United States Patent Application Publication US 2020/0163878 A1 - sequence listing, part 30

SEQ ID NO: 109694 - RNA, 1701 nt, Artificial Sequence
  derived and/or modified CDS sequence (opt2) from hemagglutinin__InfluenzaA__ALN39713
augaagaccaucaucgcccucuccuacauccucugccucgucuucgcccagaagauccccggcaacgacaacuccaccgccacccucugccucggccaccacgccguccccaacggcaccaucgucaagaccaucaccaacgaccgcaucgaggucaccaacgccaccgagcucguccagaacuccuccaucggcgagaucugcgacuccccccaccagauccucgacggcgagaacugcacccucaucgacgcccuccucggcgacccccagugcgacggcuuccagaacaagaagugggaccucuucgucgagcgcuccaaggccuacuccaacugcuaccccuacgacguccccgacuacgccucccuccgcucccucgucgccuccuccggcacccucgaguucaacaacgaguccuucaacuggaccggcgucacccagaacggcaccuccuccgccugcauccgcggcuccuccuccuccuucuucucccgccucaacuggcucacccaccucaacuacaccuaccccgcccucaacgucaccaugcccaacaacgagcaguucgacaagcucuacaucuggggcguccaccaccccggcaccgacaaggaccagaucuuccucuacgcccaguccuccggccgcaucaccgucuccaccaagcgcucccagcaggccgucauccccaacaucggcucccgcccccgcauccgcgacauccccucccgcaucuccaucuacuggaccaucgucaagcccggcgacauccuccucaucaacuccaccggcaaccucaucgccccccgcggcuacuucaagauccgcuccggcaaguccuccaucaugcgcuccgacgcccccaucggcaagugcaaguccgagugcaucacccccaacggcuccauccccaacgacaagcccuuccagaacgucaaccgcaucaccuacggcgccugcccccgcuacgucaagcacuccacccucaagcucgccaccggcaugcgcaacguccccgagaagcagacccgcggcaucuucggcgccaucgccggcuucaucgagaacggcugggagggcauggucgacggcugguacggcuuccgccaccagaacuccgagggccgcggccaggccgccgaccucaaguccacccaggccgccaucgaccagaucaacggcaagcucaaccgccucaucggcaagaccaacgagaaguuccaccagaucgagaaggaguucuccgaggucgagggccgcauccaggaccucgagaaguacgucgaggacaccaagaucgaccucugguccuacaacgccgagcuccucgucgcccucgagaaccagcacaccaucgaccucaccgacuccgagaugaacaagcucuucgagaagaccaagaagcagcuccgcgagaacgccgaggacaugggcaacggcugcuucaagaucuaccacaagugcgacaacgccugcaucggcuccauccgcaacggcaccuacgaccacaacgucuaccgcgacgaggcccucaacaaccgcuuccagaucaagggcgucgagcucaaguccggcuacaaggacuggauccucuggaucuccuucgccaucuccugcuuccuccucugcgucgcccuccucggcuucaucaugugggccugccagaagggcaacauccgcugcaacaucugcaucuga

SEQ ID NO: 109695 - RNA, 1701 nt, Artificial Sequence
  derived and/or modified CDS sequence (opt2) from hemagglutinin__InfluenzaA__ALN39714
augaagaccaucaucgcccucuccuacauccucugccucgucuucgcccagaagauccccggcaacgacaacuccaccgccacccucugccucggccaccacgccguccccaacggcaccaucgucaagaccaucaccaacgaccgcaucgaggucaccaacgccaccgagcucguccagaacuccuccaucggcgagaucugcgacuccccccaccagauccucgacggcgagaacugcacccucaucgacgcccuccucggcgacccccagugcgacggcuuccagaacaagaagugggaccucuucgucgagcgcuccaaggccuacuccaacugcuaccccuacgacguccccgacuacgccucccuccgcucccucgucgccuccuccggcacccucgaguucaacaacgaguccuucaacugggccggcgucacccagaacggcaccuccuccuccugcauccgcggcuccaacuccuccuucuucucccgccucaacuggcucacccaccucaacuccaaguaccccgcccucaacgucaccaugcccaacaacgagcaguucgacaagcucuacaucuggggcguccaccaccccggcaccgacaaggaccagaccuuccucuacgcccagcccuccggccgcaucaccgucuccaccaagcgcucccagcaggccgucauccccaacaucggcucccgcccccgcauccgcgacauccccucccgcaucuccaucuacuggaccaucgucaagcccggcgacauccuccucaucaacuccaccggcaaccucaucgccccccgcggcuacuucaagauccgcuccggcaaguccuccaucaugcgcuccgacgcccccaucggcaagugcaaguccgagugcaucacccccaacggcuccauccccaacgacaagcccuuccagaacgucaaccgcaucaccuacggcgccugcccccgcuacgucaagcaguccacccucaagcucgccaccggcaugcgcaacguccccgagcgccagacccgcggcaucuucggcgccaucgccggcuucaucgagaacggcugggagggcauggucgacggcugguacggcuuccgccaccagaacuccgagggccgcggccaggccgccgaccucaaguccacccaggccgccaucgaccagaucaacggcaagcucaaccgccucaucggcaagaccaacgagaaguuccaccagaucgagaaggaguucuccgaggucgagggccgcauccaggaccucgagaaguacgucgaggacaccaagaucgaccucugguccuacaacgccgagcuccucgucgcccucgagaaccagcacaccaucgaccucaccgacuccgagaugaacaagcucuucgagaagaccaagaagcagcuccgcgagaacgccgaggacaugggcaacggcugcuucaagaucuaccacaagugcgacaacgccugcaucggcuccauccgcaacggcaccuacgaccacgacgucuaccgcgacgaggcccucaacaaccgcuuccagaucaagggcgucgagcucaaguccggcuacaaggacuggauccucuggaucuccuucgccaucuccugcuuccuccucugcgucgcccuccucggcuucaucaugugggccugccagaagggcaacauccgcugcaacaucugcaucuga

SEQ ID NO: 109696 - RNA, 1701 nt, Artificial Sequence; identical to SEQ ID NO: 109135
  derived and/or modified CDS sequence (opt2) from hemagglutinin__InfluenzaA__ALN39715

SEQ ID NO: 109697 - RNA, 1701 nt, Artificial Sequence; identical to SEQ ID NO: 108477
  derived and/or modified CDS sequence (opt2) from hemagglutinin__InfluenzaA__ALN39716

SEQ ID NO: 109698 - RNA, 1701 nt, Artificial Sequence; identical to SEQ ID NO: 108477
  derived and/or modified CDS sequence (opt2) from hemagglutinin__InfluenzaA__ALN39717

SEQ ID NO: 109699 - RNA, 1701 nt, Artificial Sequence; identical to SEQ ID NO: 109515
  derived and/or modified CDS sequence (opt2) from hemagglutinin__InfluenzaA__ALN39718

SEQ ID NO: 109700 - RNA, 1701 nt, Artificial Sequence; identical to SEQ ID NO: 108477
  derived and/or modified CDS sequence (opt2) from hemagglutinin__InfluenzaA__ALN39734

SEQ ID NO: 109701 - RNA, 1701 nt, Artificial Sequence
  derived and/or modified CDS sequence (opt2) from hemagglutinin__InfluenzaA__ALN39735
augaagaccaucaucgcccucuccuacauccucugccucgucuucgcccagaagauccccggcaacgacaacuccaccgccacccucugccucggccaccacgccguccccaacggcaccaucgucaagaccaucaccgacgaccgcaucgaggucaccaacgccaccgagcucguccagaacuccuccaucggcgagaucugcgacuccccccaccagauccucgacggcgagaacugcacccucaucgacgcccuccucggcgacccccagugcgacggcuuccagaacaagaagugggaccucuucgucgagcgcuccaaggccuacuccaacugcuaccccuacgacguccccgacuacgccucccuccgcucccucgucgccuccuccggcacccucgaguucaacaacgaguccuucaacuggaccggcgucacccagaacggcaccuccuccgccugcauccgccgcuccuccuccuccuucuucucccgccucaacuggcucacccaccucaacuacaccuaccccgcccucaacgucaccaugcccaacaacgagcaguucgacaagcucuacaucuggggcguccaccaccccggcaccgacaaggaccagaucuuccucuacgcccaguccuccggccgcaucaccgucuccaccaagcgcucccagcaggccgucauccccaacaucggcucccgcccccgcauccgcgacauccccucccgcaucuccaucuacuggaccaucgucaagcccggcgacauccuccucaucaacuccaccggcaaccucaucgccccccgcggcuacuucaagauccgcuccggcaaguccuccaucaugcgcuccgacgcccccaucggcaagugcaaguccgagugcaucacccccaacggcuccauccccaacgacaagcccuuccagaacgucaaccgcaucaccuacggcgccugcccccgcuacgucaagcacuccacccucaagcucgccaccggcaugcgcaacguccccgagaagcagacccgcggcaucuucggcgccaucgccggcuucaucgagaacggcugggagggcauggucgacggcugguacggcuuccgccaccagaacuccgagggccgcggccaggccgccgaccucaaguccacccaggccgccaucgaccagaucaacggcaagcucaaccgccucaucggcaagaccaacgagaaguuccaccagaucgagaaggaguucuccgaggucgagggccgcauccaggaccucgagaaguacgucgaggacaccaagaucgaccucugguccuacaacgccgagcuccucgucgcccucgagaaccagcacaccaucgaccucaccgacuccgagaugaacaagcucuucgagaagaccaagaagcagcuccgcgagaacgccgaggacaugggcaacggcugcuucaagaucuaccacaagugcgacaacgccugcaucggcuccauccgcaacggcaccuacgaccacaacgucuaccgcgacgaggcccucaacaaccgcuuccagaucaagggcgucgagcucaaguccggcuacaaggacuggauccucuggaucuccuucgccaucuccugcuuccuccucugcgucgcccuccucggcuucaucaugugggccugccagaagggcaacauccgcugcaacaucugcaucuga

SEQ ID NO: 109702 - RNA, 1701 nt, Artificial Sequence
  derived and/or modified CDS sequence (opt2) from hemagglutinin__InfluenzaA__ALN39736
augaagaccaucaucgcccucuccuacauccucugccucgucuucgcccagaagauccccggcaacgacaacuccaccgccacccucugccucggccaccacgccguccccaacggcaccaucgucaagaccaucaccaacgaccgcaucgaggucaccaacgccaccgagcucguccagaacuccuccaucggcgagaucugcgacuccccccaccagauccucgacggcgagaacugcacccucaucgacgcccuccucggcgacccccagugcgacggcuuccagaacaagaagugggaccucuucgucgagcgcuccaaggccuacuccaacugcuaccccuacgacguccccgacuacgccucccuccgcucccucgucgccuccuccggcacccucgaguucaacaacgaguccuucaacuggaccggcgucacccagaacggcaccuccuccgccugcauccgccgcuccuccuccuccuucuucucccgccucaacuggcucacccaccucaacuacaccuaccccgcccucaacgucaccaugcccaacaacgagcaguucgacaagcucuacaucuggggcguccaccaccccggcaccgacaaggaccagaucuuccucuacgcccagcccuccggccgcaucaccgucuccaccaagcgcucccagcaggccgucauccccaacaucggcucccgcccccgcauccgcgacauccccucccgcaucuccaucuacuggaccaucgucaagcccggcgacauccuccucaucaacuccaccggcaaccucaucgccccccgcggcuacuucaagauccgcggcggcaaguccuccaucaugcgcuccgacgcccccaucggcaagugcaaguccgagugcaucacccccaacggcuccauccccaacgacaagcccuuccagaacgucaaccgcaucaccuacggcgccugcccccgcuacgucaagcacuccacccucaagcucgccaccggcaugcgcaacguccccgagaagcagacccgcggcaucuucggcgccaucgccggcuucaucgagaacggcugggagggcauggucgacggcugguacggcuuccgccaccagaacuccgagggccgcggccaggccgccgaccucaaguccacccaggccgccaucgaccagaucaacggcaagcucaaccgccucaucggcaagaccaacgagaaguuccaccagaucgagaaggaguucuccgaggucgagggccgcauccagaaccucgagaaguacgucgaggacaccaagaucgaccucugguccuacaacgccgagcuccucgucgcccucgagaaccagcacaccaucgaccucaccgacuccgagaugaacaagcucuucgagaagaccaagaagcagcuccgcgagaacgccgaggacaugggcaacggcugcuucaagaucuaccacaagugcgacaacgccugcaucggcuccauccgcaacggcaccuacgaccacaacgucuaccgcgacgaggcccucaacaaccgcuuccagaucaagggcgucgagcucaaguccggcuacaaggacuggauccucuggaucuccuucgccaucuccugcuuccuccucugcgucgcccuccucggcuucaucaugugggccugccagaagggcaacauccgcugcaacaucugcaucuga

SEQ ID NO: 109703 - RNA, 1701 nt, Artificial Sequence; identical to SEQ ID NO: 109083
  derived and/or modified CDS sequence (opt2) from hemagglutinin__InfluenzaA__ALN39737

SEQ ID NO: 109704 - RNA, 1701 nt, Artificial Sequence
  derived and/or modified CDS sequence (opt2) from hemagglutinin__InfluenzaA__ALN39738
augaagaccaucaucgcccucuccuacauccucugccucgucuucgcccagaagauccccggcaacgacaacuccaccgccacccucugccucggccaccacgccguccccaacggcaccaucgucaagaccaucaccaacgaccgcaucgaggucaccaacgccaccgagcucguccagaacuccuccaucggcgagaucugcgacuccccccaccagauccucgacggcgagaacugcacccucaucgacgcccuccucggcgacccccucugcgacggcuuccagaacaagaagugggaccucuucgucgagcgcuccaaggccuacuccaacugcuaccccuacgacguccccgacuacgccucccuccgcucccucgucgccuccuccggcacccucgaguucaacaacgaguccuucaacuggaccggcgucacccagaacggcaccuccuccgccugcauccgccgcuccuccuccuccuucuucucccgccucaacuggcucacccaccucaacuacaccuaccccgcccucaacgucaccaugcccaacaacgagcaguucgacaagcucuacaucuggggcguccaccaccccggcaccgacaaggaccagaucuuccucuacgcccaguccuccggccgcaucaccgucuccaccaagcgcucccagcaggccgucauccccaacaucggcucccgcccccgcauccgcgacauccccucccgcaucuccaucuacuggaccaucgucaagcccggcgacauccuccucaucaacuccaccggcaaccucaucgccccccgcggcuacuucaagauccgcuccggcaaguccuccaucaugcgcuccgacgcccccaucggcaagugcaaguccgagugcaucacccccaacggcuccauccccaacgacaagcccuuccagaacgucaaccgcaucaccuacggcgccugcccccgcuacgucaagcacuccacccucaagcucgccaccggcaugcgcaacguccccgagaagcagacccgcggcaucuucggcgccaucgccggcuucaucgagaacggcugggagggcauggucgacggcugguacggcuuccgccaccagaacuccgagggccgcggccaggccgccgaccucaaguccacccaggccgccaucgaccagaucaacggcaagcucaaccgccucaucggcaagaccaacgagaaguuccaccagaucgagaaggaguucuccgaggucgagggccgcauccaggaccucgagaaguacgucgaggacaccaagaucgaccucugguccuacaacgccgagcuccucgucgcccucgagaaccagcacaccaucgaccucaccgacuccgagaugaacaagcucuucgagaagaccaagaagcagcuccgcgagaacgccgaggacaugggcaacggcugcuucaagaucuaccacaagugcgacaacgccugcaucggcuccauccgcaacggcaccuacgaccacaacgucuaccgcgacgaggcccucaacaaccgcuuccagaucaagggcgucgagcucaaguccggcuacaaggacuggauccucuggaucuccuucgccaucuccugcuuccuccucugcgucgcccuccucggcuucaucaugugggccugccagaagggcaacauccgcugcaacaucugcaucuga

SEQ ID NO: 109705 - RNA, 1701 nt, Artificial Sequence
  derived and/or modified CDS sequence (opt2) from hemagglutinin__InfluenzaA__ALN39739
augaagaccaucaucgcccucggcuacauccucugccucgucuucgcccagaagauccccggcaacgacaacuccaccgccacccucugccucggccaccacgccguccccaacggcaccaucgucaagaccaucaccaacgaccgcaucgaggucaccaacgccaccgagcucguccagaacuccuccaucggcgagaucugcgacuccccccacaagauccucgacggcgagaacugcacccucaucgacgcccuccucggcgacccccagugcgacggcuuccagaacaagaagugggaccucuucgucgagcgcuccaaggccuacuccaacugcuaccccuacgacguccccgacuacgccucccuccgcucccucgucgccuccuccggcacccucgaguucaacaacgaguccuucaacuggaccggcgucacccagaacggcaccuccuccgccugcauccgccgcuccuccuccuccuucuucucccgccucaacuggcucacccaccucgacuacaccuaccccgcccucaacgucaccaugcccaacaacgagcaguucgacaagcucuacaucuggggcguccaccaccccggcaccgacaaggaccagaucuuccucuacgcccaguccuccggccgcaucaccgucuccaccaagcgcucccagcaggccgucauccccaacaucggcucccgcccccgcauccgcgacauccccucccgcaucuccaucuacuggaccaucgucaagcccggcgacauccuccucaucaacuccaccggcaaccucaucgccccccgcggcuacuucaagauccgcuccggcaaguccuccaucaugcgcuccgacgcccccaucggcaagugcaaguccgagugcaucacccccaacggcuccauccccaacgacaagcccuuccagaacgucaaccgcaucaccuacggcgccugcccccgcuacgucaagcacuccacccucaagcucgccaccggcaugcgcaacguccccgagaagcagacccgcggcaucuucggcgccaucgccggcuucaucgagaacggcugggagggcauggucgacggcugguacggcuuccgccaccagaacuccgagggccgcggccaggccgccgaccucaaguccacccaggccgccaucgaccagaucaacggcaagcucaaccgccucaucggcaagaccaacgagaaguuccaccagaucgagaaggaguucuccgaggucgagggccgcauccaggaccucgagaaguacgucgaggacaccaagaucgaccucugguccuacaacgccgagcuccucgucgcccucgagaaccagcacaccaucgaccucaccgacuccgagaugaacaagcucuucgagaagaccaagaagcagcuccgcgagaacgccgaggacaugggcaacggcugcuucaagaucuaccacaagugcgacaacgccugcaucggcuccauccgcaacggcaccuacgaccacaacgucuaccgcgacgaggcccucaacaaccgcuuccagaucaagggcgucgagcucaaguccggcuacaaggacuggauccucuggaucuccuucgccaucuccugcuuccuccucugcgucgcccuccucggcuucaucaugugggccugccagaagggcaacauccgcugcaacaucugcaucuga

SEQ ID NO: 109706 - RNA, 1701 nt, Artificial Sequence
  derived and/or modified CDS sequence (opt2) from hemagglutinin__InfluenzaA__ALN39740
augaagaccaucaucgcccucuccuacauccucugccucgucuucgcccagaagauccccggcaacgacaacuccaccgccacccucugccucggccaccacgccguccccaacggcaccaucgucaagaccaucaccaacgaccgcaucgaggucaccaacgccaccgagcucguccagaacuccuccaucggcgagaucugcgacuccccccaccagauccucgacggcgagaacugcacccucaucgacgcccuccucggcgacccccagugcgacggcuuccagaacaagaagugggaccucuucgucgagcgcuccaaggccuacuccaacugcuaccccuacgacguccccgacuacgccucccuccgcucccucgucgccuccuccggcacccucgaguucaacaacgaguccuucaacuggaccggcgucacccagaacggcaccuccuccgccugcauccgcaaguccuccuccuccuucuucucccgccucaacuggcucacccaccucaacuacaccuaccccgcccucaacgucaccguccccaacaacgagcaguucgacaagcucuacaucuggggcguccaccaccccggcaccgacaaggaccagaucuuccucuacgcccgcuccuccggccgcaucaccgucuccaccaagcgcucccagcaggccgucauccccaacaucggcuaccgcccccgcauccgcgacauccccucccgcaucuccaucuacuggaccaucgucaagcccggcgacauccuccucaucaacuccaccggcaaccucaucgccccccgcggcuacuucaagauccgcuccggcaaguccuccaucaugcgcuccgacgcccccaucggcaagugcaaguccgagugcaucacccccaacggcuccauccccaacgacaagcccuuccagaacgucaaccgcaucaccuacggcgccugcccccgcuacgucaagcacuccacccucaagcucgccaccggcaugcgcaacguccccgagaagcagacccgcggcaucuucggcgccaucgccggcuucaucgagaacggcugggagggcauggucgacggcugguacggcuuccgccaccagaacuccgagggccgcggccaggccgccgaccucaaguccacccaggccgccaucgaccagaucaacggcaagcucaaccgccucaucggcaagaccaacgagaaguuccaccagaucgagaaggaguucuccgaggucgagggccgcauccaggaccucgagaaguacgucgaggacaccaagaucgaccucugguccuacaacgccgagcuccucgucgcccucgagaaccagcacaccaucgaccucaccgacuccgagaugaacaagcucuucgagaagaccaagaagcagcuccgcgagaacgccgaggacaugggcaacggcugcuucaagaucuaccacaagugcgacaacgccugcaucggcuccauccgcaacggcaccuacgaccacaacgucuaccgcgacgaggcccucaacaaccgcuuccagaucaagggcgucgagcucaaguccggcuacaaggacuggauccucuggaucuccuucgccaucuccugcuuccuccucugcgucgcccuccucggcuucaucaugugggccugccagaagggcaacauccgcugcaacaucugcaucuga

SEQ ID NO: 109707 - RNA, 1701 nt, Artificial Sequence; identical to SEQ ID NO: 108477
  derived and/or modified CDS sequence (opt2) from hemagglutinin__InfluenzaA__ALN39741

SEQ ID NO: 109708 - RNA, 1701 nt, Artificial Sequence
  derived and/or modified CDS sequence (opt2) from hemagglutinin__InfluenzaA__ALN39742
augaagaccaucaucgcccucuccuacauccucugccucgucuucgcccagaagauccccggcaacgacaacuccaccgccacccucugccucggccaccacgccguccccaacggcaccaucgucaagaccaucaccaacgaccgcaucgaggucaccaacgccaccgagcucguccagaacuccuccaucggcgagaucugcgacuccccccaccagauccucgacggcgagaacugcacccucaucgacgcccuccucggcgacccccagugcgacggcuuccagaacaagaagugggaccucuucgucgagcgcuccaaggccuacuccaacugcuaccccuacgacguccccgacuacgccucccuccgcucccucgucgccuccuccggcacccucgaguucaacaacgaguccuucaacuggaccggcgucacccagaacggcaccuccuccgccugcauccgccgcuccuccuccuccuucuucucccgccucaacuggcucacccaccucaacuacaccuaccccgcccucaacgucaccaugcccaacaacgagcaguucgacaagcucuacaucuggggcguccaccaccccggcaccgacaaggaccagaucuuccucuacgcccaguccuccggccgcaucaccgucuccaccaagcgcucccagcaggccgucauccccaacaucggcucccgcccccgcauccgcgacauccccucccgcaucuccaucuacuggaccaucgucaagcccggcgacauccuccucaucaacuccaccggcaaccucaucgccccccgcggcuacuucaagauccgcuccggcaaguccuccaucaugcgcuccgacgcccccaucggcaagugcaaguccgagugcaucacccccaacggcuccauccccaacgacaagcccuuccagaacgucaaccgcaucaccuacggcgacugcccccgcuacgucaagcacuccacccucaagcucgccaccggcaugcgcaacguccccgagaagcagacccgcggcaucuucggcgccaucgccggcuucaucgagaacggcugggagggcauggucgacggcugguacggcuuccgccaccagaacuccgagggccgcggccaggccgccgaccucaaguccacccaggccgccaucgaccagaucaacggcaagcucaaccgccucaucggcaagaccaacgagaaguuccaccagaucgagaaggaguucuccgaggucgagggccgcauccaggaccucgagaaguacgucgaggacaccaagaucgaccucugguccuacaacgccgagcuccucgucgcccucgagaaccagcacaccaucgaccucaccgacuccgagaugaacaagcucuucgagaagaccaagaagcagcuccgcgagaacgccgaggacaugggcaacggcugcuucaagaucuaccacaagugcgacaacgccugcaucggcuccauccgcaacggcaccuacgaccacaacgucuaccgcgacgaggcccucaacaaccgcuuccagaucaagggcgucgagcucaaguccggcuacaaggacuggauccucuggaucuccuucgccaucuccugcuuccuccucugcgucgcccuccucggcuucaucaugugggccugccagaagggcaacauccgcugcaacaucugcaucuga

SEQ ID NO: 109709 - RNA, 1701 nt, Artificial Sequence
  derived and/or modified CDS sequence (opt2) from hemagglutinin__InfluenzaA__ALN39743
augaagaccaucaucgcccucuccuacauccucugccucgucuucgcccagaagauccccggcaacgacaacuccaccgccacccucugccucggccaccacgccguccccaacggcaccaucgucaagaccaucaccaacgaccgcaucgaggucaccaacgccaccgagcucguccagaacuccuccaucggcgagaucugcgacuccccccaccagauccucgacggcgagaacugcacccucaucgacgcccuccucggcgacccccagugcgacggcuuccagaacaagaagugggaccucuucgucgagcgcuccaaggccuacuccaacugcuaccccuacgacguccccgacuacgccucccuccgcucccucgucgccuccuccggcacccucgaguucaacaacgaguccuucaacuggaccggcgucacccagaacggcaccuccuccgccugcauccgcaaguccuccuccuccuucuucucccgccucaacuggcucacccaccucaacuacaucuaccccgcccucaacgucaccaugcccaacaacgagcaguucgacaagcucuacaucuggggcguccaccaccccggcaccgacaaggaccagaucuuccucuacgcccaguccuccggccgcaucaccgucuccaccaagcgcucccagcaggccgucauccccaacaucggcucccgcccccgcauccgcgacauccccucccgcaucuccaucuacuggaccaucgucaagcccggcgacauccuccucaucaacuccaccggcaaccucaucgccccccgcggcuacuucaagauccgcuccggcaaguccuccaucaugcgcuccgacgcccccaucggcaagugcaaguccgagugcaucacccccaacggcuccauccccaacgacaagcccuuccagaacgucaaccgcaucaccuacggcgccugcccccgcuacgucaagcacuccacccucaagcucgccaccggcaugcgcaacguccccgagaagcagacccgcggcaucuucggcgccaucgccggcuucaucgagaacggcugggagggcauggucgacggcugguacggcuuccgccaccagaacuccgagggccgcggccaggccgccgaccucaaguccacccaggccgccaucgaccagaucaacggcaagcucaaccgccucaucggcaagaccaacgagaaguuccaccagaucgagaaggaguucuccgaggucgagggccgcauccaggaccucgagaaguacgucgaggacaccaagaucgaccucugguccuacaacgccgagcuccucgucgcccucgagaaccagcacaccaucgaccucaccgacuccgagaugaacaagcucuucgagaagaccaagaagcagcuccgcgagaacgccgaggacaugggcaacggcugcuucaagaucuaccacaagugcgacaacgccugcaucggcuccauccgcaacggcaccuacgaccacaacgucuaccgcgacgaggcccucaacaaccgcuuccagaucaagggcgucgagcucaaguccggcuacaaggacuggauccucuggaucuccuucgccaucuccugcuuccuccucugcgucgcccuccucggcuucaucaugugggccugccagaagggcaacauccgcugcaacaucugcaucuga

SEQ ID NO: 109710 - RNA, 1701 nt, Artificial Sequence
  derived and/or modified CDS sequence (opt2) from hemagglutinin__InfluenzaA__ALN39744
augaagaccaucaucgcccucuccuacauccucugccucgucuucgcccagaagauccccggcaacgacaacuccaccgccacccucugccucggccaccacgccguccccaacggcaccaucgucaagaccaucaccaacgaccgcaucgaggucaccaacgccaccgagcucguccagaacuccuccaucggcgagaucugcgacuccccccaccagauccucgacggcgagaacugcacccucaucgacgcccuccucggcgacccccagugcgacggcuuccagaacaagaagugggaccucuucgucgagcgcuccaaggccuacuccaacugcuaccccuacgacguccccgacuacgccucccuccgcucccucgucgccuccuccggcacccucgaguucaacaacgaguccuucaacuggaccggcgucacccagaacggcaccuccuccgccugcauccgcaaguccuccuccuccuucuucucccgccucaacuggcucacccaccucaacuacaccuaccccgcccucaacgucaccaugcccaacaacgagcaguucgacaagcucuacaucuggggcguccaccaccccggcaccgacaaggaccagaucuuccucuacgcccaguccuccggccgcaucaccgucuccaccaagcgcucccagcaggccgucauccccaacaucggcucccgcccccgcauccgcgacauccccucccgcaucuccaucuacuggaccaucgucaagcccggcgacauccuccucaucaacuccaccggcaaccucaucgccccccgcggcuacuucaagauccgcuccggcaaguccuccaucaugcgcuccgacgcccccaucggcaagugcaaguccgagugcaucacccccaacggcuccauccccaacgacaagcccuuccagaacgucaaccgcaucaccuacggcgccugcccccgcuacgucaagcacuccacccucaagcucgccaccggcaugcgcaacguccccgagaagcagacccgcggcaucuucggcgccaucgccggcuucaucgagaacggcugggagggcauggucgacggcugguacggcuuccgccaccagaacuccgagggccgcggccaggccgccgaccucaaguccacccaggccgccaucgaccagaucaacggcaagcucaaccgccucaucggcaagaccaacgagaaguuccaccagaucgagaaggaguucuccgaggucgagggccgcauccaggaccucgagaaguacgucgaggacaccaagaucgaccucugguccuacaacgccgagcuccucgucgcccucgagaaccagcacaccaucgaccucaccgacuccgagaugaacaagcucuucgagaagaccaagaagcagcuccgcgagaacgccgaggacaugggcaacggcugcuucaagaucuaccacaagugcgacaacgccugcaucggcuccauccgcaacggcaccuacgaccacaacgucuaccgcgacgaggcccucaacaaccgcuuccagaucaagggcgucgagcucaaguccggcuacaaggacuggauccucuggaucuccuucgccaucuccugcuuccuccucugcgucgcccuccucggcuucaucaugugggccugccagaagggcaacauccgcugcaacaucugcaucuga

SEQ ID NO: 109711 - RNA, 1701 nt, Artificial Sequence
  derived and/or modified CDS sequence (opt2) from hemagglutinin__InfluenzaA__ALN39745
augaagaccaucaucgcccucuccuacauccucugccucgucuucgcccagaagauccccggcaacgacaacuccaccgccacccucugccucggccaccacgccguccccaacggcaccaucgucaagaccaucaccaacgaccgcaucgaggucaccaacgccaccgagcucguccagaacuccuccaucggcgagaucugcgacuccccccaccagauccucgacggcgagaacugcacccucaucgacgcccuccucggcgacccccagugcgacggcuuccagaacaagaagugggaccucuucgucgagcgcuccaaggccuacuccaacugcuaccccuacgacguccccgacuacgccucccuccgcucccucgucgccuccuccggcacccucgaguucaacaacgaguccuucaacuggaccggcgucacccagaacggcaccuccuccgccugcauccgcaaguccuccuccuccuucuucucccgccucaacuggcucacccaccucaacuacaaguaccccgcccucaacgucaccaugcccaacaacgagcaguucgacaagcucuacaucuggggcguccaccaccccggcaccgacaaggaccagaucuuccucuacgcccaguccuccggccgcaucaccgucuccaccaagcgcucccagcaggccgucauccccaacaucggcucccgcccccgcauccgcgacauccccucccgcaucuccaucuacuggaccaucgucaagcccggcgacauccuccucaucaacuccaccggcaaccucaucgccccccgcggcuacuucaagauccgcuccggcaaguccuccaucaugcgcuccgacgcccccaucggcaagugcaaguccgagugcaucacccccaacggcuccauccccaacgacaagcccuuccagaacgucaaccgcaucaccuacggcgccugcccccgcuacgucaagcacuccacccucaagcucgccaccggcaugcgcaacguccccgagaagcagacccgcggcaucuucggcgccaucgccggcuucaucgagaacggcugggagggcauggucgacggcugguacggcuuccgccaccagaacuccgagggccgcggccaggccgccgaccucaaguccacccaggccgccaucgaccagaucaacggcaagcucaaccgccucaucggcaagaccaacgagaaguuccaccagaucgagaaggaguucuccgaggucgagggccgcauccaggaccucgagaaguacgucgaggacaccaagaucgaccucugguccuacaacgccgagcuccucgucgcccucgagaaccagcacaccaucgaccucaccgacuccgagaugaacaagcucuucgagaagaccaagaagcagcuccgcgagaacgccgaggacaugggcaacggcugcuucaagaucuaccacaagugcgacaacgccugcaucggcuccauccgcaacggcaccuacgaccacaacgucuaccgcgacgaggcccucaacaaccgcuuccagaucaagggcgucgagcucaaguccggcuacaaggacuggauccucuggaucuccuucgccaucuccugcuuccuccucugcgucgcccuccucggcuucaucaugugggccugccagaagggcaacauccgcugcaacaucugcaucuga

SEQ ID NO: 109712 - RNA, 1701 nt, Artificial Sequence; identical to SEQ ID NO: 109710
  derived and/or modified CDS sequence (opt2) from hemagglutinin__InfluenzaA__ALN39746

SEQ ID NO: 109713 - RNA, 1701 nt, Artificial Sequence; identical to SEQ ID NO: 109405
  derived and/or modified CDS sequence (opt2) from hemagglutinin__InfluenzaA__ALN39747

SEQ ID NO: 109714 - RNA, 1701 nt, Artificial Sequence
  derived and/or modified CDS sequence (opt2) from hemagglutinin__InfluenzaA__ALN39748
augaagaccaucaucgcccucuccuacauccucugccucgucuucgcccagaagauccccggcaacgacaacuccaccgccacccucugccucggccaccacgccguccccaacggcaccaucgucaagaccaucaccaacgaccgcaucgaggucaccaacgccaccgagcucguccagaacuccuccaucggcgagaucugcgacuccccccaccagauccucgacggcgagaacugcacccucaucgacgcccuccucggcgacccccagugcgacggcuuccagaacaagaagugggaccucuucgucgagcgcuccaaggccuacuccaacugcuaccccuacgacguccccgacuacgccucccuccgcucccucgucgccuccuccggcacccucgaguucaacaacgaguccuucaacuggaccggcgucacccagaacggcaccuccuccgccugcauccgccgcuccuccuccuccuucuucucccgccucaacuggcucacccaccucaacuacgccuaccccgcccucaacgucaccaugcccaacaacgagcaguucgacaagcucuacaucuggggcguccaccaccccggcaccgacaaggaccagaucuuccucuacgcccaguccuccggccgcaucaccgucuccaccaagcgcucccagcaggccgucauccccaacaucggcucccgcccccgcauccgcgacauccccucccgcaucuccaucuacuggaccaucgucaagcccggcgacauccuccucaucaacuccaccggcaaccucaucgccccccgcggcuacuucaagauccucuccggcaaguccuccaucaugcgcuccgacgcccccaucggcaagugcaaguccgagugcaucacccccaacggcuccauccccaacgacaagcccuuccagaacgucaaccgcaucaccuacggcgccugcccccgcuacgucaagcacuccacccucaagcucgccaccggcaugcgcaacguccccgagaagcagacccgcggcaucuucggcgccaucgccggcuucaucgagaacggcugggagggcauggucgacggcugguacggcuuccgccaccagaacuccgagggccgcggccaggccgccgaccucaaguccacccaggccgccaucgaccagaucaacggcaagcucaaccgccucaucggcaagaccaacgagaaguuccaccagaucgagaaggaguucuccgaggucgagggccgcauccaggaccucgagaaguacgucgaggacaccaagaucgaccucugguccuacaacgccgagcuccucgucgcccucgagaaccagcacaccaucgaccucaccgacuccgagaugaacaagcucuucgagaagaccaagaagcagcuccgcgagaacgccgaggacaugggcaacggcugcuucaagaucuaccacaagugcgacaacgccugcaucggcuccauccgcaacggcaccuacgaccacaacgucuaccgcgacgaggcccucaacaaccgcuuccagaucaagggcgucgagcucaaguccggcuacaaggacuggauccucuggaucuccuucgccaucuccugcuuccuccucugcgucgcccuccucggcuucaucaugugggccugccagaagggcaacauccgcugcaacaucugcaucuga

SEQ ID NO: 109715 - RNA, 1701 nt, Artificial Sequence
  derived and/or modified CDS sequence (opt2) from hemagglutinin__InfluenzaA__ALN39749
augaagaccaucaucgcccucuccuacauccucugccucgucuucgcccagaagcuccccggcaacgacaacuccaccgccacccucugccucggccaccacgccguccccaacggcaccaucgucaagaccaucaccaacgaccgcaucgaggucaccaacgccaccgagcucguccagaacuccuccaucggcgagaucugcaacuccccccaccagauccucgacggcgagaacugcacccucaucgacgcccuccucggcgacccccagugcgacggcuuccagaacaagaagugggaccucuucgucgagcgcuccaaggccuacuccaacugcuaccccuacgacguccccgacuacgccucccuccgcucccucgucgccuccuccggcacccucgaguucaacaacgaguccuucaacugggccggcgucacccagaacggcaccuccuccuccugcauccgcggcuccaacuccuccuucuucucccgccucaacuggcucacccaccucaacuccaaguaccccgcccucaacgucaccaugcccaacaacgagcaguucgacaagcucuacaucuggggcguccaccaccccggcaccgacaaggaccagaucuuccucuacgcccagcccuccggccgcaucaccgucuccaccaagcgcucccagcaggccgucauccccaacaucggcucccgcccccgcauccgcgacauccccucccgcaucuccaucuacuggaccaucgucaagcccggcgacauccuccucaucaacuccaccggcaaccucaucgccccccgcggcuacuucaagauccgcuccggcaaguccuccaucaugcgcuccgacgcccccaucggcaagugcaaguccgagugcaucacccccaacggcuccauccccaacgacaagcccuuccagaacgucaaccgcaucaccuacggcgccugcccccgcuacgucaagcaguccacccucaagcucgccaccggcaugcgcaacguccccgagcgccagacccgcggcaucuucggcgccaucgccggcuucaucgagaacggcugggagggcauggucgacggcugguacggcuuccgccaccagaacuccgagggccgcggccaggccgccgaccucaaguccacccaggccgccaucgaccagaucaacggcaagcucaaccgccucaucggcaagaccaacgagaaguuccaccagaucgagaaggaguucuccgaggucgagggccgcauccaggaccucgagaaguacgucgaggacaccaagaucgaccucugguccuacaacgccgagcuccucgucgcccucgagaaccagcacaccaucgaccucaccgacuccgagaugaacaagcucuucgagaagaccaagaagcagcuccgcgagaacgccgaggacaugggcaacggcugcuucaagaucuaccacaagugcgacaacgccugcaucggcuccauccgcaacggcaccuacgaccacgacgucuaccgcgacgaggcccucaacaaccgcuuccagaucaagggcgucgagcucaaguccggcuacaaggacuggauccucuggaucuccuucgccaucuccugcuuccuccucugcgucgcccuccucggcuucaucaugugggccugccagaagggcaacauccgcugcaacaucugcaucuga

SEQ ID NO: 109716 - RNA, 1701 nt, Artificial Sequence; identical to SEQ ID NO: 108477
  derived and/or modified CDS sequence (opt2) from hemagglutinin__InfluenzaA__ALN39750

SEQ ID NO: 109717 - RNA, 1701 nt, Artificial Sequence; identical to SEQ ID NO: 108477
  derived and/or modified CDS sequence (opt2) from hemagglutinin__InfluenzaA__ALN39789

SEQ ID NO: 109718 - RNA, 1701 nt, Artificial Sequence; identical to SEQ ID NO: 109007
  derived and/or modified CDS sequence (opt2) from hemagglutinin__InfluenzaA__ALO75895

SEQ ID NO: 109719 - RNA, 1701 nt, Artificial Sequence
  derived and/or modified CDS sequence (opt2) from hemagglutinin__InfluenzaA__ALO75907
auggagaagaucguccuccuccucgccaucgucucccucgucaagggcgaccagaucugcaucggcuaccacgccaacaacuccaccgagcaggucgacaccaucauggagaagaacgucaccgucacccacgcccaggacauccucgagaagacccacaacggcaagcucugcgaccucaacggcgucaagccccucauccucaaggacugcuccgucgccggcugguuccucggcaaccgcaugugcgacgaguucauccgcguccccgagugguccuacaucgucgagcgcgccaaccccgccaacgaccucugcuaccccggcaaccucaacgacuacgaggagcucaagcaccuccucucccgcaucaaccacuucgagaagacccucaucauccccaaguccuccuggcccaaccacaccuccuccggcgucuccgccgccugccccuaccagggcaugcccuccuucuuccgcaacgucgucuggcucaccaagaagaacgacgccuaccccaccaucaagauguccuacaacaacaccuaccgcgaggaccuccucauccucuggggcauccaccacuccaacaacgccgccgagcagaccaaccucuacaagaaccccaccaccuacgucuccgucggcaccuccacccucaaccagcgccucgagcccaagaucgccacccgcucccaggucaacggccagcgcggccgcauggacuucuucuggaccauccucaagcccaacgacgccauccacuucgaguccaacggcaacuucaucgcccccgaguacgccuacaagaucgucaagaagggcgacuccaccaucaugaaguccgagauggaguacggccacugcaacaccaagugccagacccccaucggcgccaucaacuccuccaugcccuuccacaacauccacccccucaccaucggcgagugccccaaguacgucaaguccaacaagcucguccucgccaccggccuccgcaacuccccccuccgcgagcgccgccgcaagcgcggccucuucggcgccaucgccggcuucaucgagggcggcuggcagggcauggucgacggcugguacggcuaccaccacuccaacgagcagggcuccggcuacgccgccgaccgcgaguccacccagaaggccaucgacggcgucaccaacaaggucaacuccaucaucgacaagaugaacacccaguucgaggccgucggccgcgaguucaacaaccucgagcgccgcaucgagaaccucaacaagaagauggaggacggcuuccucgacgucuggaccuacaacgccgagcuccucguccucauggagaacgagcgcacccucgacuuccacgacuccaacgucaagaaccucuacgacaagguccgccuccagcuccgcgacaacgccaaggagcucggcaacggcugcuucgaguucuaccacaagugcgacaacgagugcauggaguccguccgcaacggcaccuacgacuacccccucuacuccgaggaggcccgccucaagcgcgaggagaucuccggcgucaagcucgaguccaucggcaccuaccagauccucuccaacuacuccaccgucgccuccucccucgcccucgccaucaucgucgccggccucucccucuggaugugcuccaacggcucccuccagugccgcaucugcaucuga

SEQ ID NO: 109720 - RNA, 1701 nt, Artificial Sequence
  derived and/or modified CDS sequence (opt2) from hemagglutinin__InfluenzaA__ALO75919
auggagaagaucguccuccuccucgccaucgucucccucgucaagggcgaccagaucugcaucggcuaccacgccaacaacuccaccgagcaggucgacaccaucauggagaagaacgucaccgucacccacgcccaggacauccucgagaagacccacaacggcaagcucugcgaccucaacggcgucaagccccucauccucaaggacugcuccgucgccggcuggcuccacggcaaccgcaugugcgacgaguucauccgcguccccgagugguccuacaucgucgagcgcgccaaccccgccaacgaccucugcuaccccggcaaccucaacgacuacgaggagcucaagcaccuccucucccgcaucaaccacuucgagaagacccucaucauccccaaguccuccuggcccaaccacaccuccuccggcgucuccgccgccugccccuaccagggcaugcccuccuucuuccgcaacgucgucuggcucaccaagaagaacgacgccuaccccaccaucaagauguccuacaacaacaccuaccgcgaggaccuccucauccucuggggcauccaccacuccaacaacgccgccgagcagaccaaccucuacaagaaccccaccaccuacgucuccgucggcaccuccacccucaaccagcgccucgagcccaagaucgccacccgcucccaggucaacggccagcgcggccgcauggacuucuucuggaccauccucaagcccaacgacgccauccacuucgaguccaacggcaacuucaucgcccccgaguacgccuacaagaucgucaagaagggcgacuccaccaucaugaaguccgagauggaguacggccacugcaacaccaagugccagacccccaucggcgccaucaacuccuccaugcccuuccacaacauccacccccucaccaucggcgagugccccaaguacgucaaguccaacaagcucguccucgccaccggccuccgcaacuccccccuccgcgagcgccgccgcaagcgcggccucuucggcgccaucgccggcuucaucgagggcggcuggcagggcauggucgacggcugguacggcuaccaccacuccaacgagcagggcuccggcuacgccgccgaccgcgaguccacccagaaggccaucgacggcgucaccaacaaggucaacuccaucaucgacaagaugaacacccaguucgaggccgucggccgcgaguucaacaaccucgagcgccgcaucgagaaccucaacaagaagauggaggacggcuuccucgacgucuggaccuacaacgccgagcuccucguccucauggagaacgagcgcacccucgacuuccacgacuccaacgucaagaaccucuacgacaagguccgccuccagcuccgcgacaacgccaaggagcucggcaacggcugcuucgaguucuaccacaagugcgacaacgagugcauggaguccguccgcaacggcaccuacgacuacccccucuacuccgaggaggccucccucaagcgcgaggagaucuccggcgucaagcucgaguccaucggcaccuaccagauccucuccaucuacuccaccgucgccuccucccucgcccucgccaucaucgucgccggccucucccucuggaugugcuccaacggcucccuccagugccgcaucugcaucuga

SEQ ID NO: 109721 - RNA, 1683 nt, Artificial Sequence
  derived and/or modified CDS sequence (opt2) from hemagglutinin__InfluenzaA__ALT20080
auggagaccgucucccucaucaccauccuccucgucgccaccgucuccaacgccgacaagaucugcaucggcuaccaguccaccaacuccaccgagaccgucgacacccucaccgagaacaacguccccgucacccacgccaaggagcuccuccacaccgagcacaacggcaugcucugcgccaccucccucggccagccccucauccucgacaccugcaccaucgagggccucaucuacggcaaccccuccugcgaccucucccucgagggccgcgagugguccuacaucgucgagcgccccuccgccgucaacggccucugcuaccccggcaacgucgagaaccucgaggagcuccgcucccucuucuccuccgcccgcuccuaccagcgcauccagaucuuccccgacaccaucuggaacgucuccuacgacggcaccuccaccgccugcuccggcuccuucuaccgcuccaugcgcuggcucacccgcaagaacggcgacuaccccauccaggacgcccaguacaccaacaaccagggcaagaacauccucuucauguggggcaucaaccacccccccaccgacaccacccagcgcgaccucuacacccgcaccgacaccaccaccuccgucgccaccgaggagaucaaccgcaucuucaagccccucaucggcccccgcccccucgucaacggccucaugggccgcaucgacuacuacugguccguccucaagcccggccagacccuccgcaucaaguccgacggcaaccucaucgcccccugguucggccacauccucuccggcgagucccacggccgcauccucaagaccaaccucaagcgcggcuccugcaccguccagugccagaccgagaagggcggccucaacaccacccuccccuuccagaacgucuccaaguacgccuucggcaacugcuccaaguacaucggcaucaagucccucaagcucgccgucggccuccgcaacguccccucccgcuccucccgcggccucuucggcgccaucgccggcuucaucgagggcggcugguccggccucgucgccggcugguacggcuuccagcacuccaacgaccagggcgucggcauggccgccgaccgcgacuccacccagaaggccaucgacaagaucaccuccaaggucaacaacaucgucgacaagaugaacaagcaguacgagaucaucgaccacgaguucuccgaggucgagacccgccucaacaugaucaacaacaagaucgacgaccagauccaggacaucugggccuacaacgccgagcuccucguccuccucgagaaccagaagacccucgacgagcacgacgccaacgucaacaaccucuacaacaaggucaagcgcgcccucggcuccaacgccgucgaggacggcaagggcugcuucgagcucuaccacaagugcgacgaccagugcauggagaccauccgcaacggcaccuacaaccgccgcaaguaccaggaggaguccaagcucgagcgccagaagaucgagggcgucaagcucgaguccgagggcaccuacaagauccucaccaucuacuccaccgucgccuccucccucgucaucgccaugggcuucgccgccuuccucuucugggccauguccaacggcuccugccgcugcaacaucugcaucuga

SEQ ID NO: 109722 - RNA, 1701 nt, Artificial Sequence
  derived and/or modified CDS sequence (opt2) from hemagglutinin__InfluenzaA__ALT66860
augaaggccauccucgucguccuccucuacaccuucaccaccgccaacgccgacacccucugcaucggcuaccacgccaacaacuccaccgacaccgucgacaccguccucgagaagaacgucaccgucacccacuccgucaaccuccucgaggacaagcacaacggcaagcucugcaagcuccgcggcgucgccccccuccaccucggcaagugcaacaucgccggcuggauccucggcaaccccgagugcgagucccucuccaccgccuccuccugguccuacaucgucgagaccuccaacuccgacaacggcaccugcuaccccggcgacuucaucaacuacgaggagcuccgcgagcagcucuccuccgucuccuccuucgagcgcuucgagaucuuccccaagaccuccuccuggcccaaccacgacuccaacaagggcgucaccgccgccugcccccacgccggcgccaaguccuucuacaagaaccucaucuggcucgucaagaagggcaacuccuaccccaagcucaaccaguccuacaucaacgacaagggcaaggagguccucguccucuggggcauccaccaccccuccaccaccgccgaccagcagucccucuaccagaacgccgacgccuacgucuucgucggcaccucccgcuacuccaagaaguucaagcccgagaucgccacccgccccaagguccgcgaccaggagggccgcaugaacuacuacuggacccucgucgagcccggcgacaagaucaccuucgaggccaccggcaaccucgucgucccccgcuacgccuucaccauggagcgcaacgccggcuccggcaucaucaucuccgacacccccguccacgacugcaacaccaccugccagacccccgagggcgccaucaacaccucccuccccuuccagaacauccaccccaucaccaucggcaagugccccaaguacgucaaguccaccaagcuccgccucgccaccggccuccgcaacguccccuccauccagucccgcggccucuucggcgccaucgccggcuucaucgagggcggcuggaccggcauggucgacggcugguacggcuaccaccaccagaacgagcagggcuccggcuacgccgccgaccucaaguccacccagaacgccaucgacaagaucaccaacaaggucaacuccgucaucgagaagaugaacacccaguucaccgccgucggcaaggaguucaaccaccucgagaagcgcaucgagaaccucaacaagaaggucgacgacggcuuccucgacaucuggaccuacaacgccgagcuccucguccuccucgagaacgagcgcacccucgacuaccacgacuccaacgucaagaaccucuacgagaagguccgcaaccagcucaagaacaacgccaaggagaucggcaacggcugcuucgaguucuaccacaagugcgacaacaccugcauggaguccgucaagaacggcaccuacgacuaccccaaguacuccgaggaggccaagcucaaccgcgagaagaucgacggcgucaagcucgaguccacccgcaucuaccagauccucgccaucuacuccaccgucgccuccucccucguccucgucgucucccucggcgccaucuccuucuggaugugcuccaacggcucccuccagugccgcaucugcaucuga

SEQ ID NO: 109723 - RNA, 1701 nt, Artificial Sequence
  derived and/or modified CDS sequence (opt2) from hemagglutinin__InfluenzaA__AMA65391
augaaggccauccucgucguccuccucuacaccuucaccaccgccaacgccgacacccucugcaucggcuaccacgccaacaacuccaccgacaccgucgacaccguccucgagaagaacgucaccgucacccacuccgucaaccuccucgaggacaagcacaacggcaagcucugcaagcuccgcggcgucgccccccuccaccucggcaagugcaacaucgccggcuggauccucggcaaccccgagugcgagucccucuccaccgccuccuccugguccuacaucgucgagaccuccaacuccgacaacggcaccugcuaccccggcgacuucaucaacuacgaggagcuccgcgagcagcucuccuccgucuccuccuucgagcgcuucgagaucuuccccaagaccuccuccuggcccaaccacgacuccaacaagggcgucaccgccgccugcccccacgccggcgccaaguccuucuacaagaaccucaucuggcucgucaagaagggcaacuccuaccccaagcucaaccaguccuacaucaacgacaagggcaaggagguccucguccucuggggcauccaccaccccuccaccaccgccgaccagcagucccucuaccagaacgccgacgccuacgucuucgucggcaccucccgcuacuccaagaaguucaagcccgagaucgccacccgccccaagguccgcggccaggagggccgcaugaacuacuacuggacccucgucgagcccggcgacaagaucaccuucgaggccaccggcaaccucgucgucccccgcuacgccuucaccauggagcgcaacgccggcuccggcaucaucaucuccgacacccccguccacgacugcaacaccaccugccagacccccgagggcgccaucaacaccucccuccccuuccagaacauccaccccaucaccaucggcaagugccccaaguacgucaaguccaccaagcuccgccucgccaccggccuccgcaacguccccuccauccagucccgcggccucuucggcgccaucgccggcuucaucgagggcggcuggaccggcauggucgacggcugguacggcuaccaccaccagaacgagcagggcuccggcuacgccgccgaccucaaguccacccagaacgccaucgacaagaucaccaacaaggucaacuccgucaucgagaagaugaacacccaguucaccgccgucggcaaggaguucaaccaccucgagaagcgcaucgagaaccucaacaagaaggucgacgacggcuuccucgacaucuggaccuacaacgccgagcuccucguccuccucgagaacgagcgcacccucgacuaccacgacuccaacgucaagaaccucuacgagaagguccgcaaccagcucaagaacaacgccaaggagaucggcaacggcugcuucgaguucuaccacaagugcgacaacaccugcauggaguccgucaagaacggcaccuacgacuaccccaaguacuccgaggaggccaagcucaaccgcgagaagaucgacggcgucaagcucgaguccacccgcaucuaccagauccucgccaucuacuccaccgucgccuccucccucguccucgucgucuuccucggcgccaucuccuucuggaugugcuccaacggcucccuccagugccgcaucugcaucuga

SEQ ID NO: 109724 - RNA, 1701 nt, Artificial Sequence
  derived and/or modified CDS sequence (opt2) from hemagglutinin__InfluenzaA__AMA65393
augaaggccauccucgucguccuccucuacaccuucaccaccgccaacgccgacacccucugcaucggcuaccacgccaacaacuccaccgacaccgucgacaccguccucgagaagaacgucaccgucacccacuccgucaaccuccucgaggacaagcacaacggcaagcucugcaagcuccgcggcgucgccccccuccaccucggcaagugcaacaucgccggcuggauccucggcaaccccgagugcgagucccucuccaccgccuccuccugguccuacaucgucgagaccuccaacuccgacaacggcaccugcuaccccggcgacuucaucaacuacgaggagcuccgcgagcagcucuccuccgucuccuccuucgagcgcuucgagaucuuccccaagaccuccuccuggcccaaccacgacuccaacaagggcgucaccgccgccugcccccacgccggcgccaaguccuucuacaagaaccucaucuggcucgucaagaagggcaacuccuaccccaagcucaaccaguccuacaucaacgacaagggcaaggagguccucguccucuggggcauccaccaccccuccaccaccgccgaccagcagucccucuaccagaacgccgacgccuacgucuucgucggcaccucccgcuacuccaagaaguucaagcccgagaucgccacccgccccaagguccgcgaccaggagggccgcaugaacuacuacuggacccucgucgagcccggcgacaagaucaccuucgaggccaccggcaaccucgucgucccccgcuacgccuucaccauggagcgcaacgccggcuccggcaucaucaucuccgacacccccguccacgacugcaacaccaccugccagacccccgagggcgccaucaacaccucccuccccuuccagaacauccaccccaucaccaucggcaagugccccaaguacgucaaguccaccaagcuccgccucgccaccggccuccgcaacguccccuccauccagucccgcggccucuucggcgccaucgccggcuucaucgagggcggcuggaccggcauggucgacggcugguacggcuaccaccaccagaacgagcagggcuccggcuacgccgccgaccucaaguccacccagaacgccaucgacaagaucaccaacaaggucaacuccgucaucgagaagaugaacacccaguucaccgccgucggcaaggaguucaaccaccucgagaagcgcaucgagaaccucaacaagaaggucgacgacggcuuccucgacaucuggaccuacaacgccgagcuccucguccuccucgagaacgagcgcacccucgacuaccacgacuccaacgucaagaaccucuacgagaagguccgcaaccagcucaagaacaacgccaaggagaucggcaacggcugcuucgaguucuaccacaagugcgacaacaccugcauggaguccgucaagaacggcaccuacgacuaccccaaguacuccgaggaggccaagcucaaccgcgagaagaucgacggcgucaagcucgaguccacccgcaucuaccagauccucgccaucuacucccccgucgccuccucccucguccucgucgucuuccucggcgccaucuccuucuggaugugcuccaacggcucccuccagugccgcaucugcaucuga

SEQ ID NO: 109725 - RNA, 1701 nt, Artificial Sequence
  derived and/or modified CDS sequence (opt2) from hemagglutinin__InfluenzaA__BAA02768
augaaggccaagcuccucguccuccucugcgccuucaccgccaccgacgccgacaccaucugcaucggcuaccacgccaacaacuccaccgacaccgucgacaccguccucgagaagaacgucaccgucacccacuccgucaaccuccucgaggacucccacaacggcaagcucugccgccucaagggcaucgccccccuccagcucggcaacugcuccaucgccggcuggauccucggcaaccccgagugcgagucccucuucuccaaggaguccugguccuacaucgccgagacccccaacuccgagaacggcaccugcuaccccggcuacuucgccgacuacgaggagcuccgcgagcagcucuccuccgucuccuccuucgagcgcuucgagaucuuccccaaggaguccuccuggcccaaccacaccgucaccaagggcgucaccgccuccugcucccacaacggcaaguccuccuucuaccgcaaccuccucuggcucaccggcaagaacggccucuaccccaaccucuccaaguccuacgucaacaacaaggagaaggagguccucguccucuggggcguccaccaccccuccaacaucggcgaccagcgcgccaucuaccacaccgagaacgccuacgucuccgucgucuccucccacuacucccgccgcuucacccccgagaucgccaagcgccccaagguccgcggccaggagggccgcaucaacuacuacuggacccuccucgagcccggcgacaccaucaucuucgaggccaacggcaaccucaucgcccccugguacgccuucgcccucucccgcggcuucggcuccggcaucaucaccuccaacgccuccauggacgagugcgacgccaagugccagaccccccagggcgccaucaacuccucccuccccuuccagaacguccaccccgucaccaucggcgagugccccaaguacguccgcuccaccaagcuccgcauggucaccggccuccgcaacauccccuccauccagucccgcggccucuucggcgccaucgccggcuucaucgagggcggcuggaccggcaugaucgacggcugguacggcuaccaccaccagaacgagcagggcuccggcuacgccgccgaccagaaguccacccagaacgccaucaacggcaucaccaacaaggucaacuccgucaucgagaagaugaacacccaguucaccgccgucggcaaggaguucaacaagcucgagcgccgcauggaguaccucaacaagaaggucgacgacggcuuccucgacaucuggaccuacaacgccgagcuccucguccuccucgagaacgagcgcacccucgacuuccacgacuccaacgucaagaaccucuacgagaaggucaagucccagcucaagaacaacgccaaggagaucggcuacggcugcuucgaguucuaccacaagugcaacaacgagugcauggaguccgucaagaacggcaccuacgacuaccccaaguacuccgaggaguccaagcucaaccgcgagaagaucgacggcgucaagcucgaguccaugggcgucuaccagauccucgccaucuacuccaccgucgccuccucccucguccuccucgucucccucggcgccaucuccuucuggaugugcuccaacggcucccuccagugccgcaucugcaucuga

SEQ ID NO: 109726 - RNA, 1701 nt, Artificial Sequence
  derived and/or modified CDS sequence (opt2) from hemagglutinin__InfluenzaA__BAA02769
augaaggccaagcuccucguccuccucugcgccuucaccgccaccgacgccgacaccaucugcaucggcuaccacgccaacaacuccaccgacaccgucgacaccguccucgagaagaacgucaccgucacccacuccgucaaccuccucgaggacucccacaacggcaagcucugccgccucaagggcaucgccccccuccagcucggcaacugcuccaucgccggcuggauccucggcaaccccgagugcgagucccucuucuccaaggaguccugguccuacaucgccgagacccccaacuccgagaacggcaccugcuaccccggcuacuucgccgacuacgaggagcuccgcgagcagcucuccuccgucuccuccuucgagcgcuucgagaucuuccccaaggaguccuccuggcccaaccacaccgucaccaagggcgucaccgccuccugcucccacaacggcaaguccuccuucuaccgcaaccuccucuggcucaccggcaagaacggccucuaccccaaccucuccaaguccuacgucaacaacaaggagaaggagguccucguccucuggggcguccaccaccccuccaacauccgcgaccagcgcgccaucuaccacaccgagaacgccuacgucuccgucgucuccucccacuacucccgccgcuucacccccgagaucgccaagcgccccaagguccgcgaccaggagggccgcaucaacuacuacuggacccuccucgagcccggcgacaccaucaucuucgaggccaacggcaaccucaucgcccccugguacgccuucgcccucucccgcggcuucggcuccggcaucaucaccuccaacgccuccauggacgagugcgacgccaagugccagaccccccagggcgccaucaacuccucccuccccuuccagaacguccaccccgucaccaucggcgagugccccaaguacguccgcuccaccaagcuccgcauggucaagggccuccgcaacauccccuccauccagucccgcggccucuucggcgccaucgccggcuucaucgagggcggcuggaccggcaugaucgacggcugguacggcuaccaccaccagaacgagcagggcuccggcuacgccgccgaccagaaguccacccagaacgccaucaacggcaucaccaacaaggucaacuccgucaucgagaagaugaacacccaguucaccgccgucggcaaggaguucaacaagcucgagcgccgcauggaguaccucaacaagaaggucgacgacggcuuccucgacaucuggaccuacaacgccgagcuccucguccuccucgagaacgagcgcacccucgacuuccacgacuccaacgucaagaaccucuacgagaaggucaagucccagcucaagaacaacgccaaggagaucggcuacggcugcuucgaguucuaccacaagugcaacaacgagugcauggaguccgucaagaacggcaccuacgacuaccccaaguacuccgaggaguccaagcucaaccgcgagaagaucgacggcgucaagcucgaguccaugggcgucuaccagauccucgccaucuacuccaccgucgccuccucccucguccuccucgucucccucggcgccaucuccuucuggaugugcuccaacggcucccuccagugccgcaucugcaucuga

SEQ ID NO: 109727 - RNA, 1689 nt, Artificial Sequence
  derived and/or modified CDS sequence (opt2) from hemagglutinin__InfluenzaA__BAC43764
auggccaucaucuaccucauccuccucuucaccgccguccgcggcgaccagaucugcaucggcuaccacgccaacaacuccaccgagaaggucgacaccauccucgagcgcaacgucaccgucacccacgccaagaacauccucgagaagacccacaacggcaagcucugcaagcucaacggcauccccccccucgagcucggcgacugcuccaucgccggcuggcuccucggcaaccccgagugcgaccgccuccucaucguccccgagugguccuacaucauggagaaggagaacccccgcgacggccucugcuaccccggcuccuucaacgacuacgaggagcucaagcaccuccucuccuccgucaagcacuucgagaaggucaagauccuccccaaggaccgcuggacccagcacaccaccaccggcggcucccgcgccugcgccgucuccggcaaccccuccuucuuccgcaacauggucuggcucaccaagaagggcuccaacuaccccgucgccaagggcuccuacaacaacaccuccggcgagcagaugcucaucaucuggggcguccaccaccccaucgacgagaccgagcagaucacccucuaccagaacgucggcaccuacgucuccgucggcaccuccacccucaacaagcgcuccacccccgagaucgccacccgccccaaggucaacggccucggcucccgcauggaguucuccuggacccuccucgacaugugggacaccaucaacuucgaguccaccggcaaccucaucgcccccgaguacggcuucaagaucuccaagcgcggcuccuccggcaucaugaagaccgagggcacccucgagaacugcgagaccaagugccagaccccccucggcgccaucaacaccacccuccccuuccacaacguccacccccucaccaucggcgagugccccaaguacgucaaguccgagaagcucguccucgccaccggccuccgcaacgucccccagaucgagucccgcggccucuucggcgccaucgccggcuucaucgagggcggcuggcagggcauggucgacggcugguacggcuaccaccacuccaacgaccagggcuccggcuacgccgccgacaaggaguccacccagaaggccuucgacggcaucaccaacaaggucaacuccgucaucgagaagaugaacacccaguucgaggccgucggcaaggaguucuccaaccucgagcgccgccucgagaaccucaacaagaagauggaggacggcuuccucgacgucuggaccuacaacgccgagcuccucguccucauggagaacgagcgcacccucgacuuccacgacuccaacgucaagaaccucuacgacaagguccgcaugcagcuccgcgacaacgucaaggagcucggcaacggcugcuucgaguucuaccacaagugcgacgacgagugcaugaacuccgucaagaacggcaccuacgacuaccccaaguacgaggaggaguccaagcucaaccgcaacgagaucaagggcgucaagcucuccuccaugggcgucuaccagauccucgccaucuacgccaccgucgccggcucccucucccucgccaucaugauggccggcaucuccuucuggaugugcuccaacggcucccuccaguuccgcaucugcaucuga

SEQ ID NO: 109728 - RNA, 1707 nt, Artificial Sequence
  derived and/or modified CDS sequence (opt2) from hemagglutinin__InfluenzaA__BAE07201
auggagaagaucguccuccucuucgccaucgucucccucgucaaguccgaccagaucugcaucggcuaccacgccaacaacuccaccgagcaggucgacaccaucauggagaagaacgucaccgucacccacgcccaggacauccucgagaagacccacaacggcaagcucugcgaccucgacggcgucaagccccucauccuccgcgacugcuccgucgccggcuggcuccucggcaaccccaugugcgacgaguucaucaacguccccgagugguccuacaucgucgagaaggccaaccccgccaacgaccucugcuaccccggcgacuucaacgacuacgaggagcucaagcaccuccucucccgcaucaaccacuucgagaagauccagaucauccccaagaacuccugguccucccacgaggccucccucggcgucuccuccgccugccccuaccagggcaaguccuccuucuuccgcaacgucgucuggcucaucaagaagaacaacgccuaccccaccaucaagcgcuccuacaacaacaccaaccaggaggaccuccucguccucuggggcauccaccaccccaacgacgccgccgagcagacccgccucuaccagaaccccaccaccuacaucuccgucggcaccuccacccucaaccagcgccucguccccaagaucgccacccgcuccaaggucaacggccagaacggccgcauggaguucuucuggaccauccucaagcccaacgacgccaucaacuucgaguccaacggcaacuucaucgcccccgaguacgccuacaagaucgucaagaagggcgacuccgccaucaugaaguccgagcucgaguacggcaacugcaacaccaagugccagacccccaugggcgccaucaacuccuccaugcccuuccacaacauccacccccucaccaucggcgagugccccaaguacgucaaguccaaccgccucguccucgccaccggccuccgcaacuccccccagcgcgagcgccgccgcaagaagcgcggccucuucggcgccaucgccggcuucaucgagggcggcuggcagggcauggucgacggcugguacggcuaccaccacuccaacgagcagggcuccggcuacgccgccgacaaggaguccacccagaaggccaucgacggcgucaccaacaaggucaacuccaucaucgacaagaugaacacccaguucgaggccgucggccgcgaguucaacaaccucgagcgccgcaucgagaaccucaacaagaagauggaggacggcuuccucgacgucuggaccuacaacgccgagcuccucguccucauggagaacgagcgcacccucgacuuccacgacuccaacgucaagaaccucuacgacaagguccgccuccagcuccgcgacaacgccaaggagcucggcaacggcugcuucgaguucuaccacaagugcgacaacgagugcauggaguccguccgcaacggcaccuacgacuacccccaguacuccgaggaggcccgccucaagcgcgaggagaucuccggcgucaagcucgaguccaucggcaccuaccagauccucuccaucuacuccaccgucgccuccucccucgcccucgccaucauggucgccggccucucccucuggaugugcuccaacggcucccuccagugccgcaucugcaucuga

SEQ ID NO: 109729 - RNA, 1701 nt, Artificial Sequence
  derived and/or modified CDS sequence (opt2) from hemagglutinin__InfluenzaA__BAH95823
augaaggccauccucgucguccuccucuacaccuucgccaccgccaacgccgacacccucugcaucggcuaccacgccaacaacuccaccgacaccgucgacaccguccucgagaagaacgucaccgucacccacuccgucaaccuccucgaggacaagcacaacggcaagcucugcaagcuccgcggcgucgccccccuccaccucggcaagugcaacaucgccggcuggauccucggcaaccccgagugcgagucccucuccaccgccuccuccugguccuacaucgucgagaccuccuccuccgacaacggcaccugcuaccccggcgacuucaucgacuacgaggagcuccgcgagcagcucuccuccgucuccuccuucgagcgcuucgagaucuuccccaagaccuccuccuggcccaaccacgacuccaacaagggcgucaccgccgccugcccccacgccggcgccaaguccuucuacaagaaccucaucuggcucgucaagaagggcaacuccuaccccaagcucuccaaguccuacaucaacgacaagggcaaggagguccucguccucuggggcauccaccaccccuccaccuccgccgaccagcagucccucuaccagaacgccgacgccuacgucuucgucggcuccucccgcuacuccaagaaguucaagcccgagaucgccauccgccccaagguccgcgaccaggagggccgcaugaacuacuacuggacccucgucgagcccggcgacaagaucaccuucgaggccaccggcaaccucgucgucccccgcuacgccuucgccauggagcgcaacgccggcuccggcaucaucaucuccgacacccccguccacgacugcaacaccaccugccagacccccaagggcgccaucaacaccucccuccccuuccagaacauccaccccaucaccaucggcaagugccccaagcacgucaaguccaccaagcuccgccucgccaccggccuccgcaacguccccuccauccagucccgcggccucuucggcgccaucgccggcuucaucgagggcggcuggaccggcauggucgacggcugguacggcuaccaccaccagaacgagcagggcuccggcuacgccgccgaccucaaguccacccagaacgccaucgacgagaucaccaacaaggucaacuccgucaucgagaagaugaacacccaguucaccgccgucggcaaggaguucaaccaccucgagaagcgcaucgagaaccucaacaagaaggucgacgacggcuuccucgacaucuggaccuacaacgccgagcuccucguccuccucgagaacgagcgcacccucgacuaccacgacuccaacgucaagaaccucuacgagaagguccgcucccagcucaagaacaacgccaaggagaucggcaacggcugcuucgaguucuaccacaagugcgacaacaccugcauggaguccgucaagaacggcaccuacgacuaccccaaguacuccgaggaggccaagcucaaccgcgaggagaucgacggcgucaagcucgaguccacccgcaucuaccagauccucgccaucuacuccaccgucgccuccucccucguccucgucgucucccucggcgccaucuccuucuggaugugcuccaacggcucccuccagugccgcaucugcaucuga

SEQ ID NO: 109730 - RNA, 1701 nt, Artificial Sequence; identical to SEQ ID NO: 98692
  derived and/or modified CDS sequence (opt2) from hemagglutinin__InfluenzaA__BAH95824

SEQ ID NO: 109731 - RNA, 1707 nt, Artificial Sequence
  derived and/or modified CDS sequence (opt2) from hemagglutinin__InfluenzaA__BAJ07997
auggagaagaucguccuccucuucgccaucgucucccucgucaaguccgaccagaucugcaucggcuaccacgccaacaacuccaccgagcaggucgacaccaucauggagaagaacgucaccgucacccacgcccaggacauccucgagaagacccacaacggcaagcucugcgaccucgacggcgucaagccccucauccuccgcgacugcuccgucgccggcuggcuccucggcaaccccaugugcgacgaguucaucaacguccccgagugguccuacaucgucgagaaggccaaccccgccaacgaccucugcuaccccggcgacuucaacgacuacgaggagcucaagcaccuccucucccgcaucaaccacuucgagaagauccagaucauccccaagaacuccugguccucccacgaggccucccucggcgucuccuccgccugccccuaccagggcaaguccuccuucuuccgcaacgucgucuggcucaucaagaagaacaacgccuaccccaccaucaagcgcuccuacaacaacaccaaccaggaggaccuccucguccucuggggcauccaccaccccaacgacgccgccgagcagacccgccucuaccagaaccccaccaccuacaucuccgucggcaccuccacccucaaccagcgccucguccccaagaucgccacccgcuccaaggucaacggccaguccggccgcauggaguucuucuggaccauccucaagcccaacgacgccaucaacuucgaguccaacggcaacuucaucgcccccgaguacgccuacaagaucgucaagaagggcgacuccgccaucaugaaguccgagcucgaguacggcaacugcaacaccaagugccagacccccaugggcgccaucaacuccuccaugcccuuccacaacauccacccccucaccaucggcgagugccccaaguacgucaaguccaaccgccucguccucgccaccggccuccgcaacuccccccagcgcgagcgccgccgcaagaagcgcggccucuucggcgccaucgccggcuucaucgagggcggcuggcagggcauggucgacggcugguacggcuaccaccacuccaacgagcagggcuccggcuacgccgccgacaaggaguccacccagaaggccaucgacggcgucaccaacaaggucaacuccaucaucgacaagaugaacacccaguucgaggccgucggccgcgaguucaacaaccucgagcgccgcaucgagaaccucaacaagaagauggaggacggcuuccucgacgucuggaccuacaacgccgagcuccucguccucauggagaacgagcgcacccucgacuuccacgacuccaacgucaagaaccucuacgacaagguccgccuccagcuccgcgacaacgccaaggagcucggcaacggcugcuucgaguucuaccacaagugcgacaacgagugcauggaguccguccgcaacggcaccuacgacuacccccaguacuccgaggaggcccgccucaagcgcgaggagaucuccggcgucaagcucgaguccaucggcaccuaccagauccucuccaucuacuccaccgucgccuccucccucgcccucgccaucauggucgccggccucucccucuggaugugcuccaacggcucccuccagugccgcaucugcaucuga

SEQ ID NO: 109732 - RNA, 1701 nt, Artificial Sequence
  derived and/or modified CDS sequence (opt2) from hemagglutinin__InfluenzaA__BAJ39949
augaaggccauccucgucguccuccucuacaccuucgccaccgccaacgccgacacccucugcaucggcuaccacgccaacaacuccaccgacaccgucgacaccguccucgagaagaacgucaccgucacccacuccgucaaccuccucgaggacaagcacaacggcaagcucugcaagcuccgcggcgucgccccccuccaccucggcaagugcaacaucgccggcuggauccucggcaaccccgagugcgagucccucuccaccgccuccuccugguccuacaucgucgagaccuccuccuccgacaacggcaccugcuaccccggcgacuucaucgacuacgaggagcuccgcgagcagcucuccuccgucuccuccuucgagcgcuucgagaucuuccccaagaccuccuccuggcccaaccacgacuccaacaagggcgucaccgccgccugcccccacgccggcgccaaguccuucuacaagaaccucaucuggcucgucaagaagggcaacuccuaccccaagcucuccaaguccuacaucaacgacaagggcaaggagguccucguccucuggggcauccaccaccccuccaccuccgccgaccagcagucccucuaccagaacgccgacaccuacgucuucgucggcaccucccgcuacuccaagaaguucaagcccgagaucgccauccgccccaagguccgcgaccaggagggccgcaugaacuacuacuggacccucgucgagcccggcgacaagaucaccuucgaggccaccggcaaccucgucgucccccgcuacgccuucgccauggagcgcaacgccggcuccggcaucaucaucuccgacacccccguccacgacugcaacaccaccugccagacccccaagggcgccaucaacaccucccuccccuuccagaacauccaccccaucaccaucggcaagugccccaaguacgucaaguccaccaagcuccgccucgccaccggccuccgcaacguccccuccauccagucccgcggccucuucggcgccaucgccggcuucaucgagggcggcuggaccggcauggucgacggcugguacggcuaccaccaccagaacgagcagggcuccggcuacgccgccgaccucaaguccacccagaacgccaucgacgagaucaccaacaaggucaacuccgucaucgagaagaugaacacccaguucaccgccgucggcaaggaguucaaccaccucgagaagcgcaucgagaaccucaacaagaaggucgacgacggcuuccucgacaucuggaccuacaacgccaagcuccucguccuccucaagaacgagcgcacccucgacuaccacgacuccaacgucaagaaccucuacgagaagguccgcucccagcucaagaacaacgccaaggagaucggcaacggcugcuucgaguucuaccacaagugcgacaacaccugcauggaguccgucaagaacggcaccuacgacuaccccaaguacuccgaggaggccaagcucaaccgcgaggagaucgacggcgucaagcucgaguccacccgcaucuaccagauccucgccaucuacuccaccgucgccuccucccucguccucgucgucucccucggcgccaucuccuucuggaugugcuccaacggcucccuccagugccgcaucugcaucuga

SEQ ID NO: 109733 - RNA, 1701 nt, Artificial Sequence
  derived and/or modified CDS sequence (opt2) from hemagglutinin__InfluenzaA__BAJ39950
augaaggccauccucgucguccuccucuacaccuucgccaccgccaacgccgacacccucugcaucggcuaccacgccaacaacuccaccgacaccgucgacaccguccucgagaagaacgucaccgucacccacuccgucaaccuccucgaggacaagcacaacggcaagcucugcaagcuccgcggcgucgccccccuccaccucggcaagugcaacaucgccggcuggauccucggcaaccccgagugcgagucccucuccaccgccuccuccugguccuacaucgccgagaccuccuccuccgacaacggcaccugcuaccccggcgacuucaucgacuacgaggagcuccgcgagcagcucuccuccgucuccuccuucgagcgcuucgagaucuuccccaagaccuccuccuggcccaaccacgacuccaacaagggcgucaccgccgccugcccccacgccggcgccaaguccuucuacaagaaccucaucuggcucgucaagaagggcaacuccuaccccaagcucuccaaguccuacaucaacgacaagggcaaggagguccucguccucuggggcauccaccaccccuccaccuccgccgaccagcagucccucuaccagaacgccgacgccuacgucuucgucggcaccucccgcuacuccaagaaguucaagcccgagaucgccauccgccccaagguccgcgaccaggagggccgcaugaacuacuacuggacccucgucgagcccggcgacaagaucaccuucgaggccaccggcaaccucgucgucccccgcuacgccuucgccauggagcgcaacgccggcuccggcaucaucaucuccgacacccccguccacgacugcaacaccaccugccagacccccaagggcgccaucaacaccucccuccccuuccagaacauccaccccaucaccaucggcaagugccccaaguacgucaaguccaccaagcuccgccucgccaccggccuccgcaacguccccuccauccagucccgcggccucuucggcgccaucgccggcuucaucgagggcggcuggaccggcauggucgacggcugguacggcuaccaccaccagaacgagcagggcuccggcuacgccgccgaccucaaguccacccagaacgccaucgacgagaucaccaacaaggucaacuccgucaucgagaagaugaacacccaguucaccgccgucggcaaggaguucaaccaccucgagaagcgcaucgagaaccucaacaagaaggucgacgacggcuuccucgacaucuggaccuacaacgccgagcuccucguccuccucgagaacgagcgcacccucgacuaccacgacuccaacgucaagaaccucuacgagaagguccgcucccagcucaagaacaacgccaaggagaucggcaacggcugcuucgaguucuaccacaagugcgacaacaccugcauggaguccgucaagaacggcaccuacgacuaccccaaguacuccgaggaggccaagcucaaccgcgaggagaucgacggcgucaagcucgaguccacccgcaucuaccagauccucgccaucuacuccaccgucgccuccucccucguccucgucgucucccucggcgccaucuccuucuggaugugcuccaacggcucccuccagugccgcaucugcaucuga

SEQ ID NO: 109734 - RNA, 1701 nt, Artificial Sequence
  derived and/or modified CDS sequence (opt2) from hemagglutinin__InfluenzaA__BAJ39951
augaaggccauccucgucguccuccucuacaccuucgccaccgccaacgccgacacccucugcaucggcuaccacgccaacaacuccaccgacaccgucgacaccguccucgagaagaacgucaccgucacccacuccgucaaccuccucgaggacaagcacaacggcaagcucugcaagcuccgcggcgucgccccccuccaccucggcaagugcaacaucgccggcuggauccucggcaaccccgagugcgagucccucuccaccgccuccuccugguccuacaucgucgagaccuccuccuccgacaacggcaccugcuaccccggcgacuucaucgacuacgaggagcuccgcgagcagcucuccuccgucuccuccuucgagcgcuucgagaucuuccccaagaccuccuccuggcccaaccacgacuccaacaagggcgucaccgccgccugcccccacgccggcgccaaguccuucuacaagaaccucaucuggcucgucaagaagggcaacuccuaccccaagcucuccaaguccuacaucaacgacaagggcaaggagguccucguccucuggggcauccaccaccccuccaccuccgccgaccagcagucccucuaccagaacgccgacaccuacgucuucgucggcaccucccgcuacuccaagaaguucaagcccgagaucgccauccgccccaagguccgcgaccaggagggccgcaugaacuacuacuggacccucgucgagcccggcgacaagaucaccuucgaggccaccggcaaccucgucgucccccgcuacgccuucgccauggagcgcaacgccggcuccggcaucaucaucuccgacacccccguccacgacugcaacaccaccugccagacccccaagggcgccaucaacaccucccuccccuuccagaacauccaccccaucaccaucggcaagugccccaaguacgucaaguccaccaagcuccgccucgccaccggccuccgcaacguccccuccuuccagucccgcggccucuucggcgccaucgccggcuucaucgagggcggcuggaccggcauggucgacggcugguacggcuaccaccaccagaacgagcagggcuccggcuacgccgccgaccucaaguccacccagaacgccaucgacgagaucaccaacaaggucaacuccgucaucgagaagaugaacacccaguucaccgccgucggcaaggaguucaaccaccucgagaagcgcaucgagaaccucaacaagaaggucgacgacggcuuccucgacaucuggaccuacaacgccgagcuccucguccuccucgagaacgagcgcacccucgacuaccacgacuccaacgucaagaaccucuacgagaagguccgcucccagcucaagaacaacgccaaggagaucggcaacggcugcuucgaguucuaccacaagugcgacaacaccugcauggaguccgucaagaacggcaccuacgacuaccccaaguacuccgaggaggccaagcucaaccgcgaggagaucgacggcgucaagcucgaguccacccgcaucuaccagauccucgccaucuacuccaccgucgccuccucccucguccucgucgucucccucggcgccaucuccuucuggaugugcuccaacggcucccuccagugccgcaucugcaucuga

SEQ ID NO: 109735 - RNA, 1701 nt, Artificial Sequence; identical to SEQ ID NO: 105308
  derived and/or modified CDS sequence (opt2) from hemagglutinin__InfluenzaA__BAJ39952

SEQ ID NO: 109736 - RNA, 1701 nt, Artificial Sequence
  derived and/or modified CDS sequence (opt2) from hemagglutinin__InfluenzaA__BAJ39953
augaaggccauccucgucguccuccucuacaccuucgccaccgccaacgccgacacccucugcaucggcuaccacgccaacaacuccaccgacaccgucgacaccguccucgagaagaacgucaccgucacccacuccgucaaccuccucgaggacaagcacaacggcaagcucugcaagcuccgcggcgucgccccccuccaccucggcaagugcaacaucgccggcuggauccucggcaaccccgagugcgagucccucuccaccgccuccuccugguccuacaucgucgagaccuccuccuccgacaacggcaccugcuaccccggcgacuucaucgacuacgaggagcuccgcgagcagcucuccuccgucuccuccuucgagcgcuucgagaucuuccccaagaccuccuccuggcccaaccacgacuccaacaagggcgucaccgccgccugcccccacgccggcgccaaguccuucuacaagaaccucaucuggcucgucaagaagggcaacuccuaccccaagcucuccaaguccuacaucaacgacaagggcaaggagguccucguccucuggggcauccaccaccccuccaccuccgccgaccagcagucccucuaccagaacgccgacaccuacgucuucgucggcaccucccgcuacuccaagaaguucaagcccgagaucgccauccgccccaagguccgcgaccaggagggccgcaugaacuacuacuggacccucgucgagcccggcgacaagaucaccuucgaggccaccggcaaccucgucgucccccgcuacgccuucgccauggagcgcaacgccggcuccggcaucaucaucuccgacacccccguccacgacugcaacaccaccugccagacccccaagggcgccaucaacaccucccuccccuuccagaacauccaccccaucaccaucggcaagugccccaaguacgucaaguccaccaagcuccgccucgccaccggccuccgcaacguccccuccauccagucccgcggccucuucggcgccaucgccggcuucaucgagggcggcuggaccggcauggucgacggcugguacggcuaccaccaccagaacgagcagggcuccggcuacgccgccgaccucaaguccacccagaacgccaucgacgagaucaccaacaaggucaacuccgucaucgagaagaugaacacccaguucaccgccgucggcaaggaguucaaccaccucgagaagcgcaucgagaaccucaacaagaaggucgacgacggcuuccucgacaucuggaccuacaacgccaagcuccucguccuccucgagaacgagcgcacccucgacuaccacgacuccaacgucaagaaccucuacgagaagguccgcucccagcucaagaacaacgccaaggagaucggcaacggcugcuucgaguucuaccacaagugcgacaacaccugcauggaguccgucaagaacggcaccuacgacuaccccaaguacuccgaggaggccaagcucaaccgcgaggagaucgacggcgucaagcucgaguccacccgcaucuaccagauccucgccaucuacuccaccgucgccuccucccucguccucgucgucucccucggcgccaucuccuucuggaugugcuccaacggcucccuccagugccgcaucugcaucuga

SEQ ID NO: 109737 - RNA, 1701 nt, Artificial Sequence; identical to SEQ ID NO: 105308
  derived and/or modified CDS sequence (opt2) from hemagglutinin__InfluenzaA__BAJ39954

SEQ ID NO: 109738 - RNA, 1701 nt, Artificial Sequence
  derived and/or modified CDS sequence (opt2) from hemagglutinin__InfluenzaA__BAJ39955
augaaggccauccucgucguccuccucuacaccuucgccaccgccaacgccgacacccucuccaucggcuaccacgccaacaacuccaccgacaccgucgacaccguccucgagaagaacgucaccgucacccacuccgucaaccuccucgaggacaagcacaacggcaagcucugcaagcuccgcggcgucgccccccuccaccucggcaagugcaacaucgccggcuggauccucggcaaccccgagugcgagucccucuccaccgccuccuccugguccuacaucgucgagaccuccuccuccgacaacggcaccugcuaccccggcgacuucaucgacuacgaggagcuccgcgagcagcucuccuccgucuccuccuucgagcgcuucgagaucuuccccaagaccuccuccuggcccaaccacgacuccaacaagggcgucaccgccgccugcccccacgccggcgccaaguccuucuacaagaaccucaucuggcucgucaagaagggcaacuccuaccccaagcucuccaaguccuacaucaacgacaagggcaaggagguccucguccucuggggcauccaccaccccuccaucuccgccgaccagcagucccucuaccagaacgccgacaccuacgucuucgucggcaccucccgcuacuccaagaaguucaagcccgagaucgccauccgccccaagguccgcgaccaggagggccgcaugaacuacuacuggacccucgucgagcccggcgacaagaucaccuucgaggccaccggcaaccucgucgucccccgcuacgccuucgccauggagcgcaacgccggcuccggcaucaucaucuccgacacccccguccacgacugcaacaccaccugccagacccccaagggcgccaucaacaccucccuccccuuccagaacauccaccccaucaccaucggcaagugccccaaguacgucaaguccaccaagcuccgccucgccaccggccuccgcaacguccccuccauccagucccgcggccucuucggcgccaucgccggcuucaucgagggcggcuggaccggcauggucgacggcugguacggcuaccaccaccagaacgagcagggcuccggcuacgccgccgaccucaaguccacccagaacgccaucgacgagaucaccaacaaggucaacuccgucaucgagaagaugaacacccaguucaccgccgucggcaaggaguucaaccaccucgagaagcgcaucgagaaccucaacaagaaggucgacgacggcuuccucgacaucuggaccuacaacgccgagcuccucguccuccucgagaacgagcgcacccucgacuaccacgacuccaacgucaagaaccucuacgagaagguccgcucccagcucaagaacaacgccaaggagaucggcaacggcugcuucgaguucuaccacaagugcgacaacaccugcauggaguccgucaagaacggcaccuacgacuaccccaaguacuccgaggaggccaagcucaaccgcgaggagaucgacggcgucaagcucgaguccacccgcaucuaccagauccucgccaucuacuccaccgucgccuccucccucguccucgucgucucccucggcgccaucuccuucuggaugugcuccaacggcucccuccagugcaagaucugcaucuga

SEQ ID NO: 109739 - RNA, 1701 nt, Artificial Sequence; identical to SEQ ID NO: 109733
  derived and/or modified CDS sequence (opt2) from hemagglutinin__InfluenzaA__BAJ39956

SEQ ID NO: 109740 - RNA, 1701 nt, Artificial Sequence; identical to SEQ ID NO: 105308
  derived and/or modified CDS sequence (opt2) from hemagglutinin__InfluenzaA__BAJ39957

SEQ ID NO: 109741 - RNA, 1701 nt, Artificial Sequence
  derived and/or modified CDS sequence (opt2) from hemagglutinin__InfluenzaA__BAJ39958
augaaggccauccucgucguccuccucuacaccuucgccaccgccaacgccgacacccucugcaucggcuaccacgccaacaacuccaccgacaccgucgacaccguccucgagaagaacgucaccgucacccacuccgucaaccuccucgaggacaagcacaacggcaagcucugcaagcuccgcggcgucgccccccuccaccucggcaagugcaacaucgccggcuggauccucggcaaccccgagugcgagucccucuccaccgccuccuccugguccuacaucgucgagaccuccuccuccgacaacggcaccugcuaccccggcgacuucaucgacuacgaggagcuccgcgagcagcucuccuccgucuccuccuucgagcgcuucgagaucuuccccaagaccuccuccuggcccaaccacgacuccaacaagggcgucaccgccgccugcccccacgccggcgccaaguccuucuacaagaaccucaucuggcucgucaagaagggcaacuccuaccccaagcucuccaaguccuacaucaacgacaagggcaaggagguccucguccucuggggcauccaccaccccuccaccuccgccgaccagcagucccucuaccagaacgccgacgccuacgucuucgucggcaccucccgcuacuccaagaaguucaagcccgagaucgccauccgccccaagguccgcgaccaggagggccgcaugaacuacuacuggacccucgucgagcccggcgacaagaucaccuucgaggccaccggcaaccucgucgucccccgcuacgccuucgccauggagcgcaacgccggcuccggcaucaucaucuccgacacccccguccacgacugcaacaccaccugccagacccccaagggcgccaucaacaccucccuccccuuccagaacauccaccccaucaccaucggcaagugccccaaguacgucaaguccaccaagcuccgccucgccaccggccuccgcaacguccccuccauccagucccgcggccucuucggcgccaucgccggcuucaucgagggcggcuggaccggcauggucgacggcugguacggcuaccaccaccagaacgagcagggcuccggcuacgccgccgaccucaaguccacccagaacgccaucgacgagaucaccaacaaggucaacuccgucaucgagaagaugaacacccaguucaccgccgucggcaaggaguucaaccaccucgagaagcgcaucgagaaccucaacaagaaggucgacgacggcuuccucgacaucuggaccuacaacgccgagcuccucguccuccucgagaacgagcgcacccucgacuaccacgacuccaacgucaagaaccucuacgagaaggucaagucccagcucaagaacaacgccaaggagaucggcaacggcugcuucgaguucuaccacaagugcgacaacaccugcauggaguccgucaagaacggcaccuacgacuaccccaaguacuccaaggaggccaagcucaaccgcgagaagaucgacggcgucaagcucgaguccacccgcaucuaccagauccucgccaucuacuccaccgucgccuccucccucguccucgucgucucccucggcgccaucuccuucuggaugugcuccaacggcucccuccagugccgcaucugcaucuga

SEQ ID NO: 109742 - RNA, 1701 nt, Artificial Sequence
  derived and/or modified CDS sequence (opt2) from hemagglutinin__InfluenzaA__BAJ39959
augaaggccauccucgucguccuccucuacaccuucgccaccgccaacgccgacacccucugcaucggcuaccacgccaacaacuccaccgacaccgucgacaccguccucgagaagaacgucaccgucacccacuccgucaaccuccucgaggacaagcacaacggcaagcucugcaagcuccgcggcgucgccccccuccaccucggcaagugcaacaucgccggcuggauccucggcaaccccgagugcgagucccucuccaccgccuccuccugguccuacaucgucgagaccuccuccuccgacaacggcaccugcuaccccggcgacuucaucgacuacgaggagcuccgcgagcagcucuccuccgucuccuccuucgagcgcuucgagaucuuccccaagaccuccuccuggcccaaccacgacuccaacaagggcgucaccgccgccugcccccacgccggcgccaaguccuucuacaagaaccucaucuggcucgucaagaagggcaacuccuaccccaagcucuccaaguccuacaucaacgacaagggcaaggagguccucguccucuggggcauccaccaccccuccaccuccgccgaccagcagucccucuaccagaacgccgacgccuacgucuucgucggcaccucccgcuacuccaagaaguucaagcccgagaucgccauccgccccaagguccgcgaccaggagggccgcaugaacuacuacuggacccucgucgagcccggcgacaagaucaccuucgaggccaccggcaaccucgucgucccccgcuacgccuucgccauggagcgcaacgccggcuccggcaucaucaucuccgacacccccguccacgacugcaacaccaccugccagacccccaagggcgccaucaacaccucccuccccuuccagaacauccaccccaucaccaucggcaagugccccaaguacgucaaguccaccaagcuccgccucgccaccggccuccgcaacguccccuucauccagucccgcggccucuucggcgccaucgccggcuucaucgagggcggcuggaccggcauggucgacggcugguacggcuaccaccaccagaacgagcagggcuccggcuacgccgccgaccucaaguccacccagaacgccaucgacgagaucaccaacaaggucaacuccgucaucgagaagaugaacacccaguucaccgccgucggcaaggaguucaaccaccucgagaagcgcaucgagaaccucaacaagaaggucgacgacggcuuccucgacaucuggaccuacaacgccgagcuccucguccuccucgagaacgagcgcacccucgacuaccacgacuccaacgucaagaaccucuacgagaaggucaagucccagcucaagaacaacgccaaggagaucggcaacggcugcuucgaguucuaccacaagugcgacaacaccugcauggaguccgucaagaacggcaccuacgacuaccccaaguacuccaaggaggccaagcucaaccgcgaggagaucgacggcgucaagcucgaguccacccgcaucuaccagauccucgccaucuacuccaccgucgccuccucccucguccucgucgucucccucggcgccaucuccuucuggaugugcuccaacggcucccuccagugccgcaucugcaucuga

SEQ ID NO: 109743 - RNA, 1701 nt, Artificial Sequence; identical to SEQ ID NO: 98705
  derived and/or modified CDS sequence (opt2) from hemagglutinin__InfluenzaA__BAJ39960

SEQ ID NO: 109744 - RNA, 1701 nt, Artificial Sequence; identical to SEQ ID NO: 99334
  derived and/or modified CDS sequence (opt2) from hemagglutinin__InfluenzaA__BAJ39961

SEQ ID NO: 109745 - RNA, 1701 nt, Artificial Sequence
  derived and/or modified CDS sequence (opt2) from hemagglutinin__InfluenzaA__BAJ39962
augaaggccauccucgucguccuccucuacaccuucgccaccgccaacgccgacacccucugcaucggcuaccacgccaacaacuccaccgacaccgucgacaccguccucgagaagaacgucaccgucacccacuccgucaaccuccucgaggacaagcacaacggcaagcucugcaagcuccgcggcgucgccccccuccaccucggcaagugcaacaucgccggcuggauccucggcaaccccgagugcgagucccucuccaccgccuccuccugguccuacaucgccgagaccuccuccuccgacaacggcaccugcuaccccggcgacuucaucgacuacgaggagcuccgcgagcagcucuccuccgucuccuccuucgagcgcuucgagaucuuccccaagaccuccuccuggcccaaccacgacuccaacaagggcgucaccgccgccugcccccacgccggcgccaaguccuucuacaagaaccucaccuggcucgucaagaagggcaacuccuaccccaagcucuccaaguccuacaucaacgacaagggcaaggagguccucguccucuggggcauccaccaccccuccaccuccgccgaccagcagucccucuaccagaacgccgacgccuacgucuucgucggcaccucccgcuacuccaagaaguucaagcccgagaucgccauccgccccaagguccgcgaccaggagggccgcaugaacuacuacuggacccucgucgagcccggcgacaagaucaccuucgaggccaccggcaaccucgucgucccccgcuacgccuucgccauggagcgcaacgccggcuccggcaucaucaucuccgacacccccguccacgacugcaacaccaccugccagacccccaagggcgccaucaacaccucccuccccuuccagaacauccaccccaucaccaucggcaagugccccaaguacgucaaguccaccaagcuccgccucgccaccggccuccgcaacguccccuucauccagucccgcggccucuucggcgccaucgccggcuucaucgagggcggcuggaccggcauggucgacggcugguacggcuaccaccaccagaacgagcagggcuccggcuacgccgccgaccucaaguccacccagaacgccaucgacgagaucaccaacaaggucaacuccgucaucgagaagaugaacacccaguucaccgccgucggcaaggaguucaaccaccucgagaagcgcaucgagaaccucaacaagaaggucgacgacggcuuccucgacaucuggaccuacaacgccgagcuccucguccuccucgagaacgagcgcacccucgacuaccacgacuccaacgucaagaaccucuacgagaaggucaagucccagcucaagaacaacgccaaggagaucggcaacggcugcuucgaguucuaccacaagugcgacaacaccugcauggaguccgucaagaacggcaccuacgacuaccccaaguacuccaaggaggccaagcucaaccgcgaggagaucgacggcgucaagcucgaguccacccgcaucuaccagauccucgccaucuacuccaccgucgccuccucccucguccucgucgucucccucggcgccaucuccuucuggaugugcuccaacggcucccuccagugccgcaucugcaucuga

SEQ ID NO: 109746 - RNA, 1701 nt, Artificial Sequence; identical to SEQ ID NO: 98705
  derived and/or modified CDS sequence (opt2) from hemagglutinin__InfluenzaA__BAJ39963

SEQ ID NO: 109747 - RNA, 1701 nt, Artificial Sequence; identical to SEQ ID NO: 105308
  derived and/or modified CDS sequence (opt2) from hemagglutinin__InfluenzaA__BAJ39964

SEQ ID NO: 109748 - RNA, 1701 nt, Artificial Sequence; identical to SEQ ID NO: 98705
  derived and/or modified CDS sequence (opt2) from hemagglutinin__InfluenzaA__BAJ39965

SEQ ID NO: 109749 - RNA, 1701 nt, Artificial Sequence; identical to SEQ ID NO: 98705
  derived and/or modified CDS sequence (opt2) from hemagglutinin__InfluenzaA__BAJ39966

SEQ ID NO: 109750 - RNA, 1701 nt, Artificial Sequence
  derived and/or modified CDS sequence (opt2) from hemagglutinin__InfluenzaA__BAJ39967
augaaggccauccucgucguccuccucuacaccuucgccaccgccaacgccgacacccucugcaucggcuaccacgccaacaacuccaccgacaccgucgacaccguccucgagaagaacgucaccgucacccacuccgucaaccuccucgaggacaagcacaacggcaagcucugcaagcuccgcggcgucgccccccuccaccucggcaagugcaacaucgccggcuggauccucggcaaccccgagugcgagcuccucuccaccgccuccuccugguccuacaucgucgagaccuccuccuccgacaacggcaccugcuaccccggcgacuucaucgacuacgaggagcuccgcgagcagcucuccuccgucuccuccuucgagcgcuucgagaucuuccccaagaccuccuccuggcccaaccacgacuccgacaagggcgucaccgccgccugcccccacgccggcgccaaguccuucuacaagaaccucaucuggcucgucaagaagggcaacuccuaccccaagcucuccaaguccuacaucaacgacaagggcaaggagguccucguccucuggggcauccaccaccccuccaccuccgccgaccagcagucccucuaccagaacgccgacgccuacgucuucgucggcaccucccgcuacuccaagaaguucaagcccgagaucgccauccgccccaagguccgcgaccaggagggccgcaugaacuacuacuggacccucgucgagcccggcgacaagaucaccuucgaggccaccggcaaccucgucgucccccgcuacgccuucgccauggagcgcaacgccggcuccggcaucaucaucuccgacacccccguccacgacugcaacaccaccugccagacccccaagggcgccaucaacaccucccuccccuuccagaacauccaccccaucaccaucggcaagugccccaaguacgucaaguccaccaagcuccgccucgccaccggccuccgcaacguccccuccauccagucccgcggccucuucggcgccaucgccggcuucaucgagggcggcuggaccggcauggucgacggcugguacggcuaccaccaccagaacgagcagggcuccggcuacgccgccgaccucaaguccacccagaacgccaucgacgagaucaccaacaaggucaacuccgucaucgagaagaugaacacccaguucaccgcccucggcaaggaguucaaccaccucgagaagaagaucgagaaccucaacaagaaggucgacgacggcuuccucgacaucuggaccuacaacgccgagcuccucguccuccucgagaacgagcgcacccucgacuaccacgacuccaacgucaagaaccucuacgagaagguccgcucccagcucaagaacaacgccaaggagaucggcaacggcugcuucgaguucuaccacaagugcgacaacaccugcauggaguccgucaagaacggcaccuacgacuaccccaaguacuccgaggaggccaagcucaaccgcgaggagaucgacggcgucaagcucgaguccacccgcaucuaccagauccucgccaucuacuccaccgucgccuccucccucguccucgucgucucccucggcgccaucuccuucuggaugugcuccaacggcucccuccagugccgcaucugcaucuga

SEQ ID NO: 109751 - RNA, 1701 nt, Artificial Sequence; identical to SEQ ID NO: 104233
  derived and/or modified CDS sequence (opt2) from hemagglutinin__InfluenzaA__BAJ39968

SEQ ID NO: 109752 - RNA, 1701 nt, Artificial Sequence; identical to SEQ ID NO: 105308
  derived and/or modified CDS sequence (opt2) from hemagglutinin__InfluenzaA__BAJ39969

SEQ ID NO: 109753 - RNA, 1701 nt, Artificial Sequence; identical to SEQ ID NO: 98705
  derived and/or modified CDS sequence (opt2) from hemagglutinin__InfluenzaA__BAJ39970

SEQ ID NO: 109754 - RNA, 1701 nt, Artificial Sequence; identical to SEQ ID NO: 98705
  derived and/or modified CDS sequence (opt2) from hemagglutinin__InfluenzaA__BAJ39971

SEQ ID NO: 109755 - RNA, 1701 nt, Artificial Sequence; identical to SEQ ID NO: 99334
  derived and/or modified CDS sequence (opt2) from hemagglutinin__InfluenzaA__BAJ39972

SEQ ID NO: 109756 - RNA, 1701 nt, Artificial Sequence
  derived and/or modified CDS sequence (opt2) from hemagglutinin__InfluenzaA__BAJ39973
augaaggccauccucgucguccuccucuacaccuucgccaccgccaacgccgacacccucugcaucggcuaccacgccaacaacuccaccgacaccgucgacaccguccucgagaagaacgucaccgucacccacuccgucaaccuccucgaggacaagcacaacggcaagcucugcaagcuccgcggcgucgccccccuccaccucggcaagugcaacaucgccggcuggauccucggcaaccccgagugcgagucccucuccaccgccuccuccugguccuacaucgucgagaccuccuccuccgacaacggcaccugcuaccccggcgacuucaucgacuacgaggagcuccgcgagcagcucuccuccgucuccuccuucgagcgcuucgagaucuuccccaagaccuccuccuggcccaaccacgacuccaacaagggcgucaccgccgccugcccccacgccggcgccaaguccuucuacaagaaccucaucuggcucgucaagaagggcaacuccuaccccaagcucuccaaguccuacaucaacgacaagggcaaggagguccucguccucuggggcauccaccaccccuccaccuccgccgaccagcagucccucuaccagaacgccgacaccuacgucuucgucggcaccucccgcuacuccaagaaguucaagcccgagaucgccauccgccccaagguccgcgaccaggagggccgcaugaacuacuacuggacccucgucgagcccggcgacaagaucaccuucgaggccaccggcaaccucgucgucccccgcuacgccuucgccauggagcgcaacgccggcuccggcaucaucaucuccgacacccccguccacgacugcaacaccaccugccagacccccaagggcgccaucaacaccucccuccccuuccagaacauccaccccaucaccaucggcaagugccccaaguacgucaaguccaccaagcuccgccucgccaccggccuccgcaacguccccuccauccagucccgcggccucuucggcgccaucgccggcuucaucgagggcggcuggaccggcauggucgacggcugguacggcuaccaccaccagaacgagcagggcuccggcuacgccgccgaccucaaguccacccagaacgccaucgacgagaucaccaacaaggucaacuccgucaucgagaagaugaacacccaguucaccgccgucggcaaggaguucaaccaccucgagaagcgcaucgagaaccucaacaagaaggucgacgacggcuuccucgacaucuggaccuacaacgccgagcuccucguccuccucgagaacgagcgcacccucgacuaccacgacuccaacgucaagaaccucuacgagaaggucaagucccagcucaagaacaacgccaaggagaucggcaacggcugcuucgaguucuaccacaagugcgacaacaccugcauggaguccgucaagaacggcaccuacgacuaccccaaguacuccgaggaggccaagcucaaccgcgaggagaucgacggcgucaagcucgaguccacccgcaucuaccagauccucgccaucuacuccaccgucgccuccucccucguccucgucgucucccucggcgccaucuccuucuggaugugcuccaacggcucccuccagugccgcaucugcaucuga

SEQ ID NO: 109757 - RNA, 1701 nt, Artificial Sequence; identical to SEQ ID NO: 98705
  derived and/or modified CDS sequence (opt2) from hemagglutinin__InfluenzaA__BAJ39974

SEQ ID NO: 109758 - RNA, 1701 nt, Artificial Sequence; identical to SEQ ID NO: 99274
  derived and/or modified CDS sequence (opt2) from hemagglutinin__InfluenzaA__BAJ39975

SEQ ID NO: 109759 - RNA, 1701 nt, Artificial Sequence
  derived and/or modified CDS sequence (opt2) from hemagglutinin__InfluenzaA__BAJ39976
augaaggccauccucgucguccuccucuacaccuucgccaccgccaacgccgacacccucugcaucggcuaccacgccaacaacuccaccgacaccgucgacaccguccucgagaagaacgucaccgucacccacuccgucaaccuccucgaggacaagcacaacgagaagcucugcaagcuccgcggcgucgccccccuccaccucggcaagugcaacaucgccggcuggauccucggcaaccccgagugcgagucccucuccaccgccuccuccugguccuacaucgucgagaccuccuccuccgacaacggcaccugcuaccccggcgacuucaucgacuacgaggagcuccgcgagcagcucuccuccgucuccuccuucgagcgcuucgagaucuuccccaagaccuccuccuggcccaaccacgacuccaacaagggcgucaccgccgccugcccccacgccggcgccaaguccuucuacaagaaccucaucuggcucgucaagaagggcaacuccuaccccaagcucuccaaguccuacaucaacgacaagggcaaggagguccucguccucuggggcauccaccaccccuccaccuccgccgaccagcagucccucuaccagaacgccgacgccuacgucuucgucggcaccucccgcuacuccaagaaguucaagcccgagaucgccauccgccccaagguccgcgaccaggagggccgcaugaacuacuacuggacccucgucgagcccggcgacaagaucaccuucgaggccaccggcaaccucgucgucccccgcuacgccuucgccauggagcgcaacgccggcuccggcaucaucaucuccgacacccccguccacgacugcaacaccaccugccagacccccaagggcgccaucaacaccucccuccccuuccagaacauccaccccaucaccaucggcaagugccccaaguacgucaaguccaccaagcuccgccucgccaccggccuccgcaacguccccuccauccagucccgcggccucuucggcgccaucgccggcuucaucgagggcggcuggaccggcauggucgacggcugguacggcuaccaccaccagaacgagcagggcuccggcuacgccgccgaccucaaguccacccagaacgccaucgacaagaucaccaacaaggucaacuccgucaucgagaagaugaacacccaguucaccgccgucggcaaggaguucaaccaccucgagaagcgcaucgagaaccucaacaagaaggucgacgacggcuuccucgacaucuggaccuacaacgccgagcuccucguccuccucgagaacgagcgcacccucgacuaccacgacuccaacgucaagaaccucuacgagaagguccgcucccagcucaagaacaacgccaaggagaucggcaacggcugcuucgaguucuaccacaagugcgacaacaccugcauggaguccgucaagaacggcaccuacgacuaccccaaguacuccgaggaggccaagcucaaccgcgaggagaucgacggcgucaagcucgaguccacccgcaucuaccagauccucgccaucuacuccaccgucgccuccucccucguccucgucgucucccucggcgccaucaacuucuggaugugcuccaacggcucccuccagugccgcaucugcaucuga

SEQ ID NO: 109760 - RNA, 1701 nt, Artificial Sequence; identical to SEQ ID NO: 98705
  derived and/or modified CDS sequence (opt2) from hemagglutinin__InfluenzaA__BAJ39977

SEQ ID NO: 109761 - RNA, 1701 nt, Artificial Sequence
  derived and/or modified CDS sequence (opt2) from hemagglutinin__InfluenzaA__BAJ39978
augaaggccauccucgucguccuccucuacaccuucgccaccgccaacgccgacacccucugcaucggcuaccacgccaacaacuccaccgacaccgucgacaccguccucgagaagaacgucaccgucacccacuccgucaaccuccucgaggacaagcacaacggcaagcucugcaagcuccgcggcgucgccccccuccaccucggcaagugcaacaucgccggcuggauccucggcaaccccgagugcgagucccucuccaccgccuccuccugguccuacaucgucgagaccuccuccuccgacaacggcaccugcuaccccggcgacuucaucgacuacgaggagcuccgcgagcagcucuccuccgucuccuccuucgagcgcuucgagaucuuccccaagaccuccuccuggcccaaccacgacuccaacaagggcgucaccgccgccugcccccacgccggcgccaaguccuucuacaagaaccucaucuggcucgucaagaagggcaacuccuaccccaagcucuccaaguccuacaucaacgacaagggcaaggagguccucguccucuggggcauccaccaccccuccaccuccgccgaccagcagucccucuaccagaacgccgacgccuacgucuucgucggcaccucccgcuacuccaagaaguucaagcccgagaucgccauccgccccaagguccgcgagcaggagggccgcaugaacuacuacuggacccucgucgagcccggcgacaagaucaccuucgaggccaccggcaaccucgucgucccccgcuacgccuucgccauggagcgcaacgccggcuccggcaucaucaucuccgacacccccguccacgacugcaacaccaccugccagacccccaagggcgccaucaacaccucccuccccuuccagaacauccacuccaucaccaucggcaagugccccaaguacgucaaguccaccaagcuccgccucgccaccggccuccgcaacguccccuccauccagucccgcggccucuucggcgccaucgccggcuucaucgagggcggcuggaccggcauggucgacggcugguacggcuaccaccaccagaacgagcagggcuccggcuacgccgccgaccucaaguccacccagaacgccaucgacgagaucaccaacaaggucaacuccgucaucgagaagaugaacacccaguucaccgccgucggcaaggaguucaaccaccucgagaagcgcaucgagaaccucaacaagaaggucgacgacggcuuccucgacaucuggaccuacaacgccgagcuccucguccuccucgagaacgagcgcacccucgacuaccacgacuccaacgucaagaaccucuacgagaaggucaagucccagcucaagaacaacgccaaggagaucggcaacggcugcuucgaguucuaccacaagugcgacaacaccugcauggaguccgucaagaacggcaccuacgacuaccccaaguacuccgaggaggccaagcucaaccgcgagaagaucgacggcgucaagcucgaguccacccgcaucuaccagauccucgccaucuacuccaccgucgccuccucccucguccucgucgucucccucggcgccaucuccuucuggaugugcuccaacggcucccuccagugccgcaucugcaucuga

SEQ ID NO: 109762 - RNA, 1701 nt, Artificial Sequence
  derived and/or modified CDS sequence (opt2) from hemagglutinin__InfluenzaA__BAJ39979
augaaggccauccucgucguccuccucuacaccuucgccaccgccaacgccgacacccucugcaucggcuaccacgccaacaacuccaccgacaccgucgacaccguccucgagaagaacgucaccgucacccacuccgucaaccuccucgaggacaagcacaacggcaagcucugcaagcuccgcggcgucgccccccuccaccucggcaagugcaacaucgccggcuggauccucggcaaccccgagugcgagcuccucuccaccgccuccuccugguccuacaucgucgagaccuccuccuccgacaacggcaccugcuaccccggcgacuucaucgacuacgaggagcuccgcgagcagcucuccuccgucuccuccuucgagcgcuucgagaucuuccccaagaccuccuccuggcccaaccacgacuccgacaagggcgucaccgccgccugcccccacgccggcgccaaguccuucuacaagaaccucaucuggcucgucaagaagggcaacuccuaccccaagcucuccaaguccuacaucaacgacaagggcaaggagguccucguccucuggggcauccaccaccccuccaccuccgccgaccagcagucccucuaccagaacgccgacgccuacgucuucgucggcaccucccgcuacuccaagaaguucaagcccgagaucgccauccgccccaagguccgcgaccaggagggccgcauggacuacuacuggacccucgucgagcccggcgacaagaucaccuucgaggccaccggcaaccucgucgucccccgcuacgccuucgccauggagcgcaacgccggcuccggcaucaucaucuccgacacccccguccacaacugcaacaccaccugccagacccccaagggcgccaucaacaccucccuccccuuccagaacauccaccccaucaccaucggcaagugccccaaguacgucaaguccaccaagcuccgccucgccaccggccuccgcaacguccccuccauccagucccgcggccucuucggcgccaucgccggcuucaucgagggcggcuggaccggcauggucgacggcugguacggcuaccaccaccagaacgagcagggcuccggcuacgccgccgaccucaaguccacccagaacgccaucgacaagaucaccaacaaggucaacuccgucaucgagaagaugaacacccaguucaccgccgucggcaaggaguucaaccaccucgagaaccgcaucgagaaccucaacaagaaggucgacgacggcuuccucgacaucuggaccuacaacgccgagcuccucguccuccucgagaacgagcgcacccucgacuaccacgacuccaacgucaagaaccucuacgagaagguccgcucccagcucaagaacaacgccaaggagaucggcaacggcugcuucgaguucuaccacaagugcgacaacaccugcauggaguccgucaagaacggcaccuacgacuaccccaaguacuccgaggaggccaagcucaaccgcgaggagaucgacggcgucaagcucgaguccacccgcaucuaccagauccucgccaucuacuccaccgucgccuccucccucguccucgucgucucccucggcgccaucuccuucuggaugugcuccaacggcucccuccagugccgcaucugcaucuga

SEQ ID NO: 109763 - RNA, 1701 nt, Artificial Sequence; identical to SEQ ID NO: 105308
  derived and/or modified CDS sequence (opt2) from hemagglutinin__InfluenzaA__BAJ39980

SEQ ID NO: 109764 - RNA, 1701 nt, Artificial Sequence
  derived and/or modified CDS sequence (opt2) from hemagglutinin__InfluenzaA__BAJ39981
augaaggccauccucgucguccuccucuacaccuucgccaccgccaacgccgacacccucugcaucggcuaccacgccaacaacuccaccgacaccgucgacaccguccucgagaagaacgucaccgucacccacuccgucaaccuccucgaggacaagcacaacggcaagcucugcaagcuccgcggcgucgccccccuccaccucggcaagugcaacaucgccggcuggauccucggcaaccccgagugcgagucccucuccaccgccuccuccugguccuacaucgucgagaccuccuccuccgacaacggcaccugcuaccccggcgacuucaucgacuacgaggagcuccgcgagcagcucuccuccgucuccuccuucgagcgcuucgagaucuuccccaagaccuccuccuggcccaaccacgacuccaacaagggcgucaccgccgccugcccccacgccggcgccaaguccuucuacaagaaccucaucuggcucgucaagaagggcaacuccuaccccaagcucuccaaguccuacaucaacgacaagggcaaggagguccucguccucuggggcauccaccaccccuccaccuccgccgaccagcagucccucuaccagaacgccgacgccuacgucuucgucggcaccucccgcuacuccaagaaguucaagcccgagaucgccauccgccccaagguccgcgaccaggagggccgcaugaacuacuacuggacccucgucgagcccggcgacaagaucaccuucgaggccaccggcaaccucgucgucccccgcuacgccuucgccauggagcgcaacgccggcuccggcaucaucaucuccgacacccccguccacgacugcaacaccaccugccagacccccaagggcgccaucaacaccucccuccccuuccagaacauccaccccaucaccaucggcaagugcuccaaguacgucaaguccaccaagcuccgccucgccaccggccuccgcaacguccccuccauccagucccgcggccucuucggcgccaucgccggcuucaucgagggcggcuggaccggcauggucgacggcugguacggcuaccaccaccagaacgagcagggcuccggcuacgccgccgaccucaaguccacccagaacgccaucgacgagaucaccaacaaggucaacuccgucaucgagaagaugaacacccaguucaccgccgucggcaaggaguucaaccaccucgagaagcgcaucgagaaccucaacaagaaggucgacgacggcuuccucgacaucuggaccuacaacgccgagcuccucguccuccucgagaacgagcgcacccucgacuaccacgacuccaacgucaagaaccucuacgagaaggucaagucccagcucaagaacaacgccaaggagaucggcaacggcugcuucgaguucuaccacaagugcgacaacaccugcauggaguccgucaagaacggcaccuacgacuaccccaaguacuccaaggaggccaagcucaaccgcgagaagaucgacggcgucaagcucgaguccacccgcaucuaccagauccucgccaucuacuccaccgucgccuccucccucguccucgucgucucccucggcgccaucuccuucuggaugugcuccaacggcucccuccagugccgcaucugcaucuga

SEQ ID NO: 109765 - RNA, 1701 nt, Artificial Sequence
  derived and/or modified CDS sequence (opt2) from hemagglutinin__InfluenzaA__BAJ39982
augaaggccauccucgucguccuccucuacaccuucgccaccgccaacgccgccacccucugcaucggcuaccacgccaacaacuccaccgacaccgucgacacccuccucgagaagaacgucaccgucacccacuccgucaaccuccucgaggacaagcacaacggcaagcucugcaagcuccgcggcgucgccccccuccaccucggcaagugcaacaucgccggcuggauccucggcaaccccgagugcgagucccucuccaccgccuccuccugguccuacaucgucgagaccuccuccuccgacaacggcaccugcuaccccggcgacuucaucgacuacgaggagcuccgcgagcagcucuccuccgucuccuccuucgagcgcuucgagaucuuccccaagaccuccuccuggcccaaccacgacuccaacaagggcgucaccgccgccugcccccacgccggcgccaaguccuucuacaagaaccucaucuggcucgucaagaagggcaacuccuaccccaagcucuccaaguccuacaucaacgacaagggcaaggagguccucguccucuggggcauccaccaccccuccaccuccgccgaccagcagucccucuaccagaacgccgacgccuacgucuucgucggcaccucccgcuacuccaagaaguucaagcccgagaucgccauccgccccaagguccgcgaccaggagggccgcaugaacuacuacuggacccucgucgagcccggcgacaagaucaccuucgaggccaccggcaaccucgucgucccccgcuacgccuucgccauggagcgcaacgccggcuccggcaucaucaucuccgacacccccguccacgacugcaacaccaccugccagacccccaagggcgccaucaacaccucccuccccuuccagaacauccaccccaucaccaucggcaagugccccaaguacgucaaguccaccaagcuccgccucgccaccggccuccgcaacguccccuccauccagucccgcggccucuucggcgccaucgccggcuucaucgagggcggcuggaccggcauggucgacggcugguacggcuaccaccaccagaacgagcagggcuccggcuacgccgccgaccucaaguccacccagaacgccaucgacgagaucaccaacaaggucaacuccgucaucgagaagaugaacacccaguucaccgccgucggcaaggaguucaaccaccucgagaagcgcaucgagaaccucaacaagaaggucgacgacggcuuccucgacaucuggaccuacaacgccgagcuccucguccuccucgagaacgagcgcacccucgacuaccacgacuccaacgucaagaaccucuacgagaagguccgcucccagcucaagaacaacgccaaggagaucggcaacggcugcuucgaguucuaccacaagugcgacaacaccugcauggaguccgucaagaacggcaccuacgacuaccccaaguacuccgaggaggccaagcucaaccgcgaggagaucgacggcgucaagcucgaguccacccgcaucuaccagauccucgccaucuacuccaccgucgccuccucccucguccucgucgucucccucggcgccaucuccuucuggaugugcuccaacggcucccuccagugccgcaucugcaucuga

SEQ ID NO: 109766 - RNA, 1701 nt, Artificial Sequence; identical to SEQ ID NO: 109733
  derived and/or modified CDS sequence (opt2) from hemagglutinin__InfluenzaA__BAJ39983

SEQ ID NO: 109767 - RNA, 1701 nt, Artificial Sequence
  derived and/or modified CDS sequence (opt2) from hemagglutinin__InfluenzaA__BAJ39984
augaaggccauccucgucguccuccucuacaccuucgccaccgccaacgccgacacccucugcaucggcuaccacgccaacaacuccaccgacaccgucgacaccguccucgagaagaacgucaccgucacccacuccgucaaccuccucgaggacaagcacaacggcaagcucugcaagcuccgcggcgucgccccccuccaccucggcaagugcaacaucgccggcuggauccucggcaaccccgagugcgagcuccucuccaccgccuccuccugguccuacaucgucgagaccuccuccuccgacaacggcaccugcuaccccggcgacuucaucgacuacgaggagcuccgcgagcagcucuccuccgucuccuccuucgagcgcuucgagaucuuccccaagaccuccuccuggcccaaccacgacuccaacaagggcgucaccgccgccugcccccacgccggcgccaaguccuucuacaagaaccucaucuggcucgucaagaagggcaacuccuaccccaagcucuccaaguccuacaucaacgacaagggcaaggagguccucguccucuggggcauccaccaccccuccaccuccgccgaccagcagucccucuaccagaacgccgacgccuacgucuucgucggcaccucccgcuacuccaagaaguucaagcccgagaucgccauccgccccaagguccgcgaccaggagggccgcaugaacuacuacuggacccucgucgagcccggcgacaagaucaccuucgaggccaccggcaaccucgucgucccccgcuacgccuucgccauggagcgcaacgccggcuccggcaucaucaucuccgacacccccguccacaacugcaacaccaccugccagacccccaagggcgccaucaacaccucccuccccuuccagaacauccaccccaucaccaucggcaagugccccaaguacgucaaguccaccaagcuccgccucgccaccggccuccgcaacguccccuccauccagucccgcggccucuucggcgccaucgccggcuucaucgagggcggcuggaccggcauggucgacggcugguacggcuaccaccaccagaacgagcagggcuccggcuacgccgccgaccucaaguccacccagaacgccaucgacaagaucaccaacaaggucaacuccgucaucgagaagaugaacacccaguucaccgccgucggcaaggaguucaaccaccucgagaagcgcaucgagaaccucaacaagaaggucgacgacggcuuccucgacaucuggaccuacaacgccgagcuccucguccuccucgagaacgagcgcacccucgacuaccacgacuccaacgucaagaaccucuacgagaagguccgcucccagcucaagaacaacgccaaggagaucggcaacggcugcuucgaguucuaccacaagugcgacaacaccugcauggaguccgucaagaacggcaccuacgacuaccccaaguacuccgaggaggccaagcucaaccgcgaggagaucgacggcgucaagcucgaguccacccgcaucuaccagauccucgccaucuacuccaccgucgccuccucccucguccucgucgucucccucggcgccaucuccuucuggaugugcuccaacggcucccuccagugccgcaucugcaucuga

SEQ ID NO: 109768 - RNA, 1701 nt, Artificial Sequence; identical to SEQ ID NO: 98705
  derived and/or modified CDS sequence (opt2) from hemagglutinin__InfluenzaA__BAJ39985

SEQ ID NO: 109769 - RNA, 1701 nt, Artificial Sequence
  derived and/or modified CDS sequence (opt2) from hemagglutinin__InfluenzaA__BAJ39987
augaagaccauccucgucguccuccucuacaccuucgccaccgccaacgccgacacccucugcaucggcuaccacgccaacaacuccaccgacaccgucgacaccguccucgagaagaacgucaccgucacccacuccgucaaccuccucgaggacaagcacaacggcaagcucugcaagcuccgcggcgucgccccccuccaccucggcaagugcaacaucgccggcuggauccucggcaaccccgagugcgagucccucuccaccgccuccuccugguccuacaucgucgagaccuccuccuccgacaacggcaccugcuaccccggcgacuucaucgacuacgaggagcuccgcgagcagcucuccuccgucuccuccuucgagcgcuucgagaucuuccccaagaccuccuccuggcccaaccacgacuccaacaagggcgucaccgccgccugcccccacgccggcgccaaguccuucuacaagaaccucaucuggcucgucaagaagggcaacuccuaccccaagcucuccaaguccuacaucaacgacaagggcaaggagguccucguccucuggggcauccaccaccccuccaccuccgccgaccagcagucccucuaccagaacgccgacaccuacgucuucgucggcaccucccgcuacuccaagaaguucaagcccgagaucgccauccgccccaagguccgcgaccaggagggccgcaugaacuacuacuggacccucgucgagcccggcgacaagaucaccuucgaggccaccggcaaccucgucgucccccgcuacgccuucgccauggagcgcaacgccggcuccggcaucaucaucuccgacacccccguccacgacugcaacaccaccugccagacccccaagggcgccaucaacaccucccuccccuuccagaacauccaccccaucaccaucggcaagugccccaaguacgucaaguccaccaagcuccgccucgccaccggccuccgcaacguccccuccauccagucccgcggccucuucggcgccaucgccggcuucaucgagggcggcuggaccggcauggucgacggcugguacggcuaccaccaccagaacgagcagggcuccggcuacgccgccgaccucaaguccacccagaacgccaucgacgagaucaccaacaaggucaacuccgucaucgagaagaugaacacccaguucaccgccgucggcaaggaguucaaccaccucgagaagcgcaucgagaaccucaacaagaaggucgacgacggcuuccucgacaucuggaccuacaacgccgagcuccucguccuccucgagaacgagcgcacccucgacuaccacgacuccaacgucaagaaccucuacgagaagguccgcucccagcucaagaacaacgccaaggagaucggcaacggcugcuucgaguucuaccacaagugcgacaacaccugcauggaguccgucaagaacggcaccuacgacuaccccaaguacuccaaggaggccaagcucaaccgcgaggagaucgacggcgucaagcucgaguccacccgcaucuaccagauccucgccaucuacuccaccgucgccuccucccucguccucgucgucucccucggcgccaucuccuucuggaugugcuccaacggcucccuccagugccgcaucugcaucuga

SEQ ID NO: 109770 - RNA, 1701 nt, Artificial Sequence
  derived and/or modified CDS sequence (opt2) from hemagglutinin__InfluenzaA__BAJ39988
augaaggccauccucgucguccuccucuacaccuucgccaccgccaacgccgacacccucugcaucggcuaccacgccaacaacuccaccgacaccgucgacaccguccucgagaagaacgucaccgucacccacuccgucaaccuccucgaggacaagcacaacggcaagcucugcaagcuccgcggcgucgccccccuccaccucggcaagugcaacaucgccggcuggauccucggcaaccccgagugcgagucccucuccaccgccuccuccugguccuacaucgucgagaccuccuccuccgacaacggcaccugcuaccccggcgacuucaucgacuacgaggagcuccgcgagcagcucuccuccgucuccuccuucgagcgcuucgagaucuuccccaagaccuccuccuggcccaaccacgacuccaacaagggcgucaccgccgccugcccccacgccggcgccaaguccuucuacaagaaccucaucuggcucgucaagaagggcaacuccuaccccaagcucuccaaguccuacaucaacgacaagggcaaggagguccucguccucuggggcauccaccaccccuccaccuccgccgaccagcaguccaucuaccagaacgccgacgccuacgucuucgucggcaccucccgcuacuccaagaaguucaagcccgagaucgccauccgccccaagguccgcgaccaggagggccgcaugaacuacuacuggacccucgucgagcccggcgacaagaucaccuucgaggccaccggcaaccucgucgucccccgcuacgccuucgccauggagcgcaacgccggcuccggcaucaucaucuccgacacccccguccacgacugcaacaccaccugccagacccccaagggcgccaucaacaccucccuccccuuccagaacauccaccccaucaccaucggcaagugcuccaaguacgucaaguccaccaagcuccgccucgccaccggccuccgcaacguccccuccauccagucccgcggccucuucggcgccaucgccggcuucaucgagggcggcuggaccggcauggucgacggcugguacggcuaccaccaccagaacgagcagggcuccggcuacgccgccgaccucaaguccacccagaacgccaucgacgagaucaccaacaaggucaacuccgucaucgagaagaugaacacccaguucaccgccgucggcaaggaguucaaccaccucgagaagcgcaucgagaaccucaacaagaaggucgacgacggcuuccucgacaucuggaccuacaacgccgagcuccucguccuccucgagaacgagcgcacccucgacuaccacgacuccaacgucaagaaccucuacgagaagguccgcucccagcucaagaacaacgccaaggagaucggcaacggcugcuucgaguucuaccacaagugcgacaacaccugcauggaguccgucaagaacggcaccuacgacuaccccaaguacuccgaggaggccaagcucaaccgcgaggagaucgacggcgucaagcucgaguccacccgcaucuaccagauccucgccaucuacuccaccgucgccuccucccucguccucgucgucucccucggcgccaucuccuucuggaugugcuccaacggcucccuccagugccgcaucugcaucuga

SEQ ID NO: 109771 - RNA, 1701 nt, Artificial Sequence; identical to SEQ ID NO: 100019
  derived and/or modified CDS sequence (opt2) from hemagglutinin__InfluenzaA__BAJ39989

SEQ ID NO: 109772 - RNA, 1701 nt, Artificial Sequence; identical to SEQ ID NO: 98705
  derived and/or modified CDS sequence (opt2) from hemagglutinin__InfluenzaA__BAJ39990

SEQ ID NO: 109773 - RNA, 1701 nt, Artificial Sequence; identical to SEQ ID NO: 98705
  derived and/or modified CDS sequence (opt2) from hemagglutinin__InfluenzaA__BAJ39993

SEQ ID NO: 109774 - RNA, 1701 nt, Artificial Sequence
  derived and/or modified CDS sequence (opt2) from hemagglutinin__InfluenzaA__BAJ39994
augaaggccauccucgucguccuccucuacaccuucgccaccgccaacgccgacacccucugcaucggcuaccacgccaacaacuccaccgacaccgucgacaccguccucgagaagaacgucaccgucacccacuccgucaaccuccucgaggacaagcacaacggcaagcucugcaagcuccgcggcgucgccccccuccaccucggcaagugcaacaucgccggcuggauccucggcaaccccgagugcgagucccucuccaccgccuccuccugguccuacaucgucgagaccuccuccuccgacaacggcaccugcuaccccggcgacuucaucgacuacgaggagcuccgcgagcagcucuccuccgucuccuccuucgagcgcuucgagaucuuccccaagaccuccuccuggcccaaccacgacuccaacaagggcgucaccgccgccugcccccacgccggcgccaaguccuucuacaagaaccucaucuggcucgucaagaagggcaacuccuaccccaagcucuccaaguccuacaucaacgacaagggcaaggagguccucguccucuggggcauccaccaccccuccaccuccgccgaccagcagucccucuaccagaacgccgacaccuacgucuucgucggcaccucccgcuacuccaagaaguucaagcccgagaucgccauccgccccaagguccgcgaccaggagggccgcaugaacuacuacuggacccucgucgagcccggcgacaagaucaccuucgaggccaccggcaaccucgucgucccccgcuacgccuucgccauggagcgcaacgccggcuccggcaucaucaucuccgacacccccguccacgacugcaacaccaccugccagacccccaagggcgccaucaacaccucccuccccuuccagaacauccaccccaccaccaucggcaagugccccaaguacgucaaguccaccaagcuccgccucgccaccggccuccgcaacguccccuccauccagucccgcggccucuucggcgccaucgccggcuucaucgagggcggcuggaccggcauggucgacggcugguacggcuaccaccaccagaacgagcagggcuccggcuacgccgccgaccucaaguccacccagaacgccaucgacgagaucaccaacaaggucaacuccgucaucgagaagaugaacacccaguucaccgccgucggcaaggaguucaaccaccucgagaagcgcaucgagaaccucaacaagaaggucgacgacggcuuccucgacaucuggaccuacaacgccgagcuccucguccuccucgagaacgagcgcacccucgacuaccacgacuccaacgucaagaaccucuacgagaaggucaagucccagcucaagaacaacgccaaggagaucggcaacggcugcuucgaguucuaccacaagugcgacaacaccugccucgaguccgucaagaacggcaccuacgacuaccccaaguacuccgaggaggccaagcucaaccgcgagaagaucgacggcgucaagcucgaguccacccgcaucuaccagauccucgccaucuacuccaccgucgccuccucccucguccucgucgucucccucggcgccaucuccuucuggaugugcuccaacggcucccuccagugccgcaucugcaucuga

SEQ ID NO: 109775 - RNA, 1701 nt, Artificial Sequence; identical to SEQ ID NO: 98705
  derived and/or modified CDS sequence (opt2) from hemagglutinin__InfluenzaA__BAJ39996

SEQ ID NO: 109776 - RNA, 1701 nt, Artificial Sequence
  derived and/or modified CDS sequence (opt2) from hemagglutinin__InfluenzaA__BAJ39997
augaaggccauccucgucguccuccucuacaccuucgccaccgccaacgccgacacccucugcaucggcuaccacgccaacaacuccaccgacaccgucgacaccguccucgagaagaacgucaccgucacccacuccgucaaccuccucgaggacaagcacaacggcaagcucugcaagcuccgcggcgucgccccccuccaccucggcaagugcaacaucgccggcuggauccucggcaaccccgagugcgagucccucuccaccgccuccuccugguccuacaucgucgagaccuccuccuccgacaacggcaccugcuaccccggcgacuucaucgacuacgaggagcuccgcgagcagcucuccuccgucuccuccuucgagcgcuucgagaucuuccccaagaccuccuccuggcccaaccacgacuccaacaagggcgucaccgccgccugcccccacgccggcgccaaguccuucuacaagaaccucaucuggcucgucaagaagggcaacuccuaccccaagcucuccaaguccuacaucaacgacaagggcaaggagguccucguccucuggggcauccaccaccccuccaccuccgccgaccagcagucccucuaccagaacgccgacaccuacgucuucgucggcaccucccgcuacuccaagaaguucaagcccgagaucgccauccgccccaagguccgcgaccaggagggccgcaugaacuacuacuggacccucgucgagcccggcgacaagaucaccuucgaggccaccggcaaccucgucgucccccgcuacgccuucgccauggagcgcaacgccggcuccggcaucaucaucuccgacacccccguccacgacugcaacaccaccugccagacccccaagggcgccaucaacaccucccuccccuuccagaacauccaccccaccaccaucggcaagugccccaaguacgucaaguccaccaagcuccgccucgccaccggccuccgcaacguccccuccauccagucccgcggccucuucggcgccaucgccggcuucaucgagggcggcuggaccggcauggucgacggcugguacggcuaccaccaccagaacgagcagggcuccggcuacgccgccgaccucaaguccacccagaacgccaucgacgagaucaccaacaaggucaacuccgucaucgagaagaugaacacccaguucaccgccgucggcaaggaguucaaccaccucgagaagcgcaucgagaaccucaacaagaaggucgacgacggcuuccucgacaucuggaccuacaacgccgagcuccucguccuccucgagaacgagcgcacccucgacuaccacgacuccaacgucaagaaccucuacgagaagguccgcucccagcucaagaacaacgccaaggagaucggcaacggcugcuucgaguucuaccacaagugcgacaacaccugcauggaguccgucaagaacggcaccuacgacuaccccaaguacuccgaggaggccaagcucaaccgcgaggagaucgacggcgucaagcucgaguccacccgcaucuaccagauccucgccaucuacuccaccgucgccuccucccucguccucgucgucucccucggcgccaucuccuucuggaugugcuccaacggcucccuccagugccgcaucugcaucuga

SEQ ID NO: 109777 - RNA, 1701 nt, Artificial Sequence; identical to SEQ ID NO: 98705
  derived and/or modified CDS sequence (opt2) from hemagglutinin__InfluenzaA__BAJ39998

SEQ ID NO: 109778 - RNA, 1701 nt, Artificial Sequence
  derived and/or modified CDS sequence (opt2) from hemagglutinin__InfluenzaA__BAJ39999
augaaggccauccucgucguccuccucuacaccuucgccaccgccaacgccgacacccucugcaucggcuaccacgccaacaacuccaccgacaccgucgacaccguccucgagcgcaacgucaccgucacccacuccgucaaccuccucgaggacaagcacaacggcaagcucugcaagcuccgcggcgucgccccccuccaccucggcaagugcaacaucgccggcuggauccucggcaaccccgagugcgagucccucuccaccgccuccuccugguccuacaucgucgagaccuccuccuccgacaacggcaccugcuaccccggcgacuucaucgacuacgaggagcuccgcgagcagcucuccuccgucuccuccuucgagcgcuucgagaucuuccccaagaccuccuccuggcccaaccacgacuccaacaagggcgucaccgccgccugcccccacgccggcgccaaguccuucuacaagaaccucaucuggcucgucaagaagggcaacuccuaccccaagcucuccaaguccuacaucaacgacaagggcaaggagguccucguccucuggggcauccaccaccccuccaccuccgccgaccagcagucccucuaccagaacgccgacaccuacgucuucgucggcaccucccgcuacuccaagaaguucaagcccgagaucgccauccgccccaagguccgcgaccaggagggccgcaugaacuacuacuggacccucgucgagcccggcgacaagaucaccuucgaggccaccggcaaccucgucgucccccgcuacgccuucgccauggagcgcaacgccggcuccggcaucaucaucuccgacacccccguccacgacugcaacaccaccugccagacccccaagggcgccaucaacaccucccuccccuuccagaacauccaccccaucaccaucggcaagugccccaaguacgucaaguccaccaagcuccgccucgccaccggccuccgcaacguccccuccauccagucccgcggccucuucggcgccaucgccggcuucaucgagggcggcuggaccggcauggucgacggcugguacggcuaccaccaccagaacgagcagggcuccggcuacgccgccgaccucaaguccacccagaacgccaucgacgagaucaccaacaaggucaacuccgucaucgagaagaugaacacccaguucaccgccgucggcaaggaguucaaccaccucgagaagcgcaucgagaaccucaacaagaaggucgacgacggcuuccucgacaucuggaccuacaacgccgagcuccucguccuccucgagaacgagcgcacccucgacuaccacgacuccaacgucaagaaccucuacgagaagguccgcucccagcucaagaacaacgccaaggagaucggcaacggcugcuucgaguucuaccacaagugcgacaacaccugcauggaguccgucaagaacggcaccuacgacuaccccaaguacuccgaggaggccaagcucaaccgcgaggagaucgacggcgucaagcucgaguccacccgcaucuaccagauccucgccaucuacuccaccgucgccuccucccucguccucgucgucucccucggcgccaucuccuucuggaugugcuccaacggcucccuccagugccgcaucugcaucuga

SEQ ID NO: 109779 - RNA, 1701 nt, Artificial Sequence
  derived and/or modified CDS sequence (opt2) from hemagglutinin__InfluenzaA__BAJ40000
augaagaccauccucgucguccuccucuacaccuucgccaccgccaacgccgacacccucugcaucggcuaccacgccaacaacuccaccgacaccgucgacaccguccucgagaagaacgucaccgucacccacuccgucaaccuccucgaggacaagcacaacggcaagcucugcaagcuccgcggcgucgccccccuccaccucggcaagugcaacaucgccggcuggauccucggcaaccccgagugcgagucccucuccaccgccuccuccugguccuacaucgucgagaccuccuccuccgacaacggcaccugcuaccccggcgacuucaucgacuacgaggagcuccgcgagcagcucuccuccgucuccuccuucgagcgcuucgagaucuuccccaagaccuccuccuggcccaaccacgacuccaacaagggcgucaccgccgccugcccccacgccggcgccaaguccuucuacaagaaccucaucuggcucgucaagaagggcaacuccuaccccaagcucuccaaguccuacaucaacgacaagggcaaggagguccucguccucuggggcauccaccaccccuccaccuccgccgaccagcagucccucuaccagaacgccgacaccuacgucuucgucggcaccucccgcuacuccaagaaguucaagcccgagaucgccauccgccccaagguccgcgaccaggagggccgcaugaacuacuacuggacccucgucgagcccggcgacaagaucaccuucgaggccaccggcaaccucgucgucccccgcuacgccuucgccauggagcgcaacgccggcuccggcaucaucaucuccgacacccccguccacgacugcaacaccaccugccagacccccaagggcgccaucaacaccucccuccccuuccagaacauccaccccaucaccaucggcaagugccccaaguacgucaaguccaccaagcuccgccucgccaccggccuccgcaacguccccuccauccagucccgcggccucuucggcgccaucgccggcuucaucgagggcggcuggaccggcauggucgacggcugguacggcuaccaccaccagaacgagcagggcuccggcuacgccgccgaccucaaguccacccagaacgccaucgacgagaucaccaacaaggucaacuccgucaucgagaagaugaacacccaguucaccgccgucggcaaggaguucaaccaccucgagaagcgcaucgagaaccucaacaagaaggucgacgacggcuuccucgacaucuggaccuacaacgccgagcuccucguccuccucgagaacgagcgcacccucgacuaccacgacuccaacgucaagaaccucuacgagaagguccgcucccagcucaagaacaacgccaaggagaucggcaacggcugcuucgaguucuaccacaagugcgacaacaccugcauggaguccgucaagaacggcaccuacgacuaccccaaguacuccgaggaggccaagcucaaccgcgaggagaucgacggcgucaagcucgaguccacccgcaucuaccagauccucgccaucuacuccaccgucgccuccucccucguccucgucgucucccucggcgccaucuccuucuggaugugcuccaacggcucccuccagugccgcaucugcaucuga

SEQ ID NO: 109780 - RNA, 1701 nt, Artificial Sequence; identical to SEQ ID NO: 103715
  derived and/or modified CDS sequence (opt2) from hemagglutinin__InfluenzaA__BAJ40001

SEQ ID NO: 109781 - RNA, 1701 nt, Artificial Sequence; identical to SEQ ID NO: 98705
  derived and/or modified CDS sequence (opt2) from hemagglutinin__InfluenzaA__BAJ40002

SEQ ID NO: 109782 - RNA, 1701 nt, Artificial Sequence; identical to SEQ ID NO: 103715
  derived and/or modified CDS sequence (opt2) from hemagglutinin__InfluenzaA__BAJ40003

SEQ ID NO: 109783 - RNA, 1701 nt, Artificial Sequence
  derived and/or modified CDS sequence (opt2) from hemagglutinin__InfluenzaA__BAJ40004
augaaggccauccucgucguccuccucuacaccuucgccaccgccaacgccgacacccucugcaucggcuaccacgccaacaacuccaccgacaccgucgacaccguccucgagaagaacgucaccgucacccacuccgucaaccuccucgaggacaagcacaacggcaagcucugcaagcuccgcggcgucgccccccuccaccucggcaagugcaacaucgccggcuggauccucggcaaccccgagugcgagucccucuccaccgccuccuccugguccuacaucgucgagaccuccuccuccgacaacggcaccugcuaccccggcgacuucaucgacuacgaggagcuccgcgagcagcucuccuccgucuccuccuucgagcgcuucgagaucuuccccaagaccuccuccuggcccaaccacgacuccaacaagggcgagaccgccgccugcccccacgccggcgccaaguccuucuacaagaaccucaucuggcucgucaagaagggcaacuccuaccccaagcucuccaaguccuacaucaacgacaagggcaaggagguccucguccucuggggcauccaccaccccuccaccuccgccgaccagcagucccucuaccagaacgccgacgccuacgucuucgucggcaccucccgcuacuccaagaaguucaagcccgagaucgccauccgccccaagguccgcgaccaggagggccgcaugaacuacuacuggacccucgucgagcccggcgacaagaucaccuucgaggccaccggcaaccucgucgucccccgcuacgccuucgccauggagcgcaacgccggcuccggcaucaucaucuccgacacccccguccacgacugcaacaccaccugccagacccccaagggcgccaucaacaccucccuccccuuccagaacauccaccccaucaccaucggcaagugccccaaguacgucaaguccaccaagcuccgccucgccaccggccuccgcaacguccccuccauccagucccgcggccucuucggcgccaucgccggcuucaucgagggcggcuggaccggcauggucgacggcugguacggcuaccaccaccagaacgagcagggcuccggcuacgccgccgaccucaaguccacccagaacgccaucgacaagaucaccaacaaggucaacuccgucaucgagaagaugaacacccaguucaccgccgucggcaaggaguucaaccaccucgagaagcgcaucgagaaccucaacaagaaggucgacgacggcuuccucgacaucuggaccuacaacgccgagcuccucguccuccucgagaacgagcgcacccucgacuaccacgacuccaacgucaagaaccucuacgagaaggucaagucccagcucaagaacaacgccaaggagaucggcaacggcugcuucgaguucuaccacaagugcgacaacaccugcauggaguccgucaagaacggcaccuacgacuaccccaaguacuccgaggaggccaagcucaaccgcgagaagaucgacggcgucaagcucgaguccacccgcaucuaccagauccucgccaucuacuccaccgucgccuccucccucguccucgucgucucccucggcgccaucuccuucuggaugugcuccaacggcucccuccagugccgcaucugcaucuga

SEQ ID NO: 109784 - RNA, 1701 nt, Artificial Sequence
  derived and/or modified CDS sequence (opt2) from hemagglutinin__InfluenzaA__BAJ40006
augaaggccauccucgucguccuccucuacaccuucgccaccgccaacgccgacacccucugcaucggcuaccacgccaacaacuccaccgacaccgucgacaccguccucgagaagaacgucaccgucacccacuccgucaaccuccucgaggacaagcacaacggcaagcucugcaagcuccgcggcgucgccccccuccaccucggcaagugcaacaucgccggcuggauccucggcaaccccgagugcgagucccucuccaccgccuccuccugguccuacaucgucgagaccuccuccuccgacaacggcaccugcuaccccggcgacuucaucgacuacgaggagcuccgcgagcagcucuccuccgucuccuccuucgagcgcuucgagaucuuccccaagaccuccuccuggcccaaccacgacuccaacaagggcgucaccgccgccugcccccacgccggcgccaaguccuucuacaagaaccucaucuggcucgucaagaagggcaacuccuaccccaagcucuccaaguccuacaucaacgacaagggccgcgagguccucguccucuggggcauccaccaccccuccaccuccgccgaccagcagucccucuaccagaacgccgacaccuacgucuucgucggcaccucccgcuacuccaagaaguucaagcccgagaucgccauccgccccaagguccgcgaccaggagggccgcaugaacuacuacuggacccucgucgagcccggcgacaagaucaccuucgaggccaccggcaaccucgucgucccccgcuacgccuucgccauggagcgcaacgccggcuccggcaucaucaucuccgacacccccguccacgacugcaacaccaccugccagacccccaagggcgccaucaacaccucccuccccuuccagaacauccaccccaucaccaucggcaagugccccaaguacgucaaguccaccaagcuccgccucgccaccggccuccgcaacguccccuccauccagucccgcggccucuucggcgccaucgccggcuucaucgagggcggcuggaccggcauggucgacggcugguacggcuaccaccaccagaacgagcagggcuccggcuacgccgccgaccucaaguccacccagaacgccaucgacgagaucaccaacaaggucaacuccgucaucgagaagaugaacacccaguucaccgccgucggcaaggaguucaaccaccucgagaagcgcaucgagaaccucaacaagaaggucgacgacggcuuccucgacaucuggaccuacaacgccgagcuccucguccuccucgagaacgagcgcacccucgacuaccacgacuccaacgucaagaaccucuacgagaagguccgcucccagcucaagaacaacgccaaggagaucggcaacggcugcuucgaguucuaccacaagugcgacaacaccugcauggaguccgucaagaacggcaccuacgacuaccccaaguacuccgaggaggccaagcucaaccgcgaggagaucgacggcgucaagcucgaguccacccgcaucuaccagauccucgccaucuacuccaccgucgccuccucccucguccucgucgucucccucggcgccaucuccuucuggaugugcuccaacggcucccuccagugccgcaucugcaucuga

SEQ ID NO: 109785 - RNA, 1701 nt, Artificial Sequence; identical to SEQ ID NO: 98705
  derived and/or modified CDS sequence (opt2) from hemagglutinin__InfluenzaA__BAJ40007

SEQ ID NO: 109786 - RNA, 1701 nt, Artificial Sequence
  derived and/or modified CDS sequence (opt2) from hemagglutinin__InfluenzaA__BAJ40008
augaaggccauccucgucguccuccucuacaccuucgccaccgccaacgccgacacccucugcaucggcuaccacgccaacaacuccaccgacaccgucgacaccguccucgagaagaacgucaccgucacccacuccgucaaccuccucgaggacaagcacaacggcaagcucugcaagcuccgcggcgucgccccccuccaccucggcaagugcaacaucgccggcuggauccucggcaaccccgagugcgagucccucuccaccgccuccuccugguccuacaucgucgagaccuccuccuccgacaacggcaccugcuaccccggcgacuucaucgacuacgaggagcuccgcgagcagcucuccuccgucuccuccuucgagcgcuucgagaucuuccccaagaccuccuccuggcccaaccacgacuccaacaagggcgucaccgccgccugcccccacgccggcgccaaguccuucuacaagaaccucaucuggcucgucaagaagggcaacuccuaccccaagcucuccaaguccuacaucaacgacaagggcaaggagguccucguccucuggggcauccaccaccccuccaccuccgccgaccagcagucccucuaccagaacgccgacgccuacgucuucgucggcaccucccgcuacuccaagaaguucaagcccgagaucgccauccgccccaagguccgcgaccaggagggccgcaugaacuacuacuggacccucgucgagcccggcgacaagaucaccuucgaggccaccggcaaccucgucgucccccgcuacgccuucgccauggagcgcaacgccggcuccggcaucaucaucuccgacacccccguccacgacugcaacaccaccugccagacccccaagggcgccaucaacaccucccuccccuuccagaacauccaccccaucaccaucggcaagugccccaaguacgucaaguccaccaagcuccgccucgccaccggccuccgcaacguccccuccauccagucccgcggccucuucggcgccaucgccggcuucaucgagggcggcuggaccggcauggucgacggcugguacggcuaccaccaccagaacgagcagggcuccggcuacgccgccgaccucaaguccacccagaacgccaucgacgagaucaccaacaaggucaacuccgucaucgagaagaugaacacccaguucaccgccgucggcaaggaguucaaccaccucgagaagcgcaucgagaaccucaacaagaaggucgacgacggcuuccucgacaucuggaccuacaucgccgagcuccucguccuccucgagaacgagcgcacccucgacuaccacgacuccaacgucaagaaccucuacgagaagguccgcucccagcucaagaacaacgccaaggagaucggcaacggcugcuucgaguucuaccacaagugcgacaacaccugcauggaguccgucaagaacggcaccuacgacuaccccaaguacuccgaggaggccaagcucaaccgcgaggagaucgacggcgucaagcucgaguccacccgcaucuaccagauccucgccaucuacuccaccgucgccuccucccucguccucgucgucucccucggcgccaucuccuucuggaugugcuccaacggcucccuccagugccgcaucugcaucuga

SEQ ID NO: 109787 - RNA, 1701 nt, Artificial Sequence
  derived and/or modified CDS sequence (opt2) from hemagglutinin__InfluenzaA__BAJ40009
augaaggccauccucgucguccuccucuacaccuucgccaccgccaacgccgacacccucugcaucggcuaccacgccaacaacuccaccgacaccgucgacaccguccucgagaagaacgucaccgucacccacuccgucaaccuccucgaggacaagcacaacggcaagcucugcaagcuccgcggcgucgccccccuccaccucggcaagugcaacaucgccggcuggauccucggcaaccccgagugcgagucccucuccaccgccuccuccugguccuacaucgucgagaccuccuccuccgacaacggcaccugcuaccccggcgacuucaucgacuacgaggagcuccgcgagcagcucuccuccgucuccuccuucgagcgcuucgagaucuuccccaagaccuccuccuggcccaaccacgacuccgacaagggcgucaccgccgccugcccccacgccggcgccaaguccuucuacaagaaccucaucuggcucgucaagaagggcaacuccuaccccaagcucuccaaguccuacaucaacgacaagggcaaggagguccucguccucuggggcauccaccaccccuccaccuccgccgaccagcagucccucuaccagaacgccgacgccuacgucuucgucggcaccucccgcuacuccaagaaguucaagcccgagaucgccauccgccccaagguccgcgaccaggagggccgcauggacuacuacuggacccucgucgagcccggcgacaagaucaccuucgaggccaccggcaaccucgucgucccccgcuacgccuucgccauggagcgcaacgccggcuccggcaucaucaucuccgacacccccguccacaacugcaacaccaccugccagacccccaagggcgccaucaacaccucccuccccuuccagaacauccaccccaucaccaucggcaagugccccaaguacgucaaguccaccaagcuccgccucgccaccggccuccgcaacguccccuccauccagucccgcggccucuucggcgccaucgccggcuucaucgagggcggcuggaccggcauggucgacggcugguacggcuaccaccaccagaacgagcagggcuccggcuacgccgccgaccucaaguccacccagaacgccaucgacaagaucaccaacaaggucaacuccgucaucgagaagaugaacacccaguucaccgccgucggcaaggaguucaaccaccucgagaaccgcaucgagaaccucaacaagaaggucgacgacggcuuccucgacaucuggaccuacaacgccgagcuccucguccuccucgagaacgagcgcacccucgacuaccacgacuccaacgucaagaaccucuacgagaagguccgcucccagcucaagaacaacgccaaggagaucggcaacggcugcuucgaguucuaccacaagugcgacaacaccugcauggaguccgucaagaacggcaccuacgacuaccccaaguacuccgaggaggccaagcucaaccgcgaggagaucgacggcgucaagcucgaguccacccgcaucuaccagauccucgccaucuacuccaccgucgccuccucccucguccucgucgucucccucggcgccaucuccuucuggaugugcuccaacggcucccuccagugccgcaucugcaucuga

SEQ ID NO: 109788 - RNA, 1701 nt, Artificial Sequence
  derived and/or modified CDS sequence (opt2) from hemagglutinin__InfluenzaA__BAJ40010
augaaggccauccucgucguccuccucuacaccuucgccaccgccaacgccgacacccucugcaucggcuaccacgccaacaacuccaccgacaccgucgacaccguccucgagaagaacgucaccgucacccacuccgucaaccuccucgaggacaagcacaacggcaagcucugcaagcuccgcggcgucgccccccuccaccucggcaagugcaacaucgccggcuggauccucggcaaccccgagugcgagcuccucuccaccgccuccuccugguccuacaucgucgagaccuccuccuccgacaacggcaccugcuaccccggcgacuucaucgacuacgaggagcuccgcgagcagcucuccuccgucuccuccuucgagcgcuucgagaucuuccccaagaccuccuccuggcccaaccacgacuccgacaagggcgucaccgccgccugcccccacgccggcgccaaguccuucuacaagaaccucaucuggcucgucaagaagggcaacuccuaccccaagcucuccaaguccuacaucaacgacaagggcaaggagguccucguccucuggggcauccaccaccccuccaccuccgccgaccagcagucccucuaccagaacgccgacgccuacgucuucgucggcaccucccgcuacuccaagaaguucaagcccgagaucgccauccgccccaagguccgcgaccaggagggccgcauggacuacuacuggacccucgucgagcccggcgacaagaucaccuucgaggccaccggcaaccucgucgucccccgcuacgccuucgccauggagcgcaacgccggcuccggcaucaucaucuccgacacccccguccacaacugcaacaccaccugccagacccccaagggcgccaucaacaccucccuccccuuccagaacauccaccccaucaccaucggcaagugccccaaguacgucaaguccaccaagcuccgccucgccaccggccuccgcaacguccccuccauccagucccgcggccucuucggcgccaucgccggcuucaucgagggcggcuggaccggcauggucgacggcugguacggcuaccaccaccagaacgagcagggcuccggcuacgccgccgaccucaaguccacccagaacgccaucgacaagaucaccaacaaggucaacuccgucaucgagaagaugaacacccaguucaccgccgucggcaaggaguucaaccaccucgagaagcgcaucgagaaccucaacaagaaggucgacgacggcuuccucgacaucuggaccuacaacgccgagcuccucguccuccucgagaacgagcgcacccucgacuaccacgacuccaacgucaagaaccucuacgagaagguccgcucccagcucaagaacaacgccaaggagaucggcaacggcugcuucgaguucuaccacaagugcgacaacaccugcauggaguccgucaagaacggcaccuacgacuaccccaaguacuccgaggaggccaagcucaaccgcgaggagaucgacggcgucaagcucgaguccacccgcaucuaccagauccucgccaucuacuccaccgucgccuccucccucguccucgucgucucccucggcgccaucuccuucuggaugugcuccaacggcucccuccagugccgcaucugcaucuga

SEQ ID NO: 109789 - RNA, 1701 nt, Artificial Sequence; identical to SEQ ID NO: 109778
  derived and/or modified CDS sequence (opt2) from hemagglutinin__InfluenzaA__BAJ40011

SEQ ID NO: 109790 - RNA, 1701 nt, Artificial Sequence
  derived and/or modified CDS sequence (opt2) from hemagglutinin__InfluenzaA__BAJ40012
augaaggccauccucgucguccuccucuacaccuucgccaccgccaacgccgacacccucugcaucggcuaccacgccaacaacuccaccgacaccgucgacaccguccucgagaagaacgucaccgucacccacuccgucaaccuccucgaggacaagcacaacggcaagcucugcaagcuccgcggcgucgccccccuccaccucggcaagugcaacaucgccggcuggauccucggcaaccccgagugcgagucccucuccaccgccuccuccugguccuacaucgucgagaccuccuccuccgacaacggcaccugcuaccccggcgacuucaucgacuacgaggagcuccgcgagcagcucuccuccgucuccuccuucgagcgcuucgagaucuuccccaagaccuccuccuggcccaaccacgacuccaacaagggcgucaccgccgccugcccccacgccggcgccaaguccuucuacaagaaccucaucuggcucgucaagaagggcaacuccuaccccaagcucuccaaguccuacaucaacgacaagggcaaggagguccucguccucuggggcauccaccaccccuccaccuccgccgaccagcagucccucuaccagaacgccgacgccuacgucuucgucggcaccucccgcuacuccaagaaguucaagcccgagaucgccauccgccccaagguccgcgaccaggagggccgcaugaacuacuacuggacccucgucgagcccggcgacaagaucaccuucgaggccaccggcaaccucgucgucccccgcuacgccuucgccauggagcgcaacgccggcuccggcaucaucaucuccgacacccccguccacgacugcaacaccaccugccagacccccaagggcgccaucaacaccucccuccccuuccagaacauccaccccaucaccaucggcaagugccccaaguacgucaaguccaccaagcuccgccucgccaccggccuccgcaacguccccuccauccagucccgcggccucuucggcgccaucgccggcuucaucgagggcggcuggaccggcauggucgacggcugguacggcuaccaccaccagaacgagcagggcuccggcuacgccgccgaccucaaguccacccagaacgccaucgacgagaucaccaacaaggucaacuccgucaucgagaagaugaacacccaguucaccgccgucggcaaggaguucaaccaccucgagaagcgcaucgagaaccucaacaagaaggucgacgacggcuuccucgacaucuggaccuacaacgccgagcuccucguccuccucgagaacgagcgcacccucgacuaccacgacuccaacgucaagaaccucuacgagaagguccgcucccagcucaagaacaacgccaaggagaucggcaacggcugcuucgaguucuaccacaagugcgacaacaccugcauggaguccgucaagaacggcaccuacgacuaccccaaguacuccgaggaggccaagcucaaccgcgaggagaucgacggcaucaagcucgaguccacccgcaucuaccagauccucgccaucuacuccaccgucgccuccucccucguccucgucgucucccucggcgccaucuccuucuggaugugcuccaacggcucccuccagugccgcaucugcaucuga

SEQ ID NO: 109791 - RNA, 1701 nt, Artificial Sequence; identical to SEQ ID NO: 109778
  derived and/or modified CDS sequence (opt2) from hemagglutinin__InfluenzaA__BAJ40013

SEQ ID NO: 109792 - RNA, 1701 nt, Artificial Sequence; identical to SEQ ID NO: 109778
  derived and/or modified CDS sequence (opt2) from hemagglutinin__InfluenzaA__BAJ40014

SEQ ID NO: 109793 - RNA, 1701 nt, Artificial Sequence
  derived and/or modified CDS sequence (opt2) from hemagglutinin__InfluenzaA__BAJ40015
augaaggccauccucgucguccuccucuacaccuucgccaccgccaacgccgacacccucugcaucggcuaccacgccaacaacuccaccgacaccgucgacaccguccucgagaagaacgucaccgucacccacuccgucaaccuccucgaggacaagcacaacggcaagcucugcaagcuccgcggcgucgccccccuccaccucggcaagugcaacaucgccggcuggauccucggcaaccccgagugcgagucccucuccaccgccuccuccugguccuacaucgucgagaccuccuccuccgacaacggcaccugcuaccccggcgacuucaucgacuacgaggagcuccgcgagcagcucuccuccgucuccuccuucgagcgcuucgagaucuuccccaacaccuccuccuggcccaaccacgacuccaacaagggcgucaccgccgccugcccccacgccggcgccaaguccuucuacaagaaccucaucuggcucgucaagaagggcaacuccuaccccaagcucuccaaguccuacaucaacgacaagggcaaggagguccucguccucuggggcauccaccaccccuccaccuccgccgaccagcagucccucuaccagaacgccgacaccuacgucuucgucggcaccucccgcuacuccaagaaguucaagcccgagaucgccauccgccccaagguccgcgaccaggagggccgcaugaacuacuacuggacccucgucgagcccggcgacaagaucaccuucgaggccaccggcaaccucgucgucccccgcuacgccuucgccauggagcgcaacgccggcuccggcaucaucaucuccgacacccccguccacgacugcaacaccaccugccagacccccaagggcgccaucaacaccucccuccccuuccagaacauccaccccaucaccaucggcaagugccccaaguacgucaaguccaccaagcuccgccucgccaccggccuccgcaacguccccuccauccagucccgcggccucuucggcgccaucgccggcuucaucgagggcggcuggaccggcauggucgacggcugguacggcuaccaccaccagaacgagcagggcuccggcuacgccgccgaccucaaguccacccagaacgccaucgacgagaucaccaacaaggucaacuccgucaucgagaagaugaacacccaguucaccgccgucggcaaggaguucaaccaccucgagaagcgcaucgagaaccucaacaagaaggucgacgacggcuuccucgacaucuggaccuacaacgccgagcuccucguccuccucgagaacgagcgcacccucgacuaccacgacuccaacgucaagaaccucuacgagaagguccgcucccagcucaagaacaacgccaaggagaucggcaacggcugcuucgaguucuaccacaagugcgacaacaccugcauggaguccgucaagaacggcaccuacgacuaccccaaguacuccgaggaggccaagcucaaccgcgaggagaucgacggcgucaagcucgaguccacccgcaucuaccagauccucgccaucuacuccaccgucgccuccucccucguccucgucgucucccucggcgccaucuccuucuggaugugcuccaacggcucccuccagugccgcaucugcaucuga

SEQ ID NO: 109794 - RNA, 1701 nt, Artificial Sequence; identical to SEQ ID NO: 109778
  derived and/or modified CDS sequence (opt2) from hemagglutinin__InfluenzaA__BAJ40016

SEQ ID NO: 109795 - RNA, 1701 nt, Artificial Sequence
  derived and/or modified CDS sequence (opt2) from hemagglutinin__InfluenzaA__BAJ40017
augaaggccauccucgucguccuccucuacaccuucgccaccgccaacgccgacacccucugcaucggcuaccacgccaacaacuccaccgacaccgucgacaccguccucgagaagaacgucaccgucacccacuccgucaaccuccucgaggacaagcacaacggcaagcucugcaagcuccgcggcgucgccccccuccaccucggcaagugcaacaucgccggcuggauccucggcaaccccgagugcgagucccucuccaccgccuccuccugguccuacaucgucgagaccuccaacuccgacaacggcaccugcuaccccggcgacuucaucgacuacgaggagcuccgcgagcagcucuccuccgucuccuccuucgagcgcuucgagaucuuccccaagaccuccuccuggcccaaccacgacuccaacaagggcgucaccgccgccugcccccacgccggcgccaaguccuucuacaagaaccucaucuggcucgucaagaagggcaacuccuaccccaagcucuccaaguccuacaucaacgacaagggcaaggagguccucguccucuggggcauccaccaccccuccaccuccgccgaccagcagucccucuaccagaacgccgacgccuacgucuucgucggcaccucccgcuacuccaagaaguucaagcccgagaucgccauccgccccaagguccgcgaccaggagggccgcaugaacuacuacuggacccucgucgagcccggcgacaagaucaccuucgaggccaccggcaaccucgucgucccccgcuacgccuucgccauggagcgcaacgccggcuccggcaucaucaucuccgacacccccguccacgacugcaacaccaccugccagacccccaagggcgccaucaacaccucccuccccuuccagaacauccaccccaucaccaucggcaagugccccaaguacgucaaguccaccaagcuccgccucgccaccggccuccgcaacguccccuccauccagucccgcggccucuucggcgccaucgccggcuucaucgagggcggcuggaccggcauggucgacggcugguacggcuaccaccaccagaacgagcagggcuccggcuacgccgccgaccucaaguccacccagaaggccaucgacgagaucaccaacaaggucaacuccgucaucgagaagaugaacacccaguucaccgccgucggcaaggaguucaaccaccucgagaagcgcaucgagaaccucaacaagaaggucgacgacggcuuccucgacaucuggaccuacaacgccgagcuccucguccuccucgagaacgagcgcacccucgacuaccacgacuccaacgucaagaaccucuacgagaagguccgcucccagcucaagaacaacgccaaggagaucggcaacggcugcuucgaguucuaccacaagugcgacaacaccugcauggaguccgucaagaacggcaccuacgacuaccccaaguacuccgaggaggccaagcucaaccgcgaggagaucgacggcgucaagcucgaguccacccgcaucuaccagauccucgccaucuacuccaccgucgccuccucccucguccucgucgucucccucggcgccaucuccuucuggaugugcuccaacggcucccuccagugccgcaucugcaucuga

SEQ ID NO: 109796 - RNA, 1701 nt, Artificial Sequence; identical to SEQ ID NO: 99869
  derived and/or modified CDS sequence (opt2) from hemagglutinin__InfluenzaA__BAJ40018

SEQ ID NO: 109797 - RNA, 1701 nt, Artificial Sequence; identical to SEQ ID NO: 109784
  derived and/or modified CDS sequence (opt2) from hemagglutinin__InfluenzaA__BAJ40019

SEQ ID NO: 109798 - RNA, 1701 nt, Artificial Sequence; identical to SEQ ID NO: 109784
  derived and/or modified CDS sequence (opt2) from hemagglutinin__InfluenzaA__BAJ40020

SEQ ID NO: 109799 - RNA, 1701 nt, Artificial Sequence
  derived and/or modified CDS sequence (opt2) from hemagglutinin__InfluenzaA__BAJ40021
augaaggccauccucgucguccuccucuacaccuucgccaccgccaacgccgacacccucugcaucggcuaccacgccaacaacuccaccgacaccgucgacaccguccucgagaagaacgucaccgucacccacuccgucaaccuccucgaggacaagcacaacggcaagcucugcaagcuccgcggcgucgccccccuccaccucggcaagugcaacaucgccggcuggauccucggcaaccccgagugcgagucccucuccaccgccuccuccugguccuacaucgucgagaccuccuccuccgacaacggcaccugcuaccccggcgacuucaucgacuacgaggagcuccgcgagcagcucuccuccgucuccuccuucgagcgcuucgagaucuuccccaagaccuccuccuggcccaaccacgacuccaacaagggcgagaccgccgccugcccccacgccggcgccaaguccuucuacaagaaccucaucuggcucgucaagaagggcaacuccuaccccaagcucuccaaguccuacaucaacgacaagggcaaggagguccucguccucuggggcauccaccaccccuccaccuccgccgaccagcagucccucuaccagaacgccgacgccuacgucuucgucggcaccucccgcuacuccaagaaguucaagcccgagaucgccauccgccccaagguccgcgaccaggagggccgcaugaacuacuacuggacccucgucgagcccggcgacaagaucaccuucgaggccaccggcaaccucgucgucccccgcuacgccuucgccauggagcgcaacgccggcuccggcaucaucaucuccgacacccccguccacgacugcaacaccaccugccagacccccaagggcgccaucaacaccucccuccccuuccagaacauccaccccaucaccaucggcaagugccccaaguacgucaaguccaccaagcuccgccucgccaccggccuccgcaacguccccuccauccagucccgcggccucuucggcgccaucgccggcuucaucgagggcggcuggaccggcauggucgacggcugguacggcuaccaccaccagaacgagcagggcuccggcuacgccgccgaccucaaguccacccagaacgccaucgacaagaucaccaacaaggucaacuccgucaucgagaagaugaacacccaguucaccgccgucggcaaggaguucaaccaccucgagaagcgcaucgagaaccucaacaagaaggucgacgacggcuuccucgacaucuggaccuacaacgccgagcuccucguccuccucgagaacgagcgcacccucgacuaccacgacuccaacgucaagaaccucuacgagaagguccgcucccagcucaagaacaacgccaaggagaucggcaacggcugcuucgaguucuaccacaagugcgacaacaccugcauggaguccgucaagaacggcaccuacgacuaccccaaguacuccgaggaggccaagcucaaccgcgaggagaucgacggcgucaagcucgaguccacccgcaucuaccagauccucgccaucuacuccaccgucgccuccucccucguccucgucgucucccucggcgccaucuccuucuggaugugcuccaacggcucccuccagugccgcaucugcaucuga

SEQ ID NO: 109800 - RNA, 1701 nt, Artificial Sequence; identical to SEQ ID NO: 99869
  derived and/or modified CDS sequence (opt2) from hemagglutinin__InfluenzaA__BAJ40023

SEQ ID NO: 109801 - RNA, 1701 nt, Artificial Sequence
  derived and/or modified CDS sequence (opt2) from hemagglutinin__InfluenzaA__BAJ40024
augaaggccauccucgucguccuccucuacaccuucgccaccgccaacgccgacacccucugcaucggcuaccacgccaacaacuccaccgacaccgucgacaccguccucgagaagaacgucaccgucacccacuccgucaaccuccucgaggacaagcacaacggcaagcucugcaagcuccgcggcgucgccccccuccaccucggcaagugcaacaucgccggcuggauccucggcaaccccgagugcgagucccucuccaccgccuccuccugguccuacaucgucgagaccuccuccuccgacaacggcaccugcuaccccggcgacuucaucgacuacgaggagcuccgcgagcagcucuccuccgucuccuccuucgagcgcuucgagaucuuccccaagaccuccuccuggcccaaccacgacuccaacaagggcgucaccgccgccugcccccacgccggcgccaaguccuucuacaagaaccucaucuggcucgucaagaagggcaacuccuaccccaagcucuccaaguccuacaucaacgacaagggcaaggagguccucguccucuggggcauccaccaccccuccaccuccgccgaccagcagucccucuaccagaacgccgacaccuacgucuucgucggcaccucccgcuacuccaagaaguucaagcccgagaucgccauccgccccaagguccgcgaccaggagggccgcaugaacuacuacuggacccucgucgagcccggcgacaagaucaccuucgaggccaccggcaaccucgucgucccccgcuacgccuucgccauggagcgcaacgccggcuccggcaucaucaucuccgacacccccguccacgacugcaacaccaccugccagacccccaagggcgccaucaacaccucccuccccuuccagaacauccaccccaucaccaucggcaagugccccaaguacgucaaguccaccaagcuccgccucgccaccggccuccgcaacguccccuccauccagucccgcggccucuucggcgccaucgccggcuucaucgagggcggcuggaccggcauggucgacggcugguacggcuaccaccaccagaacgagcagggcuccggcuacgccgccgaccucaaguccacccagaacgccaucgacgagaucaccaacaaggucaacuccgucaucgagaagaugaacacccaguucaccgccgucggcaaggaguucaaccaccucgagaagcgcaucgagaaccucaacaagaaggucgacgacggcuuccucgacaucuggaccuacaacgccgagcuccucguccuccucgagaacgagcgcacccucgacuaccacgacuccaacgucaagaaccucuacgagaagguccgcucccagcucaagaacaacgccaaggagaucggcaacggcugcuucgaguucuaccacaagugcgacaacaccugcauggaguccgucaagaacggcaccuacgacuaccccaaguacuccgaggaggccaagcucaaccgcgagaagaucgacggcgucaagcucgaguccacccgcaucuaccagauccucgccaucuacuccaccgucgccuccucccucguccucgucgucucccucggcgccaucuccuucuggaugugcuccaacggcucccuccagugccgcaucugcaucuga

SEQ ID NO: 109802 - RNA, 1701 nt, Artificial Sequence; identical to SEQ ID NO: 109778
  derived and/or modified CDS sequence (opt2) from hemagglutinin__InfluenzaA__BAJ40025

SEQ ID NO: 109803 - RNA, 1701 nt, Artificial Sequence; identical to SEQ ID NO: 99869
  derived and/or modified CDS sequence (opt2) from hemagglutinin__InfluenzaA__BAJ40026

SEQ ID NO: 109804 - RNA, 1701 nt, Artificial Sequence
  derived and/or modified CDS sequence (opt2) from hemagglutinin__InfluenzaA__BAJ40027
augaaggccauccucgucguccuccucuacaccuucgccaccgccaacgccgacacccucugcaucggcuaccacgccaacaacuccaccgacaccgucgacaccguccucgagaagaacgucaccgucacccacuccgucaaccuccucgaggacaagcacaacggcaagcucugcaagcuccgcggcgucgccccccuccaccucggcaagugcaacaucgccggcuggauccucggcaaccccgagugcgagucccucuccaccgccuccuccugguccuacaucgucgagaccuccuccuccgacaacggcaccugcuaccccggcgacuucaucgacuacgaggagcuccgcgagcagcucuccuccgucuccuccuucgagcgcuucgagaucuuccccaagaccuccuccuggcccaaccacgacuccaacaagggcgagaccgccgccugcccccacgccggcgccaaguccuucuacaagaaccucaucuggcucgucaagaagggcaacuccuaccccaagcucuccaaguccuacaucaacgacaagggcaaggagguccucguccucuggggcauccaccaccccuccaccuccgccgaccagcagucccucuaccagaacgccgacgccuacgucuucgucggcaccucccgcuacuccaagaaguucaagcccgagaucgccauccgccccaagguccgcgaccaggagggccgcaugaacuacuacuggacccucgucgagcccggcgacaagaucaccuucgaggccaccggcaaccucgucgucccccgcuacgccuucgccauggagcgcaacgccggcuccggcaucaucaucuccgacacccccguccacgacugcaacaccaccugccagacccccaagggcgccaucaacaccucccuccccuuccagaacauccaccccaucaccaucggcaagugccccaaguacgucaaguccaccaagcuccgccucgccaccggccuccgcaacguccccuccauccagucccgcggccucuucggcgccaucgccggcuucaucgagggcggcuggaccggcauggucgacggcugguacggcuaccaccaccagaacgagcagggcuccggcuacgccgccgaccucaaguccacccagaacgccaucgacaagaucaccaacaaggucaacuccgucaucgagaagaugaacacccaguucaccgccgucggcaaggaguucaaccaccucgagaagcgcaucgagaaccucaacaagaaggucgacgacggcuuccucgacaucuggaccuacaacgccgagcuccucguccuccucgagaacgagcgcacccucgacuaccacgacuccaacgucaagaaccucuacgagaaggucaagucccagcucaagaacaacgccaaggagaucggcaacggcugcuucgaguucuaccacaagugcgacaacaccugcauggaguccgucaagaacggcaccuacgacuaccccaaguacuccgaggaggccaagcucaaccgcgaggagaucgacggcgucaagcucgaguccacccgcaucuaccagauccucgccaucuacuccaccgucgccuccucccucguccucgucgucucccucggcgccaucuccuucuggaugugcuccaacggcucccuccagugccgcaucugcaucuga

SEQ ID NO: 109805 - RNA, 1701 nt, Artificial Sequence
  derived and/or modified CDS sequence (opt2) from hemagglutinin__InfluenzaA__BAJ40028
augaaggccauccucgucguccuccucuacaccuucgccaccgccaacgccgacacccucugcaucggcuaccacgccaacaacuccaccgacaccgucgacaccguccucgagaagaacgucaccgucacccacuccgucaaccuccucgaggacaagcacaacggcaagcucugcaagcuccgcggcgucgccccccuccaccucggcaagugcaacaucgccggcuggauccucggcaaccccgagugcgagucccucuccaccgccuccuccugguccuacaucgucgagaccuccuccuccgacaacggcaccugcuaccccggcgacuucaucgacuacgaggagcuccgcgagcagcucuccuccgucuccuccuucgagcgcuucgagaucuuccccaagaccuccuccuggcccaaccacgacuccaacaagggcgucaccgccgccugcccccacgccggcgccaaguccuucuacaagaaccucaucuggcucgucaagaagggcaacuccuaccccaagcucuccaaguccuacaucaacgacaagggcaaggagguccucguccucuggggcauccaccaccccuccaccuccgccgaccagcagucccucuaccagaacgccgacgccuacgucuucgucggcaccucccgcuacuccaagaaguucaagcccgagaucgccauccgccccaagguccgcgaccaggagggccgcaugaacuacuacuggacccucgucgagcccggcgacaagaucaccuucgaggccaccggcaaccucgucgucccccgcuacgccuucgccauggagcgcaacgccggcuccggcaucaucaucuccgacacccccguccacgacugcaacaccaccugccagacccccaagggcgccaucaacaccucccuccccuuccagaacauccaccccaucaccaucggcaagugccccaaguacgucaaguccaccaagcuccgccucgccaccggccuccgcaacguccccuccauccagucccgcggccucuucggcgccaucgccgccuucaucgagggcggcuggaccggcauggucgacggcugguacggcuaccaccaccagaacgagcagggcuccggcuacgccgccgaccucaaguccacccagaacgccaucgacaagaucaccaacaaggucaacuccgucaucgagaagaugaacacccaguucaccgccgucggcaaggaguucaaccaccucgagaagcgcaucgagaaccucaacaagaaggucgacgacggcuuccucgacaucuggaccuacaacgccgagcuccucguccuccucgagaacgagcgcacccucgacuaccacgacuccaacgucaagaaccucuacgagaagguccgcucccagcucaagaacaacgccaaggagaucggcaacggcugcuucgaguucuaccacaagugcgacaacaccugcauggaguccgucaagaacggcaccuacgacuaccccaaguacuccgaggaggccaagcucaaccgcgaggagaucgacggcgucaagcucgaguccacccgcaucuaccagauccucgccaucuacuccaccgucgccuccucccucguccucgucgucucccucggcgccaucuccuucuggaugugcuccaacggcucccuccagugccgcaucugcaucuga

SEQ ID NO: 109806 - RNA, 1701 nt, Artificial Sequence; identical to SEQ ID NO: 109778
  derived and/or modified CDS sequence (opt2) from hemagglutinin__InfluenzaA__BAJ40029

SEQ ID NO: 109807 - RNA, 1701 nt, Artificial Sequence
  derived and/or modified CDS sequence (opt2) from hemagglutinin__InfluenzaA__BAJ40030
augaaggccauccucgucguccuccucuacaccuucgccaccgccaacgccgacacccucugcaucggcuaccacgccaacaacuccaccgacaccgucgacaccguccucgagaagaacgucaccgucacccacuccgucaaccuccucgaggacaagcacaacggcaagcucugcaagcuccgcggcgucgccccccuccaccucggcaagugcaacaucgccggcuggauccucggcaaccccgagugcgagucccucuccaccgccuccuccugguccuacaucgucgagaccuccuccuccgacaacggcaccugcuaccccggcgacuucaucgacuacgaggagcucaaggagcagcucuccuccgucuccuccuucgagcgcuucgagaucuuccccaagaccuccuccuggcccaaccacgacuccaacaagggcgucaccgccgccugcccccacgccggcgccaaguccuucuacaagaaccucaucuggcucgucaagaagggcaacuccuaccccaagcucuccaaguccuacaucaacgacaagggccgcgagguccucguccucuggggcauccaccaccccuccaccuccgccgaccagcagucccucuaccagaacgccgacaccuacgucuucgucggcaccucccgcuacuccaagaaguucaagcccgagaucgccauccgccccaagguccgcgaccaggagggccgcaugaacuacuacuggacccucgucgagcccggcgacaagaucaccuucgaggccaccggcaaccucgucgucccccgcuacgccuucgccauggagcgcaacgccggcuccggcaucaucaucuccgacacccccguccacgacugcaacaccaccugccagacccccaagggcgccaucaacaccucccuccccuuccagaacauccaccccaucaccaucggcaagugccccaaguacgucaaguccaccaagcuccgccucgccaccggccuccgcaacguccccuccauccagucccgcggccucuucggcgccaucgccggcuucaucgagggcggcuggaccggcauggucgacggcugguacggcuaccaccaccagaacgagcagggcuccggcuacgccgccgaccucaaguccacccagaacgccaucgacgagaucaccaacaaggucaacuccgucaucgagaagaugaacacccaguucaccgccgucggcaaggaguucaaccaccucgagaagcgcaucgagaaccucaacaagaaggucgacgacggcuuccucgacaucuggaccuacaacgccgagcuccucguccuccucgagaacgagcgcacccucgacuaccacgacuccaacgucaagaaccucuacgagaagguccgcucccagcucaagaacaacgccaaggagaucggcaacggcugcuucgaguucuaccacaagugcgacaacaccugcauggaguccgucaagaacggcaccuacgacuaccccaaguacuccgaggaggccaagcucaaccgcgaggagaucgacggcgucaagcucgaguccacccgcaucuaccagauccucgccaucuacuccaccgucgccuccucccucguccucgucgucucccucggcgccaucuccuucuggaugugcuccaacggcucccuccagugccgcaucugcaucuga

SEQ ID NO: 109808 - RNA, 1701 nt, Artificial Sequence; identical to SEQ ID NO: 98705
  derived and/or modified CDS sequence (opt2) from hemagglutinin__InfluenzaA__BAJ40031

SEQ ID NO: 109809 - RNA, 1701 nt, Artificial Sequence; identical to SEQ ID NO: 109778
  derived and/or modified CDS sequence (opt2) from hemagglutinin__InfluenzaA__BAJ40032

SEQ ID NO: 109810 - RNA, 1701 nt, Artificial Sequence; identical to SEQ ID NO: 109807
  derived and/or modified CDS sequence (opt2) from hemagglutinin__InfluenzaA__BAJ40033

SEQ ID NO: 109811 - RNA, 1701 nt, Artificial Sequence
  derived and/or modified CDS sequence (opt2) from hemagglutinin__InfluenzaA__BAJ40034
augaaggccauccucgucguccuccucuacaccuucgccaccgccaacgccgacacccucugcaucggcuaccacgccaacaacuccaccgacaccgucgacaccguccucgagcgcaacgucaccgucacccacuccgucaaccuccucgaggacaagcacaacggcaagcucugcaagcuccgcggcgucgccccccuccaccucggcaagugcaacaucgccggcuggauccucggcaaccccgagugcgagucccucuccaccgccuccuccugguccuacaucgucgagaccuccuccuccgacaacggcaccugcuaccccggcgacuucaucgacuacgaggagcuccgcgagcagcucuccuccgucuccuccuucgagcgcuucgagaucuuccccaagaccuccuccuggcccaaccacgacuccaacaagggcgucaccgccgccugcccccacgccggcgccaaguccuucuacaagaaccucaucuggcucgucaagaagggcaacuccuaccccaagcucuccaaguccuacaucaacgacaagggcaaggagguccucguccucuggggcauccaccaccccuccaccuccgccgaccagcagucccucuaccagaacgccgacaccuacgucuucgucggcaccucccgcuacuccaagaaguucaagcccgagaucgccauccgccccaagguccgcgaccaggagggccgcaugaacuacuacuggacccucgucgagcccggcgacaagaucaccuucgaggccaccggcaaccucgucgucccccgcuacgccuucgccauggagcgcaacgccggcuccggcaucaucaucuccgacacccccguccacgacugcaacaccaccugccagacccccaagggcgccaucaacaccucccuccccuuccagaacauccaccccaucaccaucggcaagugccccaaguacgucaaguccaccaagcuccgccucgccaccggccuccgcaacguccccuccauccagucccgcggccucuucggcgccaucgccggcuucaucgagggcggcuggaccggcauggucgacggcugguacggcuaccaccaccagaacgagcagggcuccggcuacgccgccgaccucaaguccacccagaacgccaucgacgagaucaccaacaaggucaacuccgucaucgagaagaugaacacccaguucaccgccgucggcaaggaguucaaccaccucgagaagcgcaucgagaaccucaacaagaaggucgacgacggcuuccucgacaucuggaccuacaacgccgagcuccucguccuccucgagaacgagcgcacccucgacuaccacgacuccaacgucaagaaccucuacgagaagguccgcucccagcucaagaacaacgccaaggagaucggcaacggcugcuucgaguucuaccacaagugcgacaacaccugcauggaguccgucaagaacggcaccuacgacuaccccaaguacuccgaggaggccaagcucaaccgcgagaagaucgacggcgucaagcucgaguccacccgcaucuaccagauccucgccaucuacuccaccgucgccuccucccucguccucgucgucucccucggcgccaucuccuucuggaugugcuccaacggcucccuccagugccgcaucugcaucuga

SEQ ID NO: 109812 - RNA, 1701 nt, Artificial Sequence
  derived and/or modified CDS sequence (opt2) from hemagglutinin__InfluenzaA__BAJ40035
augaaggccauccucgucguccuccucuacaccuucgccaccgccaacgccgacacccucugcaucggcuaccacgccaacaacuccaccgacaccgucgacaccguccucgagaagaacgucaccgucacccacuccgucaaccuccucgaggacaagcacaacggcaagcucugcaagcuccgcggcgucgccccccuccaccucggcaagugcaacaucgccggcuggauccucggcaaccccgagugcgagucccucuccaccgccuccuccugguccuacaucgucgagaccuccuccuccgacaacggcaccugcuaccccggcgacuucaucgacuacgaggagcuccgcgagcagcucuccuccgucuccuccuucgagcgcuucgagaucuuccccaagaccuccuccuggcccaaccacgacuccaacaagggcgucaccgccgccugcccccacgccggcgccaaguccuucuacaagaaccucaucuggcucgucaagaagggcaacuccuaccccaagcucuccaaguccuacaucaacgacaagggcaaggagguccucguccucuggggcauccaccaccccuccaccuccgccgaccagcagucccucuaccagaacgccgacaccuacgucuucgucggcaccucccgcuacuccaagaaguucaagcccgagaucgccauccgccccaagguccgcgaccaggagggccgcaugaacuacuacuggacccucgucgagcccggcgacaagaucaaguucgaggccaccggcaaccucgucgucccccgcuacgccuucgccauggagcgcaacgccggcuccggcaucaucaucuccgacacccccguccacgacugcaacaccaccugccagacccccaagggcgccaucaacaccucccuccccuuccagaacauccaccccaucaccaucggcaagugccccaaguacgucaaguccaccaagcuccgccucgccaccggccuccgcaacguccccuccauccagucccgcggccucuucggcgccaucgccggcuucaucgagggcggcuggaccggcauggucgacggcugguacggcuaccaccaccagaacgagcagggcuccggcuacgccgccgaccucaaguccacccagaacgccaucgacgagaucaccaacaaggucaacuccgucaucgagaagaugaacacccaguucaccgccgucggcaaggaguucaaccaccucgagaagcgcaucgagaaccucaacaagaaggucgacgacggcuuccucgacaucuggaccuacaacgccgagcuccucguccuccucgagaacgagcgcacccucgacuaccacgacuccaacgucaagaaccucuacgagaagguccgcaaccagcucaagaacaacgccaaggagaucggcaacggcugcuucgaguucuaccacaagugcgacaacaccugcauggaguccgucaagaacggcaccuacgacuaccccaaguacuccgaggaggccaagcucaaccgcgaggagaucgacggcgucaagcucgaguccacccgcaucuaccagauccucgccaucuacuccaccgucgccuccucccucguccucgucgucucccucggcgccaucuccuucuggaugugcuccaacggcucccuccagugccgcaucugcaucuga

SEQ ID NO: 109813 - RNA, 1701 nt, Artificial Sequence
  derived and/or modified CDS sequence (opt2) from hemagglutinin__InfluenzaA__BAJ40036
augaaggccauccucgucguccucaucuacaccuucgccaccgccaacgccgacacccucugcaucggcuaccacgccaacaacuccaccgacaccgucgacaccguccucgagaagaacgucaccgucacccacuccgucaaccuccucgaggacaagcacaacggcaagcucugcaagcuccgcggcgucgccccccuccaccucggcaagugcaacaucgccggcuggauccucggcaaccccgagugcgagucccucuccaccgccuccuccugguccuacaucgucgagaccuccuccuccgacaacggcaccugcuaccccggcgacuucaucgacuacgaggagcuccgcgagcagcucuccuccgucuccuccuucgagcgcuucgagaucuuccccaagaccuccuccuggcccaaccacgacuccaacaagggcgucaccgccgccugcccccacgccggcgccaaguccuucuacaagaaccucaucuggcucgucaagaagggcaacuccuaccccaagcucuccaaguccuacaucaacgacaagggcaaggagguccucguccucuggggcauccaccaccccuccaccuccgccgaccagcagucccucuaccagaacgccgacgccuacgucuucgucggcaccucccgcuacuccaagaaguucaagcccgagaucgccauccgccccaagguccgcgaccaggagggccgcaugaacuacuacuggaccaucgucgagcccggcgacaagaucaccuucgaggccaccggcaaccucgucgucccccgcuacgccuucgccauggagcgcaacgccggcuccggcaucaucaucuccgacacccccguccacgacugcaacaccaccugccagacccccaagggcgccaucaacaccucccuccccuuccagaacauccaccccaucaccaucggcaagugccccaaguacgucaaguccaccaagcuccgccucgccaccggccuccgcaacguccccuccauccagucccgcggccucuucggcgccaucgccggcuucaucgagggcggcuggaccggcauggucgacggcugguacggcuaccaccaccagaacgagcagggcuccggcuacgccgccgaccucaaguccacccagaacgccaucgacgagaucaccaacaaggucaacuccgucaucgagaagaugaacacccaguucaccgccgucggcaaggaguucaaccaccucgagaagcgcaucgagaaccucaacaagaaggucgacgacggcuuccucgacaucuggaccuacaacgccgagcuccucguccuccucgagaacgagcgcacccucgacuaccacgacuccaacgucaagaaccucuacgagaaggucaagucccagcucaagaacaacgccaaggagaucggcaacggcugcuucgaguucuaccacaagugcgacaacaccugcauggaguccgucaagaacggcaccuacgacuaccccaaguacuccgaggaggccaagcucaaccgcgaggagaucgacggcgucaagcucgaguccacccgcaucuaccagauccucgccaucuacuccaccgucgccuccucccucguccucgucgucucccucggcgccaucuccuucuggaugugcuccaacggcucccuccagugccgcaucugcaucuga

SEQ ID NO: 109814 - RNA, 1701 nt, Artificial Sequence; identical to SEQ ID NO: 105308
  derived and/or modified CDS sequence (opt2) from hemagglutinin__InfluenzaA__BAJ40037

SEQ ID NO: 109815 - RNA, 1701 nt, Artificial Sequence
  derived and/or modified CDS sequence (opt2) from hemagglutinin__InfluenzaA__BAJ40038
augaaggccauccuccucguccuccucuacaccuucgccaccgccaacgccgacacccucugcaucggcuaccacgccaacaacuccaccgacaccgucgacaccguccucgagaagaacgucaccgucacccacuccgucaaccuccucgaggacaagcacaacggcaagcucugcaagcuccgcggcgucgccccccuccaccucggcaagugcaacaucgccggcuggauccucggcaaccccgagugcgagucccucuccaccgccuccuccugguccuacaucgucgagaccuccuccuccgacaacggcaccugcuaccccggcgacuucaucgacuacgaggagcuccgcgagcagcucuccuccgucuccuccuucgagcgcuucgagaucuuccccaagaccuccuccuggcccaaccacgacuccaacaagggcgucaccgccgccugcccccacgccggcgccaaguccuucuacaagaaccucaucuggcucgucaagaagggcaacuccuaccccaagcucuccaaguccuacaucaacgacaagggcaaggagguccucguccucuggggcauccaccaccccuccaccuccgccgaccagcagucccucuaccagaacgccgacaccuacgucuucgucggcaccucccgcuacuccaagaaguucaagcccgagaucgccauccgccccaagguccgcgaccaggagggccgcaugaacuacuacuggaccaucgucgagcccggcgacaagaucaccuucgaggccaccggcaaccucgucgucccccgcuacgccuucgccauggagcgcaacgccggcuccggcaucaucaucuccgacacccccguccacgacugcaacaccaccugccagacccccaagggcgccaucaacaccucccuccccuuccagaacauccaccccaucaccaucggcaagugccccaaguacgucaaguccaccaagcuccgccucgccaccggccuccgcaacguccccuccauccagucccgcggccucuucggcgccaucgccggcuucaucgagggcggcuggaccggcauggucgacggcugguacggcuaccaccaccagaacgagcagggcuccggcuacgccgccgaccucaaguccacccagaacgccaucgacgagaucaccaacaaggucaacuccgucaucgagaagaugaacacccaguucaccgccgucggcaaggaguucaaccaccucgagaagcgcaucgagaaccucaacaagaaggucgacgacggcuuccucgacaucuggaccuacaacgccgagcuccucguccuccucgagaacgagcgcacccucgacuaccacgacuccaacgucaagaaccucuacgagaagguccgcucccagcucaagaacaacgccaaggagaucggcaacggcugcuucgaguucuaccacaagugcgacaacaccugcauggaguccgucaagaacggcaccuacgacuaccccaaguacuccgaggaggccaagcucaaccgcgaggagaucgacggcgucaagcucgaguccacccgcaucuaccagauccucgccaucuacuccaccgucgccuccucccucguccucgucgucucccucggcgccaucuccuucuggaugugcuccaacggcucccuccagugccgcaucugcaucuga

SEQ ID NO: 109816 - RNA, 1701 nt, Artificial Sequence; identical to SEQ ID NO: 98705
  derived and/or modified CDS sequence (opt2) from hemagglutinin__InfluenzaA__BAJ40039

SEQ ID NO: 109817 - RNA, 1701 nt, Artificial Sequence
  derived and/or modified CDS sequence (opt2) from hemagglutinin__InfluenzaA__BAJ40040
augaaggccauccucgucguccuccucuacaccuucgccaccgccaacgccgacacccucugcaucggcuaccacgccaacaacuccaccgacaccgucgacaccguccucgagaagaacgucaccgucacccacuccgucaaccuccucgaggacaagcacaacggcaagcucugcaagcuccgcggcgucgccccccuccaccucggcaagugcaacaucgccggcuggauccucggcaaccccgagugcgagucccucuccaccgccuccuccugguccuacaucgucgagaccuccuccuccgacaacggcaccugcuaccccggcgacuucaucgacuacgaggagcuccgcgagcagcucuccuccgucuccuccuucgagcgcuucgagaucuuccccaagaccuccuccuggcccaaccacgacuccaacaagggcgucaccgccgccugcccccacgccggcgccaaguccuucuacaagaaccucaucuggcucgucaagaagggcaacuccuaccccaagcucuccaaguccuacaucaacgacaagggccgcgagguccucguccucuggggcauccaccaccccuccaccuccgccgaccagcagucccucuaccagaacgccgacaccuacgucuucgucggcaccucccgcuacuccaagaaguucaagcccgagaucgccauccgccccaagguccgcgaccaggagggccgcaugaacuacuacuggacccucgucgagcccggcgacaagaucaccuucgaggccaccggcaaccucgucgucccccgcuacgccuucgccauggagcgcaacgccggcuacggcaucaucaucuccgacacccccguccacgacugcaacaccaccugccagacccccaagggcgccaucaacaccucccuccccuuccagaacauccaccccaucaccaucggcaagugccccaaguacgucaaguccaccaagcuccgccucgccaccggccuccgcaacguccccuccauccagucccgcggccucuucggcgccaucgccggcuucaucgagggcggcuggaccggcauggucgacggcugguacggcuaccaccaccagaacgagcagggcuccggcuacgccgccgaccucaaguccacccagaacgccaucgacgagaucaccaacaaggucaacuccgucaucgagaagaugaacacccaguucaccgccgucggcaaggaguucaaccaccucgagaagcgcaucgagaaccucaacaagaaggucgacgacggcuuccucgacaucuggaccuacaacgccgagcuccucguccuccucgagaacgagcgcacccucgacuaccacgacuccaacgucaagaaccucuacgagaagguccgcucccagcucaagaacaacgccaaggagaucggcaacggcugcuucgaguucuaccacaagugcgacaacaccugcauggaguccgucaagaacggcaccuacgacuaccccaaguacuccgaggaggccaagcucaaccgcgaggagaucgacggcgucaagcucgaguccacccgcaucuaccagauccucgccaucuacuccaccgucgccuccucccucguccucgucgucucccucggcgccaucuccuucuggaugugcuccaacggcucccuccagugccgcaucugcaucuga

SEQ ID NO: 109818 - RNA, 1701 nt, Artificial Sequence; identical to SEQ ID NO: 105308
  derived and/or modified CDS sequence (opt2) from hemagglutinin__InfluenzaA__BAJ40041

SEQ ID NO: 109819 - RNA, 1701 nt, Artificial Sequence
  derived and/or modified CDS sequence (opt2) from hemagglutinin__InfluenzaA__BAJ40042
augaaggccauccucgucguccuccucuacaccuucgccaccgccaacgccgacacccucugcaucggcuaccacgccaacaacuccaccgacaccgucgacaccguccucgagaagaacgucaccgucacccacuccgucaaccuccucgaggacaagcacaacggcaagcucugcaagcuccgcggcgucgccccccuccaccucggcaagugcaacaucgccggcuggauccucggcaaccccgagugcgagucccucuccaccgccuccuccugguccuacaucgucgagaccuccuccuccgacaacggcaccugcuaccccggcgacuucaucgacuacgaggagcucaaggagccccucuccuccgucuccuccuucgagcgcuucgagaucuuccccaagaccuccuccuggcccaaccacgacuccaacaagggcgucaccgccgccugcccccacgccggcgccaaguccuucuacaagaaccucaucuggcucgucaagaagggcaacuccuaccccaagcucuccaaguccuacaucaacgacaagggccgcgagguccucguccucuggggcauccaccaccccuccaccuccgccgaccgccagucccucuaccagaacgccgacaccuacgucuucgucggcaccucccgcuacuccaagaaguucaagcccgagaucgccauccgccccaagguccgcgaccaggagggccgcaugaacuacuacuggacccucgucgagcccggcgacaagaucaccuucgaggccaccggcaaccucgucgucccccgcuacgccuucgccauggagcgcaacgccggcuccggcaucaucaucuccgacacccccguccacgacugcaacaccaccugccagacccccaagggcgccaucaacaccucccuccccuuccagaacauccaccccaucaccaucggcaagugccccaaguacgucaaguccaccaagcuccgccucgccaccggccuccgcaacguccccuccauccagucccgcggccucuucggcgccaucgccggcuucaucgagggcggcuggaccggcauggucgacggcugguacggcuaccaccaccagaacgagcagggcuccggcuacgccgccgaccucaaguccacccagaacgccaucgacgagaucaccaacaaggucaacuccgucaucgagaagaugaacacccaguucaccgccgucggcaaggaguucaaccaccucgagaagcgcaucgagaaccucaacaagaaggucgacgacggcuuccucgacaucuggaccuacaacgccgagcuccucguccuccucgagaacgagcgcacccucgacuaccacgacuccaacgucaagaaccucuacgagaagguccgcucccagcucaagaacaacgccaaggagaucggcaacggcugcuucgaguucuaccacaagugcgacaacaccugcauggaguccgucaagaacggcaccuacgacuaccccaaguacuccgaggaggccaagcucaaccgcgaggagaucgacggcgucaagcucgaguccacccgcaucuaccagauccucgccaucuacuccaccgucgccuccucccucguccucgucgucucccucggcgccaucuccuucuggaugugcuccaacggcucccuccagugccgcaucugcaucuga

SEQ ID NO: 109820 - RNA, 1701 nt, Artificial Sequence; identical to SEQ ID NO: 105308
  derived and/or modified CDS sequence (opt2) from hemagglutinin__InfluenzaA__BAJ40043

SEQ ID NO: 109821 - RNA, 1701 nt, Artificial Sequence
  derived and/or modified CDS sequence (opt2) from hemagglutinin__InfluenzaA__BAJ40044
augaaggccauccucgucguccuccucuacaccuucgccaccgccaacgccgacacccucugcaucggcuaccacgccaacaacuccaccgacaccgucgacaccguccucgagaagaacgucaccgucacccacuccgucaaccuccucgaggacaagcacaacggcaagcucugcaagcuccgcggcgucgccccccuccaccucggcaagugcaacaucgccggcuggauccucggcaaccccgagugcgagucccucuccaccgccuccuccugguccuacaucgucgagaccuccuccuccgacaacggcaccugcuaccccggcgacuucaucgacuacgaggagcagaaggagcagcucuccuccgucuccuccuucgagcgcuucgagaucuuccccaagaccuccuccuggcccaaccacgacuccaacaagggcgucaccgccgccugcccccacgccggcgccaaguccuucuacaagaaccucaucuggcucgucaagaagggcaacuccuaccccaagcucuccaaguccuacaucaacgacaagggcaaggagguccucguccucuggggcauccaccaccccuccaccuccgccgaccagcagucccucuaccagaacgccgacgccuacgucuucgucggcaccucccgcuacuccaagaaguucaagcccgagaucgccauccgccccaagguccgcgaccaggagggccgcaugaacuacuacuggacccucgucgagcccggcgacaagaucaccuucgaggccaccggcaaccucgucgucccccgcuacgccuucgccauggagaucaacgccggcuccggcaucaucaucuccgacacccccguccacgacugcaacaccaccugccagacccccaagggcgccaucaacaccucccuccccuuccagaacauccaccccaucaccaucggcaagugccccaaguacgucaaguccaccaagcuccgccucgccaccggccuccgcaacguccccuccauccagucccgcggccucuucggcgccaucgccggcuucaucgagggcggcuggaccggcauggucgacggcugguacggcuaccaccaccagaacgagcagggcuccggcuacgccgccgaccucaaguccacccagaacgccaucgacaagaucaccaacaaggucaacuccgucaucgagaagaugaacacccaguucaccgccgucggcaaggaguucaaccaccucgagaagcgcaucgagaaccucaacaagaaggucgacgacggcuuccucgacaucuggaccuacaacgccgagcuccucguccuccucgagaacgagcgcacccucgacuaccacgacuccaacgucaagaaccucuacgagaagguccgcucccagcucaagaacaacgccaaggagaucggcaacggcugcuucgaguucuaccacaagugcgacaacaccugcauggaguccgucaagaacggcaccuacgacuaccccaaguacuccgaggaggccaagcucaaccgcgaggagaucgacggcgucaagcucgaguccacccgcaucuaccagauccucgccaucuacuccaccgucgccuccucccucguccucgucgucucccucggcgccaucuccuucuggaugugcuccaacggcucccuccagugccgcaucugcaucuga

SEQ ID NO: 109822 - RNA, 1701 nt, Artificial Sequence; identical to SEQ ID NO: 109784
  derived and/or modified CDS sequence (opt2) from hemagglutinin__InfluenzaA__BAJ40045

SEQ ID NO: 109823 - RNA, 1701 nt, Artificial Sequence
  derived and/or modified CDS sequence (opt2) from hemagglutinin__InfluenzaA__BAJ40046
augaaggccauccucgucguccuccucuacaccuucgccaccgccaacgccgacacccucugcaucggcuaccacgccaacaacuccaccgacaccgucgacaccguccucgagaagaacgucaccgucacccacuccgucaaccuccucgaggacaagcacaacggcaagcucugcaagcuccgcggcgucgccccccuccaccucggccgcugcaacaucgccggcuggauccucggcaaccccgagugcgagucccucuccaccgccuccuccugguccuacaucgucgagaccuccaucuccgacaacggcaccugcuaccccggcgacuucaucgacuacgaggagcucaaggagcagcucuccuccgucuccuccuucgagcgcuucgagaucuuccccaagaccuccuccuggcccaaccacgacuccaacaagggcgucaccgccgccugcccccacgccggcgccaaguccuucuacaagaaccucaucuggcucgucaagaagggcaacuccuaccccaagcucuccaaguccuacaucaacgacaagggcaaggagguccucguccucuggggcauccaccaccccuccaccuccgccgaccagcagucccucuaccagaacgccgacgccuacgucuucgucggcaccucccgcuacuccaagaaguucaagcccgagaucgccauccgccccaagguccgcgaccaggagggccgcaugaacuacuacuggacccucgucgagcccggcgacaagaucaccuucgaggccaccggcaaccucgucgucccccgcuacgccuucgccauggagcgcaacgccggcuccggcaucaucaucuccgacacccccguccacgacugcaacaccaccugccagacccccaagggcgccaucaacaccucccuccccuuccagaacauccaccccaucaccaucggcaagugccccaaguacgucaaguccaccaagcuccgccucgccaccggccuccgcaacguccccuccauccagucccgcggccucuucggcgccaucgccggcuucaucgagggcggcuggaccggcauggucgacggcugguacggcuaccaccaccagaacgagcagggcuccggcuacgccgccgaccucaaguccacccagaacgccaucgacaagaucaccaacaaggucaacuccgucaucgagaagaugaacacccaguucaccgccgucggcaaggaguucaaccaccucgagaagaagaucgagaaccucaacaagaaggucgacgacggcuuccucgacaucuggaccuacaacgccaagcuccucguccuccucgagaacgagcgcacccucgacuaccacgacuccaacgucaagaaccucuacgagaagguccgcucccagcucaagaacaacgccaaggagaucggcaacggcugcuucgaguucuaccacaagugcgacaacaccugcauggaguccgucaagaacggcaccuacgacuaccccaaguacuccgaggaggccaagcucaaccgcgaggagaucgacggcgucaagcucgaguccacccgcaucuaccagauccucgccaucuacuccaccgucgccuccucccucguccucgucgucucccucggcgccaucuccuucuggaugugcuccaacggcucccuccagugccgcaucugcaucuga

SEQ ID NO: 109824 - RNA, 1701 nt, Artificial Sequence; identical to SEQ ID NO: 109807
  derived and/or modified CDS sequence (opt2) from hemagglutinin__InfluenzaA__BAJ40047

SEQ ID NO: 109825 - RNA, 1701 nt, Artificial Sequence; identical to SEQ ID NO: 109778
  derived and/or modified CDS sequence (opt2) from hemagglutinin__InfluenzaA__BAJ40048

SEQ ID NO: 109826 - RNA, 1701 nt, Artificial Sequence
  derived and/or modified CDS sequence (opt2) from hemagglutinin__InfluenzaA__BAJ40050
augaaggccauccucgucguccuccucuacaccuucgccaccgccaacgccgacacccucugcaucggcuaccacgccaacaacuccaccgacaccgucgacaccguccucgagaagaacgucaccgucacccacuccgucaaccuccucgaggacaagcacaacggcaagcucugcaagcuccgcggcgucgccccccuccaccucggcaagugcaacaucgccggcuggauccucggcaaccccgagugcgagucccucuccaccgccuccuccugguccuacaucgucgagaccuccuccuccgacaacggcaccugcuaccccggcgacuucaucgacuacgaggagcucaaggagcagcucuccuccgucuccuccuucgagcgcuucgagaucuuccccaagaccuccuccuggcccaaccacgacuccaacaagggcgucaccgccgccugcccccacgccggcgccaaguccuucuacaagaaccucaucuggcucgucaagaagggcaacuccuaccccaagcucuccaaguccuacaucaacgacaagggcaaggagguccucguccucuggggcauccaccaccccuccaccuccgccgaccagcagucccucuaccagaacgccgacgccuacgucuucgucggcaccucccgcuacuccaagaaguucaagcccgagaucgccauccgccccaagguccgcgaccaggagggccgcaugaacuacuacuggacccucgucgagcccggcgacaagaucaccuucgaggccaccggcaaccucgucgucccccgcuacgccuucgccauggagcgcaacgccggcuccggcaucaucaucuccgacacccccguccacgacugcaacaccaccugccagacccccaagggcgccaucaacaccucccuccccuuccagaacauccaccccaucaccaucggcaagugccccaaguacgucaaguccaccaagcuccgccucgccaccggccuccgcaacguccccuccauccagucccgcggccucuucggcgccaucgccggcuucaucgagggcggcuggaccggcauggucgacggcugguacggcuaccaccaccagaacgagcagggcuccggcuacgccgccgaccucaaguccacccagaacgccaucgacaagaucaccaacaaggucaacuccgucaucgagaagaugaacacccaguucaccgccgucggcaaggaguucaaccaccucgagaagcgcaucgagaaccucaacaagaaggucgacgacggcuuccucgacaucuggaccuacaacgccgagcuccucguccuccucgagaacgagcgcacccucgacuaccacgacuccaacgucaagaaccucuacgagaagguccgcucccagcucaagaacaacgccaaggagaucggcaacggcugcuucgaguucuaccacaagugcgacaacaccugcauggaguccgucaagaacggcaccuacgacuaccccaaguacuccgaggaggccaagcucaaccgcgaggagaucgacggcgucaagcucgaguccacccgcaucuaccagauccucgccaucuacuccaccgucgccuccucccucguccucgucgucucccucggcgccaucuccuucuggaugugcuccaacggcucccuccagugccgcaucugcaucuga

SEQ ID NO: 109827 - RNA, 1701 nt, Artificial Sequence; identical to SEQ ID NO: 99869
  derived and/or modified CDS sequence (opt2) from hemagglutinin__InfluenzaA__BAJ40051

SEQ ID NO: 109828 - RNA, 1701 nt, Artificial Sequence
  derived and/or modified CDS sequence (opt2) from hemagglutinin__InfluenzaA__BAJ40052
augaaggccauccucgucguccuccucuacaccuucgccaccgccaacgccgacacccucugcaucggcuaccacgccaacaacuccaccgacaccgucgacaccguccucgagaagaacgucaccgucacccacuccgucaaccuccucgaggacaagcacaacggcaagcucugcaagcuccgcggcgucgccccccuccaccucggcaagugcaacaucgccggcuggauccucggcaaccccgagugcgagucccucuccaccgccuccuccugguccuacaucgucgagaccuccuccuccgacaacggcaccugcuaccccggcgacuucaucgacuacgaggagcuccgcgagcagcucuccuccgucuccuccuucgagcgcuucgagaucuuccccaagaccuccuccuggcccaaccacgacuccaacaagggcgucaccgccgccugcccccacgccggcgccaaguccuucuacaagaaccucaucuggcucgucaagaagggcaacuccuaccccaagcucuccaaguccuacaucaacgacaagggccgcgagguccucguccucuggggcauccaccaccccuccaccaccgccgaccagcagucccucuaccagaacgccgacaccuacgucuucgucggcaccucccgcuacuccaagaaguucaagcccgagaucgccauccgccccaagguccgcgaccaggagggccgcaugaacuacuacuggacccucgucgagcccggcgacaagaucaccuucgaggccaccggcaaccucgucgucccccgcuacgccuucgccauggagcgcaacgccggcuccggcaucaucaucuccgacacccccguccacgacugcaacaccaccugccagacccccaagggcgccaucaacaccucccuccccuuccagaacauccaccccaucaccaucggcaagugccccaaguacgucaaguccaccaagcuccgccucgccaccggccuccgcaacguccccuccauccagucccgcggccucuucggcgccaucgccggcuucaucgagggcggcuggaccggcauggucgacggcugguacggcuaccaccaccagaacgagcagggcuccggcuacgccgccgaccucaaguccacccagaacgccaucgacgagaucaccaacaaggucaacuccgucaucgagaagaugaacacccaguucaccgccgucggcaaggaguucaaccaccucgagaagcgcaucgagaaccucaacaagaaggucgacgacggcuuccucgacaucuggaccuacaacgccgagcuccucguccuccucgagaacgagcgcacccucgacuaccacgacuccaacgucaagaaccucuacgagaagguccgcucccagcucaagaacaacgccaaggagaucggcaacggcugcuucgaguucuaccacaagugcgacaacaccugcauggaguccgucaagaacggcaccuacgacuaccccaaguacuccgaggaggccaagcucaaccgcgaggagaucgacggcgucaagcucgaguccacccgcaucuaccagauccucgccaucuacuccaccgucgccuccucccucguccucgucgucucccucggcgccaucuccuucuggaugugcuccaacggcucccuccagugccgcaucugcaucuga

SEQ ID NO: 109829 - RNA, 1701 nt, Artificial Sequence
  derived and/or modified CDS sequence (opt2) from hemagglutinin__InfluenzaA__BAJ40053
augaaggccauccucgucguccuccucuacaccuucgccaccgccaacgccgacacccucugcaucggcuaccacgccaacaacuccaccgacaccgucgacaccguccucgagaagaacgucaccgucacccacuccgucaaccuccucgaggacaagcacaacggcaagcucugcaagcuccgcggcgucgccccccuccaccucggcaagugcaacaucgccggcuggauccucggcaaccccgagugcgagucccucuccaccgccuccuccugguccuacaucgucgagaccuccuccuccgacaacggcaccugcuaccccggcgacuucaucgacuacgaggagcuccgcgagcagcucuccuccgucuccuccuucgagcgcuucgagaucuuccccaagaccuccuccuggcccaaccacgacuccaacaagggcgucaccgccgccugcccccacgccggcgccaaguccuucuacaagaaccucaucuggcucgucaagaagggcaacuccuaccccaagcucuccaaguccuacaucaacgacaagggcaaggagguccucguccucuggggcauccaccaccccuccaccuccgccgaccagcagucccucuaccagaacgccgacaccuacgucuucgucggcaccucccgcuacuccaagaaguucaagcccgagaucgccauccgccccaagguccgcgaccaggagggccgcaugaacuacuacuggacccucgucgagcccggcgacaagaucaccuucgaggccaccggcaaccucgucgucccccgcuacgccuucgccauggagcgcaacgccggcuccggcaucaucaucuccgacacccccguccacgacugcaacaccaccugccagacccccaagggcgccaucaacaccucccuccccuuccagaacauccaccccaucaccaucggcaagugccccaaguacgucaaguccaccaagcuccgccucgccaccggccuccgcaacguccccuccauccagucccgcggccucuucggcgccaucgccggcuucaucgagggcggcuggaccggcauggucgacggcugguacggcuaccaccaccagaacgagcagggcuccggcuacgccgccgaccucaaguccacccagaacgccaucgacgagaucaccaacaaggucaacuccgucaucgagaagaugaacacccaguucaccgccgucggcaaggaguucaaccaccucgagaagcgcaucgagaaccucaacaagaaggucgacgacggcuuccucgacaucuggaccuacaacgccgagcuccucguccuccucgagaacgagcgcacccucgacuaccacgacuccaacgucaagaaccucuacgagaagguccgcaaccagcucaagaacaacgccaaggagaucggcaacggcugcuucgaguucuaccacaagugcgacaacaccugcauggaguccgucaagaacggcaccuacgacuaccccaaguacuccgaggaggccaagcucaaccgcgaggagaucgacggcgucaagcucgaguccacccgcaucuaccagauccucgccaucuacuccaccgucgccuccucccucguccucgucgucucccucggcgccaucuccuucuggaugugcuccaacggcucccuccagugccgcaucugcaucuga

SEQ ID NO: 109830 - RNA, 1701 nt, Artificial Sequence; identical to SEQ ID NO: 99869
  derived and/or modified CDS sequence (opt2) from hemagglutinin__InfluenzaA__BAJ40054

SEQ ID NO: 109831 - RNA, 1701 nt, Artificial Sequence
  derived and/or modified CDS sequence (opt2) from hemagglutinin__InfluenzaA__BAJ40055
augaaggccauccucgucguccuccucuacaccuucgccaccgccaacgccgacacccucugcaucggcuaccacgccaacaacuccaccgacaccgucgacaccguccucgagaagaacgucaccgucacccacuccgucaaccuccucgaggacaagcacaacggcaagcucugcaagcuccgcggcgucgccccccuccaccucggcaagugcaacaucgccggcuggauccucggcaaccccgagugcgagucccucuccaccgccuccuccugguccuacaucgucgagaccuccuccuccgacaacggcaccugcuaccccggcgacuucaucgacuacgaggagcuccgcgagcagcucuccuccgucuccuccuucgagcgcuucgagaucuuccccaagaccuccuccuggcccaaccacgacuccaacaagggcgucaccgccgccugcccccacgccggcgccaaguccuucuacaagaaccucaucuggcucgucaagaagggcaacuccuaccccaagcucuccaaguccuacaucaacgacaagggcaaggagguccucguccucuggggcauccaccaccccuccaccuccaccgaccagcagucccucuaccagaacgccgacaccuacgucuucgucggcaccucccgcuacuccaagaaguucaagcccgagaucgccauccgccccaagguccgcgaccaggagggccgcaugaacuacuacuggacccucgucgagcccggcgacaagaucaccuucgaggccaccggcaaccucgucgucccccgcuacgccuucgccauggagcgcaacgccggcuccggcaucaucaucuccgacacccccguccacgacugcaacaccaucugccagacccccaagggcgccaucaacaccucccuccccuuccagaacauccaccccaucaccaucggcaagugccccaaguacgucaaguccaccaagcuccgccucgccaccggccuccgcaacguccccuccguccagucccgcggccucuucggcgccaucgccggcuucaucgagggcggcuggaccggcauggucgacggcugguacggcuaccaccaccagaacgagcagggcuccggcuacgccgccgaccucaaguccacccagaacgccaucgacgagaucaccaacaaggucaacuccgucaucgagaagaugaacacccaguucaccgccgucggcaaggaguucaaccaccucgagaagcgcaucgagaaccucaacaagaaggucgacgacggcuuccucgacaucuggaccuacaacgccgagcuccucguccuccucgagaacgagcgcacccucgacuaccacgacuccaacgucaagaaccucuacgagaagguccgcucccagcucaagaacaacgccaaggagaucggcaacggcugcuucgaguucuaccacaagugcgacaacaccugcauggaguccgucaagaacggcaccuacgacuaccccaaguacuccgaggaggccaagcucaaccgcgaggagaucgacggcgucaagcucgaguccacccgcaucuaccagauccucgccaucuacuccaccgucgccuccucccucguccucgucgucucccucggcgccaucuccuucuggaugugcuccaacggcucccuccagugccgcaucugcaucuga

SEQ ID NO: 109832 - RNA, 1701 nt, Artificial Sequence
  derived and/or modified CDS sequence (opt2) from hemagglutinin__InfluenzaA__BAJ40056
augaaggccauccucgucguccuccucuacaccuucgccaccgccaacgccgacacccucugcaucggcuaccacgccaacaacuccaccgacaccgucgacaccguccucgagaagaacgucaccgucacccacuccgucaaccuccucgaggacaagcacaacggcaagcucugcaagcuccgcggcgucgccccccuccaccucggcaagugcaacaucgccggcuggauccucggcaaccccgagugcgagcuccucuccaccgccuccuccugguccuacaucgucgagaccuccuccuccgacaacggcaccugcuaccccggcgacuucaucgacuacgaggagcuccgcgagcagcucuccuccgucuccuccuucgagcgcuucgagaucuuccccaagaccuccuccuggcccaaccacgacuccaacaagggcgucaccgccgccugcccccacgccggcgccaaguccuucuacaagaaccucaucuggcaggucaagaagggcaacuccuaccccaagcucuccaaguccuacaucaacgacaagggcaaggagguccucguccucuggggcauccaccaccccuccaccuccgccgaccagcagucccucuaccagaacgccgacgccuacgucuucgucggcaccucccgcuacuccaagaaguucaagcccgagaucgccauccgccccaagguccgcgaccaggagggccgcaugaacuacuacuggacccucgucgagcccggcgacaagaucaccuucgaggccaccggcaaccucgucgucccccgccacgccuucgccauggagcgcaacgccggcuccggcaucaucaucuccgacacccccguccacaacugcaacaccaccugccagacccccaagggcgccaucaacaccucccuccccuuccagaacauccaccccaucaccaucggcaagugccccaaguacgucaagucccccaagcuccgccucgccaccggccuccgcaacguccccuccauccagucccgcggccucuucggcgccaucgccggcuucaucgagggcggcuggaccggcauggucgacggcugguacggcuaccaccaccagaacgagcagggcuccggcuacgccgccgaccucaaguccacccagaacgccaucgacaagaucaccaacaaggucaacuccgucaucgagaagaugaacacccaguucaccgccgucggcaaggaguucaaccaccucgagaagcgcaucgagaaccucaacaagaaggucgacgacggcuuccucgacaucuggaccuacaacgccgagcuccucguccuccucgagaacgagcgcacccucgacuaccacgacuccuacgucaagaaccucuacgagaagguccgcucccagcucaagaacaacgccaaggagaucggcaacggcugcuucgaguucuaccacaagugcgacaacaccugcauggaguccgucaagaacggcaccuacgacuaccccaaguacuccgaggaggccaagcucaaccgcgaggagaucgacggcgucaagcucgaguccacccgcaucuaccagauccucgccaucuacuccaccgucgccuccucccucguccucgucgucucccucggcgccaucuccuucuggaugugcuccaacggcucccuccagugccgcaucugcaucuga

SEQ ID NO: 109833 - RNA, 1701 nt, Artificial Sequence
  derived and/or modified CDS sequence (opt2) from hemagglutinin__InfluenzaA__BAJ40057
augaaggccauccucgucguccuccucuacaccuucgccaccgccaacgccgacacccucugcaucggcuaccacgccaacaacuccaccgacaccgucgacaccguccucgagcgcaacgucaccgucacccacuccgucaaccuccucgaggacaagcacaacggcaagcucugcaagcuccgcggcgucgccccccuccaccucggcaagugcaacaucgccggcuggauccucggcaaccccgagugcgagucccucuccaccgccuccuccugguccuacaucgucgagaccuccuccuccgacaacggcaccugcuaccccggcgacuucaucgacuacgaggagcuccgcgagcagcucuccuccgucuccuccuucgagcgcuucgagaucuuccccaagaccuccuccuggcccaaccacgacuccaacaagggcgucaccgccgccugcccccacgccggcgccaaguccuucuacaagaaccucaucuggcucgucaagaagggcaacuccuaccccaagcucuccaaguccuacaucaacgacaagggcaaggagguccucguccucuggggcauccaccaccccuccaccuccgccgaccagcagucccucuaccagaacgccgacaccuacgucuucgucggcaccucccgcuacuccaagaaguucaagcccgagaucgccauccgccccaagguccgcgaccaggagggccgcaugaacuacuacuggacccucgucgagcccggcgacaagaucaccuucgaggccaccggcaaccucgucgucccccgcuacgccuucgccauggagcgcaacgccggcuccggcaucaucaucuccgacacccccguccacgacugcaacaccaccugccagacccccaagggcgccaucaacaccucccuccccuuccagaacauccaccccaucaccaucggcaagugccccaaguacgucaaguccaccaagcuccgccucgccaccggccuccgcaacguccccuccauccagucccgcggccucuucggcgccaucgccggcuucaucgagggcggcuggaccggcauggucgacggcugguacggcuaccaccaccagaacgagcagggcuccggcuacgccgccgaccucaaguccacccagaacgccaucgacgagaucaccaacgaggucaacuccgucaucgagaagaugaacacccaguucaccgccgucggcaaggaguucaaccaccucgagaagcgcaucgagaaccucaacaagaaggucgacgacggcuuccucgacaucuggaccuacaacgccgagcuccucguccuccucgagaacgagcgcacccucgacuaccacgacuccaacgucaagaaccucuacgagaagguccgcucccagcucaagaacaacgccaaggagaucggcaacggcugcuucgaguucuaccacaagugcgacaacaccugcauggaguccgucaagaacggcaccuacgacuaccccaaguacuccgaggaggccaagcucaaccgcgaggagaucgacggcgucaagcucgaguccacccgcaucuaccagauccucgccaucuacuccaccgucgccuccucccucguccucgucgucucccucggcgccaucuccuucuggaugugcuccaacggcucccuccagugccgcaucugcaucuga

SEQ ID NO: 109834 - RNA, 1701 nt, Artificial Sequence; identical to SEQ ID NO: 105308
  derived and/or modified CDS sequence (opt2) from hemagglutinin__InfluenzaA__BAJ40058

SEQ ID NO: 109835 - RNA, 1701 nt, Artificial Sequence; identical to SEQ ID NO: 109778
  derived and/or modified CDS sequence (opt2) from hemagglutinin__InfluenzaA__BAJ40059

SEQ ID NO: 109836 - RNA, 1701 nt, Artificial Sequence; identical to SEQ ID NO: 99869
  derived and/or modified CDS sequence (opt2) from hemagglutinin__InfluenzaA__BAJ40060

SEQ ID NO: 109837 - RNA, 1701 nt, Artificial Sequence
  derived and/or modified CDS sequence (opt2) from hemagglutinin__InfluenzaA__BAJ40061
augaaggccauccucgucguccuccucuacaccuucgccaccgccaacgccgacacccucugcaucggcuaccacgccaacaacuccaccgacaccgucgacaccguccucgagaagaacgucaccgucacccacuccgucaaccuccucgaggacaagcacaacggcaagcucugcaagcuccgcggcgucgccccccuccaccucggcaagugcaacaucgccggcuggauccucggcaaccccgagugcgagucccucuccaccgccuccuccugguccuacaucgucgagaccuccuccuccgacaacggcaccugcuaccccggcgacuucaucgacuacgaggagcuccgcgagcagcucuccuccgucuccuccuucgagcgcuucgagaucuuccccaaggccuccuccuggcccaaccacgacuccaacaagggcgucaccgccgccugcccccacgccggcgccaaguccuucuacaagaaccucaucuggcucgucaagaagggcaacuccuaccccaagcucuccaaguccuacaucaacgacaagggcaaggagguccucguccucuggggcauccaccaccccuccaccuccgccgaccagcagucccucuaccagaacgccgacgccuacgucuucgucggcaccucccgcuacuccaagaaguucaagcccgagaucgccauccgccccaagguccgcgaccaggagggccgcaugaacuacuacuggacccucgucgagcccggcgacaagaucaccuucgaggccaccggcaaccucgucgucccccgcuacgccuucgccauggagcgcaacgccggcuccggcaucaucaucuccgacacccccguccacgacugcaacaccaccugccagacccccaagggcgccaucaacaccucccuccccuuccagaacauccaccccaucaccaucggcaagugccccaaguacgucaaguccaccaagcuccgccucgccaccggccuccgcaacguccccuccauccagucccgcggccucuucggcgccaucgccggcuucaucgagggcggcuggaccggcauggucgacggcugguacggcuaccaccaccagaacgagcagggcuccggcuacgccgccgaccucaaguccacccagaacgccaucgacaagaucaccaacaaggucaacuccgucaucgagaagaugaacacccaguucaccgccgucggcaaggaguucaaccaccucgagaagcgcaucgagaaccucaacaagaaggucgacgacggcuuccucgacaucuggaccuacaacgccgagcuccucguccuccucgagaacgagcgcacccucgacuaccacgacuccaacgucaagaaccucuacgagaagguccgcucccagcucaagaacaacgccaaggagaucggcaacggcugcuucgaguucuaccacaagugcgacaacaccugcauggaguccgucaagaacggcaccuacgacuaccccaaguacuccgaggaggccaagcucaaccgcgaggagaucgacggcgucaagcucgaguccacccgcaucuaccagauccucgccaucuacuccaccgucgccuccucccucguccucgucgucucccucggcgccaucuccuucuggaugugcuccaacggcucccuccagugccgcaucugcaucuga

SEQ ID NO: 109838 - RNA, 1701 nt, Artificial Sequence
  derived and/or modified CDS sequence (opt2) from hemagglutinin__InfluenzaA__BAJ40062
augaaggccauccucgucguccuccucuacaccuucgccaccgccaacgccgacacccucugcaucggcuaccacgccaacaacuccaccgacaccgucgacaccguccucgagaagaacgucaccgucacccacuccgucaaccuccucgaggacaagcacaacggcaagcucugcaagcuccgcggcgucgccccccuccaccucggcaagugcaacaucgccggcuggauccucggcaaccccgagugcgagucccucuccaccgccuccuccugguccuacaucgucgagaccuccuccuccgacaacggcaccugcuaccccggcgacuucaucgacuacgaggagcuccgcgagcagcucuccuccgucuccuccuucgagcgcuucgagaucuuccccaagaccuccuccuggcccaaccacgacuccaacaagggcgucaccgccgccugcccccacgccggcgccaaguccuucuacaagaaccucaucuggcucgucaagaagggcaacuccuaccccaagcucuccaaguccuacaucaacgacaagggcaaggagguccucguccucuggggcauccaccaccccuccaccuccgccgaccagcagucccucuaccagaacgccgacaccuacgucuucgucggcaccucccgcuacuccaagaaguucaagcccgagaucgccauccgccccaagguccgcgaccaggagggccgcaugaacuacuacuggacccucgucgagcccggcgacaagaucaccuucgaggccaccggcaaccucgucgucccccgcuacgccuucgccauggagcgcaacgccggcuccggcaucaucaucuccgacacccccguccacgacugcaacaccaccugccagacccccaagggcgccaucaacaccucccuccccuuccagaacauccaccccaucaccaucggcaagugccccaaguacgucaaguccaccaagcuccgccucgccaccggccuccgcaacguccccuccauccagucccgcggccucuucggcgccaucgccggcuucaucgagggcggcuggaccggcauggucgacggcugguacggcuaccaccaccagaacgagcagggcuccggcuacgccgccgaccucaaguccacccagaacgccaucgacgagaucaccaacaaggucaacuccgucaucgagaagaugaacacccaguucaccgccgucggcaaggaguucaaccaccucgagaagaagaucgagaaccucaacaagaaggucgacgacggcuuccucgacaucuggaccuacaacgccgagcuccucguccuccucgagaacgagcgcacccucgacuaccacgacuccaacgucaagaaccucuacgagaagguccgcucccagcucaagaacaacgccaaggagaucggcaacggcugcuucgaguucuaccacaagugcgacaacaccugcauggaguccgucaagaacggcaccuacgacuaccccaaguacuccgaggaggccaagcucaaccgcgaggagaucgacggcgucaagcucgaguccacccgcaucuaccagauccucgccaucuacuccaccgucgccuccucccucguccucgucgucucccucggcgccaucuccuucuggaugugcuccaacggcucccuccagugcaagaucugcaucuga

SEQ ID NO: 109839 - RNA, 1701 nt, Artificial Sequence; identical to SEQ ID NO: 109837
  derived and/or modified CDS sequence (opt2) from hemagglutinin__InfluenzaA__BAJ40063

SEQ ID NO: 109840 - RNA, 1701 nt, Artificial Sequence; identical to SEQ ID NO: 105308
  derived and/or modified CDS sequence (opt2) from hemagglutinin__InfluenzaA__BAJ40064

SEQ ID NO: 109841 - RNA, 1707 nt, Artificial Sequence
  derived and/or modified CDS sequence (opt2) from hemagglutinin__InfluenzaA__BAK23398
auggagaagaucguccuccuccucgccaucgucucccucgucaaguccgaccagaucugcaucggcuaccacgccaacaacuccaccgagcaggucgacaccaucauggagaagaacgucaccgucacccacgcccaggacauccucgagaagacccacaacggcaagcucugcgaccucgacggcgucaagccccucauccuccgcgacugcuccgucgccggcuggcuccucggcaaccccaugugcgacgaguuccucaacguccccgagugguccuacaucgucgagaagaucaaccccgucaacgaccucugcuaccccggcaacuucaacgacuacgaggagcucaagcaccuccucucccgcaucaaccacuucgagaagauccagaucuuccccaaguccuccugguccgaccacgaggccuccuccggcgucuccuccgccugccccuaccagggccgcuccuccuucuuccgcaacgucgucuggcucgucaagaaggacaacgccuaccccaccaucaagaaguccuacaacaacaccaaccaggaggaccuccucauccucuggggcauccaccaccccaacgacgccgccgagcagacccgccucuaccagaaccccaccaccuacaucuccgucggcaccuccacccucaaccagcgccucguccccaagaucgccacccgcuccaaggucaacggccaguccggccgcaucgaguucuucuggaccauccucaaguccaacgacgucaucaacuucgaguccaacggcaacuucaucgcccccgagaacgccuacaagaucgucaagaagggcgacuccaccaucaugaaguccgagcucgaguacggcaacugcaacaccaagugccagacccccaucggcgccaucaacuccuccaugcccuuccacaacauccacccccucaccaucggcgagugccccaaguacgucaaguccaaccgccucguccucgccaccggccuccgcaacuccccccgcggcgagcgccgccgcaagaagcgcggccucuucggcgccaucgccggcuucaucgagggcggcuggcagggcauggucgacggcugguacggcuaccaccacuccaacgagcagggcuccggcuacgccgccgacaaggaguccacccagaaggccaucgacggcgucaccaacaaggucaacuccaucaucgacaagaugaacacccaguucgaggccgucggccgcgaguucaacaaccucgagcgccgcaucgagaaccucaacaagaagauggaggacggcuuccucgacgucuggaccuacaacgccgagcuccucguccucauggagaacgagcgcacccucgacuuccacgacuccaacgucaagaaccucuacgacaagguccgccuccagcuccgcgacaacgccaaggagcucggcaacggcugcuucgaguucuaccaccgcugcgacaacgagugcauggaguccgucaagaacggcaccuacgacuacccccaguacuccgaggaggcccgccucaagcgcgaggagaucuccggcgucaagcucgaguccaucggcaccuaccagauccucuccaucuacuccaccgucgccuccucccucgcccucgccaucaugauggccggccucuuccucuggaugugcuccaacggcucccuccagugccgcaucugcaucuga

SEQ ID NO: 109842 - RNA, 1707 nt, Artificial Sequence
  derived and/or modified CDS sequence (opt2) from hemagglutinin__InfluenzaA__BAK23400
auggagaagaucguccuccuccucgccaucgucucccucgucaaguccgaccagaucugcaucggcuaccacgccaacaacuccaccgagcaggucgacaccaucauggagaagaacgucaccgucacccacgcccaggacauccucgagaagacccacaacggcaagcucugcgaccucaacggcgucaagccccucauccuccgcgacugcuccgucgccggcuggcuccucggcaaccccaugugcgacgaguuccucaacguccccgagugguccuacaucgucgagaagaucaaccccgccaacgaccucugcuaccccggcgacuucaacgacuacgaggagcucaagcaccuccucucccgcaucaaccacuucgagaagauccagaucauccccaaguccuccugguccgaccacgaggccuccuccggcgucuccuccgccugccccuaccagggccgcuccuccuucuuccgcaacgucgucuggcucaucaagaaggacaacgccuaccccaccaucaagcgcuccuacaacaacaccaaccaggaggaccuccucguccucuggggcauccaccaccccaacgacgccgccgagcagacccgccucuaccacaaccccaccaccuacaucuccgucggcaccuccacccucaaccagcgccucguccccaagaucgccacccgcuccaaggucaacggccaguccggccgcauggaguucuucuggaccauccucaagcccaacgacgccaucaacuucgaguccaacggcaacuucaucgcccccgagaacgccuacaagaucgucaagaagggcgacuccaccaucaugaaguccgagcucgaguacggcaacugcaacaccaagugccagacccccaucggcgccaucaacuccuccaugcccuuccacaacauccacccccucaccaucggcgagugccccaaguacgucaaguccucccgccucguccucgccaccggccuccgcaacuccccccagggcaagucccgccgcaagaagcgcggccucuucggcgccaucgccggcuucaucgagggcggcuggcagggcauggucgacggcugguacggcuaccaccacuccaacgagcagggcuccggcuacgccgccgacaaggaguccacccagcgcgccaucgacggcgucaccaacaaggucaacuccaucaucgacaagaugaacacccaguucgaggccgucggccgcgaguucaacaaccucgagcgccgcaucgagaaccucaacaagaagauggaggacggcuuccucgacgucuggaccuacaacgccgagcuccucguccucauggagaacgagcgcacccucgacuuccacgacuccaacgucaagaaccucuacgacaagguccgccuccagcuccgcgacaacgccaaggagcucggcaacggcugcuucgaguucuaccaccgcugcgacaacgagugcauggaguccguccgcaacggcaccuacgacuacccccaguacuccgaggaggcccgccucaagcgcgaggagaucuccggcgucaagcucgaguccaucggcaucuaccagauccucuccaucuacuccaccgucgccuccucccucgcccucgccaucauggucgccggccucuuccucuggaugugcuccaacggcucccuccagugccgcaucugcaucuga

SEQ ID NO: 109843 - RNA, 1707 nt, Artificial Sequence
  derived and/or modified CDS sequence (opt2) from hemagglutinin__InfluenzaA__BAK23401
auggagaagaucguccuccuccucgccaucgucucccucgucaaguccgaccagaucugcaucggcuaccacgccaacaacuccaccgagcaggucgacaccaucauggagaagaacgucaccgucacccacgcccaggacauccucgagaagacccacaacggcaagcucugcgaccucgacggcgucaagccccucauccuccgcgacugcuccgucgccggcuggcuccucggcaaccccaugugcgacgaguuccucaacgucuccgagugguccuacaucgucgagaagaucaaccccgccaacgaccucugcuaccccggcaacuucaacaacuacgaggagcucaagcaccuccucucccgcaucaaccgcuucgagaagauccagaucauccccaaguccuccuggcccgaccacgaggccucccucggcgucuccuccgccugccccuaccagggcggccccuccuucuaccgcaacgucgucuggcucaucaagaagaacaacaccuaccccaucaucaagaaguccuaccacaacaccaaccaggaggaccuccucguccucuggggcauccaccaccccaacgacgaggaggagcagacccgcaucuacaagaaccccaccaccuacaucuccgucggcaccuccacccucaaccagcgccucguccccaagaucgccacccgcuccaaggucaacggccaguccggccgcgucgaguucuucuggaccauccucaaguccaacgacaccaucaacuucgaguccaacggcaacuucaucgcccccgagaacgccuacaagaucgucaagaagggcgacuccaccaucaugaaguccgagcucgaguacggcaacugcaacaccaagugccagacccccaucggcgccaucaacuccuccaugcccuuccacaacauccacccccucaccaucggcgagugccccaaguacgucaaguccaaccgccucguccucgccaccggccuccgcaacuccccccagggcgagcgccgccgcaagaagcgcggccucuucggcgccaucgccggcuucaucgagggcggcuggcagggcauggucgacggcugguacggcuaccaccacuccaacgagcagggcuccggcuacgccgccgacaaggaguccacccagaaggccaucgacggcgucaccaacaaggucaacuccaucaucgacaagaugaacauccaguucgaggccgucggccgcgaguucaacaaccucgagcgccgcaucgagaaccucaacaagaagauggaggacggcuuccucgacgucuggaccuacaacgccgagcuccucguccucauggagaacgagcgcacccucgacuuccacgacuccaacgucaagaaccucuacgacaagguccgccuccagcuccgcgacaacgccaaggagcucggcaacggcugcuucgaguucuaccaccgcugcgacaacgagugcauggaguccguccgcaacggcaccuacgacuacccccaguacuccgaggaggcccgccucaagcgcgaggagaucuccggcgucaagcucgaguccaucggcaccuaccagauccucuccaucuacuccaccgucgccuccucccucgcccucgccaucauggucgccggccucuuccucuggaugugcuccaacggcucccuccagugccgcaucugcaucuga

SEQ ID NO: 109844 - RNA, 1707 nt, Artificial Sequence
  derived and/or modified CDS sequence (opt2) from hemagglutinin__InfluenzaA__BAK23402
auggagaagaucguccuccuccucgccaucgucucccucgucaaguccgaccagaucugcaucggcuaccacgccaacaacuccaccgagcaggucgacaccaucauggagaagaacgucaccgucacccacgcccaggacauccucgagaagacccacaacggcaagcucugcgaccucgacggcgucaagccccucauccuccgcgacugcuccgucgccggcuggcuccucggcaaccccaugugcgacgaguuccucaacguccccgagugguccuacaucgucgagaagaucaaccccgccaacgaccucugcuaccccggcaacuucaacgacuacgaggagcucaagcaccuccucucccgcaucaaccacuucgagaagauccagaucauccccaaguccuccugguccaaccacgaggccuccuccggcgucuccuccgccugccccuaccagggccgcuccuccuucuuccgcaacgucgucuggcucaucaagaaggacaacgccuaccccaccaucaagaucuccuacaacaacaccaaccaggaggaccuccucguccucuggggcauccaccaccccaacgacgccgccgagcagacccgccucuaccagaaccccaccaccuacaucuccgucggcaccuccacccucaaccagcgccucguccccaagaucgccacccgcuccaaggucaacggccaguccggccgcauggaguucuucuggaccauccucaaguccaacgacgccaucaacuucgaguccaacggcaacuucaucgcccccgagaacgccuacaagaucgucaagaagggcgacuccaccaucaugaaguccgagcucgaguacggcaacugcaacaccaagugccagacccccaucggcgccaucaacuccuccaugcccuuccacaacacccacccccucaccaucggcgagugccccaaguacgucaaguccaaccgccucguccucgccaccggccuccgcaacuccccccacggcgagcgccgccgcaagaagcgcggccucuucggcgccaucgccggcuucaucgagggcggcuggcagggcauggucgacggcugguacggcuaccaccacuccaacgagcagggcuccggcuacgccgccgacaaggaguccacccagaaggccaucgacggcgucaccaacaaggucaacuccaucaucgacaagaugaacacccaguucgaggccgucggccgcgaguucaacaaccucgagcgccgcaucgagaaccucaacaagaagauggaggacggcuuccucgacgucuggaccuacaacgccgagcuccucguccucauggagaacgagcgcacccucgacuuccacgacuccaacgucaagaaccucuacgacaagguccgccuccagcuccgcgacaacgccaaggagcucggcaacggcugcuucgaguucuaccaccgcugcgacaacgagugcauggaguccguccgcaacggcaccuacgacuacccccaguacuccgaggaggcccgccucaagcgcgaggagaucuccggcgucaagcucgaguccaucggcaccuaccagauccucuccaucuacuccaccgucgccuccucccucgcccucgccaucauggucgccggccucuuccucuggaugugcuccaacggcucccuccagugccgcaucugcaucuga

SEQ ID NO: 109845 - RNA, 1707 nt, Artificial Sequence
  derived and/or modified CDS sequence (opt2) from hemagglutinin__InfluenzaA__BAK23403
auggagaagaucguccuccuccucgccaucgucucccucgucaaguccgaccagaucugcaucggcuaccacgccaacaacuccaccgagcaggucgacaccaucauggagaagaacgucaccgucacccacgcccaggacauccucgagaagacccacaacggcaagcucugcgaccucgacggcgucaagccccucauccuccgcgacugcuccgucgccggcuggcuccucggcaaccccaugugcgacgaguuccucaacguccccgagugguccuacaucgucgagaagaucaaccccgccaacgaccucugcuaccccggcaacuucaacgacuacgaggagcucaagcaccuccucucccgcaucaaccacuucgagaagauccagaucauccccaaguccuccugguccaaccacgaggccuccuccggcgucuccuccgccugccccuaccagggccgcuccuccuucuuccgcaacgucgucuggcucaucaagaaggacaacgccuaccccaccaucaagaucuccuacaacaacaccaaccaggaggaccuccucguccucuggggcauccaccaccccaacgacgccgccgagcagacccgccucuaccagaaccccaccaccuacaucuccgucggcaccuccacccucaaccagcgccucguccccaagaucgccacccgcuccaaggucaacggccaguccggccgcauggaguucuucuggaccauccucaaguccaacgacgccaucaacuucgaguccaacggcaacuucaucgcccccgagaacgccuacaagaucgucaagaagggcgacuccaccaucaugaaguccgagcucgaguacggcaacugcaacaccaagugccagacccccaucggcgccaucaacuccuccaugcccuuccacaacauccacccccucaccaucggcgagugccccaaguacgucaaguccaaccgccucguccucgccaccggccuccgcaacuccccccagggcgagcgccgccgcaagaagcgcggccucuucggcgccaucgccggcuucaucgagggcggcuggcagggcauggucgacggcugguacggcuaccaccacuccaacgagcagggcuccggcuacgccgccgacaaggaguccacccagaaggccaucgacggcgucaccaacaaggucaacuccaucaucgacaagaugaacacccaguucgaggccgucggccgcgaguucaacaaccucgagcgccgcaucgagaaccucaacaagaagauggaggacggcuuccucgacgucuggaccuacaacgccgagcuccucguccucauggagaacgagcgcacccucgacuuccacgacuccaacgucaagaaccucuacgacaagguccgccuccagcuccgcgacaacgccaaggagcucggcaacggcugcuucgaguucuaccaccgcugcgacaacgagugcauggaguccguccgcaacggcaccuacgacuacccccaguacuccgaggaggcccgccucaagcgcgaggagaucuccggcgucaagcucgaguccaucggcaccuaccagauccucuccaucuacuccaccgucgccuccucccucgcccucgccaucauggucgccggccucuuccucuggaugugcuccaacggcucccuccagugccgcaucugcaucuga

SEQ ID NO: 109846 - RNA, 1707 nt, Artificial Sequence
  derived and/or modified CDS sequence (opt2) from hemagglutinin__InfluenzaA__BAK23404
auggagaagaucguccuccuccucgccaucgucucccucgucaaguccgaccagaucugcaucggcuaccacgccaacaacuccaccgagcaggucgacaccaucauggagaagaacgucaccgucacccacgcccaggacauccucgagaagacccacaacggcaagcucugcgaccucgacggcgucaagccccucauccuccgcgacugcuccgucgccggcuggcuccucggcaaccccaugugcgacgaguuccucaacguccccgagugguccuacaucgucgagaagaucaaccccgccaacgaccucugcuaccccggcaacuucaacgacuacgaggagcucaagcaccuccucucccgcaucaaccacuucgagaagauccagaucauccccaaguccuccugguccgaccacgaggccuccuccggcgucuccuccgccugccccuaccagggccgcuccuccuucuuccgcaacgucgucuggcucaucaagaaggacaacgccuaccccaccaucaagcgcuccuacaacaacaccaaccaggaggaccuccucguccucuggggcauccaccaccccaacgacgccgccgagcagacccgccucuaccagaaccccaccaccuacaucuccgucggcaccuccacccucaaccagcgccucguccccaagaucgccacccgcuccaaggucaacggccaguccggccgcauggaguucuucuggaccauccucaaguccaacgacgccaucaacuucgaguccaacggcaacuucaucgcccccgagaacgccuacaagaucgucaagaagggcgacuccaccaucaugaaguccgagcucgaguacggcaacugcaacaccaagugccagacccccaucggcgccaucaacuccuccaugcccuuccacaacauccacccccucaccaucggcgagugccccaaguacgucaaguccaaccgccucguccucgccaccggccuccgcaacuccccccagggcgagcgccgccgcaagaagcgcggccucuucggcgccaucgccggcuucaucgagggcggcuggcagggcauggucgacggcugguacggcuaccaccacuccaacgagcagggcuccggcuacgccgccgacaaggaguccacccagaaggccaucgacggcgucaccaacaaggucaacuccaucaucgacaagaugaacacccaguucgaggccgucggccgcgaguucaacaaccucgagcgccgcaucgagaaccucaacaagaagauggaggacggcuuccucgacgucuggaccuacaacgccgagcuccucguccucauggagaacgagcgcacccucgacuuccacgacuccaacgucaagaaccucuacgacaagguccgccuccagcuccgcgacaacgccaaggagcucggcaacggcugcuucgaguucuaccaccgcugcgacaacgagugcauggaguccguccgcaacggcaccuacgacuacccccaguacuccgaggaggcccgccucaagcgcgaggagaucuccggcgucaagcucgaguccaucggcaccuaccagauccucuccaucuacuccaccgucgccuccucccucgcccucgccaucauggucgccggccucuuccucuggaugugcuccaacggcucccuccagugccgcaucugcaucuga

SEQ ID NO: 109847 - RNA, 1707 nt, Artificial Sequence; identical to SEQ ID NO: 109846
  derived and/or modified CDS sequence (opt2) from hemagglutinin__InfluenzaA__BAK23405

SEQ ID NO: 109848 - RNA, 1707 nt, Artificial Sequence
  derived and/or modified CDS sequence (opt2) from hemagglutinin__InfluenzaA__BAK23406
auggagaagaucguccuccuccucgccaucgucucccucgucaaguccgaccagaucugcaucggcuaccacgccaacaacuccaccgagcaggucgacaccaucauggagaagaacgucaccgucacccacgcccaggacauccucgagaagacccacaacggcaagcucugcgaccucgacggcgucaagccccucauccuccgcgacugcuccgucgccggcuggcuccucggcaaccccaugugcgacgaguuccucaacguccccgagugguccuacaucgucgagaagaucaaccccgucaacgaccucugcuaccccggcaacuucaacgacuacgaggagcucaagcaccuccucucccgcaucaaccacuucgagaagauccagaucuuccccaaguccuccugguccgaccacgaggccuccuccggcgucuccuccgccugccccuaccagggccgcuccuccuucuuccgcaacgucgucuggcucgucaagaaggacaacgccuaccccaccaucaagaaguccuacaacaacaccaaccaggaggaccuccucauccucuggggcauccaccaccccaacgacgccgccgagcagacccgccucuaccagaaccccaccaccuacaucuccgucggcaccuccacccucaaccagcgccucguccccaagaucgccacccgcuccaaggucaacggccaguccggccgcaucgaguucuucuggaccauccucaaguccaacgacgucaucaacuucgaguccaacggcaacuucaucgcccccgagaacgccuacaagaucgucaagaagggcgacuccaccaucaugaaguccgagcucgaguacggcaacugcaacaccaagugccagacccccaucggcgccaucaacuccuccaugcccuuccacaacauccacccccucaccaucggcgagugccccaaguacgucaaguccaaccgccucguccucgccaccggccuccgcaacuccccccagggcgagcgccgccgcaagaagcgcggccucuucggcgccaucgccggcuucaucgagggcggcuggcagggcauggucgacggcugguacggcuaccaccacuccaacgagcagggcuccggcuacgccgccgacaaggaguccacccagaaggccaucgacggcgucaccaacaaggucaacuccaucaucgacaagaugaacacccaguucgaggccgucggccgcgaguucaacaaccucgagcgccgcaucgagaaccucaacaagaagauggaggacggcuuccucgacgucuggaccuacaacgccgagcuccucguccucauggagaacgagcgcacccucgacuuccacgacuccaacgucaagaaccucuacgacaagguccgccuccagcuccgcgacaacgccaaggagcucggcaacggcugcuucgaguucuaccaccgcugcgacaacgagugcauggaguccgucaagaacggcaccuacgacuacccccaguacuccgaggaggcccgccucaagcgcgaggagaucuccggcgucaagcucgaguccaucggcaccuaccagauccucuccaucuacuccaccgucgccuccucccucgcccucgccaucaugauggccggccucuuccucuggaugugcuccaacggcucccuccagugccgcaucugcaucuga

SEQ ID NO: 109849 - RNA, 1707 nt, Artificial Sequence
  derived and/or modified CDS sequence (opt2) from hemagglutinin__InfluenzaA__BAK23407
auggagaagaucguccuccuccucgccaucgucucccucgucaaguccggccagaucugcaucggcuaccacgccaacaacuccaccgagcaggucgacaccaucauggagaagaacgucaccgucacccacgcccaggacauccucgagaagacccacaacggcaagcucugcgaccucgacggcgucaagccccucauccuccgcgacugcuccgucgccggcuggcuccucggcaaccccaugugcgacgaguuccucaacgucuccgagugguccuacaucgucgagaagaucaaccccgccaacgaccucugcuaccccggcaacuucaacaacuacgaggagcucaagcaccuccucucccgcaucaaccgcuucgagaagauccagaucauccccaaguccuccuggcccgaccacgaggccucccucggcgucuccgccgccugccccuaccagggcggccccuccuucuaccgcaacgucgucuggcucaucaagaagaacaacaccuaccccaccaucgagaaguccuaccacaacaccaaccaggaggaccuccucguccucuggggcauccaccaccccaacgacgaggccgagcagacccgcaucuacaagaaccccaccaccuacaucuccgucggcaccuccacccucaaccagcgccucguccccaagaucgccacccgcuccaaggucaacggccaguccggccgcgucgaguucuucuggaccauccucaaguccaacgacaccaucaacuucgaguccaacggcaacuucaucgcccccgagaacgccuacaagaucgucaagaagggcgacuccaccaucaugaaguccgagcucgaguacggcaacugcaacacccgcugccagacccccaucggcgccaucaacuccuccaugcccuuccacaacauccacccccucaccaucggcgagugccccaaguacgucaaguccaaccgccucguccucgccaccggccuccgcaacuccccccagggcgagcgccgccgcaagaagcgcggccucuucggcgccaucgccggcuucaucgagggcggcuggcagggcauggucgacggcugguacggcuaccaccacuccaacgagcagggcuccggcuacgccgccgacaaggaguccacccagaaggccaucgacggcgucaccaacaaggucaacuccaucaucgacaagaugaacacccaguucgaggccgucggccgcgaguucaacaaccucgagcgccgcaucgagaaccucaacaagaagauggaggacggcuuccucgacgucuggaccuacaacgccgagcuccucguccucauggagaacgagcgcacccucgacuuccacgacuccaacgucaagaaccucuacgacaagguccgccuccagcuccgcgacaacgccaaggagcucggcaacggcugcuucgaguucuaccaccgcugcgacaacgagugcauggaguccguccgcaacggcaccuacgacuacccccaguacuccgaggaggcccgccucaagcgcgaggagaucuccggcgucaagcucgaguccaucggcaccuaccagauccucuccaucuacuccaccgucgccuccucccucgcccucgccaucauggucgccggccucuuccucuggaugugcuccaacggcucccuccagugccgcaucugcaucuga

SEQ ID NO: 109850 - RNA, 1707 nt, Artificial Sequence
  derived and/or modified CDS sequence (opt2) from hemagglutinin__InfluenzaA__BAK23408
auggagaagaucguccuccuccucgccaucgucucccucgucaaguccgaccagaucugcaucggcuaccacgccaacaacuccaccgagcaggucgacaccaucauggagaagaacgucaccgucacccacgcccaggacauccucgagaagacccacaacggcaagcucugcgaccucgacggcgucaagccccucauccuccgcgacugcuccgucgccggcuggcuccucggcaaccccaugugcgacgaguuccccaacgucuccgagugguccuacaucgucgagaagaucaaccccgccaacgaccucugcuaccccggcaacuucaacaacuacgaggagcucaagcaccuccucucccgcaucaaccgcuucgagaagauccagaucauccccaaguccuccuggcccgaccacgaggccucccucggcgucuccuccgccugccaguaccagggcggccccuccuucuaccgcaacgucgucuggcucaucaagaaggacaacgccuaccccaccaucaagaaguccuaccacaacaccaacaaggaggaccuccucguccucuggggcauccaccaccccaacaacgaggaggagcagaccaagcucuaccagaaccccaccaccuacaucuccgucggcaccuccacccucaaccagcgccucguccccaagaucgccacccgcuccaaggucaacggccaguccggccgcgucgaguucuucuggaccauccucaaguccaacgacgccaucaacuucgaguccaacggcaacuucaucgcccccgagaacgccuacaagaucgucaagaagggcgacuccaccaucaugaaguccgagcucgaguacggcaacuacaacaccaagugccagacccccaucggcgccaucaacuccuccaugcccuuccacaacauccacccccucaccaucggcgagugccccaaguacgucaaguccaaccgccucguccucgccaccggccuccgcaacuccccccagggcgagcgccgccgcaagaagcgcggccucuucggcgccaucgccggcuucaucgagggcggcuggcagggcauggucgacggcugguacggcuaccaccacuccaacgagcagggcuccggcuacgccgccgacaaggaguccacccagaaggccaucgacggcgucaccaacaaggucaacuccaucaucgacaagaugaacacccaguucgaggccgucggcaaggaguucaacaaccucgagcgccgcaucgagaaccucaacaagaagauggaggacggcuuccucgacgucuggaccuacaacgccgagcuccucguccucauggagaacgagcgcacccucgacuuccacgacuccaacgucaagaaccucuacgacaagguccgccuccagcuccgcgacaacgccaaggagcucggcaacggcugcuucgaguucuaccaccgcugcgacaacgagugcauggaguccguccgcaacggcaccuacgacuacccccaguacuccgaggaggcccgccucaagcgcgaggagaucuccggcgucaagcucgaguccaucggcaccuaccagauccucuccaucuacuccaccgucgccuccucccucgcccucgccaucauggucgccggccucuuccucuggaugugcuccaacggcucccuccagugccgcaucugcaucuga

SEQ ID NO: 109851 - RNA, 1707 nt, Artificial Sequence
  derived and/or modified CDS sequence (opt2) from hemagglutinin__InfluenzaA__BAK23411
auggagaagaucguccuccuccucgccaucgucucccucgucaaguccgaccagaucugcaucggcuaccacgccaacaacuccaccgagcaggucgacaccaucauggagaagaacgucaccgucacccacgcccaggacauccucgagaagacccacaacggcaagcucugcgaccucgacggcgucaagccccucauccuccgcgacugcuccgucgccggcuggcuccucggcaaccccaugugcgacgaguuccucaacgucuccgagugguccuacaucgucgagaagaucaaccccgccaacgaccucugcuaccccggcaacuucaacaacuacgaggagcucaagcaccuccucucccgcaucaaccgcuucgagaagauccagaucauccccaaguccuccuggcccgaccacgaggccucccucggcgucuccuccgccugccaguaccagggcggccccuccuucuaccgcaacgucgucuggcucaucaagaaggacaacgccuaccccaccaucaagaaguccuaccacaacaccaacaaggaggaccuccucguccucuggggcauccaccaccccaacaacgaggaggagcagaccaagcucuaccagaaccccaccaccuacaucuccgucggcaccuccacccucaaccagcgccucguccccaagaucgccacccgcuccaaggucaacggccaguccggccgcgucgaguucuucuggaccauccucaaguccaacgacgccaucaacuucgaguccaacggcaacuucaucgcccccgagaacgccuacaagaucgucaagaagggcgacuccaccaucaugaaguccgagcucgaguacggcaacugcaacaccaagugccagacccccaucggcgccaucaacuccuccaugcccuuccacaacauccacccccucaccaucggcgagugccccaaguacgucaaguccaaccgccucguccucgccaccggccuccgcaacuccccccagggcgagcgccgccgcaagaagcgcggccucuucggcgccaucgccggcuucaucgagggcggcuggcagggcauggucgacggcugguacggcuaccaccacuccaacgagcagggcuccggcuacgccgccgacaaggaguccacccagaaggccaucgacggcgucaccaacaaggucaacuccaucaucgacaagaugaacacccaguucgaggccgucggcaaggaguucaacaaccucgagcgccgcaucgagaaccucaacaagaagauggaggacggcuuccucgacgucuggaccuacaacgccgagcuccucguccucauggagaacgagcgcacccucgacuuccacgacuccaacgucaagaaccucuacgacaagguccgccuccagcuccgcgacaacgccaaggagcucggcaacggcugcuucgaguucuaccaccgcugcgacaacgagugcauggaguccguccgcaacggcaccuacgacuacccccaguacuccgaggaggcccgccucaagcgcgaggagaucuccggcgucaagcucgaguccaucggcaccuaccagauccucuccaucuacuccaccgucgccuccucccucgcccucgccaucauggucgccggccucuuccucuggaugugcuccaacggcucccuccagugccgcaucugcaucuga

SEQ ID NO: 109852 - RNA, 1707 nt, Artificial Sequence
  derived and/or modified CDS sequence (opt2) from hemagglutinin__InfluenzaA__BAK23412
auggagaagaucguccuccuccucgccaucgucucccucgucaaguccgaccagaucugcaucggcuaccacgccaacaacuccaccgagcaggucgacaccaucauggagaagaacgucaccgucacccacgcccaggacauccucgagaagacccacaagggcaagcucugcgaccucgacggcgucaagccccucauccuccgcgacugcuccgucgccggcuggcuccucggcaaccccaugugcgacgaguuccucaacgucuccgagugguccuacaucgucgagaagaucaaccccgccaacgaccucugcuaccccggcaacuucaacaacuacgaggagcucaagcaccuccucucccgcaucaaccgcuucgagaagauccagaucauccccaaguccuccuggcccgaccacgaggccucccucggcgucuccuccgccugccaguaccagggcggccccuccuucuaccgcaacgucgucuggcucaucaagaaggacaacaccuaccccaccaucaagaaguccuaccacaacaccaacaaggaggaccuccucguccucuggggcauccaccaccccaacaacgaggaggagcagaccaagcucuaccagaaccccaccaccuacaucuccgucggcaccuccacccucaaccagcgccucguccccaagaucgccacccgcuccaaggucaacggccaguccggccgcgucgaguucuucuggaccauccucaaguccaacgacgccaucaacuucgaguccaacggcaacuucaucgcccccgagaacgccuacaagaucgucaagaagggcgacuccaccaucaugaaguccgagcucgaguacggcaacugcaacaccaagugccagacccccaucggcgccaucaacuccuccaugcccuuccacaacauccacccccucaccaucggcgagugccccaaguacgucaaguccaaccgccucguccucgccaccggccuccgcaacuccccccagggcgagcgccgccgcaagaagcgcggccucuucggcgccaucgccggcuucaucgagggcggcuggcagggcauggucgacggcugguacggcuaccaccacuccaacgagcagggcuccggcuacgccgccgacaaggaguccacccagaaggccaucgacggcgucaccaacaaggucaacuccaucaucgacaagaugaacacccaguucgaggccgucggcaaggaguucaacaaccucgagcgccgcaucgagaaccucaacaagaagauggaggacggcuuccucgacgucuggaccuacaacgccgagcuccucguccucauggagaacgagcgcacccucgacuuccacgacuccaacgucaagaaccucuacgacaagguccgccuccagcuccgcgacaacgccaaggagcucggcaacggcugcuucgaguucuaccaccgcugcgacaacgagugcauggaguccguccgcaacggcaccuacgacuacccccaguacuccgaggaggcccgccucaagcgcgaggagaucuccggcgucaagcucgaguccaccggcaccuaccagauccucuccaucuacuccaccgucgccuccucccucgcccucgccaucauggucgccggccucuuccucuggaugugcuccaacggcucccuccagugccgcaucugcaucuga

SEQ ID NO: 109853 - RNA, 1707 nt, Artificial Sequence
  derived and/or modified CDS sequence (opt2) from hemagglutinin__InfluenzaA__BAK23413
auggagaagaucguccuccuccucgccaucgucucccucgucaaguccgaccagaucugcaucggcuaccacgccaacaacuccaccgagcaggucgacaccaucauggagaagaacgucaccgucacccacgcccaggacauccucgagaagacccacaacggcaagcucugcgaccucgacggcgucaagccccucauccuccgcgacugcuccgucgccggcuggcuccucggcaaccccaugugcgacgaguuccucaacgucuccgagugguccuacaucgucgagaagaucaaccccgccaacgaccucugcuaccccggcaacuucaacaacuacgaggagcucaagcaccuccucucccgcaucaaccgcuucgagaagauccagaucauccccaaguccuccuggcccgaccacgaggccucccucggcgucuccuccgccugccaguaccagggcggccccuccuucuaccgcaacgucgucuggcucaucaagaaggacaacaccuaccccaccaucaagaaguccuaccacaacaccaacaaggaggaccuccucguccucuggggcauccaccaccccaacaacgaggaggagcagaccaagcucuaccagaaccccaccaccuacaucuccgucggcaccuccacccucaaccagcgccucguccccaagaucgccacccgcuccaaggucaacggccaguccggccgcgucgaguucuucuggaccauccucaaguccaacgacgccaucaacuucgaguccaacggcaacuucaucgcccccgagaacgccuacaagaucgucaagaagggcgacuccaccaucaugaaguccgagcucgaguacggcaacugcaacaccaagugccagacccccaucggcgccaucaacuccuccaugcccuuccacaacauccacccccucaccaucggcgagugccccaaguacgucaaguccaaccgccucguccucgccaccggccuccgcaacuccccccagggcgagcgccgccgcaagaagcgcggccucuucggcgccaucgccggcuucaucgagggcggcuggcagggcauggucgacggcugguacggcuaccaccacuccaacgagcagggcuccggcuacgccgccgacaaggaguccacccagaaggccaucgacggcgucaccaacaaggucaacuccaucaucgacaagaugaacacccaguucgaggccgucggcaaggaguucaacaaccucgagcgccgcaucgagaaccucaacaagaagauggaggacggcuuccucgacgucuggaccuacaacgccgagcuccucguccucauggagaacgagcgcacccucgacuuccacgacuccaacgucaagaaccucuacgacaagguccgccuccagcuccgcgacaacgccaaggagcucggcaacggcugcuucgaguucuaccaccgcugcgacaacgagugcauggaguccguccgcaacggcaccuacgacuacccccaguacuccgaggaggcccgccucaagcgcgaggagaucuccggcgucaagcucgaguccaucggcaccuaccagauccucuccaucuacuccaccgucgccuccucccucgcccucgccaucauggucgccggccucuuccucuggaugugcuccaacggcucccuccagugccgcaucugcaucuga

SEQ ID NO: 109854 - RNA, 1707 nt, Artificial Sequence; identical to SEQ ID NO: 109851
  derived and/or modified CDS sequence (opt2) from hemagglutinin__InfluenzaA__BAK23414

SEQ ID NO: 109855 - RNA, 1698 nt, Artificial Sequence
  derived and/or modified CDS sequence (opt2) from hemagglutinin__InfluenzaA__BAM65746
auggaggucaagcuccucguccuccucugcaccuucaccgccaccuacgccgacaccaucugcaucggcuaccacgccaacaacuccaccgacaccgucgacacccuccccgagaagaacgucaccgucacccacuccgucaaccuccucgaggacacccacaacggcaagcucugccuccucaagggcaucgccccccuccagcucggcaacugcuccgucgccggcuggauccucggcaaccccgagugcgagcuccucaucucccgcgaguccugguccuacaucgucgagaagcccaaccccgagaacggcaucugcuaccccggccacuucgccgacuacgaggagcuccgcgagcagcucuccuccgucuccuccuucgagcgcuucgagaucuuccccaaggaguccuccuggcccaaccacaccgccaccggcgucuccgccuccugcucccacaacggcaaguccuccuucuacaagaaccuccucuggcucaccgucaagaacggccucuaccccaaccucuccaaguccuacgccaacaacaaggagaaggagguccucguccucuggggcguccaccaccccaccaacaucggcgaccagcgcgcccucuaccacaccgagaacgccuacgucuccgucgucuccucccacuacucccgccgcuucacccccgagaucgccaagcgccccaagguccgcgaccaggagggccgcaucaacuacuacuggacccuccucgagcccggcgacaccaucaucuucgaggccaacggcaaccucaucgccccccgcuacgccuucgcccucucccgcggcuucggcuccggcaucaucaaguccaacgcccccauggacgagugcaacgccaagugccagaccccccagggcgccaucaacuccucccuccccuuccagaacguccaccccgucaccaucggcgagugccccaaguacguccgcuccaccaagcuccgcauggucaccggccuccgcaacacccccuccauccagucccgcggccucuucggcgccaucgccggcuucaucgagggcggcuggaccggcauggucgacggcugguacggcuaccaccaccagaacgagcagggcuccggcuacgccgccgaccagaaguccacccagaacgccaucaacggcaucaccaacaaggucaacuccgucaucgagaagaugaacacccaguucaccgccgucgacaaggaguucaacaagcucgagcgccgcauggagaacuucaacaagaaggucgacgacggcuucaucgacaucuggaccuacaacgccgagcuccucauccuccucgagaacgagcgcacccucgacuuccacgacuccaacgucaagaaccucuacgagaaggucaagucccagcucaagaacaacgccaaggagaucggcaacggcugcuucgaguucuaccacaagugcaacgacgagugcauggaguccgucaagaacggcaccuacgacuaccccaaguacuccgaggaguccaagcucaaccgcgagaagaucgacggcgucaagcucgaguccaugggcgucuaccagauccucgccaucuacuccaccgucgccuccuccaugguccuccucgucucccucggcgccaucuccuucuggaugugcuccaacggcucccuccagugccgcaucugcaucuga

SEQ ID NO: 109856 - RNA, 1701 nt, Artificial Sequence; identical to SEQ ID NO: 108602
  derived and/or modified CDS sequence (opt2) from hemagglutinin__InfluenzaA__BAO79716

SEQ ID NO: 109857 - RNA, 1683 nt, Artificial Sequence
  derived and/or modified CDS sequence (opt2) from Hemagglutinin__InfluenzaA__CAB95856
auggagaccaucucccucaucaccauccuccucgucgucaccgccuccaacgccgacaagaucugcaucggccaccaguccaccaacuccaccgagaccgucgacacccucaccgagaccaacguccccgucacccacgccaaggagcuccuccacaccgagcacaacggcaugcucugcgccaccucccucggccacccccucauccucgacaccugcaccaucgagggccucgucuacggcaaccccuccugcgaccuccuccucggcggccgcgagugguccuacaucgucgagcgcuccuccgccgucaacggcaccugcuaccccggcaacgucgagaaccucgaggagcuccgcacccucuucuccuccgccuccuccuaccagcgcauccagaucuuccccgacaccaccuggaacgucaccuacaccggcaccucccgcgccugcuccggcuccuucuaccgcuccaugcgcuggcucacccagaaguccggcuucuaccccguccaggacgcccaguacaccaacaaccgcggcaaguccauccucuucgucuggggcauccaccacccccccaccuacaccgagcagaccaaccucuacauccgcaacgacaccaccaccuccgucaccaccgaggaccucaaccgcaccuucaagcccgucaucggcccccgcccccucgucaacggccuccagggccgcaucgacuacuacugguccguccucaagcccggccagacccuccgcguccgcuccaacggcaaccucaucgcccccugguacggccacguccucuccggcggcucccacggccgcauccucaagaccgaccucaagggcggcaacugcgucguccagugccagaccgagaagggcggccucaacuccacccuccccuuccacaacaucuccaaguacgccuucggcaccugccccaaguacguccgcgucaacucccucaagcucgccgucggccuccgcaacguccccgcccgcuccucccgcggccucuucggcgccaucgccggcuucaucgagggcggcuggcccggccucgucgccggcugguacggcuuccagcacuccaacgaccagggcgucggcauggccgccgaccgcgacuccacccagaaggccaucgacaagaucaccuccaaggucaacaacaucgucgacaagaugaacaagcaguacgagaucaucgaccacgaguucuccgaggucgagacccgccucaacaugaucaacaacaagaucgacgaccagauccaggacgucugggccuacaacgccgagcuccucguccuccucgagaaccagaagacccucgacgagcacgacgccaacgucaacaaccucuacaacaaggucaagcgcgcccucggcuccaacgccauggaggacggcaagggcugcuucgagcucuaccacaagugcgacgaccagugcauggagaccauccgcaacggcaccuacaaccgccgcaaguaccgcgaggagucccgccucgagcgccagaagaucgagggcgucaagcucgaguccgagggcaccuacaagauccucaccaucuacuccaccgucgccuccucccucguccucgccaugggcuucgccgccuuccucuucugggccauguccaacggcuccugccgcugcaacaucugcaucuga

SEQ ID NO: 109858 - RNA, 1683 nt, Artificial Sequence
  derived and/or modified CDS sequence (opt2) from Hemagglutinin__InfluenzaA__CAB95857
auggagaccaucucccucaucaccauccuccucgucgucaccgccuccaacgccgacaagaucugcaucggccaccaguccaccaacuccaccgagaccgucgacacccucaccgagaccaacguccccgucacccacgccaaggagcuccuccacaccgagcacaacggcaugcucugcgccaccucccucggccacccccucauccucgacaccugcaccaucgagggccucgucuacggcaaccccuccugcgaccuccuccucgagggccgcgagugguccuacaucgucgagcgcuccuccgccgucaacggcaccugcuaccccggcaacgucgagaaccucgaggagcuccgcacccucuucuccuccgccuccuccuaccagcgcauccagaucuuccccgacaccaccuggaacgucaccuacaccggcaccucccgcgccugcuccggcuccuucuaccgcuccaugcgcuggcucacccagaaguccggcuucuaccccguccaggacgcccaguacaccaacaaccgcggcaaguccauccucuucgucuggggcauccaccacccccccaccuacaccgagcagaccaaccucuacauccgcaacgacaccaccaccuccgucaccaccgaggaccucaaccgcaccuucaagcccgucaucggcccccgcccccucgucaacggccuccagggccgcaucgacuacuacugguccguccucaagcccggccagacccuccgcguccgcuccaacggcaaccucaucgcccccugguacggccacguccucuccggcggcucccacggccgcauccucaagaccgaccucaaguccggcaacugcgucguccagugccagaccgagaagggcggccucaacuccacccuccccuuccacaacaucuccaaguacgccuucggcaccugccccaaguacguccgcgucaacucccucaagcucgccgucggccuccgcaacguccccgcccgcuccucccgcggccucuucggcgccaucgccggcuucaucgagggcggcuggcccggccucgucgccggcugguacggcuuccagcacuccaacgaccagggcgucggcauggccgccgaccgcgacuccacccagaaggccaucgacaagaucaccuccaaggucaacaacaucgucgacaagaugaacaagcaguacgagaucaucgaccacgaguucuccgaggucgagacccgccucaacaugaucaacaacaagaucgacgaccagauccaggacgucugggccuacaacgccgagcuccucguccuccucgagaaccagaagacccucgacgagcacgacgccaacgucaacaaccucuacaacaaggucaagcgcgcccucggcuccaacgccauggaggacggcaagggcugcuucgagcucuaccacaagugcgacgaccagugcauggagaccauccgcaacggcaccuacaaccgccgcaaguaccgcgaggagucccgccucgagcgccagaagaucgagggcgucaagcucgaguccgagggcgccuacaagauccucaccaucuacuccaccgucgccuccucccucguccucgccaugggcuucgccgccuuccucuucugggccauguccaacggcuccugccgcugcaacaucugcaucuga

SEQ ID NO: 109859 - RNA, 1707 nt, Artificial Sequence
  derived and/or modified CDS sequence (opt2) from hemagglutinin__InfluenzaA__CBW54815
auggagaagaucguccuccuccucgccaucgucucccucgucaaguccgaccagaucugcaucggcuaccacgccaacaacuccaccgagcaggucgacaccaucauggagaagaacgucaccgucacccacgcccaggacauccucgagaagacccacaacggcaagcucugcgaccucgacggcgucaagccccucauccuccgcgacugcuccgucgccggcuggcuccucggcaaccccaugugcgacgaguuccccaacgucuccgagugguccuacaucgucgagaagaccaaccccgccaacgaccucugcuaccccggcaacuucgacaacuacgaggagcucaagcaccuccucucccgcaucaaccgcuucgagaagauccagaucauccccaaguccuccuggcccgaccacgaggccucccucggcgucuccuccgccugccccuaccagggcggccccuccuucuaccgcaacgucgucuggcucaucaagaagaacaacaccuaccccaccaucaaggaguccuaccacaacaccaaccaggaggaccuccucguccucuggggcauccaccaccccaacgacgaggaggagcagacccgcaucuacaagaaccccaccaccuacaucuccgucggcaccuccacccucaaccagcgccucguccccaagaucgccacccgcuccaaggucaacggccaguccggccgcgucgaguucuucuggaccauccucaaguccaacgacaccaucaacuucgaguccaacggcaacuucaucgcccccgagaacgccuacaagaucgucaagaagggcgacuccaccaucaugaaguccgagcucgaguacggcaacugcuccaccaagugccagacccccaucggcgccaucaacuccuccaugcccuuccacaacauccacccccucaccaucggcgagugccccaaguacgucaaguccaaccgccucguccucgccaccggccuccgcaacuccccccagggcgagggccgccgcaagaagcgcggccucuucggcgccaucgccggcuucaucgagggcggcuggcagggcauggucgacggcugguacggcuaccaccacuccaacgagcagggcuccggcuacgccgccgacaaggaguccacccagaaggccaucgacggcgucaccaacaaggucaacuccaucaucgacaagaugaacacccaguucgaggccgucggccgcgaguucaacaaccucgagaagcgcaucgagaaccucaacaagaagauggaggacggcuuccucgacgucuggaccuacaacgccgagcuccucguccucauggagaacgagcgcacccucgacuuccacgacuccaacgucaagaaccucuacgacaagguccgccuccagcuccgcgacaacgccaaggagcucggcaacggcugcuucgaguucuaccaccgcugcgacaacgagugcauggaguccguccgcaacggcaccuacgacuacccccaguacuccgaggaggcccgccucaagcgcgaggagaucuccggcgucaagcucgaguccaucggcaccuaccagauccucuccaucuacuccaccgucgccuccucccucgcccucgccaucauggucgccggccucuuccucuggaugugcuccaacggcucccuccagugccgcaucugcaucuga

SEQ ID NO: 109860 - RNA, 1707 nt, Artificial Sequence
  derived and/or modified CDS sequence (opt2) from hemagglutinin__InfluenzaA__CBW54817
auggagaagaucguccuccuccucgccaucgucucccucgucaaguccgaccagaucugcaucggcuaccacgccaacaacuccaccgagcaggucgacaccaucauggagaagaacgucaccgucacccacgcccaggacauccucgagaagacccacaacggcaagcucugcgaccucgacggcgucaagccccucauccuccgcgacugcuccgucgccggcuggcuccucggcaaccccaugugcgacgaguuccccaacgucuccgagugguccuacaucgucgagaagaucaaccccgccaacgaccucugcuaccccggcaacuucaacaacuacgaggagcucaagcaccuccucucccgcaucaaccgcuucgagaagauccagaucauccccaaguccuccuggcccgaccacgaggccucccucggcgucuccuccgccugccccuaccagcgcggccccuccuucuaccgcaacgucgucuggcucaucaagaagaacgacaccuaccccaccaucaaggaguccuaccacaacaccaaccaggaggaccuccucguccucuggggcauccaccaccccaacgacgaggaggagcagaagcgcaucuacaagaaccccaccaccuacaucuccgucggcaccuccacccucaaccagcgccucguccccaagaucgccacccgcuccaaggucaacggccaguccggccgcgucgaguucuucuggaccauccucaaguccaacgacaccaucaacuucgaguccaacggcaacuucaucgcccccgagaacgccuacaagaucgucaagaagggcgacuccaccaucaugaaguccgagcucgaguacggcaacugcuccaccaagugccagacccccaucggcgccaucaacaccuccaugcccuuccacaacauccacccccucaccaucggcgagugccccaaguacgucaaguccaaccgccucguccucgccaccggccuccgcaacuccccccagggcgagggccgccgcaagaagcgcggccucuucggcgccaucgccggcuucaucgagggcggcuggcagggcauggucgacggcugguacggcuaccaccacuccaacgagcagggcuccggcuacgccgccgacaaggaguccacccagaaggccaucgacggcgucaccaacaaggucaacuccaucaucgacaagaugaacacccaguucgaggccgucggccgcgaguucaacaaccucgagaagcgcaucgagaaccucaacaagaagauggaggacggcuuccucgacgucuggaccuacaacgccgagcuccucguccucauggagaacgagcgcacccucgacuuccacgacuccaacguccgcaaccucuacgacaagguccgccuccagcuccgcgacaacgccaaggagcucggcaacggcugcuucgaguucuaccaccgcugcgacaacgagugcauggaguccguccgcaacggcaccuacgacuacccccaguacuccgaggaggcccgccucaagcgcgaggagaucuccggcgucaagcucgaguccaucggcaccuaccagauccucuccaucuacuccaccgucgccuccucccucgcccucgccaucauggucgccggccucuuccucuggaugugcuccaacggcucccuccagugccgcaucugcaucuga

SEQ ID NO: 109861 - RNA, 1707 nt, Artificial Sequence
  derived and/or modified CDS sequence (opt2) from hemagglutinin__InfluenzaA__CBW54818
auggagaagaucguccuccuccucgccaucgucucccucgucaaguccgaccagaucugcaucggcuaccacgccaacaacuccaccgagcaggucgacaccaucauggagaagaacgucaccgucacccacgcccaggacauccucgagaagacccacaacggcaagcucugcgaccucgacggcgucaagccccucauccuccgcgacugcuccgucgccggcuggcuccucggcaaccccaugugcgacgaguuccccaacgucuccgagugguccuacaucgucgagaagaccaaccccgccaacgaccucugcuaccccggcaacuucaacaacuacgaggagcucaagcaccuccucucccgcaucaaccgcuucgagaagaucaagaucauccccaaguccuccuggcccgaccacgaggccucccucggcgucuccuccgccugccccuaccagggcggccccuccuucuaccgcaacgucgucuggcucaucaagaagaacaacaccuaccccaccaucaaggaguccuaccacaacaccaaccaggaggaccuccucguccucuggggcauccaccaccccaacgacgaggaggagcagacccgcaucuacaagaaccccaccaccuacaucuccgucggcaccuccacccucaaccagcgccucguccccaagaucgccacccgcuccaaggucaacggccaguccggccgcgucgaguucuucuggaccauccucaaguccaacgacaccaucaacuucgaguccaacggcaacuucaucgcccccgagaacgccuacaagaucgucaagaagggcgacuccaccaucaugaaguccgagcucgaguacggcaacugcuccaccaagugccagacccccgucggcgccaucaacuccuccaugcccuuccacaacauccacccccucaccaucggcgagugccccaaguacgucaaguccaaccgccucguccucgccaccggccuccgcaacuccccccagggcgagggccgccgcaagaagcgcggccucuucggcgccaucgccggcuucaucgagggcggcuggcagggcauggucgacggcugguacggcuaccaccacuccaacgagcagggcuccggcuacgccgccgaccgcgaguccacccagaaggccaucgacggcgucaccaacaaggucaacuccaucaucgacaagaugaacacccaguucgaggccgucggccgcgaguucaacaaccucgagaagcgcaucgagaaccucaacaagaagauggaggacggcuuccucgacgucuggaccuacaacgccgagcuccucguccucauggagaacgagcgcacccucgacuuccacgacuccaacgucaagaaccucuacgacaagguccgccuccagcuccgcgacaacgccaaggagcucggcaacggcugcuucgaguucuaccaccgcugcgacaacgagugcauggaguccguccgcaacggcaccuacgacuacccccaguacuccgaggaggcccgccucaagcgcgaggagaucuccggcgucaagcucgaguccaucggcaccuaccagauccucuccaucuacuccaccgucgccuccucccucgcccucgccaucaucgucgccggccuccuccucuggaugugcuccaacggcucccuccagugccgcaucugcaucuga

SEQ ID NO: 109862 - RNA, 1701 nt, Artificial Sequence
  derived and/or modified CDS sequence (opt2) from hemagglutinin__InfluenzaA__CCG47908
augaagaccgucaucgcccucuccuacgucuucugccucggcuucggccagggccuccccggcaagggcaacaacaccgccacccucugccucggccaccacgccguccccaacggcacccucgucaagaccaucaccgacgaccagaucgaggucaccaacgccaccgagcucguccagaacuucuccaugggcaagaucugcaagaacccccaccgcauccucgacggcgccaacugcacccucaucgacucccuccucggcgacccccacugcgacggcuuccaggacgagaagugggaccucuucaucgagcgcuccaaggccuucuccaacugcuaccccuacgacguccccgaguacaccucccuccgcuccaucaucgccuccuccggcacccucgaguucaccaacgaggacuucaacuggaccggcgucacccagaacggcggcuccuccgccugcaagcgcggccccaacaacuccuucuucucccgccucaacuggcucuacaaguccggcaacaccuaccccaugcucaacgucaccaugcccaacuccgacgacuucgacaagcucuacaucuggggcguccaccaccccuccaccgaccgcgagcagaccaaccucuacauccaggccuccggcaagaucaucgucuccaccaagcgcucccagcagaccaucauccccaacaucggcucccgccccuggguccgcggccucuccucccgcaucuccaucuacuggaccaucgucaagcccggcgacauccucaucaucaacuccaacggcaaccucaucgccccccgcggcuacuucaagauccagaccggcaaguccuccgucaugcgcuccgacgcccccaucgacaccugcaacuccgagugcaucacccccaacggcuccauccccaacgacaagcccuuccagaacgucaaccgcaucaccuacggcgccugccccaaguacaucaagcagaacacccucaagcucgccaccggcaugcgcaacauccccgagcgccagacccgcggcaucuucggcgccaucgccggcuucaucgagaacggcugggagggcauggucaacggcugguacggcuuccgccaccagaacuccgagggcaucggccaggccgccgaccucaaguccacccaggccgccaucaaccagaucaacggcaagcucaaccgcgucaucgagaagaccaacgagaaguuccaccagaucgagaaggaguucuccgaggucgagggccgcauccaggaccucgagcgcuacgucgaggacaccaagaucgaccucugguccuacaacgccgagcuccucgucgcccucgagaaccagcacaccaucgaccucaccgacuccgagaugaacaagcucuucgagaagacccgcaagcagcuccgcgagaacgccgaggacaugggcaacggcugcuucaagaucuaccacaagugcgacaacuccugcauggaguccauccgcaacggcaccuacgaccacaacgaguaccgcgacgaggccgucaacaaccgcuuccagaucaaguccgucgagcucaaguccggcuacaaggacuggauccucuggaucuccuucgccaucuccugcuuccuccucugcgccgucuggcucggcuucaucaucugggccugccagaagggcaacauccgcugcaacaucugcaucuga

SEQ ID NO: 109863 - RNA, 1701 nt, Artificial Sequence
  derived and/or modified CDS sequence (opt2) from hemagglutinin__InfluenzaA_ _AAB39851
augaaggccauccuccucguccuccucugcaccuucgccgccaccaacgccgacacccucugcaucggcuaccacgccaacaacuccaccgacaccgucgacaccguccucgagaagaacgucaccgucacccacuccgucaaccuccucgaggaccgccacaacggcaagcucugcaagcucggcggcaucgccccccuccaccucggcaagugcaacaucgccggccgccuccucggcaaccccgagugcgagcuccuccucaccgucuccuccugguccuacaucgucgagaccuccaaguccgacaacggcaccugcuaccccggcgacuucaucaacuacgaggagcuccgcgagcagcucuccuccgucuccuccuucgagcgcuucgagaucuuccccaagaccuccuccuggcccaaccacgagaccaaccgcggcgucaccgccgccugccccuacgccggcgccaacuccuucuaccgcaaccucaucuggcucgucaagaaggagaacuccuaccccaagcucuccaaguccuacgucaacaacaagggcaaggagguccucguccucuggggcauccaccacccccccaccuccaccgaccagcagucccucuaccagaacgccgacgccuacgucuucgucggcuccuccaaguacaaccgcaaguucaagcccgagaucgccgcccgccccaagguccgcggccaggccggccgcauguccuacuacuggacccucaucgagcccggcgacaccaucaccuucgaggccaccggcaaccucgucgucccccgcuacgccuucgccaugaaccgcggcuccggcuccggcaucaucaucugggacgcccccguccacgacugcaacaccaagugccagacccccaagggcgccaucaacaccucccuccccuuccagaacauccaccccgucaccaucggcgagugccccaaguacgucaaguccaccaagcuccgcauggccaccggccuccgcaacguccccuccauccagucccgcggccucuucggcgccaucgccggcuucaucgagggcggcuggaccggcaugaucgacggcugguacggcuaccaccaccagaacgagcagggcuccggcuacgccgccgaccagcgcuccacccagaacgccaucgacggcaucaccaacaaggucaacuccgucaucgagaagaugaacacccaguucaccgccgucggcaaggaguucaaccaccucgagaagcgcaucgagaaccucaacaagaaggucgacgacggcuuccucgacaucuggaccuacaacgccgagcuccucguccuccucgagaacgagcgcacccucgacuuccacgacuccaacgucaagaaccucuacgagaagguccgcucccagcuccgcaacaacgccaaggagaucggcaacggcugcuucgaguucuaccacaagugcgacgacaccugcauggaguccgucaagaacggcaccuacgacuaccccaaguacuccgaggaguccaagcucaaccgcgaggagaucgacggcgucaagcucgaguccacccgcaucuaccagauccucgccaucuacuccaccgucgccuccucccucguccuccucgucucccucggcgccaucuccuucuggaugugcuccaacggcucccuccagugccgcaucugcaucuga

SEQ ID NO: 109864 - RNA, 1701 nt, Artificial Sequence
  derived and/or modified CDS sequence (opt2) from hemagglutinin__InfluenzaA__AAA43178
augaagaccaucaucgcccucuccuacaucuucugccucgcccucggccaggaccuccccggcaacgacaacuccaccgccacccucugccucggccaccacgccguccccaacggcacccucgucaagaccaucaccgacgaccagaucgaggucaccaacgccaccgagcucguccaguccuccuccaccggcaagaucugcaacaacccccaccgcauccucgacggcaucgacugcacccucaucgacgcccuccucggcgacccccacugcgacgucuuccagaacgagaccugggaccucuucgucgagcgcuccaaggccuucuccaacugcuaccccuacgacguccccgacuacgccucccuccgcucccucgucgccuccuccggcacccucgaguucaucaccgagggcuucaccuggaccggcgucacccagaacggcggcuccaacgccugcaagcgcggccccggcuccggcuucuucucccgccucaacuggcucaccaaguccggcuccaccuaccccguccucaacgucaccaugcccaacaacgacaacuucgacaagcucuacaucuggggcauccaccaccccuccaccaaccaggagcagaccucccucuacguccaggccuccggccgcgucaccgucuccacccgccgcucccagcagaccaucauccccaacaucggcucccgccccuggguccgcggccucuccucccgcaucuccaucuacuggaccaucgucaagcccggcgacguccucgucaucaacuccaacggcaaccucaucgccccccgcggcuacuucaagaugcgcaccggcaaguccuccaucaugcgcuccgacgcccccaucgacaccugcaucuccgagugcaucacccccaacggcuccauccccaacgacaagcccuuccagaacgucaacaagaucaccuacggcgccugccccaaguacgucaagcagaacacccucaagcucgccaccggcaugcgcaacguccccgagaagcagacccgcggccucuucggcgccaucgccggcuucaucgagaacggcugggagggcaugaucgacggcugguacggcuuccgccaccagaacuccgagggcaccggccaggccgccgaccucaaguccacccaggccgccaucgaccagaucaacggcaagcucaaccgcgucaucgagaagaccaacgagaaguuccaccagaucgagaaggaguucuccgaggucgagggccgcauccaggaccucgagaaguacgucgaggacaccaagaucgaccucugguccuacaacgccgagcuccucgucgcccucgagaaccagcacaccaucgaccucaccgacuccgagaugaacaagcucuucgagaagacccgccgccagcuccgcgagaacgccgaggagaugggcaacggcugcuucaagaucuaccacaagugcgacaacgccugcaucgaguccauccgcaacggcaccuacgaccacgacgucuaccgcgacgaggcccucaacaaccgcuuccagaucaagggcgucgagcucaaguccggcuacaaggacuggauccucuggaucuccuucgccaucuccugcuuccuccucugcgucguccuccucggcuucaucaugugggccugccagcgcggcaacauccgcugcaacaucugcaucuga

SEQ ID NO: 109865 - RNA, 1689 nt, Artificial Sequence
  derived and/or modified CDS sequence (opt2) from hemagglutinin__InfluenzaA__AAA43185
auggccaucaucuaccucauccuccucuucaccgccguccgcggcgaccagaucugcaucggcuaccacgccaacaacuccaccgagaaggucgacaccaaccucgagcgcaacgucaccgucacccacgccaaggacauccucgagaagacccacaacggcaagcucugcaagcucaacggcauccccccccucgagcucggcgacugcuccaucgccggcuggcuccucggcaaccccgagugcgaccgccuccucuccguccccgagugguccuacaucauggagaaggagaacccccgcgacggccucugcuaccccggcuccuucaacgacuacgaggagcucaagcaccuccucuccuccgucaagcacuucgagaaggucaagauccuccccaaggaccgcuggacccagcacaccaccaccggcggcucccgcgccugcgccgucuccggcaaccccuccuucuuccgcaacauggucuggcucaccaaggagggcuccgacuaccccgucgccaagggcuccuacaacaacaccuccggcgagcagaugcucaucaucuggggcguccaccaccccaucgacgagaccgagcagcgcacccucuaccagaacgucggcaccuacgucuccgucggcaccuccacccucaacaagcgcuccacccccgagaucgccacccgccccaaggucaacggccagggcggccgcauggaguucuccuggacccuccucgacaugugggacaccaucaacuucgaguccaccggcaaccucaucgcccccgaguacggcuucaagaucuccaagcgcggcuccuccggcaucaugaagaccgagggcacccucgagaacugcgagaccaagugccagaccccccucggcgccaucaacaccacccuccccuuccacaacguccacccccucaccaucggcgagugccccaaguacgucaaguccgagaagcucguccucgccaccggccuccgcaacgucccccagaucgagucccgcggccucuucggcgccaucgccggcuucaucgagggcggcuggcagggcauggucgacggcugguacggcuaccaccacuccaacgaccagggcuccggcuacgccgccgacaaggaguccacccagaaggccuucgacggcaucaccaacaaggucaacuccgucaucgagaagaugaacacccaguucgaggccgucggcaaggaguucggcaaccucgagcgccgccucgagaaccucaacaagcgcauggaggacggcuuccucgacgucuggaccuacaacgccgagcuccucguccucauggagaacgagcgcacccucgacuuccacgacuccaacgucaagaaccucuacgacaagguccgcaugcagcuccgcgacaacgucaaggagcucggcaacggcugcuucgaguucuaccacaagugcgacgacgagugcaugaacuccgucaagaacggcaccuacgacuaccccaaguacgaggaggaguccaagcucaaccgcaacgagaucaagggcgucaagcucuccuccaugggcgucuaccagauccucgccaucuacgccaccgucgccggcucccucucccucgccaucaugauggccggcaucuccuucuggaugugcuccaacggcucccuccagugccgcaucugcaucuga

SEQ ID NO: 109866 - RNA, 1701 nt, Artificial Sequence
  derived and/or modified CDS sequence (opt2) from hemagglutinin__InfluenzaA__AAA43187
augaagaccaucaucgcccucucccacaucuucugccucguccucggccaguaccuccccggcaacgacaacuccaccgccacccucugccucggccaccacgccguccccaacggcacccucgucaagaccaucaccaacgaccagaucgaggucaccaacgccaccgagcucguccaguccuccuccaccggcaagaucugcaacaacccccaccgcauccucgacggcaucgacugcacccucaucgacgcccuccucggcgacccccacugcgacggcuuccagaacgagaccugggaccucuucgucgagcgcuccaaggccuucuccaacugcuaccccuacgacguccccgacuacgccucccuccgcucccucgucgccuccuccggcacccucgaguucaucaccgagggcuucaccuggaccggcgucacccagaacggcggcuccaacgccugcaagcgcggccccggcuccggcuucuucucccgccucaacuggcucaccaaguccgaguccaccuaccccguccucaacgucaccaugcccaacaacgacaacuucgacaagcucuacaucuggggcguccaccaccccuccaccaaccaggagcagaccucccucuacguccaggccuccggccgcgucaccgucuccacccgccgcucccagcagaccaucauccccaacaucggcucccgccccuggguccgcggccucuccucccgcaucuccaucuacuggaccaucgucaagcccggcgacguccucgucaucaacuccaacgccaaccucaucgccccccgcggcuacuucaagaugcgcaccggcaaguccuccaucaugcgcuccgacgcccccaucgacaccugcaucuccgagugcaucacccccaacggcuccauccccaacgacaagcccuuccagaacgucaacaagaucaccuacggcgccugccccaaguacgucaagcagaacacccucaagcucgccacccgcaugcgcaacguccccgagaagcagacccgcggccucuucggcgccaucgccggcuucaucgagaacggcugggagggcaugaucgacggcugguacggcuuccgccaccagaacuccgagggcaccggccaggccgccgaccucaaguccacccaggccgccaucgaccagaucaacggcaagcucaaccgcgucaucgagaagaccaacgagaaguuccaccagaucgagaaggaguucuccgaggucgagggccgcauccaggaccucgagaaguacgucgaggacaccaagaucgaccucugguccuacaacgccgagcuccucgucgcccucgagaaccagcacaccaucgaccucaccgacuccgagaugaacaagcucuucgagaagacccgccgccagcuccgcgagaacgccgaggacaugggcaacggcugcuucaagaucuacgacaagugcgacaacgccugcaucgaguccauccgcaacggcaccuacgaccacgacgucuaccgcgacgaggcccucaacaaccgcuuccagaucaagggcgucgagcucaaguccggcuacaaggacuggauccucuggaucuccuucgccaucuccugcuuccuccucugcgucguccuccucggcuucaucaugugggccugccagcgcggcaacauccgcugcaacaucugcaucuga

SEQ ID NO: 109867 - RNA, 1698 nt, Artificial Sequence
  derived and/or modified CDS sequence (opt2) from hemagglutinin__InfluenzaA__AAA43209
augaaggccaagcuccucguccuccucuacgccuucgucgccaccgacgccgacaccaucugcaucggcuaccacgccaacaacuccaccgacaccgucgacaccaucuucgagaagaacgucgccgucacccacuccgucaaccuccucgaggaccgccacaacggcaagcucugcaagcucaagggcaucgccccccuccagcucggcaagugcaacaucaccggcuggcuccucggcaaccccgagugcgacucccuccuccccgcccgcuccugguccuacaucgucgagacccccaacuccgagaacggcgccugcuaccccggcgacuucaucgacuacgaggagcuccgcgagcagcucuccuccgucuccucccucgagcgcuucgagaucuuccccaaggaguccuccuggcccaaccacaccuucaacggcgucaccgucuccugcucccaccgcggcaaguccuccuucuaccgcaaccuccucuggcucaccaagaagggcgacuccuaccccaagcucaccaacuccuacgucaacaacaagggcaaggagguccucguccucuggggcguccaccaccccuccuccuccgacgagcagcagucccucuacuccaacggcaacgccuacgucuccgucgccuccuccaacuacaaccgccgcuucacccccgagaucgccgcccgccccaaggucaaggaccagcacggccgcaugaacuacuacuggacccuccucgagcccggcgacaccaucaucuucgaggccaccggcaaccucaucgcccccugguacgccuucgcccucucccgcggcuucgaguccggcaucaucaccuccaacgccuccaugcacgagugcaacaccaagugccagaccccccagggcuccaucaacuccaaccuccccuuccagaacauccaccccgucaccaucggcgagugccccaaguacguccgcuccaccaagcuccgcauggucaccggccuccgcaacauccccuccauccaguaccgcggccucuucggcgccaucgccggcuucaucgagggcggcuggaccggcaugaucgacggcugguacggcuaccaccaccagaacgagcagggcuccggcuacgccgccgaccagaaguccacccagaacgccaucaacggcaucaccaacaaggucaacuccgucaucgagaagaugaacacccaguucaccgccgucggcaaggaguucaacaaccucgagaagcgcauggagaaccucaacaagaaggucgacgacggcuuccucgacaucuggaccuacaacgccgagcuccucguccuccucgagaacgagcgcacccucgacuuccacgaccucaacgucaagaaccucuacgagaaggucaagucccagcucaagaacaacgccaaggagaucggcaacggcugcuucgaguucuaccacaagugcgacaacgagugcauggaguccguccgcaacggcaccuacgacuaccccaaguacuccgaggaguccaagcucaaccgcgagaagaucgacggcgucaagcucgaguccaugggcgucuaccagauccucgccaucuacuccaccgucgccuccucccucguccuccucgucucccucggcgccaucuccuucuggaugugcuccaacggcucccuccagugccgcaucugcaucuga

SEQ ID NO: 109868 - RNA, 1683 nt, Artificial Sequence
  derived and/or modified CDS sequence (opt2) from hemagglutinin__InfluenzaA__AAC40998
augaacacccagauccucauccucgcccucgucgccaucauccccaccaacgccgacaagaucugccucggccaccacgccgucuccaacggcgccaaggucaacacccucaccgagcgcggcgucgaggucgucaacgccaccgagaccgucgagcgcaccaacgucccccgcaucugcuccaagggcaagcgcaccgucgaccucggccagugcggccuccucggcaccaucaccggccccccccagugcgaccaguuccucgaguucuccgccgaccucaucaucgagcgccgcgagggcaacgacgucugcuaccccggcaaguucgucaacgaggaggcccuccgccagauccuccgcaaguccggcggcaucgacaaggagaccaugggcuucaccuacuccggcauccgcaccaacggcgccaccuccgccugccgccgcuccggcuccuccuucuacgccgagaugaaguggcuccucuccaacaccgacaacgccgccuucccccagaugaccaaguccuacaagaacauccgcaaggaccccgcccucaucaucuggggcauccaccacuccggcuccaccgccgagcagaccaagcucuacggcuccggcaacaagcucaucaccgucggcuccuccaacuaccagcaguccuucguccccucccccggcgcccgcccccaggucaacggccaguccggccgcaucgacuuccacuggcucaugcucaaccccaacgacaccgucaccuucuccuucaacggcgccuucaucgcccccgaccgcgccuccuuccuccgcggcaaguccaugggcauccaguccgagguccaggucgacgccaacugcgagggcgacugcuaccacuccggcggcaccauccucuccucccuccccuuccagaacaucaacucccgcaccgucggcgagugcccccgcuacgucaagcaggagucccuccuccucgccaccggcaugaagaacguccccgagauccccaagggccgcggccucuucggcgccaucgccggcuucaucgagaacggcugggagggccucgucgacggcugguacggcuuccgccaccagaacgcccagggcgagggcaccgccgccgacuacaaguccacccaguccgccaucgaccagaucaccggcaagcucaaccgccucaucgagaagaccaaccagcaguucgagcucaucgacaacgaguucaccgaggucgagaagcagaucggcaacgucaucaacuggacccgcgacucccucaccgagaugugguccuacaacgccgagcuccucgucgccauggagaaccagcacaccaucgaccucgccgacuccgagaugaacaagcucuacgagcgcguccgccgccagcuccgcgagaacgccgaggaggacggcaccggcugcuucgagaucuuccacaagugcgacgacgacugcauggccuccauccgcaacaacaccuacgaccacuccaaguaccgcgaggaggccauccagaaccgcauccagaucgaccccgucaagcucuccuccggcuacaaggacgucauccucugguucuccuucggcgccuccugcuucauccuccucgccaucgccaugggccucgucuucaucugcgucaagaacggcaacaugcgcugcaccaucugcaucuga

SEQ ID NO: 109869 - RNA, 1683 nt, Artificial Sequence
  derived and/or modified CDS sequence (opt2) from hemagglutinin__InfluenzaA__AAC40999
augaacacccagauccucauccucgcccucgucgccaucauccccaccaacgccgacaagaucugccucggccaccacgccgucuccaacggcaccaaggucaacacccucaccgagcgcggcgucgaggucgucaacgccaccgagaccgucgagcgcaccaacgucccccgcaucugcuccaagggcaagcgcaccgucgaccucggccagugcggccuccucggcaccaucaccggccccccccagugcgaccaguuccucgaguucuccgccgaccucaucaucgagcgccgcgagggcgacgacgucugcuaccccggcaaguucgucaacgaggaggcccuccgccagauccuccgcgaguccggcggcaucgacaaggagaccaugggcuucaccuacuccggcauccgcaccaacggcgccaccuccgccugccgccgcuccggcuccuccuucuacgccgagaugaaguggcuccucuccaacaccgacaacgccgccuucccccagaugaccaaguccuacaagaacauccgcaaggaccccgcccucaucaucuggggcauccaccacuccggcuccaccgccgagcagaccaagcucuacggcuccggcaacaagcucaucaccgucggcuccuccaacuaccagcaguccuucguccccauccccggcgcccgcccccaggucaacggccaguccggccgcaucgacuuccacuggcucaugcucaaccccaacgacaccgucaccuucuccuucaacggcgccuucaucgcccccgaccgcgccuccuuccuccgcggcaaguccaugggcauccaguccgagguccaggucgacgccaacugcgagggcgacugcuaccacuccggcggcaccauccucaacaaccuccccuuccagaacaucaacggccgcgccgucggcaagugcccccgcuacgucaagcaggagucccuccuccucgccaccggcaugaagaacguccccgagauccccaagggccgcggccucuucggcgccaucgccggcuucaucgagaacggcugggagggccucgucgacggcugguacggcuuccgccaccagaacgcccagggcgagggcaccgccgccgacuacaaguccacccaguccgccaucgaccagaucaccggcaagcucaaccgccucaucgagaagaccaaccagcaguucgagcucaucgacaacgaguucaccgaggucgagaagcagaucggcaacgucaucaacuggacccgcgacuccaugaccgaggucugguccuacaacgccgagcuccucgucgccauggagaaccagcacaccaucgaccucgccgacuccgagaugaacaagcucuacgagcgcguccgccgccagcuccgcgagaacgccgaggaggacggcaccggcugcuucgagaucuuccacaagugcgacgacgacugcauggccuccauccgcaacaacaccuacgaccacuccaaguaccgcgaggaggccauccagaaccgcauccagaucgaccccgucaagcucuccuccggcuacaaggacgucauccucugguucuccuucggcgccuccugcuucauccuccucgccaucgccaugggccucgucuucaucugcgucaagaacggcaacaugcgcugcaccaucugcaucuga

SEQ ID NO: 109870 - RNA, 1698 nt, Artificial Sequence; identical to SEQ ID NO: 98524
  derived and/or modified CDS sequence (opt2) from hemagglutinin__InfluenzaA__ACA28844

SEQ ID NO: 109871 - RNA, 1698 nt, Artificial Sequence; identical to SEQ ID NO: 103829
  derived and/or modified CDS sequence (opt2) from hemagglutinin__InfluenzaA__ACA28844/m1

SEQ ID NO: 109872 - RNA, 1701 nt, Artificial Sequence; identical to SEQ ID NO: 105186
  derived and/or modified CDS sequence (opt2) from hemagglutinin__InfluenzaA__ACV82259

SEQ ID NO: 109873 - RNA, 1701 nt, Artificial Sequence; identical to SEQ ID NO: 105186
  derived and/or modified CDS sequence (opt2) from hemagglutinin__InfluenzaA__ACV82259/m1

SEQ ID NO: 109874 - RNA, 1701 nt, Artificial Sequence; identical to SEQ ID NO: 105186
  derived and/or modified CDS sequence (opt2) from hemagglutinin__InfluenzaA__ACV82259/m2

SEQ ID NO: 109875 - RNA, 1701 nt, Artificial Sequence; identical to SEQ ID NO: 98703
  derived and/or modified CDS sequence (opt2) from hemagglutinin__InfluenzaA__ACP41953

SEQ ID NO: 109876 - RNA, 1701 nt, Artificial Sequence; identical to SEQ ID NO: 108277
  derived and/or modified CDS sequence (opt2) from hemagglutinin__InfluenzaA__AFM72832

SEQ ID NO: 109877 - RNA, 1701 nt, Artificial Sequence
  derived and/or modified CDS sequence (opt2) from hemagglutinin__InfluenzaA__EPI516528
augaaggccauccucgucguccuccucuacaccuucgccaccgccaacgccgacacccucugcaucggcuaccacgccaacaacuccaccgacaccgucgacaccguccucgagaagaacgucaccgucacccacuccgucaaccuccucgaggacaagcacaacggcaagcucugcaagcuccgcggcgucgccccccuccaccucggcaagugcaacaucgccggcuggauccucggcaaccccgagugcgagucccucuccaccgccuccuccugguccuacaucgucgagacccccuccuccgacaacggcaccugcuaccccggcgacuucaucgacuacgaggagcuccgcgagcagcucuccuccgucuccuccuucgagcgcuucgagaucuuccccaagaccuccuccuggcccaaccacgacuccaacaagggcgucaccgccgccugcccccacgccggcgccaaguccuucuacaagaaccucaucuggcucgucaagaagggcaacuccuaccccaagcucuccaaguccuacaucaacgacaagggcaaggagguccucguccucuggggcauccaccaccccuccaccuccgccgaccagcagucccucuaccagaacgccgacgccuacgucuucgucggcuccucccgcuacuccaagaaguucaagcccgagaucgccauccgccccaagguccgcgaccaggagggccgcaugaacuacuacuggacccucgucgagcccggcgacaagaucaccuucgaggccaccggcaaccucgucgucccccgcuacgccuucgccauggagcgcaacgccggcuccggcaucaucaucuccgacacccccguccacgacugcaacaccaccugccagacccccaagggcgccaucaacaccucccuccccuuccagaacauccaccccaucaccaucggcaagugccccaaguacgucaaguccaccaagcuccgccucgccaccggccuccgcaacauccccuccauccagucccgcggccucuucggcgccaucgccggcuucaucgagggcggcuggaccggcauggucgacggcugguacggcuaccaccaccagaacgagcagggcuccggcuacgccgccgaccucaaguccacccagaacgccaucgacgagaucaccaacaaggucaacuccgucaucgagaagaugaacacccaguucaccgccgucggcaaggaguucaaccaccucgagaagcgcaucgagaaccucaacaagaaggucgacgacggcuuccucgacaucuggaccuacaacgccgagcuccucguccuccucgagaacgagcgcacccucgacuaccacgacuccaacgucaagaaccucuacgagaagguccgcucccagcucaagaacaacgccaaggagaucggcaacggcugcuucgaguucuaccacaagugcgacaacaccugcauggaguccgucaagaacggcaccuacgacuaccccaaguacuccgaggaggccaagcucaaccgcgaggagaucgacggcgucaagcucgaguccacccgcaucuaccagauccucgccaucuacuccaccgucgccuccucccucguccucgucgucucccucggcgccaucuccuucuggaugugcuccaacggcucccuccacugccgcaucugcgucuga

SEQ ID NO: 109878 - RNA, 1701 nt, Artificial Sequence
  derived and/or modified CDS sequence (opt2) from hemagglutinin__InfluenzaA__AGM53850
augaaggccauccucgucguccuccucuacaccuucgccaccgccaacgccgacacccucugcaucggcuaccacgccaacaacuccaccgacaccgucgacaccguccucgagaagaacgucaccgucacccacuccgucaaccuccucgaggacaagcacaacggcaagcucugcaagcuccgcggcgucgccccccuccaccucggcaagugcaacaucgccggcuggauccucggcaaccccgagugcgagucccucuccaccgccuccuccugguccuacaucgucgagacccccuccuccgacaacggcaccugcuaccccggcgacuucaucgacuacgaggagcuccgcgagcagcucuccuccgucuccuccuucgagcgcuucgagaucuuccccaagaccuccuccuggcccaaccacgacuccaacaagggcgucaccgccgccugcccccacgccggcgccaaguccuucuacaagaaccucaucuggcucgucaagaagggcaacuccuaccccaagcucuccaaguccuacaucaacgacaagggcaaggagguccucguccucuggggcauccaccacccccccaccuccgccgaccagcagucccucuaccagaacgccgacgccuacgucuucgucggcuccucccgcuacuccaagaaguucaagcccgagaucgccauccgccccaagguccgcgaccaggagggccgcaugaacuacuacuggacccucgucgagcccggcgacaagaucaccuucgaggccaccggcaaccucgucgucccccgcuacgccuucgccauggagcgcaacgccggcuccggcaucaucaucuccgacacccccguccacgacugcaacaccaccugccagacccccaagggcgccaucaacaccucccuccccuuccagaacauccaccccaucaccaucggcaagugccccaaguacgucaaguccaccaagcuccgccucgccaccggccuccgcaacauccccuccauccagucccgcggccucuucggcgccaucgccggcuucaucgagggcggcuggaccggcauggucgacggcugguacggcuaccaccaccagaacgagcagggcuccggcuacgccgccgaccucaaguccacccagaacgccaucgacgagaucaccaacaaggucaacuccgucaucgagaagaugaacacccaguucaccgccgucggcaaggaguucaaccaccucgagaagcgcaucgagaaccucaacaagaaggucgacgacggcuuccucgacaucuggaccuacaacgccgagcuccucguccuccucgagaacgagcgcacccucgacuaccacgacuccaacgucaagaaccucuacgagaagguccgcucccagcucaagaacaacgccaaggagaucggcaacggcugcuucgaguucuaccacaagugcgacaacaccugcauggaguccgucaagaacggcaccuacgacuaccccaaguacuccgaggaggccaagcucaaccgcgaggagaucgacggcgucaagcucgaguccacccgcaucuaccagauccucgccaucuacuccaccgucgccuccucccucguccucgucgucucccucggcgccaucuccuucuggaugugcuccaacggcucccuccagugccgcaucugcaucuga

SEQ ID NO: 109879 - RNA, 1701 nt, Artificial Sequence
  derived and/or modified CDS sequence (opt2) from hemagglutinin__InfluenzaA__EPI731463
augaaggccauccucgucguccuccucuacaccuucgccaccgccaacgccgacacccucugcaucggcuaccacgccaacaacuccaccgacaccgucgacaccguccucgagaagaacgucaccgucacccacuccgucaaccuccucgaggacaagcacaacggcaagcucugcaagcuccgcggcgucgccccccuccaccucggcaagugcaacaucgccggcuggauccucggcaaccccgagugcgagucccucuccaccgccuccuccugguccuacaucgucgagacccccuccuccgacaacggcaccugcuaccccggcgacuucaucgacuacgaggagcuccgcgagcagcucuccuccgucuccuccuucgagcgcuucgagaucuuccccaacaccuccuccuggcccaaccacgacuccaacaagggcgucaccgccgccugcccccacgccggcgccaaguccuucuacaagaaccucaucuggcucgucaagaagggcaacuccuaccccaagcucuccaaguccuacaucaacgacaagggcaaggagguccucguccucuggggcauccaccaccccuccaccuccgccgaccagcagucccucuaccagaacgccgacgccuacgucuucgucggcuccucccgcuacuccaagaaguucaagcccgagaucgccauccgccccaagguccgcggccaggagggccgcaugaacuacuacuggacccucgucgagcccggcgacaagaucaccuucgaggccaccggcaaccucgucgucccccgcuacgccuucgccauggagcgcaacgccggcuccggcaucaucaucuccgacacccccguccacgacugcaacaccaccugccagacccccaagggcgccaucaacaccucccuccccuuccagaacauccaccccaucaccaucggcaagugccccaaguacgucaaguccaccaagcuccgccucgccaccggccuccgcaacauccccuccauccagucccgcggccucuucggcgccaucgccggcuucaucgagggcggcuggaccggcauggucgacggcugguacggcuaccaccaccagaacgagcagggcuccggcuacgccgccgaccucaaguccacccagaacgccaucgacgagaucaccaacaaggucaacuccgucaucgagaagaugaacacccaguucaccgccgucggcaaggaguucaaccaccucgagaagcgcaucgagaaccucaacaagaaggucgacgacggcuuccucgacaucuggaccuacaacgccgagcuccucguccuccucgagaacgagcgcacccucgacuaccacgacuccaacgucaagaaccucuacgagaagguccgcucccagcucaagaacaacgccaaggagaucggcaacggcugcuucgaguucuaccacaagugcgacaacaccugcauggaguccgucaagaacggcaccuacgacuaccccaaguacuccgaggaggccaagcucaaccgcgaggagaucgacggcgucaagcucgaguccacccgcaucuaccagauccucgccaucuacuccaccgucgccuccucccucguccucgucgucucccucggcgccaucuccuucuggaugugcuccaacggcucccuccagugccgcaucugcaucuga

SEQ ID NO: 109880 - RNA, 1701 nt, Artificial Sequence; identical to SEQ ID NO: 100534
  derived and/or modified CDS sequence (opt2) from hemagglutinin__InfluenzaA__EPI696972

SEQ ID NO: 109881 - RNA, 1701 nt, Artificial Sequence; identical to SEQ ID NO: 109722
  derived and/or modified CDS sequence (opt2) from hemagglutinin__InfluenzaA__EPI662594

SEQ ID NO: 109882 - RNA, 1701 nt, Artificial Sequence
  derived and/or modified CDS sequence (opt2) from hemagglutinin__InfluenzaA__EPI685579
augaaggccauccucgucguccuccucuacaccuucaccaccgccaacgccgacacccucugcaucggcuaccacgccaacaacuccaccgacaccgucgacaccguccucgagaagaacgucaccgucacccacuccgucaaccuccucgaggacaagcacaacggcaagcucugcaagcuccgcggcgucgccccccuccaccucggcaagugcaacaucgccggcuggauccucggcaaccccgagugcgagucccucuccaccgccuccuccugguccuacaucgucgagaccuccaacuccgacaacggcaccugcuaccccggcgacuucaucaacuacgaggagcuccgcgagcagcucuccuccgucuccuccuucgagcgcuucgagaucuuccccaagaccuccuccuggcccaaccacgacuccaacaagggcgucaccgccgccugcccccacgccggcgccaaguccuucuacaagaaccucaucuggcucgucaagaagggcaacuccuaccccaagcucaaccaguccuacaucaacgacaagggcaaggagguccucguccucuggggcauccaccaccccuccaccaccgccgaccagcagucccucuaccagaacgccgacgccuacgucuucgucggcaccucccgcuacuccaagaaguucaagcccgagaucgccacccgccccaagguccgcgaccgcgagggccgcaugaacuacuacuggacccucgucgagcccggcgacaagaucaccuucgaggccaccggcaaccucgucgucccccgcuacgccuucaccauggagcgcaacgccggcuccggcaucaucaucuccgacacccccguccacgacugcaacaccaccugccagacccccgagggcgccaucaacaccucccuccccuuccagaacauccaccccaucaccaucggcaagugccccaaguacgucaaguccaccaagcuccgccucgccaccggccuccgcaacguccccuccauccagucccgcggccucuucggcgccaucgccggcuucaucgagggcggcuggaccggcauggucgacggcugguacggcuaccaccaccagaacgagcagggcuccggcuacgccgccgaccucaaguccacccagaacgccaucgacaagaucaccaacaaggucaacuccgucaucgagaagaugaacacccaguucaccgccgucggcaaggaguucaaccaccucgagaagcgcaucgagaaccucaacaagaaggucgacgacggcuuccucgacaucuggaccuacaacgccgagcuccucguccuccucgagaacgagcgcacccucgacuaccacgacuccaacgucaagaaccucuacgagaagguccgcaaccagcucaagaacaacgccaaggagaucggcaacggcugcuucgaguucuaccacaagugcgacaacaccugcauggaguccgucaagaacggcaccuacgacuaccccaaguacuccgaggaggccaagcucaaccgcgagaagaucgacggcgucaagcucgaguccacccgcaucuaccagauccucgccaucuacuccaccgucgccuccucccucguccucgucgucucccucggcgccaucuccuucuggaugugcuccaacggcucccuccagugccgcaucugcaucuga

SEQ ID NO: 109883 - RNA, 1701 nt, Artificial Sequence
  derived and/or modified CDS sequence (opt2) from hemagglutinin__InfluenzaA__EPI830230
augaaggccauccucgucguccuccucuacaccuucaccaccgccaacgccgacacccucugcaucggcuaccacgccaacaacuccaccgacaccgucgacaccguccucgagaagaacgucaccgucacccacuccgucaaccuccucgaggacaagcacaacggcaagcucugcaagcuccgcggcgucgccccccuccaccucggcaagugcaacaucgccggcuggauccucggcaaccccgagugcgagucccucuccaccgccuccuccugguccuacaucgucgagaccuccaacuccgacaacggcaccugcuaccccggcgacuucaucaacuacgaggagcuccgcgagcagcucuccuccgucuccuccuucgagcgcuucgagaucuuccccaagaccuccuccuggcccaaccacgacuccaacaagggcgucaccgccgccugcccccacgccggcgccaaguccuucuacaagaaccucaucuggcucgucaagaagggcaacuccuaccccaagcucaaccaguccuacaucaacgacaagggcaaggagguccucguccucuggggcauccaccaccccuccaccaccgccgaccagcagucccucuaccagaacgccgacgccuacgucuucgucggcaccucccgcuacuccaagauguucaagcccgagaucgccacccgccccaagguccgcgaccgcgagggccgcaugaacuacuacuggacccucgucgagcccggcgacaagaucaccuucgaggccaccggcaaccucgucgucccccgcuacgccuucaccauggagcgcaacgccggcuccggcaucaucaucuccgacacccccguccacgacugcaacaccaccugccagacccccgagggcgccaucaacaccucccuccccuuccagaacauccaccccaucaccaucggcaagugccccaaguacgucaaguccaccaagcuccgccucgccaccggccuccgcaacguccccuccauccagucccgcggccucuucggcgccaucgccggcuucaucgagggcggcuggaccggcauggucgacggcugguacggcuaccaccaccagaacgagcagggcuccggcuacgccgccgaccucaaguccacccagaacgccaucgacaagaucaccaacaaggucaacuccgucaucgagaagaugaacacccaguucaccgccgucggcaaggaguucaaccaccucgagaagcgcaucgagaaccucaacaagaaggucgacgacggcuuccucgacaucuggaccuacaacgccgagcuccucguccuccucgagaacgagcgcacccucgacuaccacgacuccaacgucaagaaccucuacgagaagguccgcaaccagcucaagaacaacgccaaggagaucggcaacggcugcuucgaguucuaccacaagugcgacaacaccugcauggaguccgucaagaacggcaccuacgacuaccccaaguacuccgaggaggccaagcucaaccgcgagaagaucgacggcgucaagcucgaguccacccgcaucuaccagauccucgccaucuacuccaccgucgccuccucccucguccucgucgucucccucggcgccaucuccuucuggaugugcuccaacggcucccuccagugccgcaucugcaucuga

SEQ ID NO: 109884 - RNA, 1701 nt, Artificial Sequence; identical to SEQ ID NO: 98692
  derived and/or modified CDS sequence (opt2) from hemagglutinin__InfluenzaA__ACQ45338

SEQ ID NO: 109885 - RNA, 1701 nt, Artificial Sequence; identical to SEQ ID NO: 98692
  derived and/or modified CDS sequence (opt2) from hemagglutinin__InfluenzaA__ACQ45338/m1

SEQ ID NO: 109886 - RNA, 1701 nt, Artificial Sequence; identical to SEQ ID NO: 98692
  derived and/or modified CDS sequence (opt2) from hemagglutinin__InfluenzaA__ACQ45338/m2

SEQ ID NO: 109887 - RNA, 1701 nt, Artificial Sequence; identical to SEQ ID NO: 98354
  derived and/or modified CDS sequence (opt2) from hemagglutinin__InfluenzaA__ACU79871

SEQ ID NO: 109888 - RNA, 1701 nt, Artificial Sequence
  derived and/or modified CDS sequence (opt2) from hemagglutinin__InfluenzaA__ACU79871/m1
augaagaccaucaucgcccucuccuacaucuucugccucgcccucggccaggaccuccccggcaacgacaacuccaccgccacccucugccucggccaccacgccguccccaacggcacccucgucaagaccaucaccgacgaccagaucgaggucaccaacgccaccgagcucguccaguccuccuccaccggcaagaucugcaacaacccccaccgcauccucgacggcaucgacugcacccucaucgacgcccuccucggcgacccccacugcgacgucuuccagaacgagaccugggaccucuucgucgagcgcuccaaggccuucuccaacugcuaccccuacgacguccccgacuacgccucccuccgcucccucgucgccuccuccggcacccucgaguucaucaccgagggcuucaccuggaccggcgucacccagaacggcggcuccaacgccugcaagcgcggccccggcuccggcuucuucucccgccucaacuggcucaccaaguccggcuccaccuaccccguccucaacgucaccaugcccaacaacgacaacuucgacaagcucuacaucuggggcguccaccaccccuccaccaaccaggagcagaccucccucuacguccaggccuccggccgcgucaccgucuccacccgccgcucccagcagaccaucauccccaacaucgagucccgccccuggguccgcggccaguccucccgcaucuccaucuacuggaccaucgucaagcccggcgacguccucgucaucaacuccaacggcaaccucaucgccccccgcggcuacuucaagaugcgcaccggcaaguccuccaucaugcgcuccgacgcccccaucgacaccugcaucuccgagugcaucacccccaacggcuccauccccaacgacaagcccuuccagaacgucaacaagaucaccuacggcgccugccccaaguacgucaagcagaacacccucaagcucgccaccggcaugcgcaacguccccgagaagcagacccgcggccucuucggcgccaucgccggcuucaucgagaacggcugggagggcaugaucgacggcugguacggcuuccgccaccagaacuccgagggcaccggccaggccgccgaccucaaguccacccaggccgccaucgaccagaucaacggcaaggucaaccgcaucaucgagaagaccaacgagaaguuccaccagaucgagaaggaguucuccgaggucgagggccgcauccaggaccucgagaaguacgucgaggacaccaagaucgaccucugguccuacaacgccgagcuccucgucgcccucgagaaccagcacaccaucgaccucaccgacuccgagaugaacaagcucuucgagaagacccgccgccagcuccgcgagaacgccgaggacaugggcaacggcugcuucaagaucuaccacaagugcgacaacgccugcaucgaguccauccgcuccggcaccuacgaccacgacgucuaccgcgacgaggcccucaacaaccgcuuccagaucaagggcgucgagcucaaguccggcuacaaggacuggauccucuggaucuccuucgccaucuccugcuuccuccucugcgucguccuccucggcuucaucaugugggccugccagcgcggcaacauccgcugcaacaucugcaucuga

SEQ ID NO: 109889 - RNA, 1701 nt, Artificial Sequence
  derived and/or modified CDS sequence (opt2) from hemagglutinin__InfluenzaA__EPI643118
augaagaccaucaucgcccucuccuacauccucugccucgucuucgcccagaagauccccggcaacgacaacuccaccgccacccucugccucggccaccacgccguccccaacggcaccaucgucaagaccaucaccaacgaccgcaucgaggucaccaacgccaccgagcucguccagaacuccuccaucggcgagaucugcgacuccccccaccagauccucgacggcgagaacugcacccucaucgacgcccuccucggcgacccccagugcgacggcuuccagaacaagaagugggaccucuucgucgagcgcuccaaggccuacuccaacugcuaccccuacgacguccccgacuacgccucccuccgcucccucgucgccuccuccggcacccucgaguucaacaacgaguccuucaacuggaccggcgucacccagaacggcaccuccuccgccugcauccgccgcuccuccuccuccuucuucucccgccucaacuggcucacccaccucaacuacaaguaccccgcccucaacgucaccaugcccaacaacgagcaguucgacaagcucuacaucuggggcguccaccaccccggcaccgacaaggaccagaucuuccccuacgcccaguccuccggccgcaucaucgucuccaccaagcgcucccagcaggccgucauccccaacaucggcucccgcccccgcauccgcgacauccccucccgcaucuccaucuacuggaccaucgucaagcccggcgacauccuccucaucaacuccaccggcaaccucaucgccccccgcggcuacuucaagcuccgcuccggcaaguccuccaucaugcgcuccgacgcccccaucggcaagugcaaguccgagugcaucacccccaacggcuccauccccaacgacaagcccuuccagaacgucaaccgcaucaccuacggcgccugcccccgcuacgucaagcacuccacccucaagcucgccaccggcaugcgcaacguccccgagaagcagacccgcggcaucuucggcgccaucgccggcuucaucgagaacggcugggagggcauggucgacggcugguacggcuuccgccaccagaacuccgagggccgcggccaggccgccgaccucaaguccacccaggccgccaucgaccagaucaacggcaagcucaaccgccucaucggcaagaccaacgagaaguuccaccagaucgagaaggaguucuccgaggucgagggccgcauccaggaccucgagaaguacgucgaggacaccaagaucgaccucugguccuacaacgccgagcuccucgucgcccucgagaaccagcacaccaucgaccucaccgacuccgagaugaacaagcucuucgagaagaccaagaagcagcuccgcgagaacgccgaggacaugggcaacggcugcuucaagaucuaccacaagugcgacaacgccugcaucggcuccauccgcaacggcaccuacgaccacaacgucuaccgcgacgaggcccucaacaaccgcuuccagaucaagggcgucgagcucaaguccggcuacaaggacuggauccucuggaucuccuucgccaucuccugcuuccuccucugcgucgcccuccucggcuucaucaugugggccugccagaagggcaacauccgcugcaacaucugcaucuga

SEQ ID NO: 109890 - RNA, 1701 nt, Artificial Sequence; identical to SEQ ID NO: 108477
  derived and/or modified CDS sequence (opt2) from hemagglutinin__InfluenzaA__EPI675798

SEQ ID NO: 109891 - RNA, 1701 nt, Artificial Sequence
  derived and/or modified CDS sequence (opt2) from hemagglutinin__InfluenzaA__EPI578430
augaagaccaucaucgcccucuccuacauccucugccucgucuucgcccagaagauccccggcaacgacaacuccaccgccacccucugccucggccaccacgccguccccaacggcaccaucgucaagaccaucaccaacgaccgcaucgaggucaccaacgccaccgagcucguccagaacuccuccaucggcgagaucugcgacuccccccaccagauccucgacggcgagaacugcacccucaucgacgcccuccucggcgacccccagugcgacggcuuccagaacaagaagugggaccucuucgucgagcgcuccaaggccuacuccuccugcuaccccuacgacguccccgacuacgccucccuccgcucccucgucgccuccuccggcacccucgaguucaacaacgaguccuucaacuggaccggcgucacccagaacggcaccuccuccgccugcauccgccgcuccuccuccuccuucuucucccgccucaacuggcucacccaccucaacuacaaguaccccgcccucaacgucaccaugcccaacaacgagcaguucgacaagcucuacaucuggggcguccaccaccccggcaccgacaaggaccagaucuuccccuacgcccaguccuccggccgcaucaccgucuccaccaagcgcucccagcaggccgucauccccaacaucggcucccgcccccgcauccgcgacauccccucccgcaucuccaucuacuggaccaucgucaagcccggcgacauccuccucaucaacuccaccggcaaccucaucgccccccgcggcuacuucaagauccgcuccggcaaguccuccaucaugcgcuccgacgcccccaucggcaagugcaaguccgagugcaucacccccaacggcuccauccccaacgacaagcccuuccagaacgucaaccgcaucaccuacggcgccugcccccgcuacgucaagcacuccacccucaagcucgccaccggcaugcgcaacguccccgagaagcagacccgcggcaucuucggcgccaucgccggcuucaucgagaacggcugggagggcauggucgacggcugguacggcuuccgccaccagaacuccgagggccgcggccaggccgccgaccucaaguccacccaggccgccaucgaccagaucaacggcaagcucaaccgccucaucggcaagaccaacgagaaguuccaccagaucgagaaggaguucuccgaggucgagggccgcauccaggaccucgagaaguacgucgaggacaccaagaucgaccucugguccuacaacgccgagcuccucgucgcccucgagaaccagcacaccaucgaccucaccgacuccgagaugaacaagcucuucgagaagaccaagaagcagcuccgcgagaacgccgaggacaugggcaacggcugcuucaagaucuaccacaagugcgacaacgccugcaucggcuccauccgcaacggcaccuacgaccacaacgucuaccgcgacgaggcccucaacaaccgcuuccagaucaagggcgucgagcucaaguccggcuacaaggacuggauccucuggaucuccuucgccaucuccugcuuccuccucugcgucgcccuccucggcuucaucaugugggccugccagaagggcaacauccgcugcaacaucugcaucuga

SEQ ID NO: 109892 - RNA, 1701 nt, Artificial Sequence
  derived and/or modified CDS sequence (opt2) from hemagglutinin__InfluenzaA__EPI614406
augaagaccaucaucgcccucuccuacauccucugccucgucuucgcccagaagauccccggcaacgacaacuccaccgccacccucugccucggccaccacgccguccccaacggcaccaucgucaagaccaucaccaacgaccgcaucgaggucaccaacgccaccgagcucguccagaacuccuccaucggcgagaucugcgacuccccccaccagauccucgacggcgagaacugcacccucaucgacgcccuccucggcgacccccagugcgacggcuuccagaacaagaagugggaccucuucgucgagcgcuccaaggccuacuccuccugcuaccccuacgacguccccgacuacgccucccuccgcucccucgucgccuccuccggcacccucgaguucaacaacgaguccuucaacuggaccggcgucacccagaacggcaccuccuccgccugcauccgccgcuccuccuccuccuucuucucccgccucaacuggcucacccaccucaacuacaaguaccccgcccucaacgucaccaugcccaacaacgagcaguucgacaagcucuacaucuggggcguccaccaccccggcaccgacaaggaccagaucuuccccuacgcccaguccuccggccgcaucaccgucuccaccaagcgcucccagcaggccgucauccccaacaucggcucccgcccccgcauccgcaacauccccucccgcaucuccaucuacuggaccaucgucaagcccggcgacauccuccucaucaacuccaccggcaaccucaucgccccccgcggcuacuucaagauccgcuccggcaaguccuccaucaugcgcuccgacgcccccaucggcaagugcaaguccgagugcaucacccccaacggcuccauccccaacgacaagcccuuccagaacgucaaccgcaucaccuacggcgccugcccccgcuacgucaagcacuccacccucaagcucgccaccggcaugcgcaacguccccgagaagcagacccgcggcaucuucggcgccaucgccggcuucaucgagaacggcugggagggcauggucgacggcugguacggcuuccgccaccagaacuccgagggccgcggccaggccgccgaccucaaguccacccaggccgccaucgaccagaucaacggcaagcucaaccgccucaucggcaagaccaacgagaaguuccaccagaucgagaaggaguucuccgaggucgagggccgcauccaggaccucgagaaguacgucgaggacaccaagaucgaccucugguccuacaacgccgagcuccucgucgcccucgagaaccagcacaccaucgaccucaccgacuccgagaugaacaagcucuucgagaagaccaagaagcagcuccgcgagaacgccgaggacaugggcaacggcugcuucaagaucuaccacaagugcgacaacgccugcaucggcuccauccgcaacggcaccuacgaccacaacgucuaccgcgacgaggcccucaacaaccgcuuccagaucaagggcgucgagcucaaguccggcuacaaggacuggauccucuggaucuccuucgccaucuccugcuuccuccucugcgucgcccuccucggcuucaucaugugggccugccagaagggcaacauccgcugcaacaucugcaucuga

SEQ ID NO: 109893 - RNA, 1695 nt, Artificial Sequence
  derived and/or modified CDS sequence (opt2) from hemagglutinin__InfluenzaA__ACU65077/m1
auggagaagaucguccuccucuucgccaucgucucccucgucaaguccgaccagaucugcaucggcuaccacgccaacaacuccaccgagcaggucgacaccaucauggagaagaacgucaccgucacccacgcccaggacauccucgagaagacccacaacggcaagcucugcgaccucgacggcgucaagccccucauccuccgcgacugcuccgucgccggcuggcuccucggcaaccccaugugcgacgaguucaucaacguccccgagugguccuacaucgucgagaaggccaaccccgucaacgaccucugcuaccccggcgacuucaacgacuacgaggagcucaagcaccuccucucccgcaucaaccacuucgagaagauccagaucauccccaaguccuccugguccucccacgaggccucccucggcgucuccuccgccugccccuaccagggcaaguccuccuucuuccgcaacgucgucuggcucaucaagaagaacuccaccuaccccaccaucaagcgcuccuacaacaacaccaaccaggaggaccuccucguccucuggggcauccaccaccccaacgacgccgccgagcagaccaagcucuaccagaaccccaccaccuacaucuccgucggcaccuccacccucaaccagcgccucgucccccgcaucgccacccgcuccaaggucaacggccaguccggccgcauggaguucuucuggaccauccucaagcccaacgacgccaucaacuucgaguccaacggcaacuucaucgcccccgaguacgccuacaagaucgucaagaagggcgacuccaccaucaugaaguccgagcucgaguacggcaacugcaacaccaagugccagacccccaugggcgccaucaacuccuccaugcccuuccacaacauccacccccucaccaucggcgagugccccaaguacgucaaguccaaccgccucguccucgccaccggccuccgcaacuccccccagcgcgagacccgcggccucuucggcgccaucgccggcuucaucgagggcggcuggcagggcauggucgacggcugguacggcuaccaccacuccaacgagcagggcuccggcuacgccgccgacaaggaguccacccagaaggccaucgacggcgucaccaacaaggucaacuccaucaucgacaagaugaacacccaguucgaggccgucggccgcgaguucaacaaccucgagcgccgcaucgagaaccucaacaagaagauggaggacggcuuccucgacgucuggaccuacaacgccgagcuccucguccucauggagaacgagcgcacccucgacuuccacgacuccaacgucaagaaccucuacgacaagguccgccuccagcuccgcgacaacgccaaggagcucggcaacggcugcuucgaguucuaccacaagugcgacaacgagugcauggaguccguccgcaacggcaccuacgacuacccccaguacuccgaggaggcccgccucaagcgcgaggagaucuccggcgucaagcucgaguccaucggcaucuaccagauccucuccaucuacuccaccgucgccuccucccucgcccucgccaucauggucgccggccucucccucuggaugugcuccaacggcucccuccagugccgcaucugcaucuga

SEQ ID NO: 109894 - RNA, 1695 nt, Artificial Sequence; identical to SEQ ID NO: 109893
  derived and/or modified CDS sequence (opt2) from hemagglutinin__InfluenzaA__ACU65077/m2

SEQ ID NO: 109895 - RNA, 1707 nt, Artificial Sequence; identical to SEQ ID NO: 96064
  derived and/or modified CDS sequence (opt2) from hemagglutinin__InfluenzaA__ABP51976

SEQ ID NO: 109896 - RNA, 1707 nt, Artificial Sequence; identical to SEQ ID NO: 96064
  derived and/or modified CDS sequence (opt2) from hemagglutinin__InfluenzaA__ABP51976/m1

SEQ ID NO: 109897 - RNA, 1695 nt, Artificial Sequence
  derived and/or modified CDS sequence (opt2) from hemagglutinin__InfluenzaA__ABW90125
auggagaagaucguccuccucuucgccaucgucucccucgucaaguccgaccagaucugcaucggcuaccacgccaacaacuccaccgagcaggucgacaccaucauggagaagaacgucaccgucacccacgcccaggacauccucgagaagaagcacaacggcaagcucugcgaccucgacggcgucaagccccucauccuccgcgacugcuccgucgccggcuggcuccucggcaaccccaugugcgacgaguucaucaacguccccgagugguccuacaucgucgagaaggccaaccccgucaacgaccucugcuaccccggcgacuucaacgacuacgaggagcucaagcaccuccucucccgcaucaaccacuucgagaagauccagaucauccccaaguccuacugguccucccacgaggccucccucggcgucuccuccgccugccccuaccagggcaaguccuccuucuuccgcaacgucgucuggcucaccaagaagaacuccaccuaccccaccaucaagcgcuccuacaacaacaccaaccaggaggaccuccucguccucuggggcauccaccaccccaacgacgccgccgagcagaccaagcucuaccagaaccccaccaccuacaucuccgucggcaccuccacccucaaccagcgccucgucccccgcaucgccacccgcuccaaggucaacggccaguccggccgcauggaguucuucuggaccauccucaagcccaacgacgccaucaacuucgaguccaacggcaacuucaucgcccccgaguacgccuacaagaucgucaagaagggcgacuccaccaucaugaaguccgagcucgaguacggcaacugcaacaccaagugccagacccccaugggcgccaucaacuccuccaugcccuuccacaacauccacccccucaccaucggcgagugccccaaguacgucaaguccaaccgccucguccucgccaccggccuccgcaacuccccccagcgcgagacccgcggccucuucggcgccaucgccggcuucaucgagggcggcuggcagggcauggucgacggcugguacggcuaccaccacuccaacgagcagggcuccggcuacgccgccgacaaggaguccacccagaaggccaucgacggcgucaccaacaaggucaacuccaucaucgacaagaugaacacccaguucgaggccgucggccgcgaguucaacaaccucgagcgccgcaucgagaaccucaacaagaagauggaggacggcuuccucgacgucuggaccuacaacgccgagcuccucguccucauggagaacgagcgcacccucgacuuccacgacuccaacgucaagaaccucuacgacaagguccgccuccagcuccgcgacaacgccaaggagcucggcaacggcugcuucgaguucuaccacaagugcgacaacgagugcauggaguccguccgcaacggcaccuacgacuacccccaguacuccgaggaggcccgccucaagcgcgaggagaucuccggcgucaagcucgaguccaucggcaucuaccagauccucuccaucuacuccaccgucgccuccucccucgcccucgccaucauggucgccggccucucccucuggaugugcuccaacggcucccuccagugccgcaucugcaucuga

SEQ ID NO: 109898 - RNA, 1695 nt, Artificial Sequence
  derived and/or modified CDS sequence (opt2) from hemagglutinin__InfluenzaA__ABW90126
auggagaagaucguccuccucuucgccaucgucucccucgucaaguccgaccagaucugcaucggcuaccacgccaacaacuccaccgagcaggucgacaccaucauggagaagaacgucaccgucacccacgcccaggacauccucgagaagaagcacaacggcaagcucugcgaccucgacggcgucaagccccucauccuccgcgacugcuccgucgccggcuggcuccucggcaaccccaugugcgacgaguucaucaacguccccgagugguccuacaucgucgagaaggccaaccccgucaacgaccucugcuaccccggcgacuucaacgacuacgaggagcucaagcaccuccucucccgcaucaaccacuucgagaagauccagaucauccccaaguccuccugguccucccacgaggccucccucggcgucuccuccgccugccccuaccagggcaaguccuccuucuuccgcaacgucgucuggcucaucaagaagaacuccaccuaccccaccaucaagggcuccuacaacaacaccaaccaggaggaccuccucguccucuggggcauccaccaccccaacgacgccgccgagcagaccaagcucuaccagaaccccaccaccuacaucuccgucggcaccuccacccucaaccagcgccucgucccccgcaucgccacccgcuccaaggucaacggccaguccggccgcauggaguucuucuggaccauccucaagcccaacgacgccaucaacuucgaguccaacggcaacuucaucgcccccgaguacgccuacaagaucgucaagaagggcgacuccaccaucaugaaguccgagcucgaguacggcaacugcaacaccaagugccagacccccaugggcgccaucaacuccuccaugcccuuccacaacauccacccccucaccaucggcgagugccccaaguacgucaaguccaaccgccucguccucgccaccggccuccgcaacuccccccagcgcgagacccgcggccucuucggcgccaucgccggcuucaucgagggcggcuggcagggcauggucgacggcugguacggcuaccaccacuccaacgagcagggcuccggcuacgccgccgacaaggaguccacccagaaggccaucgacggcgucaccaacaaggucaacuccaucaucgacaagaugaacacccaguucgaggccgucggccgcgaguucaacaaccucgagcgccgcaucgagaaccucaacaagaagauggaggacggcuuccucgacgucuggaccuacaacgccgagcuccucguccucauggagaacgagcgcacccucgacuuccacgacuccaacgucaagaaccucuacgacaagguccgccuccagcuccgcgacaacgccaaggagcucggcaacggcugcuucgaguucuaccacaagugcgacaacgagugcauggaguccguccgcaacggcaccuacgacuacccccaguacuccgaggaggcccgccucaagcgcgaggagaucuccggcgucaagcucgaguccaucggcaucuaccagauccucuccaucuacuccaccgucgccuccucccucgcccucgccaucauggucgccggccucucccucuggaugugcuccaacggcucccuccagugccgcaucugcaucuga

SEQ ID NO: 109899 - RNA, 1695 nt, Artificial Sequence
  derived and/or modified CDS sequence (opt2) from hemagglutinin__InfluenzaA__ABW90127
auggagaagaucguccuccucuucgccaucgucucccucgucaaguccgaccagaucugcaucggcuaccacgccaacaacuccaccgagcaggucgacaccaucauggagaagaacgucaccgucacccacgcccaggacauccucgagaagaagcacaacggcaagcucugcgaccucgacggcgucaagccccucauccuccgcgacugcuccgucgccggcuggcuccucggcaaccccaugugcgacgaguucaucaacguccccgagugguccuacaucgucgagaaggccaaccccgucaacgaccucugcuaccccggcgacuucaacgacuacgaggagcucaagcaccuccucucccgcaucaaccacuucgagaagauccagaucauccccaaguccuccugguccucccacgaggccucccucggcgucuccuccgccugccccuaccagggcgaguccuccuucuuccgcaacgucgucuggcucaucaagaagaacuccaccuaccccaccaucaagcgcuccuacaacaacaccaaccaggaggaccuccucguccucuggggcauccaccaccccaacgacgccgccgagcagaccaagcucuaccagaaccccaccaccuacaucuccgucggcaccuccacccucaaccagcgccucgucccccgcaucgccacccgcuccaaggucaacggccaguccggccgcauggaguucuucuggaccauccucaagcccaacgacgccaucaacuucgaguccaacggcaacuucaucgcccccgaguacgccuacaagaucgucaagaagggcgacuccaccaucaugaaguccgagcucgaguacggcaacugcaacaccaagugccagacccccaugggcgccaucaacuccuccaugcccuuccacaacauccacccccucaccaucggcgagugccccaaguacgucaaguccaaccgccucguccucgccaccggccuccgcaacuccccccagcgcgagacccgcggccucuucggcgccaucgccggcuucaucgagggcggcuggcagggcauggucgacggcugguacggcuaccaccacuccaacgagcagggcuccggcuacgccgccgacaaggaguccacccagaaggccaucgacggcgucaccaacaaggucaacuccaucaucgacaagaugaacacccaguucgaggccgucggccgcgaguucaacaaccucgagcgccgcaucgagaaccucaacaagaagauggaggacggcuuccucgacgucuggaccuacaacgccgagcuccucguccucauggagaacgagcgcacccucgacuuccacgacuccaacgucaagaaccucuacgacaagguccgccuccagcuccgcgacaacgccaaggagcucggcaacggcugcuucgaguucuaccacaagugcgacaacgagugcauggaguccguccgcaacggcaccuacgacuacccccaguacuccgaggaggcccgccucaagcgcgaggagaucuccggcgucaagcucgaguccaucggcaucuaccagauccucuccaucuacuccaccgucgccuccucccucgcccucgccaucauggucgccggccucucccucuggaugugcuccaacggcucccuccagugccgcaucugcaucuga

SEQ ID NO: 109900 - RNA, 1695 nt, Artificial Sequence
  derived and/or modified CDS sequence (opt2) from hemagglutinin__InfluenzaA__ABW90128
auggagaagaucguccuccucuucgccaucgucucccucgucaaguccgaccagaucugcaucggcuaccacgccaacaacuccaccgagcaggucgacaccaucauggagaagaacgucaccgucacccacgcccaggacauccucgagaagaagcacaacggcaagcucugcgaccucgacggcgucaagccccucauccuccgcgacugcuccgucgccggcuggcuccucggcaaccccaugugcgacgaguucaucaacguccccgagugguccuacaucgucgagaaggccaaccccgucaacgaccucugcuaccccggcgacuucaacgacuacgaggagcucaagcaccuccucucccgcaucaaccacuucgagaagauccagaucauccccaaguccuccugguccucccacgaggccucccucggcgucuccuccgccugccccuaccagggcaaguccuccuucuuccgcaacgucgucuggcucaucgagaagaacuccaccuaccccaccaucaagcgcuccuacaacaacaccaaccaggaggaccuccucguccucuggggcauccaccaccccaacgacgccgccgagcagaccaagcucuaccagaaccccaccaccuacaucuccgucggcaccuccacccucaaccagcgccucgucccccgcaucgccacccgcuccaaggucaacggccaguccggccgcauggaguucuucuggaccauccucaagcccaacgacgccaucaacuucgaguccaacggcaacuucaucgcccccgaguacgccuacaagaucgucaagaagggcgacuccaccaucaugaaguccgagcucgaguacggcaacugcaacaccaagugccagacccccaugggcgccaucaacuccuccaugcccuuccacaacauccacccccucaccaucggcgagugccccaaguacgucaaguccaaccgccucguccucgccaccggccuccgcaacuccccccagcgcgagacccgcggccucuucggcgccaucgccggcuucaucgagggcggcuggcagggcauggucgacggcugguacggcuaccaccacuccaacgagcagggcuccggcuacgccgccgacaaggaguccacccagaaggccaucgacggcgucaccaacaaggucaacuccaucaucgacaagaugaacacccaguucgaggccgucggccgcgaguucaacaaccucgagcgccgcaucgagaaccucaacaagaagauggaggacggcuuccucgacgucuggaccuacaacgccgagcuccucguccucauggagaacgagcgcacccucgacuuccacgacuccaacgucaagaaccucuacgacaagguccgccuccagcuccgcgacaacgccaaggagcucggcaacggcugcuucgaguucuaccacaagugcgacaacgagugcauggaguccguccgcaacggcaccuacgacuacccccaguacuccgaggaggcccgccucaagcgcgaggagaucuccggcgucaagcucgaguccaucggcaucuaccagauccucuccaucuacuccaccgucgccuccucccucgcccucgccaucauggucgccggccucucccucuggaugugcuccaacggcucccuccagugccgcaucugcaucuga

SEQ ID NO: 109901 - RNA, 1695 nt, Artificial Sequence
  derived and/or modified CDS sequence (opt2) from hemagglutinin__InfluenzaA__ABW90129
auggagaagaucguccuccucuucgccaucgucucccucgucaaguccgaccagaucugcaucggcuaccacgccaacaacuccaccgagcaggucgacaccaucauggagaagaacgucaccgucacccacgcccaggacauccucgagaagaagcacaacggcaagcucugcgaccucgacggcgucaagccccucauccuccgcgacugcuccgucgccggcuggcuccucggcaaccccaugugcgacgaguucaucaacguccccgagugguccuacaucgucgagaaggccaaccccgucaacgaccucugcuaccccggcgacuucaacgacuacgaggagcucaagcaccuccucucccgcaucaaccacuucgagaagauccagaucauccccaaguccuccugguccucccacgaggccucccucggcgucuccuccgccugccccuaccagggcaaguccuccuucuuccgcaacgucgucuggcucaucaagaagaacuccgccuaccccaccaucaagcgcuccuacaacaacaccaaccaggaggaccuccucguccucuggggcauccaccaccccaacgacgccgccgagcagaccgagcucuaccagaaccccaccaccuacaucuccgucggcaccuccacccucaaccagcgccucgucccccgcaucgccacccgcuccaaggucaacggccaguccggccgcauggaguucuucuggaccauccucaagcccaacgacgccaucaacuucgaguccaacggcaacuucaucgcccccgaguacgccuacaagaucgucaagaagggcgacuccaccaucaugaaguccgagcucgaguacggcaacugcaacaccaagugccagacccccaugggcgccaucaacuccuccaugcccuuccacaacauccacccccucaccaucggcgagugccccaaguacgucaaguccaaccgccucguccucgccaccggccuccgcaacuccccccagcgcgagacccgcggccucuucggcgccaucgccggcuucaucgagggcggcuggcagggcauggucgacggcugguacggcuaccaccacuccaacgagcagggcuccggcuacgccgccgacaaggaguccacccagaaggccaucgacggcgucaccaacaaggucaacuccaucaucgacaagaugaacacccaguucgaggccgucggccgcgaguucaacaaccucgagcgccgcaucgagaaccucaacaagaagauggaggacggcuuccucgacgucuggaccuacaacgccgagcuccucguccucauggagaacgagcgcacccucgacuuccacgacuccaacgucaagaaccucuacgacaagguccgccuccagcuccgcgacaacgccaaggagcucggcaacggcugcuucgaguucuaccacaagugcgacaacgagugcauggaguccguccgcaacggcaccuacgacuacccccaguacuccgaggaggcccgccucaagcgcgaggagaucuccggcgucaagcucgaguccaucggcaucuaccagauccucuccaucuacuccaccgucgccuccucccucgcccucgccaucauggucgccggccucucccucuggaugugcuccaacggcucccuccagugccgcaucugcaucuga

SEQ ID NO: 109902 - RNA, 1695 nt, Artificial Sequence
  derived and/or modified CDS sequence (opt2) from hemagglutinin__InfluenzaA__ABW90130
auggagaagaucguccuccucuucgccaucgucucccucgucaaguccgaccagaucugcaucggcuaccacgccaacaacuccaccgagcaggucgacaccaucauggagaagaacgucaccgucacccacgcccaggacauccucgagaagaagcacaacggcaagcucugcgaccucgacggcgucaagccccucauccuccgcgacugcuccgucgccggcuggcuccucggcaaccccaugugcgacgaguucaucaacguccccgagugguccuacaucgucgagaaggccaaccccgucaacgaccucugcuaccccggcgacuucaacgacuacgaggagcucaagcaccuccucucccgcaucaaccacuucgagaagauccagaucauccccaaguccuccugguccucccacgaggccucccucggcgucuccuccgccugccccuaccagggcaaguucuccuucuuccgcaacgucgucuggcucaucaagaagaacuccaccuaccccaccaucaagcgcuccuacaacaacaccaaccaggaggaccuccucguccucuggggcauccaccaccccaacgacgccgccgagcagaccaagcucuaccagaaccccaccaccuacaucuccgucggcaccuccacccucaaccagcgccucgucccccgcaucgccacccgcuccaaggucaacggccaguccggccgcauggaguucuucuggaccauccucaagcccaacgacgccaucaacuucgaguccaacggcaacuucaucgcccccgaguacgccuacaagaucgucaagaagggcgacuccaccaucaugaaguccgagcucgaguacggcaacugcaacaccaagugccagacccccaugggcgccaucaacuccuccaugcccuuccacaacauccacccccucaccaucggcgagugccccaaguacgucaaguccaaccgccucguccucgccaccggccuccgcaacuccccccagcgcgagacccgcggccucuucggcgccaucgccggcuucaucgagggcggcuggcagggcauggucgacggcugguacggcuaccaccacuccaacgagcagggcuccggcuacgccgccgacaaggaguccacccagaaggccaucgacggcgucaccaacaaggucaacuccaucaucgacaagaugaacacccaguucgaggccgucggccgcgaguucaacaaccucgagcgccgcaucgagaaccucaacaagaagauggaggacggcuuccucgacgucuggaccuacaacgccgagcuccucguccucauggagaacgagcgcacccucgacuuccacgacuccaacgucaagaaccucuacgacaagguccgccuccagcuccgcgacaacgccaaggagcucggcaacggcugcuucgaguucuaccacaagugcgacaacgagugcauggaguccguccgcaacggcaccuacgacuacccccaguacuccgaggaggcccgccucaagcgcgaggagaucuccggcgucaagcucgaguccaucggcaucuaccagauccucuccaucuacuccaccgucgccuccucccucgcccucgccaucauggucgccggccucucccucuggaugugcuccaacggcucccuccagugccgcaucugcaucuga

SEQ ID NO: 109903 - RNA, 1695 nt, Artificial Sequence
  derived and/or modified CDS sequence (opt2) from hemagglutinin__InfluenzaA__ABW90132
auggagaagaucguccuccucuucgccaucgucucccucgucaaguccgaccagaucugcaucggcuaccacgccaacaacuccaccgagcaggucgacaccaucauggagaagaacgucaccgucacccacgcccaggacauccucgagaagaagcacaacggcaagcucugcgaccucgacggcgucaagccccucauccuccgcgacugcuccgucgccggcuggcuccucggcaaccccaugugcgacgaguucaucaacguccccgagugguccuacaucgucgagaaggccaaccccgucaacgaccucugcuaccccggcgacuucaacgacuacgaggagcucaagcaccuccucucccgcaucaaccacuucgagaagauccagaucauccccaaguccuccugguccucccacgaggccucccucggcgucuccuccgccugccccuaccagggcaaguccuccuucuuccgcaacgucgucuggcucaucaagaagaacuccaccuaccccaccaucaagcgcuccuacaacaacaccaaccaggaggaccuccucguccucuggggcauccaccaccccaacaacgccgccgagcagaccgagcucuaccagaaccccaccaccuacaucuccgucggcaccuccacccucaaccagcgccucgucccccgcaucgccacccgcuccaaggucaacggccaguccggccgcauggaguucuucuggaccauccucaagcccaacgacgccaucaacuucgaguccaacggcaacuucaucgcccccgaguacgccuacaagaucgucaagaagggcgacuccaccaucaugaaguccgagcucgaguacggcaacugcaacaccaagugccagacccccaugggcgccaucaacuccuccaugcccuuccacaacauccacccccucaccaucggcgagugccccaaguacgucaaguccaaccgccucguccucgccaccggccuccgcaacuccccccagcgcgagacccgcggccucuucggcgccaucgccggcuucaucgagggcggcuggcagggcauggucgacggcugguacggcuaccaccacuccaacgagcagggcuccggcuacgccgccgacaaggaguccacccagaaggccaucgacggcgucaccaacaaggucaacuccaucaucgacaagaugaacacccaguucgaggccgucggccgcgaguucaacaaccucgagcgccgcaucgagaaccucaacaagaagauggaggacggcuuccucgacgucuggaccuacaacgccgagcuccucguccucauggagaacgagcgcacccucgacuuccacgacuccaacgucaagaaccucuacgacaagguccgccuccagcuccgcgacaacgccaaggagcucggcaacggcugcuucgaguucuaccacaagugcgacaacgagugcauggaguccguccgcaacggcaccuacgacuacccccaguacuccgaggaggcccgccucaagcgcgaggagaucuccggcgucaagcucgaguccaucggcaucuaccagauccucuccaucuacuccaccgucgccuccucccucgcccucgccaucauggucgccggccucucccucuggaugugcuccaacggcucccuccagugccgcaucugcaucuga

SEQ ID NO: 109904 - RNA, 1695 nt, Artificial Sequence
  derived and/or modified CDS sequence (opt2) from hemagglutinin__InfluenzaA__ABW90133
auggagaagaucguccuccucuucgccaucgucucccucgucaaguccgaccagaucugcaucggcuaccacgccaacaacuccaccgagcaggucgacaccaucauggagaagaacgucaccgucacccacgcccaggacauccucgagaagaagcacaacggcaagcucugcgaccucgacggcgucaagccccucauccuccgcgacugcuccgucgccggcuggcuccucggcaaccccaugugcgacgaguucaucaacguccccgagugguccuacaucgucgagaaggccaaccccgucaacgaccucugcuaccccggcgacuucaacgacuacgaggagcucaagcaccuccucucccgcaucaaccacuucgagaagauccagaucauccccaaguccuccugguccucccacgaggccucccucggcgucuccuccgccugccccuaccagggcaagcccuccuucuuccgcaacgucgucuggcucaucaagaagaacuccaccuaccccaccaucaagcgcuccuacaacaacaccaaccaggaggaccuccucguccucuggggcauccaccaccccaacgacgccgccgagcagaccaagcucuaccagaaccccaccaccuacaucuccgucggcaccuccacccucaaccagcgccucgucccccgcaucgccacccgcuccaaggucaacggccaguccggccgcauggaguucuucuggaccauccucaagcccaacgacgccaucaacuucgaguccaacggcaacuucaucgcccccgaguacgccuacaagaucgucaagaagggcgacuccaccaucaugaaguccgagcucgaguacggcaacugcaacaccaagugccagacccccaugggcgccaucaacuccuccaugcccuuccacaacauccacccccucaccaucggcgagugccccaaguacgucaaguccaaccgccucguccucgccaccggccuccgcaacuccccccagcgcgagacccgcggccucuucggcgccaucgccggcuucaucgagggcggcuggcagggcauggucgacggcugguacggcuaccaccacuccaacgagcagggcuccggcuacgccgccgacaaggaguccacccagaaggccaucgacggcgucaccaacaaggucaacuccaucaucgacaagaugaacacccaguucgaggccgucggccgcgaguucaacaaccucgagcgccgcaucgagaaccucaacaagaagauggaggacggcuuccucgacgucuggaccuacaacgccgagcuccucguccucauggagaacgagcgcacccucgacuuccacgacuccaacgucaagaaccucuacgacaagguccgccuccagcuccgcgacaacgccaaggagcucggcaacggcugcuucgaguucuaccacaagugcgacaacgagugcauggaguccguccgcaacggcaccuacgacuacccccaguacuccgaggaggcccgccucaagcgcgaggagaucuccggcgucaagcucgaguccaucggcaucuaccagauccucuccaucuacuccaccgucgccuccucccucgcccucgccaucauggucgccggccucucccucuggaugugcuccaacggcucccuccagugccgcaucugcaucuga

SEQ ID NO: 109905 - RNA, 1695 nt, Artificial Sequence
  derived and/or modified CDS sequence (opt2) from hemagglutinin__InfluenzaA__ABW90134
auggagaagaucguccuccucuucgccaucgucucccucgucaaguccgaccagaucugcaucggcuaccacgccaacaacuccaccgagcaggucgacaccaucauggagaagaacgucaccgucacccacgcccaggacauccucgagaagaagcacaacggcaagcucugcgaccucgacggcgucaagccccucauccuccgcgacugcuccgucgccggcuggcuccucggcaaccccaugugcgacgaguucaucaacguccccgagugguccuacaucgucgagaaggccaaccccgucaacgaccucugcuaccccggcgacuucaacgacuacgaggagcucaagcaccuccucucccgcaucaaccacuucgagaagauccagaucauccccaaguccuccugguccucccacgaggccucccucggcgucuccuccgccugccccuaccaggagaaguccuccuucuuccgcaacgucgucuggcucaucaagaagaacuccaccuaccccaccaucaagcgcuccuacaacaacaccaaccaggaggaccuccucguccucuggggcauccaccaccccaacgacgccgccgagcagaccaagcucuaccagaaccccaccaccuacaucuccgucggcaccuccacccucaaccagcgccucgucccccgcaucgccacccgcuccaaggucaacggccaguccggccgcauggaguucuucuggaccauccucaagcccaacgacgccaucaacuucgaguccaacggcaacuucaucgcccccgaguacgccuacaagaucgucaagaagggcgacuccaccaucaugaaguccgagcucgaguacggcaacugcaacaccaagugccagacccccaugggcgccaucaacuccuccaugcccuuccacaacauccacccccucaccaucggcgagugccccaaguacgucaaguccaaccgccucguccucgccaccggccuccgcaacuccccccagcgcgagacccgcggccucuucggcgccaucgccggcuucaucgagggcggcuggcagggcauggucgacggcugguacggcuaccaccacuccaacgagcagggcuccggcuacgccgccgacaaggaguccacccagaaggccaucgacggcgucaccaacaaggucaacuccaucaucgacaagaugaacacccaguucgaggccgucggccgcgaguucaacaaccucgagcgccgcaucgagaaccucaacaagaagauggaggacggcuuccucgacgucuggaccuacaacgccgagcuccucguccucauggagaacgagcgcacccucgacuuccacgacuccaacgucaagaaccucuacgacaagguccgccuccagcuccgcgacaacgccaaggagcucggcaacggcugcuucgaguucuaccacaagugcgacaacgagugcauggaguccguccgcaacggcaccuacgacuacccccaguacuccgaggaggcccgccucaagcgcgaggagaucuccggcgucaagcucgaguccaucggcaucuaccagauccucuccaucuacuccaccgucgccuccucccucgcccucgccaucauggucgccggccucucccucuggaugugcuccaacggcucccuccagugccgcaucugcaucuga

SEQ ID NO: 109906 - RNA, 1695 nt, Artificial Sequence
  derived and/or modified CDS sequence (opt2) from hemagglutinin__InfluenzaA__ABW90135
auggagaagaucguccuccucuucgccaucgucucccucgucaaguccgaccagaucugcaucggcuaccacgccaacaacuccaccgagcaggucgacaccaucauggagaagaacgucaccgucacccacgcccaggacauccucgagaagaagcacaacggcaagcucugcgaccucgacggcgucaagccccucauccuccgcgacugcuccgucgccggcuggcuccucggcaaccccaugugcgacgaguucaucaacguccccgagugguccuacaucgucgagaaggccaaccccgucaacgaccucugcuaccccggcgacuucaacgacuacgaggagcucaagcaccuccucucccgcaucaaccacuucgagaagauccagaucauccccaaguccuccugguccucccacgaggccucccucggcgucuccuccgccugccccuaccagggcaaguccuccuucuuccgcaacgucgucuggcucaucaacaagaacuccaccuaccccaccaucaagcgcuccuacaacaacaccaaccaggaggaccuccucguccucuggggcauccaccaccccaacgacgccgccgagcagaccaagcucuaccagaaccccaccaccuacaucuccgucggcaccuccacccucaaccagcgccucgucccccgcaucgccacccgcuccaaggucaacggccaguccggccgcauggaguucuucuggaccauccucaagcccaacgacgccaucaacuucgaguccaacggcaacuucaucgcccccgaguacgccuacaagaucgucaagaagggcgacuccaccaucaugaaguccgagcucgaguacggcaacugcaacaccaagugccagacccccaugggcgccaucaacuccuccaugcccuuccacaacauccacccccucaccaucggcgagugccccaaguacgucaaguccaaccgccucguccucgccaccggccuccgcaacuccccccagcgcgagacccgcggccucuucggcgccaucgccggcuucaucgagggcggcuggcagggcauggucgacggcugguacggcuaccaccacuccaacgagcagggcuccggcuacgccgccgacaaggaguccacccagaaggccaucgacggcgucaccaacaaggucaacuccaucaucgacaagaugaacacccaguucgaggccgucggccgcgaguucaacaaccucgagcgccgcaucgagaaccucaacaagaagauggaggacggcuuccucgacgucuggaccuacaacgccgagcuccucguccucauggagaacgagcgcacccucgacuuccacgacuccaacgucaagaaccucuacgacaagguccgccuccagcuccgcgacaacgccaaggagcucggcaacggcugcuucgaguucuaccacaagugcgacaacgagugcauggaguccguccgcaacggcaccuacgacuacccccaguacuccgaggaggcccgccucaagcgcgaggagaucuccggcgucaagcucgaguccaucggcaucuaccagauccucuccaucuacuccaccgucgccuccucccucgcccucgccaucauggucgccggccucucccucuggaugugcuccaacggcucccuccagugccgcaucugcaucuga

SEQ ID NO: 109907 - RNA, 1695 nt, Artificial Sequence
  derived and/or modified CDS sequence (opt2) from hemagglutinin__InfluenzaA__HB649491
auggagaagaucguccuccucuucgccaucgucucccucgucaaguccgaccagaucugcaucggcuaccacgccaacaacuccaccgagcaggucgacaccaucauggagaagaacgucaccgucacccacgcccaggacauccucgagaagaagcacaacggcaagcucugcgaccucgacggcgucaagccccucauccuccgcgacugcuccgucgccggcuggcuccucggcaaccccaugugcgacgaguucaucaacguccccgagugguccuacaucgucgagaaggccaaccccgucaacgaccucugcuaccccggcgacuucaacgacuacgaggagcucaagcaccuccucucccgcaucaaccacuucgagaagauccagaucauccccaaguccuccugguccucccacgaggccucccucggcgucuccuccgccugccccuaccagggcaaguccuccuucuuccgcaacgucgucuggcucaucaagaagaacuccaccuaccccaccaucaagcgcuccuacaacaacaccaaccaggaggaccuccucguccucuggggcauccaccaccccaacgacgccgccgagcagaccaagcucuaccagaaccccaccaccuacaucuccgucggcaccuccacccucaaccagcgccucgucccccgcaucgccacccgcuccaaggucaacggccaguccggccgcauggaguucuucuggaccauccucaagcccaacgacgccaucaacuucgaguccaacggcaacuucaucgcccccgaguacgccuacaagaucgucaagaagggcgacuccaccaucaugaaguccgagcucgaguacggcaacugcaacaccaagugccagacccccaugggcgccaucaacuccuccaugcccuuccacaacauccacccccucaccaucggcgagugccccaaguacgucaaguccaaccgccucguccucgccaccggccuccgcaacuccccccagcgcgagacccgcggccucuucggcgccaucgccggcuucaucgagggcggcuggcagggcauggucgacggcugguacggcuaccaccacuccaacgagcagggcuccggcuacgccgccgacaaggaguccacccagaaggccaucgacggcgucaccaacaaggucaacuccaucaucgacaagaugaacacccaguucgaggccgucggccgcgaguucaacaaccucgagcgccgcaucgagaaccucaacaagaagauggaggacggcuuccucgacgucuggaccuacaacgccgagcuccucguccucauggagaacgagcgcacccucgacuuccacgacuccaacgucaagaaccucuacgacaagguccgccuccagcuccgcgacaacgccaaggagcucggcaacggcugcuucgaguucuaccacaagugcgacaacgagugcauggaguccguccgcaacggcaccuacgacuacccccaguacuccgaggaggcccgccucaagcgcgaggagaucuccggcgucaagcucgaguccaucggcaucuaccagauccucuccaucuacuccaccgucgccuccucccucgcccucgccaucauggucgccggccucucccucuggaugugcuccaacggcucccuccagugccgcaucugcaucuga

SEQ ID NO: 109908 - RNA, 1683 nt, Artificial Sequence; identical to SEQ ID NO: 106024
  derived and/or modified CDS sequence (opt2) from hemagglutinin__InfluenzaA__EPI439507

SEQ ID NO: 109909 - RNA, 1701 nt, Artificial Sequence
  derived and/or modified CDS sequence (opt2) from hemagglutinin__InfluenzaA__EPI482777
augaaggccauccucgucguccuccucuacaccuucaccaccgccaacgccgacacccucugcaucggcuaccacgccaacaacuccaccgacaccgucgacaccguccucgagaagaacgucaccgucacccacuccgucaaccuccucgagaaccgccacaacggcaagcucugcaagcuccgcggcgucgccccccuccaccucggcaagugcaacaucgccggcuggcuccucggcaaccccgagugcgagucccucuccaccgccuccuccugguccuacaucgucgagaccuccaacuccgacaacggcaccugcuaccccggcgacuucaucaacuacgaggagcuccgcgagcagcucuccuccgucuccuccuucgagcgcuucgagaucuuccccaagaccuccuccuggcccaaccacgacaccaaccgcggcgucaccgccgccugcccccacgccggcgccaacuccuucuaccgcaaccucgucuggcucgucaagaagggcaacuccuaccccaagaucaacaaguccuacaucaacaacaaggagaaggagguccucguccucugggccauccaccaccccuccaccuccgccgaccagcagucccucuaccagaacgccgacgccuacgucuucgucggcuccucccgcuacucccgcaaguucgagcccgagaucgccacccgccccaagguccgcgaccaggccggccgcaugaacuacuacuggacccucgucgagcccggcgacaagaucaccuucgaggccaccggcaaccucgucgccccccgcuacgccuucgcccucaagcgcaacuccggcuccggcaucaucaucuccgacaccuccguccacgacugcgacaccaccugccagacccccaacggcgccaucaacaccucccuccccuuccagaacauccaccccgucaccaucggcgagugccccaaguacgucaaguccaccaagcuccgcauggccaccggccuccgcaacauccccuccauccagucccgcggccucuucggcgccaucgccggcuucaucgagggcggcuggaccggcaugaucgacggcugguacggcuaccaccaccagaacgagcagggcuccggcuacgccgccgaccucaaguccacccagaacgccaucgacggcaucaccaacaaggucaacuccgucaucgagaagaugaacacccaguucaccgccgucggcaaggaguucucccaccucgagcgccgcaucgagaaccucaacaagaaggucgacgacggcuuccucgacaucuggaccuacaacgccgagcuccucguccuccucgagaacgagcgcacccucgacuaccacgacuccaacgucaagaaccucuacgagaagguccgcucccagcucaagaacaacgccaaggagaucggcaacggcugcuucgaguucuaccacaagugcgacgacaugugcauggaguccgucaagaacggcaccuacgacuaccccaaguacuccgaggaggccaagcucaaccgcgaggagaucgacggcgucaagcucgaguccacccgcaucuaccagauccucgccaucuacuccaccgucgccuccucccucguccucgucgucucccucggcgccaucuccuucuggaugugcuccaacggcucccuccagugccgcaucugcaucuga

SEQ ID NO: 109910 - RNA, 1701 nt, Artificial Sequence; identical to SEQ ID NO: 101620
  derived and/or modified CDS sequence (opt2) from hemagglutinin__InfluenzaA__EPI745532

SEQ ID NO: 109911 - RNA, 1701 nt, Artificial Sequence
  derived and/or modified CDS sequence (opt2) from hemagglutinin__InfluenzaA__EPI278594
augaaggccauccucgucguccuccucuacaccuucgccaccgccaacgccgacacccucugcaucggcuaccacgccaacaacuccaccgacaccgucgacaccguccucgagaagaacgucaccgucacccacuccgucaaccuccucgaggacaagcacaacggcaagcucugcaagcuccgcggcgucgccccccuccaccucggcaagugcaacaucgccggcuggauccucggcaaccccgagugcgagucccucuccaccgccuccuccugguccuacaucgucgagaccuccuccuccgacaacggcaccugcuaccccggcgacuucaucgacuacgaggagcuccgcgagcagcucuccuccgucuccuccuucgagcgcuucgagaucuuccccaagaccuccuccuggcccgaccacgaguccaacaagggcgucaccgccgccugcccccacgccggcgccaaguccuucuacaagaaccucaucuggcucgucaagaagggcaacuccuaccccaagcucuccaaguccuacaucaacgacaagggcaaggagguccucguccucuggggcauccaccaccccuccaccuccgccgaccagcagucccucuaccagaacgccgacgccuacgucuucgucggcaccucccgcuacuccaagaaguucaagcccgagaucgccauccgccccaagguccgcgaccaggagggccgcaugaacuacuacuggacccucgucgagcccggcgacaagaucaccuucgaggccaccggcaaccucgucgucccccgcuacgccuucgccauggagcgcaacgccggcuccggcaucaucaucuccgacacccccguccacgacugcaacaccaccugccagacccccaagggcgccaucaacaccucccuccccuuccagaacauccaccccaucaccaucggcaagugccccaaguacgucaaguccaccaagcuccgccucgccaccggccuccgcaacguccccuccauccagucccgcggccucuucggcgccaucgccggcuucaucgagggcggcuggaccggcauggucgacggcugguacggcuaccaccaccagaacgagcagggcuccggcuacgccgccgaccucaaguccacccagaacgccaucgacaagaucaccaacaaggucaacuccgucaucgagaagaugaacacccaguucaccgccgucggcaaggaguucaaccaccucgagaagcgcaucgagaaccucaacaagaaggucgacgacggcuuccucgacaucuggaccuacaacgccgagcuccucguccuccucgagaacgagcgcacccucgacuaccacgacuccaacgucaagaaccucuacgagaagguccgcucccagcucaagaacaacgccaaggagaucggcaacggcugcuucgaguucuaccacaagugcgacaacaccugcauggaguccgucaagaacggcaccuacgacuaccccaaguacuccgaggaggccaagcucaaccgcgaggagaucgacggcgucaagcucgaguccacccgcaucuaccagauccucgccaucuacuccaccgucgccuccucccucguccucgucgucucccucggcgccaucuccuucuggaugugcuccaacggcucccuccagugccgcaucugcaucuga

SEQ ID NO: 109912 - RNA, 1701 nt, Artificial Sequence
  derived and/or modified CDS sequence (opt2) from hemagglutinin__InfluenzaA__AEE69009
augaaggccauccucgucguccuccucuacaccuucgccaccgccaacgccgacacccucugcaucggcuaccacgccaacaacuccaccgacaccgucgacaccguccucgagaagaacgucaccgucacccacuccgucaaccuccucgaggacaagcacaacggcaagcucugcaagcuccgcggcgucgccccccuccaccucggcaagugcaacaucgccggcuggauccucggcaaccccgagugcgagucccucuccaccgccuccuccugguccuacaucgucgagacccccuccuccgacaacggcaccugcuaccccggcgacuucaucgacuacgaggagcuccgcgagcagcucuccuccgucuccuccuucgagcgcuucgagaucuuccccaagaccuccuccuggcccaaccacgacuccaacaagggcgucaccgccgccugcccccacgccggcgccaaguccuucuacaagaaccucaucuggcucgucaagaagggcaacuccuaccccaagcucuccaaguccuacaucaacgacaagggcaaggagguccucguccucuggggcauccaccacccccccaccuccgccgaccagcagucccucuaccagaacgccgacaccuacgucuucgucggcuccucccgcuacuccaagaaguucaagcccgagaucgccauccgccccaagguccgcgaccaggagggccgcaugaacuacuacuggacccucgucgagcccggcgacaagaucaccuucgaggccaccggcaaccucgucgucccccgcuacgccuucgccauggagcgcaacgccggcuccggcaucaucaucuccgacacccccguccacgacugcaacaccaccugccagacccccaagggcgccaucaacaccucccuccccuuccagaacauccaccccaucaccaucggcaagugccccaaguacgucaaguccaccaagcuccgccucgccaccggccuccgcaacauccccuccauccagucccgcggccucuucggcgccaucgccggcuucaucgagggcggcuggaccggcauggucgacggcugguacggcuaccaccaccagaacgagcagggcuccggcuacgccgccgaccucaaguccacccagaacgccaucgacgagaucaccaacaaggucaacuccgucaucgagaagaugaacacccaguucaccgccgucggcaaggaguucaaccaccucgagaagcgcaucgagaaccucaacaagaaggucgacgacggcuuccucgacaucuggaccuacaacgccgagcuccucguccuccucgagaacgagcgcacccucgacuaccacgacuccaacgucaagaaccucuacgagaagguccgcucccagcucaagaacaacgccaaggagaucggcaacggcugcuucgaguucuaccacaagugcgacaacaccugcauggaguccgucaagaacggcaccuacgacuaccccaaguacuccgaggaggccaagcucaaccgcgaggagaucgacggcgucaagcucgaguccacccgcaucuaccagauccucgccaucuacuccaccgucgccuccucccucguccucgucgucucccucggcgccaucuccuucuggaugugcuccaacggcucccuccagugccgcaucugcaucuga

SEQ ID NO: 109913 - RNA, 1701 nt, Artificial Sequence; identical to SEQ ID NO: 98987
  derived and/or modified CDS sequence (opt2) from hemagglutinin__InfluenzaA__GQ280797

SEQ ID NO: 109914 - RNA, 1701 nt, Artificial Sequence; identical to SEQ ID NO: 98720
  derived and/or modified CDS sequence (opt2) from hemagglutinin__InfluenzaA__EPI178457

SEQ ID NO: 109915 - RNA, 1701 nt, Artificial Sequence; identical to SEQ ID NO: 98720
  derived and/or modified CDS sequence (opt2) from hemagglutinin__InfluenzaA__EPI176470

SEQ ID NO: 109916 - RNA, 1701 nt, Artificial Sequence
  derived and/or modified CDS sequence (opt2) from hemagglutinin__InfluenzaA__EPI280341
augaaggccauccucgucguccuccuccacaccuucgccaccgccaacgccgacacccucugcaucggcuaccacgccaacaacuccaccgacaccgucgacaccguccucgagaagaacgucaccgucacccacuccgucaaccuccucgaggacaagcacaacggcaagcucugcaagcuccgcggcgucgccccccuccaccucggcaagugcaacaucgccggcuggauccucggcaaccccgagugcgagucccucuccaccgccuccuccugguccuacaucgucgagaccuccuccuccgacaacggcaccugcuaccccggcaacuucaucgacuacgaggagcuccgcgagcagcucuccuccgucuccuccuucgagcgcuucgagaucuuccccaagaccuccuccuggcccgaccacgacuccaacaagggcgucaccgccgccugcccccacgccggcgccaaguccuucuacaagaaccucaucuggcucgucaagaagggcaacuccuaccccacccucuccaaguccuacaucaacgacaagggcaaggagguccucguccucuggggcauccaccaccccuccaccuccgccgaccagcagucccucuaccagaacgccgacgccuacgucuucgucggcaccucccgcuacuccaagaaguucaagcccgagaucgccauccgccccaagguccgcaaccaggagggccgcaugaacuacuacuggacccucgucgagcccggcgacaagaucaccuucgaggccaccggcaaccucgucgccccccgcuacgccuucgccauggagcgcaacgccggcuccggcaucaucaucuccgacacccccguccacgacugcaacaccaccugccagacccccaagggcgccaucaacaccucccuccccuuccagaacauccaccccaucaccaucggcaagugccccaaguacgucaaguccaccaagcuccgccucgccaccggccuccgcaacguccccuccauccagucccgcggccucuucggcgccaucgccggcuucaucgagggcggcuggaccggcauggucgacggcugguacggcuaccaccaccagaacgagcagggcuccggcuacgccgccgaccucaaguccacccagaacgccaucgacaagaucaccaacaaggucaacuccgucaucgagaagaugaacacccaguucaccgccgucggcaaggaguucaaccaccucgagaagcgcaucgagaaccucaacaagaaggucgacgacggcuuccucgacaucuggaccuacaacgccgagcuccucguccuccucgagaacgagcgcacccucgacuaccacgacuccaacgucaagaaccucuacgagaagguccgcucccagcucaagaacaacgccaaggagaucggcaacggcugcuucgaguucuaccacaagugcgacaacaccugcauggaguccgucaagaacggcaccuacgacuaccccaaguacuccgaggaggccaagcucaaccgcgaggagaucgacggcgucaagcucgaguccacccgcaucuaccagauccucgccaucuacuccaccgucgccuccucccucguccucgucgucucccucggcgccaucuccuucuggaugugcuccaacggcucccuccagugccgcaucugcaucuga

SEQ ID NO: 109917 - RNA, 1701 nt, Artificial Sequence
  derived and/or modified CDS sequence (opt2) from hemagglutinin__InfluenzaA__EPI240319
augaaggccauccucgucguccuccucuacaccuucgccaccgccaacgccgacacccucugcaucggcuaccacgccaacaacuccaccgacaccgucgacaccguccucgagaagaacgucaccgucacccacuccgucaacauccucgaggacaagcacaacggcaagcucugcaagcuccgcggcgucgccccccuccaccucggcaagugcaacaucgccggcuggauccucggcaaccccgagugcgagucccucuccaccgccuccuccugguccuacaucgucgagaccuccuccuccgacaacggcaccugcuaccccggcgacuucaucgacuacgaggagcuccgcgagcagcucuccuccgucuccuccuucgagcgcuucgagaucuuccccaagaccuccuccuggcccaaccacgacuccaacaagggcgucaccgccgccugcccccacgccggcgccaaguccuucuacaagaaccucaucuggcucgucaagaagggcaacuccuaccccaagcucuccaaguccuacaucaacgacaagggcaaggagguccucguccucuggggcauccaccaccccuccaccuccgccgaccagcagucccucuaccagaacgccgacgccuacgucuucgucggcuccucccgcuacuccaagaaguucaagcccgagaucgccauccgccccaagguccgcgaccgcgagggccgcaugaacuacuacuggacccucgucgagcccggcgacaagaucaccuucgaggccaccggcaaccucgucgucccccgcuacgccuucgccauggagcgcaacgccggcuccggcaucaucaucuccgacacccccguccacgacugcaacaccaccugccagacccccaagggcgccaucaacaccucccuccccuuccagaacauccaccccaucaccaucggcaagugccccaaguacgucaaguccaccaagcuccgccucgccaccggccuccgcaacguccccuccauccagucccgcggccucuucggcgccaucgccggcuucaucgagggcggcuggaccggcauggucgacggcugguacggcuaccaccaccagaacgagcagggcuccggcuacgccgccgaccucaaguccacccagaacgccaucgacgagaucaccaacaaggucaacuccgucaucgagaagaugaacacccaguucaccgccgucggcaaggaguucaaccaccucgagaagcgcaucgagaaccucaacaagaaggucgacgacggcuuccucgacaucuggaccuacaacgccgagcuccucguccuccucgagaacgagcgcacccucgacuaccacgacuccaacgucaagaaccucuacgagaagguccgcucccagcucaagaacaacgccaaggagaucggcaacggcugcuucgaguucuaccacaagugcgacaacaccugcauggaguccgucaagaacggcaccuacgacuaccccaaguacuccgaggaggccaagcucaaccgcgaggagaucgacggcgucaagcucgaguccacccgcaucuaccagauccucgccaucuacuccaccgucgccuccucccucguccucgucgucucccucggcgccaucuccuucuggaugugcuccaacggcucccuccagugccgcaucugcaucuga

SEQ ID NO: 109918 - RNA, 1701 nt, Artificial Sequence; identical to SEQ ID NO: 98885
  derived and/or modified CDS sequence (opt2) from hemagglutinin__InfluenzaA__EPI183134

SEQ ID NO: 109919 - RNA, 1701 nt, Artificial Sequence
  derived and/or modified CDS sequence (opt2) from hemagglutinin__InfluenzaA__EPI368693
augaaggccauccucgucguccuccucuacaccuucgccaccgccaacgccgacacccucugcaucggcuaccacgccaacaacuccaccgacaccgucgacaccguccucgagaagaacgucaccgucacccacuccgucaacauccucgaggacaagcacaacggcaagcucugcaagcuccgcggcgucgccccccuccaccucggcaagugcaacaucgccggcuggauccucggcaaccccgagugcgagucccucuccaccgccuccuccugguccuacaucgucgagaccuccuccuccgacaacggcaccugcuaccccggcgacuucaucgacuacgaggagcuccgcgagcagcucuccuccgucuccuccuucgagcgcuucgagaucuuccccaagaccuccuccuggcccaaccacgacuccaacaagggcgucaccgccuccugcccccacgccggcgccaaguccuucuacaagaaccucaucuggcucgucaagaagggcaacuccuaccccaagcucuccaaguccuacaucaacgacaagggcaaggagguccucguccucuggggcauccaccaccccuccaccuccgccgaccagcagucccucuaccagaacgccgacgccuacgucuucgucggcuccucccgcuacuccaagaaguucaagcccgagaucgccauccgccccaagguccgcggccaggagggccgcaugaacuacuacuggacccucgucgagcccggcgacaagaucaccuucgaggccaccggcaaccucgucgucccccgcuacgccuucgccauggagcgcaacgccggcuccggcaucaucaucuccgacacccccguccacgacugcaacaccaccugccagacccccaagggcgccaucaacaccucccuccccuuccagaacauccaccccaucaccaucggcaagugccccaaguacgucaaguccaccaagcuccgccucgccaccggccuccgcaacguccccuccauccagucccgcggccucuucggcgccaucgccggcuucaucgagggcggcuggaccggcauggucgacggcugguacggcuaccaccaccagaacgagcagggcuccggcuacgccgccgaccucaaguccacccagaacgccaucgacgagaucaccaacaaggucaacuccgucaucgagaagaugaacacccaguucaccgccgucggcaaggaguucaaccaccucgagaagcgcaucgagaaccucaacaagaaggucgacgacggcuuccucgacaucuggaccuacaacgccgagcuccucguccuccucgagaacgagcgcacccucgacuaccacgacuccaacgucaagaaccucuacgagaagguccgcucccagcucaagaacaacgccaaggagaucggcaacggcugcuucgaguucuaccacaagugcgacaacaccugcauggaguccgucaagaacggcaccuacgacuaccccaaguacuccgaggaggccaagcucaaccgcgaggagaucgacggcgucaagcucgaguccacccgcaucuaccagauccucgccaucuacuccaccgucgccuccucccucguccucgucgucucccucggcgccaucuccuucuggaugugcuccaacggcucccuccagugccgcaucugcaucuga

SEQ ID NO: 109920 - RNA, 1701 nt, Artificial Sequence
  derived and/or modified CDS sequence (opt2) from hemagglutinin__InfluenzaA__EPI291788
augaaggccauccucgucguccuccucuacaccuucaccaccgccaacgccgacacccucugcaucggcuaccacgccaacaacuccaccgacaccgucgacaccguccucgagaagaacgucaccgucacccacuccgucaaccuccucgagaaccgccacaacggcaagcucugcaagcuccgcggcgucgccccccuccaccucggcaagugcaacaucgccggcuggcuccucggcaaccccgagugcgagucccucuccaccgccuccuccugguccuacaucgucgagaccuccaacuccgacaacggcaccugcuaccccggcgacuucaucaacuacgaggagcuccgcgagcagcucuccuccgucuccuccuucgagcgcuucgagaucuuccccaagaccuccuccuggcccaaccacgacaccaaccgcggcgucaccgccgccugcccccacgccggcaccaacuccuucuaccgcaaccucaucuggcucgucaagaagggcaacuccuaccccaagaucaacaaguccuacaucaacaacaaggagaaggagguccucguccucugggccauccaccaccccuccaccuccgccgaccagcagucccucuaccagaacgccgacgccuacgucuucgucggcuccucccgcuacucccgcaaguucgagcccgagaucgccacccgccccaagguccgcgaccaggccggccgcaugaacuacuacuggacccucgucgagcccggcgacaagaucaccuucgaggccaccggcaaccucgucgucccccgcuacgccuucgcccucaagcgcaacuccggcuccggcaucaucaucuccgacaccuccguccacgacugcgacaccaccugccagacccccaacggcgccaucaacaccucccuccccuuccagaacauccaccccgucaccaucggcgagugccccaaguacgucaaguccaccaagcuccgcauggccaccggccuccgcaacauccccuccauccagucccgcggccucuucggcgccaucgccggcuucaucgagggcggcuggaccggcaugaucgacggcugguacggcuaccaccaccagaacgagcagggcuccggcuacgccgccgaccucaaguccacccagaacgccaucgacggcaucaccaacaaggucaacuccgucaucgagaagaugaacacccaguucaccgccgucggcaaggaguucucccaccucgagcgccgcaucgagaaccucaacaagaaggucgacgacggcuuccucgacaucuggaccuacaacgccgagcuccucguccuccucgagaacgagcgcacccucgacuaccacgacuccaacgucaagaaccucuacgagaagguccgcucccagcucaagaacaacgccaaggagaucggcaacggcugcuucgaguucuaccacaagugcgacgacaccugcauggaguccgucaagaacggcaccuacgacuaccccaaguacuccgaggaggccaagcucaaccgcgaggagaucgacggcgucaagcucgaguccacccgcaucuaccagauccucgccaucuacuccaccgucgccuccucccucguccucgucgucucccucggcgccaucuccuucuggaugugcuccaacggcucccuccagugccgcaucugcaucuga

SEQ ID NO: 109921 - RNA, 1701 nt, Artificial Sequence
  derived and/or modified CDS sequence (opt2) from hemagglutinin__InfluenzaA__EPI482788
augaaggccauccucgucguccuccucuacaccuucaccaccgccaacgccgacacccucugcaucggcuaccacgccaacaacuccaccgacaccgucgacaccguccucgagaagaacgucaccgucacccacuccgucaaccuccucgagaaccgccacaacggcaagcucugcaagcuccgcggcgucgccccccuccaccucggcaagugcaacaucgccggcuggcuccucggcaaccccgagugcgagucccucuccaccgccuccuccugguccuacaucgucgagaccuccaacuccgacaacggcaccugcuaccccggcgacuucaucaacuacgaggagcuccgcgagcagcucuccuccgucuccuccuucgagcgcuucgagaucuuccccaagaccuccuccuggcccaaccacgacaccaaccgcggcgucaccgccgccugcccccacgccggcaccaacuccuucuaccgcaaccucaucuggcucgucaagaagggcaacuccuaccccaagaucaacaaguccuacaucaacaacaaggagaaggagguccucguccucugggccauccaccaccccuccaccuccgccgaccagcaguccaucuaccagaacgccgacgccuacgucuucgucggcuccucccgcuacucccgcaaguucgagcccgagaucgccacccgccccaagguccgcgaccaggccggccgcaugaacuacuacuggacccucgucgagcccggcgacaagaucaccuucgaggccaccggcaaccucgucgucccccgcuacgccuucgcccucaagcgcaacuccggcuccggcaucaucaucuccgacaccuccguccacgacugcgacaccaccugccagacccccaacggcgccaucaacaccucccuccccuuccagaacauccaccccgucaccaucggcgagugccccaaguacgucaaguccaccaagcuccgcauggccaccggccuccgcaacauccccuccauccagucccgcggccucuucggcgccaucgccggcuucaucgagggcggcuggaccggcaugaucgacggcugguacggcuaccaccaccagaacgagcagggcuccggcuacgccgccgaccucaaguccacccagaacgccaucgacggcaucaccaacaaggucaacuccgucaucgagaagaugaacacccaguucaccgccgucggcaaggaguucucccaccucgagcgccgcaucgagaaccucaacaagaaggucgacgacggcuuccucgacaucuggaccuacaacgccgagcuccucguccuccucgagaacgagcgcacccucgacuaccacgacuccaacgucaagaaccucuacgagaagguccgcucccagcucaagaacaacgccaaggagaucggcaacggcugcuucgaguucuaccacaagugcgacgacaccugcauggaguccgucaagaacggcaccuacgacuaccccaaguacuccgaggaggccaagcucaaccgcgaggagaucgacggcgucaagcucgaguccacccgcaucuaccagauccucgccaucuacuccaccgucgccuccucccucguccucgucgucucccucggcgccaucuccuucuggaugugcuccaacggcucccuccagugccgcaucugcaucuga

SEQ ID NO: 109922 - RNA, 1701 nt, Artificial Sequence
  derived and/or modified CDS sequence (opt2) from hemagglutinin__InfluenzaA__EPI178946/m1
augaaggccaucaucgucguccuccucuacaccuucgccaccgccgacgccgacacccucugcaucggcuaccacgccaacaacuccaccgacaccgucgacaccguccucgagaagaacgucaccgucacccacuccgucaaccuccucgagaacaagcacgacggcaagcucugcaagcuccgcggcgucgccccccuccaccucggcaagugcaacaucgccggcuggcuccucggcaaccccgagugcgagucccucuucaccgccuccuccugguccuacaucgucgagacccccaacuccgacaacggcaccugcuaccccggcgacuucaucaacuacgaggagcuccgcgagcaccucuccuccgucuccuccuucgagcgcuucgagaucuuccccaaggccaacuccuggcccaaccacgacaccaacaagggcgucaccgccgccugccccuacgccggcgccaacuccuucuaccgcaaccucaucuggcucgucaagaagggcaacuccuaccccaagcucuccaaguccuacaucaacaacaagaagaaggagguccucgucaucuggggcauccaccacccccccaccuccaccgaccagcagacccucuaccagaacgccgacgccuacgucuucgucggcuccuccaaguacuccaagcgcuucaagcccgagaucgccgcccgccccaagguccgcaaccaggccggccgcaugaacuacuacuggacccucaucgagcccggcgacaccaucaccuucgaggccaccggcaaccucgucgucccccgcuacgccuucgccaugaagcgcggcuccggcuccggcaucaucgucuccgacgcccccguccacgacugcaacaccaccugccagacccccaagggcgccaucaacaccucccuccccuuccagaacauccaccccgucaccaucggcgagugccccaaguacgucaaguccaccaagcuccgcauggccaccggccuccgcaacauccccuccauccagucccgcggccucuucggcgccaucgccggcuuccucgagggcggcuggaccggcaugaucgacggcugguacggcuaccaccaccagaacgagcagggcuccggcuacgccgccgaccagaaguccacccagaacgccaucgacggcaucaccaacaaggucaacuccaucaucgagaagaugaacacccaguucaccgccgucggcaaggaguucaaccagcucgagaagcgcaucgagucccucaacaacaaggucgacgacggcuuccucgacaucuggaccuacaacgccgagaugcucguccuccucgagaacgagcgcacccucgacuaccacgacuccaacgucaagaaccucuacgagaagguccgcucccagcucaagaacaacgccaaggagaucggcaacggcugcuucgaguucuaccacaagugcgacaacaccugcauggaguccgucaagaacggcaccuacgacuaccccaaguacuccgaggaggccaagcucaaccgcgaggagaucgacggcgucaagcucgaguccgcccgcaucuaccagauccucgccaucuacuccaccgucgccuccucccucguccuccucgucucccucggcgccgucuccuucuggaugugcuccaacggcucccuccagugccgcaucugcaucuga

SEQ ID NO: 109923 - RNA, 1701 nt, Artificial Sequence
  derived and/or modified CDS sequence (opt2) from hemagglutinin__InfluenzaA__EPI482791/m2
augaaggccaucaucgucguccuccucuacaccuucgccaccgccgacgccgacacccucugcaucggcuaccacgccaacaacuccaccgacaccgucgacaccguccucgagaagaacgucaccgucacccacuccgucaaccuccucgagaacaagcacgacggcaagcucugcaagcuccgcggcgucgccccccuccaccucggcaagugcaacaucgccggcuggcuccucggcaaccccgagugcgagucccucuucaccgccuccuccugguccuacaucgucgagacccccaacuccgacaacggcaccugcuaccccggcgacuucaucaacuacgaggagcuccgcgagcaccucuccuccgucuccuccuucgagcgcuucgagaucuuccccaaggccaacuccuggcccaaccacgagaccaacaagggcgucaccgccgccugccccuacgccggcgccaacuccuucuaccgcaaccucaucuggcucgucaagaagggcaacuccuaccccaagcucuccaaguccuacaucaacaacaagaagaaggagguccucgucaucuggggcauccaccacccccccaccuccaccgaccagcagacccucuaccagaacgccgacgccuacgucuucgucggcuccuccaaguacuccaagcgcuucaagcccgagaucgccgcccgccccaagguccgcaaccaggccggccgcaugaacuacuacuggacccucaucgagcccggcgacaccaucaccuucgaggccaccggcaaccucgucgucccccgcuacgccuucgccaugaagcgcggcuccggcuccggcaucaucgucuccgacgcccccguccacgacugcaacaccaccugccagacccccaagggcgccaucaacaccucccuccccuuccagaacauccaccccgucaccaucggcgagugccccaaguacgucaaguccaccaagcuccgcauggccaccggccuccgcaacauccccuccauccagucccgcggccucuucggcgccaucgccggcuuccucgagggcggcuggaccggcaugaucgacggcugguacggcuaccaccaccagaacgagcagggcuccggcuacgccgccgaccagaaguccacccagaacgccaucgacggcaucaccaacaaggucaacuccaucaucgagaagaugaacacccaguucaccgccgucggcaaggaguucaaccagcucgagaagcgcaucgagucccucaacaacaaggucgacgacggcuuccucgacaucuggaccuacaacgccgagaugcucguccuccucgagaacgagcgcacccucgacuaccacgacuccaacgucaagaaccucuacgagaagguccgcucccagcucaagaacaacgccaaggagaucggcaacggcugcuucgaguucuaccacaagugcgacaacaccugcauggaguccgucaagaacggcaccuacgacuaccccaaguacuccgaggaggccaagcucaaccgcgaggagaucgacggcgucaagcucgaguccgcccgcaucuaccagauccucgccaucuacuccaccgucgccuccucccucguccuccucgucucccucggcgccgucuccuucuggaugugcuccaacggcucccuccagugccgcaucugcaucuga

SEQ ID NO: 109924 - RNA, 1701 nt, Artificial Sequence
  derived and/or modified CDS sequence (opt2) from hemagglutinin__InfluenzaA__EPI291799
augaaggccauccucgucguccuccucuacaccuucaccaccgccaacgccgacacccucugcaucggcuaccacgccaacaacuccaccgacaccgucgacaccguccucgagaagaacgucaccgucacccacuccgucaaccuccucgagaaccgccacaacggcaagcucugcaagcuccgcggcgucgccccccuccaccucggcaagugcaacaucgccggcuggcuccucggcaaccccgagugcgagucccucuccaccgccuccuccugguccuacaucgucgagaccuccaacuccgacaacggcaccugcuaccccggcgacuucaucaacuacgaggagcuccgcgagcagcucuccuccgucuccuccuucgagcgcuucgagaucuuccccaagaccuccuccuggcccaaccacgacaccaaccgcggcgucaccgccgccugcccccacgccggcaccaacuccuucuaccgcaaccucaucuggcucgucaagaagggcaacuccuaccccaagaucaacaaguccuacaucaacaacaaggagaaggagguccucguccucugggccauccaccaccccuccaccuccgccgaccagcagucccucuaccagaacgccgacgccuacgucuucgucggcuccucccgcuacucccgcaaguucgagcccgagaucgccacccgccccaagguccgcgaccaggccggccgcaugaacuacuacuggacccucgucgagcccggcgacaagaucaccuucgaggccaccggcaaccucgucgucccccgcuacgccuucgcccucaagcgcaccuccggcuccggcaucaucaucuccgacaccuccguccacgacugcgacaccaccugccagacccccaacggcgccaucaacaccucccuccccuuccagaacauccaccccgucaccaucggcgagugccccaaguacgucaaguccaccaagcuccgcauggccaccggccuccgcaacauccccuccauccagucccgcggccucuucggcgccaucgccggcuucaucgagggcggcuggaccggcaugaucgacggcugguacggcuaccaccaccagaacgagcagggcuccggcuacgccgccgaccucaaguccacccagaacgccaucgacggcaucaccaacaaggucaacuccgucaucgagaagaugaacacccaguucaccgccgucggcaaggaguucucccaccucgagcgccgcaucgagaaccucaacaagaaggucgacgacggcuuccucgacaucuggaccuacaacgccgagcuccucguccuccucgagaacgagcgcacccucgacuaccacgacuccaacgucaagaaccucuacgagaagguccgcucccagcucaagaacaacgccaaggagaucggcaacggcugcuucgaguucuaccacaagugcgacgacaccugcauggaguccgucaagaacggcaccuacgacuaccccaaguacuccgaggaggccaagcucaaccgcgaggagaucgacggcgucaagcucgaguccacccgcaucuaccagauccucgccaucuacuccaccgucgccuccucccucguccucgucgucucccucggcgccaucuccuucuggaugugcuccaacggcucccuccagugccgcaucugcaucuga

SEQ ID NO: 109925 - RNA, 1701 nt, Artificial Sequence
  derived and/or modified CDS sequence (opt2) from hemagglutinin__InfluenzaA__EPI482799
augaaggccauccucgucguccuccucuacaccuucaccaccgccaacgccgacacccucugcaucggcuaccacgccaacaacuccaccgacaccgucgacaccguccucgagaagaacgucaccgucacccacuccgucaaccuccucgagaaccgccacaacggcaagcucugcaagcuccgcggcgucgccccccuccaccucggcaagugcaacaucgccggcuggcuccucggcaaccccgagugcgagucccucuccaccgccuccuccugguccuacaucgucgagaccuccaacuccgacaacggcaccugcuaccccggcgacuucaucaacuacgaggagcuccgcgagcagcucuccuccgucuccuccuucgagcgcuucgagaucuuccccaagaccuccuccuggcccaaccacgagaccaaccgcggcgucaccgccgccugcccccacgccggcaccaacuccuucuaccgcaaccucaucuggcucgucaagaagggcaacuccuaccccaagaucaacaaguccuacaucaacaacaaggagaaggagguccucguccucugggccauccaccaccccuccaccuccgccgaccagcagucccucuaccagaacgccgacgccuacgucuucgucggcuccucccgcuacucccgcaaguucgagcccgagaucgccacccgccccaagguccgcgaccaggccggccgcaugaacuacuacuggacccucgucgagcccggcgacaagaucaccuucgaggccaccggcaaccucgucgucccccgcuacgccuucgcccucaagcgcaccuccggcuccggcaucaucaucuccgacaccuccguccacgacugcgacaccaccugccagacccccaacggcgccaucaacaccucccuccccuuccagaacauccaccccgucaccaucggcgagugccccaaguacgucaaguccaccaagcuccgcauggccaccggccuccgcaacauccccuccauccagucccgcggccucuucggcgccaucgccggcuucaucgagggcggcuggaccggcaugaucgacggcugguacggcuaccaccaccagaacgagcagggcuccggcuacgccgccgaccucaaguccacccagaacgccaucgacggcaucaccaacaaggucaacuccgucaucgagaagaugaacacccaguucaccgccgucggcaaggaguucucccaccucgagcgccgcaucgagaaccucaacaagaaggucgacgacggcuuccucgacaucuggaccuacaacgccgagcuccucguccuccucgagaacgagcgcacccucgacuaccacgacuccaacgucaagaaccucuacgagaagguccgcucccagcucaagaacaacgccaaggagaucggcaacggcugcuucgaguucuaccacaagugcgacgacaccugcauggaguccgucaagaacggcaccuacgacuaccccaaguacuccgaggaggccaagcucaaccgcgaggagaucgacggcgucaagcucgaguccacccgcaucuaccagauccucgccaucuacuccaccgucgccuccucccucguccucgucgucucccucggcgccaucuccuucuggaugugcuccaacggcucccuccagugccgcaucugcaucuga

SEQ ID NO: 109926 - RNA, 1701 nt, Artificial Sequence
  derived and/or modified CDS sequence (opt2) from hemagglutinin__InfluenzaA__EPI291807
augaaggccaucaucgucguccuccucuacaccuucgccaccgccgacgccgacacccucugcaucggcuaccacgccaacaacuccaccgacaccgucgacaccguccucgagaagaacgucaccgucacccacuccgucaaccuccucgagaacaagcacgacggcaagcucugcaagcuccgcggcgucgccccccuccaccucggcaagugcaacaucgccggcuggcuccucggcaaccccgagugcgagucccucuucgccgccuccuccugguccuacaucgucgagacccccaacuccgacaacggcaccugcuaccccggcgacuucaucaacuacgaggagcuccgcgagcaccucuccuccgucuccuccuucgagcgcuucgagaucuuccccaaggccaacuccuggcccaaccacgacaccaacaagggcgucaccgccgccugccccuacgccggcgccaacuccuucuaccgcaaccucaucuggcucgucaagaagggcaacuccuaccccaagcucuccaaguccuacaucaacaacaagaagaaggagguccucgucaucuggggcauccaccacccccccaccuccaccgaccagcagacccucuaccagaacgccgacgccuacgucuucgucggcuccuccaaguacuccaagcgcuucaagcccgagaucgccgcccgccccaagguccgcgaccaggccggccgcauggacuacuacuggacccucaucgagcccggcgacaccaucaccuucgaggccaccggcaaccucgucgucccccgcuacgccuucgccaugaagcgcggcuccggcuccggcaucaucgucuccgacgcccccguccacgacugcaacaccaccugccagacccccaagggcgccaucaacaccucccuccccuuccagaacauccaccccgucaccaucggcgagugccccaaguacgucaaguccaccaagcuccgcauggccaccggccuccgcaacauccccuccauccagucccgcggccucuucggcgccaucgccggcuucaucgagggcggcuggaccggcaugaucgacggcugguacggcuaccaccaccagaacgagcagggcuccggcuacgccgccgaccagaaguccacccagaacgccaucgacggcaucaccaacaaggucaacuccaucaucgagaagaugaacacccaguucaccgccgucggcaaggaguucucccagcucgagaagcgcaucgagucccucaacaacaaggucgacgacggcuuccucgacaucuggaccuacaacgccgagcuccucguccuccucgagaacgagcgcacccucgacuaccacgacuccaacgucaagaaccucuacgagaagguccgcucccagcucaagaacaacgccaaggagaucggcaacggcugcuucgaguucuaccacaagugcgacaacaccugcauggaguccgucaagaacggcaccuacgacuaccccaaguacuccgaggaggccaagcucaaccgcgaggagaucgacggcgucaagcucgaguccgcccgcaucuaccagauccucgccaucuacuccaccgucgccuccucccucguccuccucgucucccucggcgccgucuccuucuggaugugcuccaacggcucccuccagugccgcaucugcaucuga

SEQ ID NO: 109927 - RNA, 1701 nt, Artificial Sequence
  derived and/or modified CDS sequence (opt2) from hemagglutinin__InfluenzaA__EPI638970
augaaggccauccucgucguccuccucuacaccuucaccaccgccaacgccgacacccucugcaucggcuaccacgccaacaacuccaccgacaccgucgacaccguccucgagaagaacgucaccgucacccacuccgucaaccuccucgagaaccgccacaacggcaagcucugcaagcuccgcggcgucgccccccuccaccucggcaagugcaacaucgccggcuggauccucggcaaccccgagugcgagucccucuccaccgccuccuccugguccuacaucgucgagaccuccaacuccgagaacggcaccugcuaccccggcgacuucaucaacuacgaggagcuccgcgagcagcucuccuccgucuccuccuucgagcgcuucgagaucuuccccaagaccuccuccuggcccaaccacgacaccaacaagggcgucaccgccgccugcccccacuccggcaccaacuccuucuaccgcaaccucgucuggcucguccagaagggcaacuccuaccccaagaucaacaaguccuacaucaacaacaaggagaacgagguccucguccucugggccauccaccaccccuccaccuccgccgaccagcagucccucuacaagaacgccgacgccuacgucuucgucggcuccucccgcuacucccgcaaguucgagcccgagaucgccacccgccccaagguccgcgaccaggccggccgcaugaacuacuacuggacccucgucgagcccggcgacaagaucaccuucgaggccaccggcaaccucgucgccccccgcuacgccuucacccucaagcgcaacuccggcuccggcaucaucaucuccgacaccuccguccacgacugcgacaccaccugccagacccccaacggcgccaucaacaccucccuccccuuccagaacauccaccccgucaccaucggcgagugccccaaguacgucaaguccaccaagcuccgcauggccaccggccuccgcaacauccccuccauccagucccgcggccucuucggcgccaucgccggcuucaucgagggcggcuggaccggcaugaucgacggcugguacggcuaccaccaccagaacgagcagggcuccggcuacgccgccgaccucaaguccacccagaacgccaucgacggcaucaccaacaaggucaacuccgucaucgagaagaugaacacccaguucaccgccgucggcaaggaguucucccaccucgagcgccgcaucgagaaccucaacaagaaggucgacgacggcuuccucgacaucuggaccuacaacgccgagcuccucguccuccucgagaacgagcgcacccucgacuaccacgacuccaacgucaagaaccucuacgagaagguccgcucccagcucaagaacaacgccaaggagaucggcaacggcugcuucgaguucuaccacaagugcgacgacaugugcauggaguccgucaagaacggcaccuacgacuaccccaaguacuccgaggaggccaagcucaaccgcgaggagaucgacggcgucaagcucgaguccaccaagaucuaccagauccucgccaucuacuccaccgucgccuccucccucguccucgucgucucccucggcgccaucuccuucuggaugugcuccaacggcucccuccagugccgcaucugcaucuga

SEQ ID NO: 109928 - RNA, 1701 nt, Artificial Sequence
  derived and/or modified CDS sequence (opt2) from hemagglutinin__InfluenzaA__ABI19015
augaaggccaucaucgucguccuccucuacaccuucgccaccgccgacgccgacacccucugcaucggcuaccacgccaacaacuccaccgacaccgucgacaccguccucgagaagaacgucaccgucacccacuccgucaaccuccucgagaacaagcacgacggcaagcucugcaagcuccgcggcaucgccccccuccaccucggcaagugcaacaucgccggcuggauccucggcaaccccgagugcgagucccucuucaccaccuccuccugguccuacaucgucgagacccccaacuccgacaacggcaccugcuaccccggcgacuucaucaacuacgaggagcuccgcgagcaccucuccuccgucuccuccuucgagcgcuucgagaucuuccccaaggccaacuccuggcccuaccacgacaccaacaagggcgucaccgccgccugccccuacgccggcgccaacuccuucuaccgcaaccucaucuggcucgucaagaagggcaacuccuaccccaagcucuccaaguccuacaucaacaacaagaagaaggagguccucgucaucuggggcauccaccacccccccaccuccaccgaccagcagacccucuaccagaacgccgacgccuacgucuucgucggcuccuccaaguacuccaagcgcuucaagcccgagaucgccgcccgccccaagguccgcgaccaggccggccgcauggacuacuacuggacccucaucgagcccggcgacaccaucaccuucgaggccaccggcaaccucgucgucccccgcuacgccuucaccaugaagcgcggcuccggcuccggcaucaucgucuccgacgcccccguccacgacugcaacaccaccugccagacccccaagggcgccaucaacaccucccuccccuuccagaacauccaccccgucaccaucggcgagugccccaaguacgucaaguccaccaagcuccgcauggccaccggccuccgcaacauccccuccauccagucccgcggccucuucggcgccaucgccggcuucaucgagggcggcuggaccggcaugaucgacggcugguacggcuaccaccaccagaacgagcagggcuccggcuacgccgccgaccagaaguccacccagaacgccaucgacggcaucaccaacaaggucaacuccaucaucgagaagaugaacacccaguucaccgccgucggcaaggaguucucccagcucgagaagcgcaucgagucccucaacaacaaggucgacgacggcuuccucgacaucuggaccuacaacgccgagcuccucguccuccucgagaacgagcgcacccucgacuaccacgacuccaacgucaagaaccucuacgagaagguccgcucccagcucaagaacaacgccaaggagaucggcaacggcugcuucgaguucuaccacaagugcgacgacaccugcauggaguccgucaagaacggcaccuacgacuaccccaaguacuccgaggaggccaagcucaaccgccaggagaucgacggcgucaagcucgaguccgcccgcaucuaccagauccucgccaucuacuccaccgucgccuccucccucguccuccucgucucccucggcgccgucuccuucuggaugugcuccaacggcucccuccagugccgcaucugcaucuga

SEQ ID NO: 109929 - RNA, 1701 nt, Artificial Sequence
  derived and/or modified CDS sequence (opt2) from hemagglutinin__InfluenzaA__EPI687790
augaaggccauccucgucguccuccucuacaccuucaccaccgccaacgccgacacccucugcaucggcuaccacgccaacaacuccaccgacaccgucgacaccguccucgagaagaacgucaccgucacccacuccgucaaccuccucgaggacaagcacaacggcaagcucugcaagcucggcggcgucgccccccuccaccucggcaagugcaacaucgccggcuggauccucggcaaccccgagugcgagucccucuccaccgccuccuccugguccuacaucgucgagaccuccaacuccgacaacggcaccugcuaccccggcgacuucaucaacuacgaggagcuccgcgagcagcucuccuccgucuccuccuucgagcgcuucgagaucuuccccaagaccuccuccuggcccaaccacgacuccaacaagggcgucaccgccgccugcccccacgccggcgccaaguccuucuacaagaaccucaucuggcucgucaagaagggcaacuccuaccccaagcucaaccaguccuacaucaacgacaagggcaaggagguccucguccucuggggcauccaccaccccuccaccaccgccgaccagcagucccucuaccagaacgccgacgccuacgucuucgucggcaccucccgcuacuccaagaaguucaagcccgagaucgccacccgccccaagguccgcgaccaggagggccgcaugaacuacuacuggacccucgucgagcccggcgacaagaucaccuucgaggccaccggcaaccucgucgucccccgcuacgccuucaccauggagcgcaacgccggcuccggcaucaucaucuccgacacccccguccacgacugcaacaccaccugccagacccccgagggcgccaucaacaccucccuccccuuccagaacauccaccccaucaccaucggcaagugccccaaguacgucaaguccaccaagcuccgccucgccaccggccuccgcaacguccccuccauccagucccgcggccucuucggcgccaucgccggcuucaucgagggcggcuggaccggcauggucgacggcugguacggcuaccaccaccagaacgagcagggcuccggcuacgccgccgaccucaaguccacccagaacgccaucgacaagaucaccaacaaggucaacuccgucaucgagaagaugaacacccaguucaccgccgucggcaaggaguucaaccaccucgagaagcgcaucgagaaccucaacaagaaggucgacgacggcuuccucgacaucuggaccuacaacgccgagcuccucguccuccucgagaacgagcgcacccucgacuaccacgacuccaacgucaagaaccucuacgagaagguccgcaaccagcucaagaacaacgccaaggagaucggcaacggcugcuucgaguucuaccacaagugcgacaacaccugcauggaguccgucaagaacggcaccuacgacuaccccaaguacuccgaggaggccaagcucaaccgcgagaagaucgacggcgucaagcucgaguccacccgcaucuaccagauccucgccaucuacuccaccgucgccuccucccucguccucgucgucucccucggcgccaucuccuucuggaugugcuccaacggcucccuccagugccgcaucugcaucuga

SEQ ID NO: 109930 - RNA, 1701 nt, Artificial Sequence
  derived and/or modified CDS sequence (opt2) from hemagglutinin__InfluenzaA__EPI841265
augaaggccauccucgucguccuccucuacaccuucaccaccgccaacgccgacacccucugcaucggcuaccacgccaacaacuccaccgacaccgucgacaccguccucgagaagaacgucaccgucacccacuccgucaaccuccucgaggacaagcacaacggcaagcucugcaagcucggcggcgucgccccccuccaccucggcaagugcaacaucgccggcuggauccucggcaaccccgagugcgagucccucuccaccgccuccuccugguccuacaucgucgagaccuccaacuccgacaacggcaccugcuaccccggcgacuucaucaacuacgaggagcuccgcgagcagcucuccuccgucuccuccuucgagcgcuucgagaucuuccccaagaccuccuccuggcccaaccacgacuccaacaagggcgucaccgccgccugcccccacgccggcgccaaguccuucuacaagaaccucaucuggcucgucaagaagggcaacuccuaccccaagcucaaccaguccuacaucaacgacaagggcaaggagguccucguccucuggggcauccaccaccccuccaccaccgccgaccagcaguccaucuaccagaacgccgacgccuacgucuucgucggcaccucccgcuacuccaagaaguucaagcccgagaucgccacccgccccaagguccgcgaccaggagggccgcaucaacuacuacuggacccucgucgagcccggcgacaagaucaccuucgaggccaccggcaaccucgucgucccccgcuacgccuucaccauggagcgcaacgccggcuccggcaucaucaucuccaacacccccguccacgacugcaacaccaccugccagacccccgagggcgccaucaacaccucccuccccuuccagaacauccaccccaucaccaucggcaagugccccaaguacgucaaguccaccaagcuccgccucgccaccggccuccgcaacguccccuccauccagucccgcggccucuucggcgccaucgccggcuucaucgagggcggcuggaccggcauggucgacggcugguacggcuaccaccaccagaacgagcagggcuccggcuacgccgccgaccucaaguccacccagaacgccaucgacaagaucaccaacaaggucaacuccgucaucgagaagaugaacacccaguucaccgccgucggcaaggaguucaaccaccucgagaagcgcaucgagaaccucaacaagaaggucgacgacggcuuccucgacaucuggaccuacaacgccgagcuccucguccuccucgagaacgagcgcacccucgacuaccacgacuccaacgucaagaaccucuacgagaagguccgcaaccagcucaagaacaacgccaaggagaucggcaacggcugcuucgaguucuaccacaagugcgacaacaccugcauggaguccgucaagaacggcaccuacgacuaccccaaguacuccgaggaggccaagcucaaccgcgagaagaucgacggcgucaagcucgaguccacccgcaucuaccagauccucgccaucuacuccaccgucgccuccucccucguccucgucgucucccucggcgccaucuccuucuggaugugcuccaacggcucccuccagugccgcaucugcaucuga

SEQ ID NO: 109931 - RNA, 1701 nt, Artificial Sequence
  derived and/or modified CDS sequence (opt2) from hemagglutinin__InfluenzaA__EPI291846
augaaggccaucaucgucguccuccucuacaccuucgccaccgccgacgccgacacccucugcaucggcuaccacgccaacaacuccaccgacaccgucgacaccguccucgagaagaacgucaccgucacccacuccgucaaccuccucgagaacaagcacgacggcaagcucugcaaccucaagggcgucgccccccuccaccucggcaagugcaacaucgccggcuggcuccucggcaaccccgagugcgagucccucuucaccgccuccuccugguccuacaucgucgagacccccaacuccgacaacggcaccugcuaccccggcgacuucaucaacuacgaggagcuccgcgagcaccucuccuccgucuccuccuucgagcgcuucgagaucuuccccaaggucaacuccuggcccaaccacgacaccaacaagggcgucaccgccgccugccccuacgccggcgccaacuccuucuaccgcaaccucaucuggcucgucaagaagggcaacuccuaccccaagcucuccaaguccuacaucaacaacaagaagaaggagguccucgucaucuggggcauccaccacccccccaccuccaccgaccagcagacccucuaccagaacgccgacgccuacgucuucgucggcuccuccaaguacuccaagcgcuucgagcccgagaucgccgcccgccccaagguccgcaaccaggccggccgcaugaacuacuacuggacccucaucgagcccggcgacaccaucaccuucgaggccaccggcaaccucgucgucccccgcuacgccuucgccaugcgccgcggcuccggcuccggcaucaucgucuccgacgcccccguccacgacugcaacaccaccugccagacccccaagggcgccaucaacaccucccuccccuuccagaacauccaccccgucaccaucggcgagugccccaaguacgucaaguccaccaagcuccgcauggccaccggccuccgcaacauccccuccauccagucccgcggccucuucggcgccaucgccggcuuccucgagggcggcuggaccggcaugaucgacggcugguacggcuaccaccaccagaacgagcagggcuccggcuacgccgccgaccagaaguccacccagaacgccaucgacggcaucaccaacaaggucaacuccaucaucgagaagaugaacacccaguucaccgccgucggcaaggaguucucccagcucgagaagcgcaucgagucccucaacaacaaggucgacgacggcuuccucgacaucuggaccuacaacgccgagaugcucguccuccucgagaacgagcgcacccucgacuaccacgacuccaacgucaagaaccucuacgagaagguccgcucccagcucaagaacaacgccaaggagaucggcaacggcugcuucgaguucuaccacaagugcgacaacaccugcauggaguccguccgcaacggcaccuacgacuaccccaaguacuccgaggaggccaagcucaaccgcgaggagaucgacggcgucaagcucgaguccgcccgcaucuaccagauccucgccaucuacuccaccgucgccuccucccucguccuccucgucucccucggcgccgucuccuucuggaugugcuccaacggcucccuccagugccgcaucugcaucuga

SEQ ID NO: 109932 - RNA, 1695 nt, Artificial Sequence
  derived and/or modified CDS sequence (opt2) from hemagglutinin__InfluenzaA__EPI558121
augaaggccauccucgucguccuccucuacaccuucaccaccgccaacgccgacacccucugcaucggcuaccacgccaacaacuccaccgacaccgucgacaccguccucgagaagaacgucaccgucacccacuccgucaaccuccucgagaaccgccacaacggcaagcucugcaagcuccgcggcgucgccccccuccaccucggcaagugcaacaucgccggcuggcuccucggcaaccccgagugcgagucccucuccaccgccuccuccugguccuacaucgucgagaccuccaacuccgacaacggcaccugcuaccccggcgacuucaucaacuacgaggagcuccgcgagcagcucuccuccgucuccuccuucgagcgcuucgagaucuucccccagaccuccuccuggcccaaccacgacaccaaccgcggcgucaccgccgccugcccccacgccggcaccaacuccuucuaccgcaaccucgucuggcucgucaagaagggcaacuccuacuccaagaucaacaaguccuacaucaacaacaaggagaaggagguccucguccucugggccauccaccaccccuccaccuccgccgaccagcagucccucuaccagaacgccgacgccuacgucuucgucggcuccucccgcuacucccgcaaguucgagcccgagaucgccacccgccccaagguccgcgaccaggccggccgcaugaacuacuacuggacccucgucgagcccggcgacaagaucaccuucgaggccaccggcaaccucgucgccccccgcuacgccuucgcccucaagcgcaacuccggcuccggcaucaucaucuccgacaccuccguccacgacugcgacaccaccugccagacccccaacggcgccaucaacaccucccuccccuuccagaacauccaccccgucaccaucggcgagugccccaaguacgucaaguccaccaagcuccgcauggccaccggccuccgcaacauccccuccauccagucccgcggccucuucggcgccaucgccggcuucaucgagggcggcuggaccggcaugaucgacggcugguacggcuaccaccaccagaacgagcagggcuccggcuacgccgccgaccucaaguccacccagaacgccaucgacggcaucaccaacaaggucaacuccgucaucgagaagaugaacacccaguucaccgccgucggcaaggaguucucccaccucgagcgccgcaucgagaaccucaacaagaaggucgacgacggcuuccucgacaucuggaccuacaacgccgagcuccucguccuccucgagaacgagcgcacccucgacuaccacgacuccaacgucaagaaccucuacgagaagguccgcucccagcucaagaacaacgccaaggagaucggcaacggcugcuucgaguucuaccacaagugcgacgacaugugcauggaguccgucaagaacggcaccuacgacuaccccaaguacuccgaggaggccaagcucaaccgcgaggagaucgacggcgucaagcucgaguccacccgcaucuaccagauccucgccaucuacuccaccgucgccuccucccucguccucgucgucucccucggcgccaucuccuucuggaugugcuccaacggcucccuccagugccgcaucuga

SEQ ID NO: 109933 - RNA, 1701 nt, Artificial Sequence; identical to SEQ ID NO: 108477
  derived and/or modified CDS sequence (opt2) from hemagglutinin__InfluenzaA__EPI564139

SEQ ID NO: 109934 - RNA, 1701 nt, Artificial Sequence; identical to SEQ ID NO: 109722
  derived and/or modified CDS sequence (opt2) from hemagglutinin__InfluenzaA__EPI786706

SEQ ID NO: 109935 - RNA, 1701 nt, Artificial Sequence
  derived and/or modified CDS sequence (opt2) from hemagglutinin__InfluenzaA__EPI395313
augaaggccauccucaucguccuccucuacaccuucaccaccgccaacgccgacacccucugcaucggcuaccacgccaacaacuccaccgacaccgucgacaccguccucgagaagaacgucaccgucacccacuccgucaaccuccucgagaaccgccacaacggcaagcucugcaagcuccgcggcgucgccccccuccaccucggcaagugcaacaucgccggcuggcuccucggcaaccccgagugcgagucccucuccaccgccuccuccugguccuacaucgucgagaccuccaacuccgacaacggcaccugcuaccccggcgacuucaucaacuacgaggagcuccgcgagcagcucuccuccgucuccuccuucgagcgcuucgagaucuuccccaagaccuccuccuggcccaaccacgacaccaaccgcggcgucaccgccgccugcccccacgccggcaccaaguccuucuacaagaaccucaucuggaucgccaagaagggcaacuccuaccccaagaucaacaaguccuacaucaacaacaaggagaaggagguccucguccucugggccauccaccaccccuccaccuccgccgaccagcagucccucuaccagaacgccgacgccuacgucuucgucggcuccucccgcuacucccgcaaguucgagcccgagaucgccacccgccccaagguccgcgaccaggccggccgcaugaacuacuacuggacccucgucgagcccggcgacaagaucaccuucgaggccaccggcaaccucgucgccccccgcuacgccuucgcccucaagcgcaacuccggcuccggcaucaucaucuccgacaccuccguccacgacugcgacaccaccugccagacccccaacggcgccaucaacaccucccuccccuuccagaacauccaccccgucaccaucggcgagugccccaaguacgucaaguccaccaagcuccgcauggccaccggccuccgcaacauccccuccauccagucccgcggccucuucggcgccaucgccggcuucaucgagggcggcuggaccggcaugaucgacggcugguacggcuaccaccaccagaacgagcagggcuccggcuacgccgccgaccucaaguccacccagaacgccaucgacggcaucaccaacaaggucaacuccgucaucgagaagaugaacacccaguucaccgccgucggcaaggaguucucccaccucgagcgccgcaucgagaaccucaacaagaaggucgacgacggcuuccucgacaucuggaccuacaacgccgagcuccucguccuccucgagaacgagcgcacccucgacuaccacgacuccaacgucaagaaccucuacgagaagguccgcucccagcucaagaacaacgccaaggagaucggcaacggcugcuucgaguucuaccacaagugcgacgacaugugcauggaguccgucaagaacggcaccuacgacuaccccaaguacuccgaggaggccaagcucaaccgcgaggucaucgacggcgucaagcucgaguccacccgcaucuaccagauccucgccaucuacgccaccgucgccuccucccucguccucgucgucucccucggcgccaucuccuucuggaugugcuccaacggcucccuccagugccgcaucugcaucuga

SEQ ID NO: 109936 - RNA, 1701 nt, Artificial Sequence
  derived and/or modified CDS sequence (opt2) from hemagglutinin__InfluenzaA__EPI291696
augaaggccauccuccucguccuccucuacaccuucaccgccgccaacgccgacacccucugcaucggcuaccacgccaacaacuccaccgacaccgucgacaccguccucgagaagaacgucaccgucacccacuccgucaaccuccucgagaaccgccacaacggcaagcucugcaagcuccgcggcguccccccccuccaccucggcaagugcaacaucgccggcuggcuccucggcaaccccgagugcgagcuccucuucaccgccuccuccugguccuacaucgucgagaccuccaacuccgacaacggcaccugcuaccccggcgacuucaucaacuacgaggagcuccgcgagcagcucuccuccgucuccuccuucgagcgcuucgagaucuuccccaaggccuccuccuggcccgaccacgagaccaaccgcggcgucaccgccgccugccccuacgccggcgccaacuccuucuaccgcaaccucaucuggcucgucaagaagggcaacuccuaccccaagcucuccaaguccuacgucaacaacaaggagaaggagguccucguccucuggggcauccaccacccccccaccuccaccgaccagcagucccucuaccagaacgccgacgccuacgucuucgucggcuccuccaaguacaacaagaaguucaagcccgagauggccgcccgccccaagguccgcggccaggccggccgcaugaacuacuacuggacccucgucgcccccggcgacaccaucaccuucgaggccaccggcaaccucgucgucccccgcuacgccuucgccaugaagcgcggcuccggcuccggcaucaucaucuccgacacccccguccacgacugcaacaccaccugccagacccccaagggcgccaucaacaccucccuccccuuccagaacauccaccccgucaccaucggcgagugccccaaguacgucaaguccaccaagcuccgcauggccaccggccuccgcaacauccccuccauccagucccgcggccucuucggcgccaucgccggcuucaucgagggcggcuggaccggcaugaucgacggcugguacggcuaccaccaccagaacgagcagggcuccggcuacgccgccgaccgcaaguccacccagaacgccaucgacggcaucaccaacaaggucaacuccgucaucgagaagaugaacacccaguucaccgccgucggcaaggaguucaaccaccucgagaagcgcaucgagaaccucaacaagaaggucgacgacggcuuccucgacgucuggaccuacaacgccgagcuccucguccuccucgagaacgagcgcacccucgacuaccacgacuccaacgucaagaaccucuacgagaagguccgcucccagcucaagaacaacgccaaggagaucggcaacggcugcuucgaguucuaccacaagugcgacgacaccugcauggaguccgucaagaacggcaccuacgacuaccccaaguacuccgaggaguccaagcucaaccgcgaggagaucgacggcgucaagcucgaguccacccgcaucuaccagauccucgccaucuacuccaccgucgccuccucccucguccucuccgucucccucggcgccaucuccuucuggaugugcuccaacggcucccuccagugccgcaucugcaucuga

SEQ ID NO: 109937 - RNA, 1701 nt, Artificial Sequence; identical to SEQ ID NO: 105867
  derived and/or modified CDS sequence (opt2) from hemagglutinin__InfluenzaA__ACU80014

SEQ ID NO: 109938 - RNA, 1701 nt, Artificial Sequence; identical to SEQ ID NO: 98705
  derived and/or modified CDS sequence (opt2) from hemagglutinin__InfluenzaA__EPI177400

SEQ ID NO: 109939 - RNA, 1701 nt, Artificial Sequence; identical to SEQ ID NO: 99148
  derived and/or modified CDS sequence (opt2) from hemagglutinin__InfluenzaA__ACT36512

SEQ ID NO: 109940 - RNA, 1704 nt, Artificial Sequence
  derived and/or modified CDS sequence (opt2) from hemagglutinin__InfluenzaA__AJE30344
auggagaagaucguccuccuccucgccgucaucucccucgucaaguccgaccagaucugcaucggcuaccacgccaacaacuccaccaagcaggucgacaccaucauggagaagaacgucaccgucacccacgcccaggacauccucgagaagacccacaacggcaagcucugcgaccucaacggcgucaagccccucauccucaaggacugcuccgucgccggcuggcuccucggcaaccccaugugcgacgaguucauccgcguccccgagugguccuacaucgucgagcgcgccaaccccgccaacgaccucugcuaccccggcacccucaacgacuacgaggagcucaagcaccuccucucccgcaucaaccacuucgagaagaaccucaucaucccccgcuccuccuggcccaaccacgagaccucccucggcgucuccgccgccugccccuaccagggcgccuccuccuucuuccgcaacgucgucuggcucaucaagaagaacgacgccuaccccaccaucaagaucuccuacaacaacaccaaccgcgaggaccuccucauccucuggggcauccaccacuccaacaacgccgccgagcagaccaaccucuacaagaaccccgacaccuacgucuccgucggcaccuccacccucaaccagcgccucguccccaagaucgccacccgcucccaggucaacggccaguccggccgcauggacuucuucuggaccauccucaagcccaacgacgccauccacuucgaguccaacggcaacuucaucgcccccgaguacgccuacaagaucgucaagaagggcgacuccaccaucaugaaguccgagauggaguacggccacugcaacaccaagugccagacccccaucggcgccaucaacuccuccaugcccuuccacaacauccacccccucaccaucggcgagugccccaaguacgucaaguccaacaagcucguccucgccaccggccuccgcaacuccccccuccgcgagcgccgccgcaagcgcggccucuucggcgccaucgccggcuucaucgagggcggcuggcagggcauggucgacggcugguacggcuaccaccacuccaacgagcagggcuccggcuacgccgccgacaaggaguccacccagaaggccaucgacggcgucaccaacaaggucaacuccaucaucgacaagaugaacacccaguucgaggccgucggccgcgaguucaacaaccucgagcgccgcaucgagaaccucaacaagaagauggaggacggcuuccucgacgucuggaccuacaacgccgagcuccucguccucauggagaacgagcgcacccucgacuuccacgacuccaacgucaagaaccucuacgacaagguccgccuccagcuccgcgacaacgccaaggagcucggcaacggcugcuucgaguucuaccacaagugcgacaacgagugcauggaguccguccgcaacggcaccuacgacuaccccaaguacuccgaggaggccauccucaagcgcgaggagaucuccggcgucaagcucgaguccaucggcaccuaccagauccucuccaucuacuccaccgucgccuccucccucgcccucgccaucaucgucgccggccucucccucuggaugugcuccaacggcucccuccagugccgcaucugcaucuga

SEQ ID NO: 109941 - RNA, 1701 nt, Artificial Sequence; identical to SEQ ID NO: 109920
  derived and/or modified CDS sequence (opt2) from hemagglutinin__InfluenzaA__EPI178948

SEQ ID NO: 109942 - RNA, 1701 nt, Artificial Sequence; identical to SEQ ID NO: 109920
  derived and/or modified CDS sequence (opt2) from hemagglutinin__InfluenzaA__EPI178949

SEQ ID NO: 109943 - RNA, 1701 nt, Artificial Sequence
  derived and/or modified CDS sequence (opt2) from hemagglutinin__InfluenzaA__EPI590132
augaaggccauccucaucguccuccucuacaccuucaccaccgccaacgccgacaagaucugcaucggcuaccacgccaacaacuccaccgacaccgucgacaccguccucgagaagaacgucaccgucacccacuccgucaaccuccucgagaacaagcacaacggcaagcucugcaagcuccgcggcgucgccccccuccaccucggcaagugcaacaucgccggcuggcuccucggcaaccccgagugcgagucccucgccaccgccuccuccugguccuacaucgucgagaccuccuccuccaacaacggcaccugcuaccccggcgacuucaucaacuacgaggagcuccgcgagcagcucuccuccgucuccuccuucgagaaguucgagaucuuccccaagaccuccuccuggcccaaccacgagaccaacaagggcgucaccgccgccugcccccacgccggcaccaacuccuucuacaagaaccucaucuggcucgucaagaaggagaacuccuaccccaagaucaacaucuccuacaccaacaaccgcggcaaggagguccucguccucugggccauccaccacccccccaccuccaccgaccagcagucccucuaccagaacgccaacuccuacgucuucgucggcuccucccgcuacucccgcaaguucgagcccgagaucgccacccgccccaagguccgcggccaggccggccgcaugaacuacuacuggacccucgucgagcccggcgacaagaucaccuucgaggccaccggcaaccucgucgucccccgcuacgccuucgcccucaagcgcaacuccggcuccggcaucaucaucuccgagacccccguccacgacugcgacaccaccugccagacccccaacggcgccaucaacaccucccuccccuuccagaacauccaccccgucaccaucggcgagugccccaaguacgucaaguccaccaagcuccgcauggccaccggccuccgcaacauccccuccauccagucccgcggccucuucggcgccaucgccggcuucaucgagggcggcuggaccggcaugaucgacggcugguacggcuaccaccaccagaacgagcagggcuccggcuacgccgccgaccucaaguccacccagaacgccaucgacggcaucaccaacaaggucaacuccgucaucgagaagaugaacacccaguucaccgccgucggcaaggaguucucccaccucgagcgccgcaucgagaaccucaacaagaaggucgacgacggcuucaucgacaucuggaccuacaacgccgagcuccucguccuccucgagaacgagcgcacccucgacuaccacgacuccaacgucaagacccucuacgagaagguccgcucccagcucaagaacaacgccaaggagaucggcaacggcugcuucgaguucuaccacaagugcgacgacaccugcauggaguccgucaagaacggcaccuacgacuaccccaaguacuccgaggaggccaagcucaaccgcgaggagaucgacggcaucaagcucgaguccacccgcaucuaccagauccucgccaucuacuccaccgucgccuccucccucguccucgucgucucccucggcgccaucuccuucuggaugugcuccaacggcucccuccagugccgcgucugcaucuga

SEQ ID NO: 109944 - RNA, 1701 nt, Artificial Sequence; identical to SEQ ID NO: 97772
  derived and/or modified CDS sequence (opt2) from hemagglutinin__InfluenzaA__ABU80400

SEQ ID NO: 109945 - RNA, 1698 nt, Artificial Sequence
  derived and/or modified CDS sequence (opt2) from hemagglutinin__InfluenzaA__ABO21709
augaaggccaaccuccucguccuccucugcgcccucgccgccgccgacgccgacaccaucugcaucggcuaccacgccaacaacuccaccgacaccgucgacaccguccucgagaagaacgucaccgucacccacuccgucaaccuccucgaggacucccacaacggcaagcucugccgccucaagggcaucgccccccuccagcucggcaagugcaacaucgccggcuggcuccucggcaaccccgagugcgacccccuccuccccguccgcuccugguccuacaucgucgagacccccaacuccgagaacggcaucugcuaccccggcgacuucaucgacuacgaggagcuccgcgagcagcucuccuccgucuccuccuucgagcgcuucgagaucuuccccaaggaguccuccuggcccaaccacaacaccaacggcgucaccgccgccugcucccacgagggcaaguccuccuucuaccgcaaccuccucuggcucaccgagaaggagggcuccuaccccaagcucaagaacuccuacgucaacaagaagggcaaggagguccucguccucuggggcauccaccacccccccaacuccaaggagcagcagaaccucuaccagaacgagaacgccuacgucuccgucgucaccuccaacuacaaccgccgcuucacccccgagaucgccgagcgccccaagguccgcgaccaggccggccgcaugaacuacuacuggacccuccucaagcccggcgacaccaucaucuucgaggccaacggcaaccucaucgcccccauguacgccuucgcccucucccgcggcuucggcuccggcaucaucaccuccaacgccuccaugcacgagugcaacaccaagugccagaccccccucggcgccaucaacuccucccuccccuaccagaacauccaccccgucaccaucggcgagugccccaaguacguccgcuccgccaagcuccgcauggucaccggccuccgcaacaaccccuccauccagucccgcggccucuucggcgccaucgccggcuucaucgagggcggcuggaccggcaugaucgacggcugguacggcuaccaccaccagaacgagcagggcuccggcuacgccgccgaccagaaguccacccagaacgccaucaacggcaucaccaacaaggucaacaccgucaucgagaagaugaacauccaguucaccgccgucggcaaggaguucaacaagcucgagaagcgcauggagaaccucaacaagaaggucgacgacggcuuccucgacaucuggaccuacaacgccgagcuccucguccuccucgagaacgagcgcacccucgacuuccacgacuccaacgucaagaaccucuacgagaaggucaagucccagcucaagaacaacgccaaggagaucggcaacggcugcuucgaguucuaccacaagugcgacaacgagugcauggaguccguccgcaacggcaccuacgacuaccccaaguacuccgaggaguccaagcucaaccgcgagaaggucgacggcgucaagcucgaguccaugggcaucuaccagauccucgccaucuacuccaccgucgccuccucccucguccuccucgucucccucggcgccaucuccuucuggaugugcuccaacggcucccuccagugccgcaucugcaucuga

SEQ ID NO: 109946 - RNA, 1701 nt, Artificial Sequence; identical to SEQ ID NO: 98692
  derived and/or modified CDS sequence (opt2) from hemagglutinin__InfluenzaA__CAZ65588

SEQ ID NO: 109947 - RNA, 1701 nt, Artificial Sequence; identical to SEQ ID NO: 109722
  derived and/or modified CDS sequence (opt2) from hemagglutinin__InfluenzaA__EPI697744

SEQ ID NO: 109948 - RNA, 1701 nt, Artificial Sequence; identical to SEQ ID NO: 109882
  derived and/or modified CDS sequence (opt2) from hemagglutinin__InfluenzaA__EPI768525

SEQ ID NO: 109949 - RNA, 1701 nt, Artificial Sequence
  derived and/or modified CDS sequence (opt2) from hemagglutinin__InfluenzaA__EPI726930
augaaggccauccucgucguccuccucuacaccuucaccaccgccaacgccgacacccucugcaucggcuaccacgccaacaacuccaccgacaccgucgacaccguccucgagaagaacgucaccgucacccacuccgucaaccuccucgaggacaagcacaacggcaagcucugcaagcuccgcggcgucgccccccuccaccucggcaagugcaacaucgccggcuggauccucggcaaccccgagugcgagucccucuccaccgccuccuccugguccuacaucgucgagaccuccaacuccgacaacggcaccugcuaccccggcgacuucaucaacuacgaggagcuccgcgagcagcucuccuccgucuccuccuucgagcgcuucgagaucuuccccaaggccuccuccuggcccaaccacgacuccaacaagggcgucaccgccgccugcccccacgccggcgccaaguccuucuacaagaaccucaucuggcucgucaagaagggcaacuccuaccccaagcucaaccaguccuacaucaacgacaagggcaaggagguccucguccucuggggcauccaccaccccuccaccaccgccgaccagcagucccucuaccagaacgccgacgccuacgucuucgucggcaccucccgcuacuccaagaaguucaagcccgagaucgccacccgccccaagguccgcgaccaggagggccgcaugaacuacuacuggacccucgucgagcccggcgacaagaucaccuucgaggccaccggcaaccucgucgucccccgcuacgccuucaccauggagcgcaacgccggcuccggcaucaucaucuccgacacccccguccacgacugcaacaccaccugccagacccccgagggcgccaucaacaccucccuccccuuccagaacauccaccccaucaccaucggcaagugccccaaguacgucaaguccaccaagcuccgccucgccaccggccuccgcaacguccccuccauccagucccgcggccucuucggcgccaucgccggcuucaucgagggcggcuggaccggcauggucgacggcugguacggcuaccaccaccagaacgagcagggcuccggcuacgccgccgaccucaaguccacccagaacgccaucgacaagaucaccaacaaggucaacuccgucaucgagaagaugaacacccaguucaccgccgucggcaaggaguucaaccaccucgagaagcgcaucgagaaccucaacaagaaggucgacgacggcuuccucgacaucuggaccuacaacgccgagcuccucguccuccucgagaacgagcgcacccucgacuaccacgacuccaacgucaagaaccucuacgagaagguccgcaaccagcucaagaacaacgccaaggagaucggcaacggcugcuucgaguucuaccacaagugcgacaacaccugcauggaguccgucaagaacggcaccuacgacuaccccaaguacuccgaggaggccaagcucaaccgcgagaagaucgacggcgucaagcucgaguccacccgcaucuaccagauccucgccaucuacuccaccgucgccuccucccucguccucgucgucucccucggcgccaucuccuucuggaugugcuccaacggcucccuccagugccgcaucugcaucuga

SEQ ID NO: 109950 - RNA, 1701 nt, Artificial Sequence
  derived and/or modified CDS sequence (opt2) from hemagglutinin__InfluenzaA__EPI813817
augaaggccauccucgucguccuccucuacaccuucaccaccgccaacgccgacacccucugcaucggcuaccacgccaacaacuccaccgacaccgucgacaccguccucgagaagaacgucaccgucacccacuccgucaaccuccucgaggacaagcacaacggcaagcucugcaagcuccgcggcgucgccccccuccaccucggcaagugcaacaucgccggcuggauccucggcaaccccgagugcgagucccucuccaccgccuccuccugguccuacaucgucgagaccuccaacuccgacaacggcaccugcuaccccggcgacuucaucaacuacgaggagcuccgcgagcagcucuccuccgucuccuccuucgagcgcuucgagaucuuccccaaggccuccuccuggcccaaccacgacuccaacaagggcgucaccgccgccugcccccacgccggcgccaaguccuucuacaagaaccucaucuggcucgucaagaagggcaacuccuaccccaagcucaaccaguccuacaucaacgacaagggcaaggagguccucguccucuggggcauccaccaccccuccaccaccgccgaccagcagucccucuaccagaacgccgacgccuacgucuucgucggcaccucccgcuacuccaagaaguucaagcccgagaucgccacccgccccaagguccgcgaccaggaggcccgcaugaacuacuacuggacccucgucgagcccggcgacaagaucaccuucgaggccaccggcaaccucgucgucccccgcuacgccuucaccauggagcgcaacgccggcuccggcaucaucaucuccgacacccccguccacgacugcaacaccaccugccagacccccgagggcgccaucaacaccucccuccccuuccagaacauccaccccaucaccaucggcaagugccccaaguacgucaaguccaccaagcuccgccucgccaccggccuccgcaacguccccuccauccagucccgcggccucuucggcgccaucgccggcuucaucgagggcggcuggaccggcauggucgacggcugguacggcuaccaccaccagaacgagcagggcuccggcuacgccgccgaccucaaguccacccagaacgccaucgacaagaucaccaacaaggucaacuccgucaucgagaagaugaacacccaguucaccgccgucggcaaggaguucaaccaccucgagaagcgcaucgagaaccucaacaagaaggucgacgacggcuuccucgacaucuggaccuacaacgccgagcuccucguccuccucgagaacgagcgcacccucgacuaccacgacuccaacgucaagaaccucuacgagaagguccgcaaccagcucaagaacaacgccaaggagaucggcaacggcugcuucgaguucuaccacaagugcgacaacaccugcauggaguccgucaagaacggcaccuacgacuaccccaaguacuccgaggaggccaagcucaaccgcgagaagaucgacggcgucaagcucgaguccacccgcaucuaccagauccucgccaucuacuccaccgucgccuccucccucguccucgucgucucccucggcgccaucuccuucuggaugugcuccaacggcucccuccagugccgcaucugcaucuga

SEQ ID NO: 109951 - RNA, 1701 nt, Artificial Sequence
  derived and/or modified CDS sequence (opt2) from hemagglutinin__InfluenzaA__EPI466626
augaaggccauccucgucguccuccucuacaccuucgccaccgccaacgccgacacccucugcaucggcuaccacgccaacaacuccaccgacaccgucgacaccguccucgagaagaacgucaccgucacccacuccgucaaccuccucgaggacaagcacaacggcaagcucugcaagcuccgcggcgucgccccccuccaccucggcaagugcaacaucgccggcuggauccucggcaaccccgagugcgagucccucuccaccgccuccuccugguccuacaucgucgagaccuccuccuccgacaacggcaccugcuaccccggcgacuucaucaacuacgaggagcuccgcgagcagcucuccuccgucuccuccuucgagcgcuucgagaucuuccccaagaccuccuccuggcccaaccacgacuccaacaagggcgucaccgccgccugcccccacgccggcgccaaguccuucuacaagaaccucaucuggcucgucaagaagggcaacuccuaccccaagcucucccaguccuacaucaacgacaagggcaaggagguccucguccucuggggcauccaccaccccuccaccaccgccgaccagcagucccucuaccagaacgccgacgccuacgucuucgucggcaccucccgcuacuccaagaaguucaagcccgagaucgccauccgccccaagguccgcgaccaggagggccgcaugaacuacuacuggacccucgucgagcccggcgacaagaucaccuucgaggccaccggcaaccucgucgucccccgcuacgccuucaccauggagcgcaacgccggcuccggcaucaucaucuccgacacccccguccacgacugcaacaccaccugccagacccccgagggcgccaucaacaccucccuccccuuccagaacauccaccccaucaccaucggcaagugccccaaguacgucaaguccaccaagcuccgccucgccaccggccuccgcaacguccccuccauccagucccgcggccucuucggcgccaucgccggcuucaucgagggcggcuggaccggcauggucgacggcugguacggcuaccaccaccagaacgagcagggcuccggcuacgccgccgaccucaaguccacccagaacgccaucgacaagaucaccaacaaggucaacuccgucaucgagaagaugaacacccaguucaccgccgucggcaaggaguucaaccaccucgagaagcgcaucgagaaccucaacaagaaggucgacgacggcuuccucgacaucuggaccuacaacgccgagcuccucguccuccucgagaacgagcgcacccucgacuaccacgacuccaacgucaagaaccucuacgagaagguccgcaaccagcucaagaacaacgccaaggagaucggcaacggcugcuucgaguucuaccacaagugcgacaacaccugcauggaguccgucaagaacggcaccuacgacuaccccaaguacuccgaggaggccaagcucaaccgcgagaagaucgacggcgucaagcucgaguccacccgcaucuaccagauccucgccaucuacuccaccgucgccuccuccgucguccucgucgucucccucggcgccaucuccuucuggaugugcuccaacggcucccuccagugccgcaucugcaucuga

SEQ ID NO: 109952 - RNA, 1701 nt, Artificial Sequence
  derived and/or modified CDS sequence (opt2) from hemagglutinin__InfluenzaA__EPI541966
augaaggccauccucgucguccuccucuacaccuucgccaccgccaacgccgacacccucugcaucggcuaccacgccaacaacuccaccgacaccgucgacaccguccucgagaagaacgucaccgucacccacuccgucaaccuccucgaggacaagcacaacggcaagcucugcaagcuccgcggcgucgccccccuccaccucggcaagugcaacaucgccggcuggauccucggcaaccccgagugcgagucccucuccaccgccuccuccugguccuacaucgucgagaccuccuccuccgacaacggcaccugcuaccccggcgacuucaucaacuacgaggagcuccgcgagcagcucuccuccgucuccuccuucgagcgcuucgagaucuuccccaagaccuccuccuggcccaaccacgaguccaacaagggcgucaccgccgccugcccccacgccggcgccaaguccuucuacaagaaccucaucuggcucgucaagaagggcaacuccuaccccaagcucucccaguccuacaucaacgacaagggcaaggagguccucguccucuggggcauccaccaccccuccaccaccgccgaccagcagucccucuaccagaacgccgacgccuacgucuucgucggcaccucccgcuacuccaagaaguucaagcccgagaucgccauccgccccaagguccgcgaccaggagggccgcaugaacuacuacuggacccucgucgagcccggcgacaagaucaccuucgaggccaccggcaaccucgucgucccccgcuacgccuucaccauggagcgcaacgccggcuccggcaucaucaucuccgacacccccguccacgacugcaacaccaccugccagacccccgagggcgccaucaacaccucccuccccuuccagaacauccaccccaucaccaucggcaagugccccaaguacgucaaguccaccaagcuccgccucgccaccggccuccgcaacguccccuccauccagucccgcggccucuucggcgccaucgccggcuucaucgagggcggcuggaccggcauggucgacggcugguacggcuaccaccaccagaacgagcagggcuccggcuacgccgccgaccucaaguccacccagaacgccaucgacaagaucaccaacaaggucaacuccgucaucgagaagaugaacacccaguucaccgccgucggcaaggaguucaaccaccucgagaagcgcaucgagaaccucaacaagaaggucgacgacggcuuccucgacaucuggaccuacaacgccgagcuccucguccuccucgagaacgagcgcacccucgacuaccacgacuccaacgucaagaaccucuacgagaagguccgcaaccagcucaagaacaacgccaaggagaucggcaacggcugcuucgaguucuaccacaagugcgacaacaccugcauggaguccgucaagaacggcaccuacgacuaccccaaguacuccgaggaggccaagcucaaccgcgagaagaucgacggcgucaagcucgaguccacccgcaucuaccagauccucgccaucuacuccaccgucgccuccuccgucguccucgucgucucccucggcgccaucuccuucuggaugugcuccaacggcucccuccagugccgcaucugcaucuga

SEQ ID NO: 109953 - RNA, 1701 nt, Artificial Sequence
  derived and/or modified CDS sequence (opt2) from hemagglutinin__InfluenzaA__EPI652003
augaaggccauccucgucguccuccucuacaccuucgccaccgccaacgccgacacccucugcaucggcuaccacgccaacaacuccaccgacaccgucgacaccguccucgagaagaacgucaccgucacccacuccgucaaccuccucgaggacaagcacaacggcaagcucugcaagcuccgcggcgucgccccccuccaccucggcaagugcaacaucgccggcuggauccucggcaaccccgagugcgagucccucuccaccgccuccuccugguccuacaucgucgagaccuccuccuccgacaacggcaccugcuaccccggcgacuucaucaacuacgaggagcuccgcgagcagcucuccuccgucuccuccuucgagcgcuucgagaucuuccccaagaccuccuccuggcccaaccacgaguccaacaagggcgucaccgccgccugcccccacgccggcgccaaguccuucuacaagaaccucaucuggcucgucaagaagggcaacuccuaccccaagcucucccaguccuacaucaacgacaagggcaaggagguccucguccucuggggcauccaccacccccccaccaccgccgaccagcagucccucuaccagaacgccgacgccuacgucuucgucggcaccucccgcuacuccaagaaguucaagcccgagaucgccauccgccccaagguccgcgaccaggagggccgcaugaacuacuacuggacccucgucgagcccggcgacaagaucaccuucgaggccaccggcaaccucgucgucccccgcuacgccuucaccauggagcgcaacgccggcuccggcaucaucaucuccgacacccccguccacgacugcaacaccaccugccagacccccgagggcgccaucaacaccucccuccccuuccagaacauccaccccaucaccaucggcaagugccccaaguacgucaaguccaccaagcuccgccucgccaccggccuccgcaacguccccuccauccagucccgcggccucuucggcgccaucgccggcuucaucgagggcggcuggaccggcauggucgacggcugguacggcuaccaccaccagaacgagcagggcuccggcuacgccgccgaccucaaguccacccagaacgccaucgacaagaucaccaacaaggucaacuccgucaucgagaagaugaacacccaguucaccgccgucggcaaggaguucaaccaccucgagaagcgcaucgagaaccucaacaagaaggucgacgacggcuuccucgacaucuggaccuacaacgccgagcuccucguccuccucgagaacgagcgcacccucgacuaccacgacuccaacgucaagaaccucuacgagaagguccgcaaccagcucaagaacaacgccaaggagaucggcaacggcugcuucgaguucuaccacaagugcgacaacaccugcauggaguccgucaagaacggcaccuacgacuaccccaaguacuccgaggaggccaagcucaaccgcgagaagaucgacggcgucaagcucgaguccacccgcaucuaccagauccucgccaucuacuccaccgucgccuccuccgucguccucgucgucucccucggcgccaucuccuucuggaugugcuccaacggcucccuccagugccgcaucugcaucuga

SEQ ID NO: 109954 - RNA, 1701 nt, Artificial Sequence
  derived and/or modified CDS sequence (opt2) from hemagglutinin__InfluenzaA__EPI291877
augaaggccaucaucgucguccuccucuacaccuucgccaccgccgacgccgacacccucugcaucggcuaccacgccaacaacuccaccgacaccgucgacaccguccucgagaagaacgucaccgucacccacuccgucaacauccucgagaacaagcacgacggcaagcucugcaagcuccgcggcgucgccccccuccaccucggcaagugcaacaucgccggcuggcuccucggcaaccccgagugcgagucccucuucgccgccuccuccugguccuacaucgucgagacccccaacuccgacaacggcaccugcuaccccggcgacuucaucaacuacgaggagcuccgcgagcaccucuccuccgucuccuccuucgagcgcuucgagaucuuccccaaggccaacuccuggcccaaccacgacaccaacaagggcgucaccgccgccugccccuacgccggcgccaacuccuucuaccgcaaccucaucuggcucgucaagaagggcaacuccuaccccaagcucuccaaguccuacaucaacaacaagaagaaggagguccucgucaucuggggcauccaccacccccccaccuccaucgaccagcagacccucuaccagaacgccgacgccuacgucuucgucggcuccuccaaguacuccaagcgcuucaagcccgagaucgccgcccgccccaagguccgcgaccaggccggccgcauggacuacuacuggacccucaucgagcccggcgacaccaucaccuucgaggccaccggcaaccucgucgucccccgcuacgccuucgccaugaagcgcggcuccggcuccggcaucaucgucuccgacgcccccguccacgacugcaacaccaccugccagacccccaagggcgccaucaacaccucccuccccuuccagaacauccaccccgucaccaucggcgagugccccaaguacgucaaguccaccaagcuccgcauggccaccggccuccgcaacauccccuccauccagucccgcggccucuucggcgccaucgccggcuucaucgagggcggcuggaccggcaugaucgacggcugguacggcuaccaccaccagaacgagcagggcuccggcuacgccgccgaccagaaguccacccagaacgccaucgacggcaucaccaacaaggucaacuccaucaucgagaagaugaacacccaguucaccgccgucggcaaggaguucucccagcucgagaagcgcaucgagucccucaacaacaaggucgacgacggcuuccucgacaucuggaccuacaacgccgagcuccucguccuccucgagaacgagcgcacccucgacuaccacgacuccaacgucaagaaccucuacgagaagguccgcucccagcucaagaacaacgccaaggagaucggcaacggcugcuucgaguucuaccacaagugcgacaacaccugcauggaguccgucaagaacggcaccuacgacuaccccaaguacuccgaggaggccaagcucaaccgcgaggagaucgacggcaucaagcucgaguccgcccgcaucuaccagauccucgccaucuacuccaccgucgccuccucccucguccuccucgucucccucggcgccgucuccuucuggaugugcuccaacggcucccuccagugccgcaucugcaucuga

SEQ ID NO: 109955 - RNA, 1701 nt, Artificial Sequence
  derived and/or modified CDS sequence (opt2) from hemagglutinin__InfluenzaA__ABR29595
augaaggccauccuccucguccuccucuacaccuucaccgccgccaacgccgacacccucugcaucggcuaccacgccaacaacuccaccgacaccgucgacaccguccucgagaagaacgucaccgucacccacuccgucaaccuccucgaggaccgccacaacggcaagcucugcaagcuccgcggcgucgccccccuccaccucggcaagugcaacaucgccggcuggcuccucggcaaccccgagugcgagcuccucuucaccgccuccuccugguccuacaucgucgagaccuccaacuccgacaacggcaccugcuaccccggcgacuucaucaacuacgaggagcuccgcgagcagcucuccuccgucuccuccuucgagcgcuucgagaucuuccccaaggccuccuccuggcccaaccacgagaccaaccgcggcgucaccgccgccugccccuacgccggcgccaacuccuucuaccgcaaccucaucuggcucgucaagaagggcaacuccuaccccaagcucuccaaguccuacgucaacaacaaggagaaggagguccucguccucuggggcauccaccacccccccaccuccaccgaccagcagucccucuaccagaacgccgacgccuacgucuucgucggcuccuccaaguacaacaagaaguucaagcccgagaucgccacccgccccaagguccgcggccaggccggccgcaugaacuacuacuggacccucgucgagcccggcgacaccaucaccuucgaggccaccggcaaccucgucgucccccgcuacgccuucgccaugaagcgcggcuccggcuccggcaucaucaucuccgacacccccguccacgacugcaacaccaccugccagacccccaagggcgccaucaacaccucccuccccuuccagaacauccaccccgucaccaucggcgagugccccaaguacgucaaguccaccaagcuccgcauggccaccggccuccgcaacauccccuccauccagucccgcggccucuucggcgccaucgccggcuucaucgagggcggcuggaccggcaugaucgacggcugguacggcuaccaccaccagaacgagcagggcuccggcuacgccgccgaccgcaaguccacccagaacgccaucgacggcaucaccaacaaggucaacuccgucaucgagaagaugaacacccaguucaccgccgucggcaaggaguucaaccaccucgagaagcgcaucgagaaccucaacaagaaggucgacgacggcuuccucgacgucuggaccuacaacgccgagcuccucguccuccucgagaacgagcgcacccucgacuaccacgacuccaacgucaagaaccucuacgagaagguccgcucccagcucaagaacaacgccaaggagaucggcaacggcugcuucgaguucuaccacaagugcgacgacaccugcauggaguccgucaagaacggcaccuacgacuaccccaaguacuccgaggaguccaagcucaaccgcgaggagaucgacggcgucaagcucgaguccacccgcaucuaccagauccucgccaucuacuccaccgucgccuccucccucguccuccucgucucccucggcgccaucuccuucuggaugugcuccaacggcucccuccagugccgcaucugcaucuga

SEQ ID NO: 109956 - RNA, 1701 nt, Artificial Sequence
  derived and/or modified CDS sequence (opt2) from hemagglutinin__InfluenzaA__EPI291885
augaaggccaucaucgucguccuccuccacaccuucgccaccgccgacgccgacacccucugcaucggcuaccacgccaacaacuccaccgacaccgucgacaccguccucgagaagaacgucaccgucacccacuccgucaaccuccucgagaccaagcacgacggcaagcucugcaaccucaagggcgucgccccccuccaccucggcaagugcaacaucgccggcuggcuccucggcaaccccgagugcgagucccucuucaccgccuccuccugguccuacaucgucgagacccccaacuccgacaacggcaccugcuaccccggcaacuucaucaacuacgaggagcuccgcgagcaccucuccuccgucuccuccuucgagcgcuucgagaucuuccccaaggccaacuccuggcccaaccacgacaccaacaagggcgucaccgccgccugccccuacgccggcgccaacuccuucuaccgcaaccucaucuggcucgucaagaagggcaacuccuaccccaagcucuccaaguccuacaucaacaacaagaagaaggagguccucgucaucuggggcauccaccacccccccaccuccaccgaccagcagacccucuaccagaacgccgacgccuacgucuucgucggcuccuccaaguacuccaagcgcuucgagcccgagaucgccgcccgccccaagguccgcaaccaggccggccgcaugaacuacuacuggacccucaucgagcccggcgacaccaucaccuucgaggccaccggcaaccucgucgucccccgcuacgccuucgccaugcgccgcggcuccggcuccggcaucaucgucuccgacgcccccguccacgacugcaacaccaccugccagacccccaagggcgccaucaacaccucccuccccuuccagaacauccaccccgucaccaucggcgagugccccaaguacgucaaguccaccaagcuccgcauggccaccggccuccgcaacauccccuccauccagucccgcggccucuucggcgccaucgccggcuuccucgagggcggcuggaccggcaugaucgacggcugguacggcuaccaccaccagaacgagcagggcuccggcuacgccgccgaccagaaguccacccagaacgccaucgacggcaucaccaacaaggucaacuccaucaucgagaagaugaacacccaguucaccgccgucggcaaggaguucucccagcucgagaagcgcaucgagucccucaacaacaaggucgacgacggcuuccucgacaucuggaccuacaacgccgagaugcucguccuccucgagaacgagcgcacccucgacuaccacgacuccaacgucaagaaccucuacgagaagguccgcucccagcucaagaacaacgccaaggagaucggcaacggcugcuucgaguucuaccacaagugcgacaacaccugcauggaguccgucaagaacggcaccuacgacuaccccaaguacuccgaggaggccaagcucaaccgcgaggagaucgacggcgucaagcucgaguccgcccgcaucuaccagauccucgccaucuacuccaccgucgccuccucccucguccuccucgucucccucggcgccgucuccuucuggaugugcuccaacggcucccuccagugccgcaucugcaucuga

SEQ ID NO: 109957 - RNA, 1701 nt, Artificial Sequence; identical to SEQ ID NO: 98692
  derived and/or modified CDS sequence (opt2) from hemagglutinin__InfluenzaA__EPI176515

SEQ ID NO: 109958 - RNA, 1701 nt, Artificial Sequence; identical to SEQ ID NO: 99148
  derived and/or modified CDS sequence (opt2) from hemagglutinin__InfluenzaA__EPI189182

SEQ ID NO: 109959 - RNA, 1701 nt, Artificial Sequence; identical to SEQ ID NO: 98940
  derived and/or modified CDS sequence (opt2) from hemagglutinin__InfluenzaA__EPI180574

SEQ ID NO: 109960 - RNA, 1701 nt, Artificial Sequence; identical to SEQ ID NO: 104745
  derived and/or modified CDS sequence (opt2) from hemagglutinin__InfluenzaA__EPI377499

SEQ ID NO: 109961 - RNA, 1701 nt, Artificial Sequence
  derived and/or modified CDS sequence (opt2) from hemagglutinin__InfluenzaA__EPI346916
augaaggccauccucgucguccuccucuacaccuucaccaccgccaccgccgacacccucugcaucggcuaccacgccaacaacuccaccgacaccgucgacaccguccucgagaagaacgucaccgucacccacuccgucaaccuccucgagaaccgccacaacggcaagcucugcaagcuccgcggcgucgccccccuccaccucggcaagugcaacaucgccggcuggcuccucggcaaccccgagugcgagucccucuccaccgccuccuccugguccuacaucgucgagaccuccaacuccgacaacggcaccugcuaccccggcgacuucaucaacuacgaggagcuccgcgagcagcucuccuccgucuccuccuucgagcgcuucgagaucuuccccaagaccuccuccuggcccaaccacgacaccaaccgcggcgucaccgccgccugcccccacgacggcaccaacuccuucuaccgcaaccucaucuggcucgucaagaagggcaacuccuaccccaagaucaacaaguccuacaucaacaacaaggagaaggagauccucguccucugggccauccaccaccccuccaccuccgccgaccagcagucccucuaccagaacgccgacgccuacgucuucgucggcuccucccgcuacucccgcaaguucgagcccgaggucgccacccgccccaagguccgcgaccaggccggccgcaugaacuacuacuggacccucgucgagcccggcgacaagaucaccuucgaggccaccggcaaccucgucgucccccgcuacgccuucgcccucaagcgcaacuccggcuccggcaucaucaucuccgacaccuccguccacgacugcgacaccaacugccagacccccaacggcgccaucaacaccucccuccccuuccagaacauccaccccgucaccaucggcgagugccccaaguacgucaaguccaccaagcuccgcauggccaccggccuccgcaacauccccuccauccagucccgcggccucuucggcgccaucgccggcuucaucgagggcggcuggaccggcaugaucgacggcugguacggcuaccaccaccagaacgagcagggcuccggcuacgccgccgaccucaaguccacccagaacgccaucgacggcaucaccaacaaggucaacuccgucaucgagaagaugaacacccaguucaccgccgucggcaaggaguucucccaccucgagcgccgcaucgagaaccucaacaagaaggucgacgacggcuuccucgacaucuggaccuacaacgccgagcuccucguccuccucgagaacgagcgcacccucgacuaccacgacuccaacgucaagaaccucuacgagaagguccgcucccagcucaagaacaacgccaaggagaucggcaacggcugcuucgaguucuaccacaagugcgacgacaugugcauggaguccgucaagaacggcaccuacgacuaccccaaguacuccgaggaggccaagcucaaccgcgaggagaucgacggcgucaagcucgaguccacccgcaucuaccagauccucgccaucuacuccaccgucgccuccucccucguccucgucgucucccucggcgccaucuccuucuggaugugcuccaacggcucccuccagugccgcaucugcaucuga

SEQ ID NO: 109962 - RNA, 1689 nt, Artificial Sequence; identical to SEQ ID NO: 99319
  derived and/or modified CDS sequence (opt2) from hemagglutinin__InfluenzaA__ACV49600

SEQ ID NO: 109963 - RNA, 1701 nt, Artificial Sequence; identical to SEQ ID NO: 98365
  derived and/or modified CDS sequence (opt2) from hemagglutinin__InfluenzaA__BAF48361

SEQ ID NO: 109964 - RNA, 1701 nt, Artificial Sequence
  derived and/or modified CDS sequence (opt2) from hemagglutinin__InfluenzaA__EPI507594
augaagaccaucaucgcccucuccuacauccucugccucgucuucgcccagaagcuccccggcaacgacaacuccaccgccacccucugccucggccaccacgccguccccaacggcaccaucgucaagaccaucaccaacgaccgcaucgaggucaccaacgccaccgagcucguccagaacuccuccaucggcgagaucugcgacuccccccaccagauccucgacggcgagaacugcacccucaucgacgcccuccucggcgacccccagugcgacggcuuccagaacaagaagugggaccucuucgucgagcgcuccaaggccuacuccaacugcuaccccuacgacguccccgacuacgccucccuccgcucccucgucgccuccuccggcacccucgaguucaacaacgaguccuucaacugggccggcgucacccagaacggcaccuccuccgccugcaagcgcggcuccaacuccuccuucuucucccgccucaacuggcucacccaccucaacuucaaguaccccgcccucaacgucaccaugcccaacaacgagcaguucgacaagcucuacaucuggggcguccaccaccccgucaccgacaaggaccagaucuuccucuacgcccaguccuccggccgcaucaccgucuccaccaagcgcucccagcaggccgucauccccaacaucggcuuccgcccccgcauccgcaacauccccucccgcaucuccaucuacuggaccaucgucaagcccggcgacauccuccucaucaacuccaccggcaaccucaucgccccccgcggcuacuucaagauccgcuccggcaaguccuccaucaugcgcuccgacgcccccaucggcaagugcaaguccgagugcaucacccccaacggcuccauccccaacgacaagcccuuccagaacgucaaccgcaucaccuacggcgccugcccccgcuacgucaagcaguccacccucaagcucgccaccggcaugcgcaacguccccgagaagcagacccgcggcaucuucggcgccaucgccggcuucaucgagaacggcugggagggcauggucgacggcugguacggcuuccgccaccagaacuucgagggccgcggccaggccgccgaccucaaguccacccaggccgccaucgaccagaucaacggcaagcucaaccgccucaucggcaagaccaacgagaaguuccaccagaucgagaaggaguucuccgaggucgagggccgcauccaggaccucgagaaguacgucgaggacaccaagaucgaccucugguccuacaacgccgagcuccucgucgcccucgagaaccagcacaccaucgaccucaccgacuccgagaugaacaagcucuucgagaagaccaagaagcagcuccgcgagaacgccgaggacaugggcaacggcugcuucaagaucuaccacaagugcgacaacgccugcaucggcuccauccgcaacggcaccuacgaccacgacgucuaccgcgacgaggcccucaacaaccgcuuccagaucaagggcgucgagcucaaguccggcuacaaggacuggauccucuggaucuccuucgccaucuccugcuuccuccucugcgucgcccuccucggcuucaucaugugggccugccagaagggcaacauccgcugcaacaucugcaucuga

SEQ ID NO: 109965 - RNA, 1701 nt, Artificial Sequence
  derived and/or modified CDS sequence (opt2) from hemagglutinin__InfluenzaA__EPI461953
augaagaccaucaucgcccucuccuacauccucugccucgucuucgcccagaagcuccccggcaacgacaacuccaccgccacccucugccucggccaccacgccguccccaacggcaccaucgucaagaccaucaccaacgaccgcaucgaggucaccaacgccaccgagcucguccagaacuccuccaucggcgagaucugcgacuccccccaccagauccucgacggcgagaacugcacccucaucgacgcccuccucggcgacccccagugcgacggcuuccagaacaagaagugggaccucuucgucgagcgcuccaaggccuacuccaacugcuaccccuacgacguccccgacuacgccucccuccgcucccucgucgccuccuccggcacccucgaguucaacaacgaguccuucaacugggccggcgucacccagaacggcaccuccuccgccugcauccgcggcuccaacuccuccuucuucucccgccucaacuggcucacccaccucaacuucaaguaccccgcccucaacgucaccaugcccaacaacgagcaguucgacaagcucuacaucuggggcguccaccaccccggcaccgacaaggaccagaucuuccucuacgcccaguccuccggccgcaucaccgucuccaccaagcgcucccagcaggccgucauccccaacaucggcucccgcccccgcauccgcaacauccccucccgcaucuccaucuacuggaccaucgucaagcccggcgacauccuccucaucaacuccaccggcaaccucaucgccccccgcggcuacuucaagauccgcuccggcaaguccuccaucaugcgcuccgacgcccccaucggcaagugcaaguccgagugcaucacccccaacggcuccauccccaacgacaagcccuuccagaacgucaaccgcaucaccuacggcgccugcccccgcuacgucaagcaguccacccucaagcucgccaccggcaugcgcaacguccccgagaagcagacccgcggcaucuucggcgccaucgccggcuucaucgagaacggcugggagggcauggucgacggcugguacggcuuccgccaccagaacuucgagggccgcggccaggccgccgaccucaaguccacccaggccgccaucgaccagaucaacggcaagcucaaccgccucaucggcaagaccaacgagaaguuccaccagaucgagaaggaguucuccgaggucgagggccgcauccaggaccucgagaaguacgucgaggacaccaagaucgaccucugguccuacaacgccgagcuccucgucgcccucgagaaccagcacaccaucgaccucaccgacuccgagaugaacaagcucuucgagaagaccaagaagcagcuccgcgagaacgccgaggacaugggcaacggcugcuucaagaucuaccacaagugcgacaacgccugcaucggcuccauccgcaacggcaccuacgaccacgacgucuaccgcgacgaggcccucaacaaccgcuuccagaucaagggcgucgagcucaaguccggcuacaaggacuggauccucuggaucuccuucgccaucuccugcuuccuccucugcgucgcccuccucggcuucaucaugugggccugccagaagggcaacauccgcugcaacaucugcaucuga

SEQ ID NO: 109966 - RNA, 1701 nt, Artificial Sequence
  derived and/or modified CDS sequence (opt2) from hemagglutinin__InfluenzaA__EPI461953/m1
augaagaccaucaucgcccucuccuacauccucugccucgucuucgcccagaagcuccccggcaacgacaacuccaccgccacccucugccucggccaccacgccguccccaacggcaccaucgucaagaccaucaccaacgaccgcaucgaggucaccaacgccaccgagcucguccagaacuccuccaucggcgagaucugcgacuccccccaccagauccucgacggcgagaacugcacccucaucgacgcccuccucggcgacccccagugcgacggcuuccagaacaagaagugggaccucuucgucgagcgcuccaaggccuacuccaacugcuaccccuacgacguccccgacuacgccucccuccgcucccucgucgccuccuccggcacccucgaguucaacaacgaguccuucaacugggccggcgucacccagaacggcaccuccuccgccugcaagcgcggcuccaacuccuccuucuucucccgccucaacuggcucacccaccucaacuucaaguaccccgcccucaacgucaccaugcccaacaacgagcaguucgacaagcucuacaucuggggcguccaccaccccgucaccgacaaggaccagaucuuccucuacgcccaguccuccggccgcaucaccgucuccaccaagcgcucccagcaggccgucauccccaacaucggcuaccgcccccgcauccgcaacauccccucccgcaucuccaucuacuggaccaucgucaagcccggcgacauccuccucaucaacuccaccggcaaccucaucgccccccgcggcuacuucaagauccgcuccggcaaguccuccaucaugcgcuccgacgcccccaucggcaagugcaaguccgagugcaucacccccaacggcuccauccccaacgacaagcccuuccagaacgucaaccgcaucaccuacggcgccugcccccgcuacgucaagcaguccacccucaagcucgccaccggcaugcgcaacguccccgagaagcagacccgcggcaucuucggcgccaucgccggcuucaucgagaacggcugggagggcauggucgacggcugguacggcuuccgccaccagaacuucgagggccgcggccaggccgccgaccucaaguccacccaggccgccaucgaccagaucaacggcaagcucaaccgccucaucggcaagaccaacgagaaguuccaccagaucgagaaggaguucuccgaggucgagggccgcauccaggaccucgagaaguacgucgaggacaccaagaucgaccucugguccuacaacgccgagcuccucgucgcccucgagaaccagcacaccaucgaccucaccgacuccgagaugaacaagcucuucgagaagaccaagaagcagcuccgcgagaacgccgaggacaugggcaacggcugcuucaagaucuaccacaagugcgacaacgccugcaucggcuccauccgcaacggcaccuacgaccacgacgucuaccgcgacgaggcccucaacaaccgcuuccagaucaagggcgucgagcucaaguccggcuacaaggacuggauccucuggaucuccuucgccaucuccugcuuccuccucugcgucgcccuccucggcuucaucaugugggccugccagaagggcaacauccgcugcaacaucugcaucuga

SEQ ID NO: 109967 - RNA, 1701 nt, Artificial Sequence
  derived and/or modified CDS sequence (opt2) from hemagglutinin__InfluenzaA__EPI668105
augaagaccaucaucgcccucuccuacauccucugccucgucuucgcccagaagauccccggcaacgacaacuccaccgccacccucugccucggccaccacgccguccccaacggcaccaucgucaagaccaucaccaacgaccgcaucgaggucaccaacgccaccgagcucguccagaacuccuccaucggcgagaucugcgacuccccccaccagauccucgacggcgagaacugcacccucaucgacgcccuccucggcgacccccagugcgacggcuuccagaacaagaagugggaccucuucgucgagcgcuccaaggccuacuccaacugcuaccccuacgacguccccgacuacgccucccuccgcucccucgucgccuccuccggcacccucgaguucaacaacgaguccuucaacuggaccggcgucacccagaacggcaccuccuccgccugcauccgcggcuccuccuccuccuucuucucccgccucaacuggcucacccaccucaacuacaaguaccccgcccucaacgucaccaugcccaacaacgagcaguucgacaagcucuacaucuggggcguccaccaccccggcaccgacaaggaccagaucuuccccuacgcccaguccuccggccgcaucaccgucuccaccaagcgcucccagcaggccgucauccccaacaucggcucccgcccccgcauccgcggcauccccucccgcaucuccaucuacuggaccaucgucaagcccggcgacauccuccucaucaacuccaccggcaaccucaucgccccccgcggcuacuucaagauccgcuccggcaaguccuccaucaugcgcuccgacgcccccaucggcaagugcaaguccgagugcaucacccccaacggcuccauccccaacgacaagcccuuccagaacgucaaccgcaucaccuacggcgccugcccccgcuacgucaagcacuccacccucaagcucgccaccggcaugcgcaacguccccgagaagcagacccgcggcaucuucggcgccaucgccggcuucaucgagaacggcugggagggcauggucgacggcugguacggcuuccgccaccagaacuccgagggccgcggccaggccgccgaccucaaguccacccaggccgccaucgaccagaucaacggcaagcucaaccgccucaucggcaagaccaacgagaaguuccaccagaucgagaaggaguucuccgaggucgagggccgcauccaggaccucgagaaguacgucgaggacaccaagaucgaccucugguccuacaacgccgagcuccucgucgcccucgagaaccagcacaccaucgaccucaccgacuccgagaugaacaagcucuucgagaagaccaagaagcagcuccgcgagaacgccgaggacaugggcaacggcugcuucaagaucuaccacaagugcgacaacgccugcaucggcuccauccgcaacggcaccuacgaccacaacgucuaccgcgacgaggcccucaacaaccgcuuccagaucaagggcgucgagcucaaguccggcuacaaggacuggauccucuggaucuccuucgccaucuccugcuuccuccucugcgucgcccuccucggcuucaucaugugggccugccagaagggcaacauccgcugcaacaucugcaucuga

SEQ ID NO: 109968 - RNA, 1701 nt, Artificial Sequence
  derived and/or modified CDS sequence (opt2) from hemagglutinin__InfluenzaA__EPI578446
augaagaccaucaucgcccucuccuacauccucugccucgucuucgcccagaagauccccggcaacgacaacuccaccgccacccucugccucggccaccacgccguccccaacggcaccaucgucaagaccaucaccaacgaccgcaucgaggucaccaacgccaccgagcucguccagaacuccuccaucggcgagaucugcgacuccccccaccagauccucgacggcgagaacugcacccucaucgacgcccuccucggcgacccccagugcgacggcuuccagaacaagaagugggaccucuucgucgagcgcuccaaggccuacuccaacugcuaccccuacgacguccccgacuacgccucccuccgcucccucgucgccuccuccggcacccucgaguucaacaacgaguccuucaacuggaccggcgucacccagaacggcaccuccuccgccugcauccgccgcuccuccuccuccuucuucucccgccucaacuggcucacccaccucaacuacaaguaccccgcccucaacgucaccaugcccaacaacgagcaguucgacaagcucuacaucuggggcguccaccaccccggcaccgacaaggaccagaucuuccccuacgcccaguccuccggccgcaucaccgucuccaccaagcgcucccagcaggccgucauccccaacaucggcucccgcccccgcauccgcggcauccccucccgcaucuccaucuacuggaccaucgucaagcccggcgacauccuccucaucaacuccaccggcaaccucaucgccccccgcggcuacuucaagauccgcuccggcaaguccuccaucaugcgcuccgacgcccccaucggcaagugcaaguccgagugcaucacccccaacggcuccauccccaacgacaagcccuuccagaacgucaaccgcaucaccuacggcgccugcccccgcuacgucaagcacuccacccucaagcucgccaccggcaugcgcaacguccccgagaagcagacccgcggcaucuucggcgccaucgccggcuucaucgagaacggcugggagggcauggucgacggcugguacggcuuccgccaccagaacuccgagggccgcggccaggccgccgaccucaaguccacccaggccgccaucgaccagaucaacggcaagcucaaccgccucaucggcaagaccaacgagaaguuccaccagaucgagaaggaguucuccgaggucgagggccgcauccaggaccucgagaaguacgucgaggacaccaagaucgaccucugguccuacaacgccgagcuccucgucgcccucgagaaccagcacaccaucgaccucaccgacuccgagaugaacaagcucuucgagaagaccaagaagcagcuccgcgagaacgccgaggacaugggcaacggcugcuucaagaucuaccacaagugcgacaacgccugcaucggcuccauccgcaacggcaccuacgaccacaacgucuaccgcgacgaggcccucaacaaccgcuuccagaucaagggcgucgagcucaaguccggcuacaaggacuggauccucuggaucuccuucgccaucuccugcuuccuccucugcgucgcccuccucggcuucaucaugugggccugccagaagggcaacauccgcugcaacaucugcaucuga

SEQ ID NO: 109969 - RNA, 1701 nt, Artificial Sequence; identical to SEQ ID NO: 108477
  derived and/or modified CDS sequence (opt2) from hemagglutinin__InfluenzaA__EPI551882

SEQ ID NO: 109970 - RNA, 1701 nt, Artificial Sequence
  derived and/or modified CDS sequence (opt2) from hemagglutinin__InfluenzaA__EPI344389
augaagaccaucaucgccuucuccugcauccucugccucaucuucgcccagaagcuccccggcuccgacaacuccauggccacccucugccucggccaccacgccguccccaacggcacccucgucaagaccaucaccgacgaccagaucgaggucaccaacgccaccgagcucguccaguccuccuccaccggccgcaucugcaacuccccccaccagauccucgacggcaagaacugcacccucaucgacgcccuccucggcgacccccacugcgacgaccuccagaacaaggagugggaccucuucgucgagcgcuccaccgccuacuccaacugcuaccccuacuacguccccgacuacgccacccuccgcucccucgucgccuccuccggcaaccucgaguucacccaggaguccuucaacuggaccggcgucgcccaggacggcuccuccuacgccugccgccgcggcuccgucaacuccuucuucucccgccucaacuggcucuacaaccucaacuacaaguaccccgagcagaacgucaccaugcccaacaacgacaaguucgacaagcucuacaucuggggcguccaccaccccggcaccgacaaggaccagaccaaccucuacguccaggccuccggccgcgucaucgucuccaccaagcgcucccagcagaccgucauccccaacaucggcucccgccccuggguccgcggcgucuccuccaucaucuccaucuacuggaccaucgucaagcccggcgacauccuccucaucaacuccaccggcaaccucaucgccccccgcggcuacuucaagauccaguccggcaaguccuccaucaugcgcuccgacgcccacaucgacgagugcaacuccgagugcaucacccccaacggcuccauccccaacgacaagcccuuccagaacgucaacaagaucaccuacggcgccugcccccgcuacgucaagcagaacacccucaagcucgccaccggcaugcgcaacguccccgagaagcagacccgcggcaucuucggcgccaucgccggcuucaucgagaacggcugggagggcauggucgacggcugguacggcuuccgccaccagaacuccgagggcaccggccaggccgccgaccucaaguccacccaggccgccaucaaccagaucaccggcaagcucaaccgcgucaucaagaagaccaacgagaaguuccaccagaucgagaaggaguucuccgaggucgagggccgcauccaggaccucgagaaguacgucgaggacaccaagaucgaccucugguccuacaacgccgagcuccucgucgcccucgagaaccagcacaccaucgaccucaccgacuccgagauguccaagcucuucgagcgcacccgccgccagcuccgcgagaacgccgaggacaugggcaacggcugcuucaagaucuaccacaagugcgacaacgccugcaucggcuccauccgcaacggcaccuacgaccacgacaucuaccgcaacgaggcccucaacaaccgcuuccagaucaagggcguccagcucaaguccggcuacaaggacuggauccucuggaucuccuucgccaucuccugcuuccuccucugcgucguccuccucggcuucaucaugugggccugccagaagggcaacauccgcugcaacaucugcaucuga

SEQ ID NO: 109971 - RNA, 1701 nt, Artificial Sequence
  derived and/or modified CDS sequence (opt2) from hemagglutinin__InfluenzaA__EPI348782
augaagaccaucaucgccuucuccugcauccucugccucaucuucgcccagaagcuccccggcuccgacaacuccauggccacccucugccucggccaccacgccguccccaacggcacccucgucaagaccaucaccgacgaccagaucgaggucaccaacgccaccgagcucguccaguccuccuccaccggccgcaucugcaacuccccccaccagauccucgacggcaagaacugcacccucaucgacgcccuccucggcgacccccacugcgacgaccuccagaacaaggagugggaccucuucgucgagcgcuccaccgccuacuccaacugcuaccccuacuacguccccgacuacgccacccuccgcucccucgucgccuccuccggcaaccucgaguucacccaggaguccuucaacuggaccggcgucgcccaggacggcuccuccuacgccugccgccgcggcuccgucaacuccuucuucucccgccucaacuggcucuacaagcucaacuacaaguaccccgagcagaacgucaccaugcccaacaacgacaaguucgacaagcucuacaucuggggcguccaccaccccggcaccgacaaggaccagaccaacaucuacguccaggccuccggccgcgucaucgucuccaccaagcgcucccagcagaccgucauccccaacaucggcucccgccccuggguccgcggcgucuccuccaucaucuccaucuacuggaccaucgucaagcccggcgacauccuccucaucaacuccaccggcaaccucaucgccccccgcggcuacuucaagauccaguccggcaaguccuccaucaugcgcuccgacgcccacaucgacgagugcaacuccgagugcaucacccccaacggcuccauccccaacgacaagcccuuccagaacgucaacaagaucaccuacggcgccugcccccgcuacgucaagcagaacacccucaagcucgccaccggcaugcgcaacguccccgagaagcagacccgcggcaucuucggcgccaucgccggcuucaucgagaacggcugggagggcauggucgacggcugguacggcuuccgccaccagaacuccgagggcaccggccaggccgccgaccucaaguccacccaggccgccaucaaccagaucaccggcaagcucaaccgcgucaucaagaagaccaacgagaaguuccaccagaucgagaaggaguucuccgaggucgagggccgcauccaggaccucgagaaguacgucgaggacaccaagaucgaccucugguccuacaacgccgagcuccucgucgcccucgagaaccagcacaccaucgaccucaccgacuccgagauguccaagcucuucgagcgcacccgccgccagcuccgcgagaacgccgaggacaugggcaacggcugcuucaagaucuaccacaagugcgacaacgccugcaucggcuccauccgcaacggcaccuacgaccacgacaucuaccgcaacgaggcccucaacaaccgcuuccagaucaagggcguccagcucaaguccggcuacaaggacuggauccucuggaucuccuucgccaucuccugcuuccuccucugcgucguccuccucggcuucaucaugugggccugccagaagggcaacauccgcugcaacaucugcaucuga

SEQ ID NO: 109972 - RNA, 1701 nt, Artificial Sequence
  derived and/or modified CDS sequence (opt2) from hemagglutinin__InfluenzaA__EPI642513
augaagaccaucaucgccuucuccugcauccucugccucaucuucgcccagaagcuccccggcuccgacaaguccauggccacccucugccucggccaccacgccguccccaacggcacccucgucaagaccaucaccgacgaccagaucgaggucaccaacgccaccgagcucguccaguccuccuccaccucccgcaucugcaacuccccccaccagauccucgacggcaagaacugcacccucaucgacgcccuccucggcgacccccacugcgacgacuuccagaacaagaagugggaccucuucgucgagcgcuccaccgccuacuccaacugcuaccccuacuacguccccgacuacgccacccuccgcucccucaucgccuccuccggcaaccucgaguucacccaggaguccuucaacuggaccggcgucgcccaggacggcuccuccuacgccugccgccgcggcuccgucaacuccuucuucucccgccucaacuggcucuacaaccucaacuacaaguaccccgagcagaacgucaccaugcccaacaacgacaaguucgacaagcucuacaucuggggcguccaccaccccggcaccgacaaggaccagaccaaccucuacguccaggccuccggccgcgucaucgucuccaccaagcgcucccagcagaccgucauccccaacaucggcucccgccccuggguccgcggcgucuccuccaucaucuccaucuacuggaccaucgucaagcccggcgacauccuccucaucaacuccaccggcaaccucaucgccccccgcggcuacuucaagauccaguccggcaaguccuccaucaugcgcuccgacgcccacaucgacgagugcaacuccgagugcaucacccccaacggcuccauccccaacgacaagcccuuccagaacgucaacaagaucaccuacggcgccugcccccgcuacgucaagcagaacacccucaagcucgccaccggcaugcgcaacguccccgagaagcagacccgcggcaucuucggcgccaucgccggcuucaucgagaacggcugggagggcauggucgacggcugguacggcuuccgccaccagaacuccgagggcaccggccaggccgccgaccucaaguccacccaggccgccaucaaccagaucaccggcaagcucaaccgcgucaucaagaagaccaacgagaaguuccaccagaucgagaaggaguucuccgaggucgagggccgcauccaggaccucgagaaguacgucgaggacaccaagaucgaccucugguccuacaacgccgagcuccucgucgcccucgagaaccagcacaccaucgaccucaccgacuccgagauguccaagcucuucgagcgcacccgccgccagcuccgcgagaacgccgaggacaugggcaacggcugcuucaagaucuaccacaagugcgacaacgccugcaucggcuccauccgcaacggcaccuacgaccacgacaucuaccgcaacgaggcccucaacaaccgcuuccagaucaagggcguccagcucaaguccggcuacaaggacuggauccucuggaucuccuucgccaucuccugcuuccuccucugcgucguccuccucggcuucaucaugugggccugccagaagggcaacauccgcugcaacaucugcaucuga

SEQ ID NO: 109973 - RNA, 1701 nt, Artificial Sequence
  derived and/or modified CDS sequence (opt2) from hemagglutinin__InfluenzaA__EPI293965
augaagaccaucaucgccuucuccugcauccucugccucaucuucgcccagaagcuccccggcuccgacaacuccauggccacccucugccucggccaccacgccguccccaacggcacccucgucaagaccaucaccgacgaccagaucgaggucaccaacgccaccgagcucguccaguccuccuccaccggccgcaucugcaacuccccccaccagauccucgacggcaagaacugcacccucaucgacgcccuccucggcgacccccacugcgacgacuuccagaacaaggagugggaccucuucgucgagcgcuccaccgccuacuccaacugcuaccccuacuacguccccgacuacgccacccuccgcucccucgucgccuccuccggcaaccucgaguucacccaggaguccuucaacuggaccggcgucgcccaggacggcuccuccuacgccugccgccgcggcuccgucaacuccuucuucucccgccucaacuggcucuacaaccucaacuacaaguaccccgagcagaacgucaccaugcccaacaacgacaaguucgacaagcucuacaucuggggcguccaccaccccggcaccgacaaggaccagaccaaccucuacguccaggccuccggccgcgucaucgucuccaccaagcgcucccagcagaccgucauccccaacaucggcucccgccccuggguccgcggcgucuccuccaucaucuccaucuacuggaccaucgucaagcccggcgacauccuccucaucaacuccaccggcaaccucaucgccccccgcggcuacuucaagauccaguccggcaaguccuccaucaugcgcuccgacgcccacaucgacgagugcaacuccgagugcaucacccccaacggcuccauccccaacgacaagcccuuccagaacgucaacaagaucaccuacggcgccugcccccgcuacgucaagcagaacacccucaagcucgccaccggcaugcgcaacguccccgagaagcagacccgcggcaucuucggcgccaucgccggcuucaucgagaacggcugggagggcauggucgacggcugguacggcuuccgccaccagaacuccgagggcaccggccaggccgccgaccucaaguccacccaggccgccaucaaccagaucaccggcaagcucaaccgcgucaucaagaagaccaacgagaaguuccaccagaucgagaaggaguucuccgaggucgagggccgcauccaggaccucgagaaguacgucgaggacaccaagaucgaccucugguccuacaacgccgagcuccucgucgcccucgagaaccagcacaccaucgaccucaccgacuccgagauguccaagcucuucgagcgcacccgccgccagcuccgcgagaacgccgaggacaugggcaacggcugcuucaagaucuaccacaagugcgacaacgccugcaucggcuccauccgcaacggcaccuacgaccacgacaucuaccgcaacgaggcccucaacaaccgcuuccagaucaagggcguccagcucaaguccggcuacaaggacuggauccucuggaucuccuucgccaucuccugcuuccuccucugcgucguccuccucggcuucaucaugugggccugccagaagggcaacauccgcugcaacaucugcaucuga

SEQ ID NO: 109974 - RNA, 1701 nt, Artificial Sequence
  derived and/or modified CDS sequence (opt2) from hemagglutinin__InfluenzaA__EPI465400
augaagaccaucaucgccuucuccugcauccucugccucaucuucgcccagaagcuccccggcuccgacaacuccauggccacccucugccucggccaccacgccguccccaacggcacccucgucaagaccaucaccgacgaccagaucgaggucaccaacgccaccgagcucguccaguccuccuccaccggccgcaucugcaacuccccccaccagauccucgacggcaagaacugcacccucaucgacgcccuccucggcgacccccacugcgacgacuuccagaacaaggagugggaccucuucgucgagcgcuccaccgccuacuccaacugcuaccccuacuacguccccgacuacgccacccuccgcucccucgucgccuccuccggcaaccucgaguucacccaggaguccuucaacuggaccggcgucgcccaggacggcuccuccuacgccugccgccgcggcuccgucaacuccuucuucucccgccucaacuggcucuacaaccucaacuacaaguaccccgagcagaacgucaccaugcccaacaacgacaaguucgacaagcucuacaucuggggcguccaccaccccggcaccgacaaggaccagaccaagcucuacguccaggccuccggccgcgucaucgucuccaccaagcgcucccagcagaccgucauccccaacaucggcucccgccccuggguccgcggcgucuccuccaucaucuccaucuacuggaccaucgucaagcccggcgacauccuccucaucaacuccaccggcaaccucaucgccccccgcggcuacuucaagauccaguccggcaaguccuccaucaugcgcuccgacgcccacaucgacgagugcaacuccgagugcaucacccccaacggcuccauccccaacgacaagcccuuccagaacgucaacaagaucaccuacggcgccugcccccgcuacgucaagcagaacacccucaagcucgccaccggcaugcgcaacguccccgagaagcagacccgcggcaucuucggcgccaucgccggcuucaucgagaacggcugggagggcauggucgacggcugguacggcuuccgccaccagaacuccgagggcaccggccaggccgccgaccucaaguccacccaggccgccaucaaccagaucaccggcaagcucaaccgcgucaucaagaagaccaacgagaaguuccaccagaucgagaaggaguucuccgaggucgagggccgcauccaggaccucgagaaguacgucgaggacaccaagaucgaccucugguccuacaacgccgagcuccucgucgcccucgagaaccagcacaccaucgaccucaccgacuccgagauguccaagcucuucgagcgcacccgccgccagcuccgcgagaacgccgaggacaugggcaacggcugcuucaagaucuaccacaagugcgacaacgccugcaucggcuccauccgcaacggcaccuacgaccacgacaucuaccgcaacgaggcccucaacaaccgcuuccagaucaagggcguccagcucaaguccggcuacaaggacuggauccucuggaucuccuucgccaucuccugcuuccuccucugcgucguccuccucggcuucaucaugugggccugccagaagggcaacauccgcugcaacaucugcaucuga

SEQ ID NO: 109975 - RNA, 1701 nt, Artificial Sequence
  derived and/or modified CDS sequence (opt2) from hemagglutinin__InfluenzaA__EPI328898
augaagaccaucaucgccuucuccugcauccucugccucaucuucgcccagaagcuccccggcuccgacaacuccauggccacccucugccucggccaccacgccguccccaacggcacccucgucaagaccaucaccgacgaccagaucgaggucaccaacgccaccgagcucguccaguccuccuccaccggccgcaucugcaacuccccccaccagauccucgacggcaagaacugcacccucaucgacgcccuccucggcgacccccacugcgacgacuuccagaacaaggagugggaccucuucgucgagcgcuccaccgccuacuccaacugcuaccccuacuacguccccgacuacgccacccuccgcucccucgucgccuccuccggcaaccucgaguucacccaggaguccuucaacuggaccggcgucgcccaggacggcuccuccuacgccugccgccgcggcuccgucaacuccuucuucucccgccucaacuggcucuacaaccucaacuacaaguaccccgagcagaacgucaccaugcccaacaacgacaaguucgacaagcucuacaucuggggcguccaccaccccggcaccgacaaggaccagaccaagaucuacguccaggccuccggccgcgucaucgucuccaccaagcgcucccagcagaccgucauccccaacaucggcucccgccccuggguccgcggcgucuccuccaucaucuccaucuacuggaccaucgucaagcccggcgacauccuccucaucaacuccaccggcaaccucaucgccccccgcggcuacuucaagauccaguccggcaaguccuccaucaugcgcuccgacgcccacaucgacgagugcaacuccgagugcaucacccccaacggcuccauccccaacgacaagcccuuccagaacgucaacaagaucaccuacggcgccugcccccgcuacgucaagcagaacacccucaagcucgccaccggcaugcgcaacguccccgagaagcagacccgcggcaucuucggcgccaucgccggcuucaucgagaacggcugggagggcauggucgacggcugguacggcuuccgccaccagaacuccgagggcaccggccaggccgccgaccucaaguccacccaggccgccaucaaccagaucaccggcaagcucaaccgcgucaucaagaagaccaacgagaaguuccaccagaucgagaaggaguucuccgaggucgagggccgcauccaggaccucgagaaguacgucgaggacaccaagaucgaccucugguccuacaacgccgagcuccucgucgcccucgagaaccagcacaccaucgaccucaccgacuccgagauguccaagcucuucgagcgcacccgccgccagcuccgcgagaacgccgaggacaugggcaacggcugcuucaagaucuaccacaagugcgacaacgccugcaucggcuccauccgcaacggcaccuacgaccacgacaucuaccgcaacgaggcccucaacaaccgcuuccagaucaagggcguccagcucaaguccggcuacaaggacuggauccucuggaucuccuucgccaucuccugcuuccuccucugcgucguccuccucggcuucaucaugugggccugccagaagggcaacauccgcugcaacaucugcaucuga

SEQ ID NO: 109976 - RNA, 1701 nt, Artificial Sequence; identical to SEQ ID NO: 109975
  derived and/or modified CDS sequence (opt2) from hemagglutinin__InfluenzaA__EPI328900

SEQ ID NO: 109977 - RNA, 1701 nt, Artificial Sequence
  derived and/or modified CDS sequence (opt2) from hemagglutinin__InfluenzaA__EPI574644
augaagaccaucaucgcccucuccuacauccucugccucgucuucgcccagaagcuccccggcaacgacaacuccaccgccacccucugccucggccaccacgccguccccaacggcaccaucgucaagaccaucaccaacgaccgcaucgaggucaccaacgccaccgagcucguccagaacuccuccaucggcgagaucugcgacuccccccaccagauccucgacggcaagaacugcacccucaucgacgcccuccucggcgacccccagugcgacggcuuccagaacaagcgcugggaccucuucgucgagcgcuccaaggccuacuccaacugcuaccccuacgacguccccgacuacgccucccuccgcucccucgucgccuccuccggcacccucgaguucaacgacgaguccuucaacugggccggcgucacccagaacggcaccuccuccgccugcauccgcggcuccaacuccuccuucuucucccgccucaacuggcucacccacuccaacuucaaguaccccgcccucaacgucaccaugcccaacaacgagcaguucgacaagcucuacaucuggggcguccaccaccccggcaccgacaaggaccagaucuuccucuacgcccacuccuccggccgcaucaccgucuccaccaagcgcucccagcaggccgucauccccaacaucggcucccgcccccgcauccgcaacauccccucccgcaucuccaucuacuggaccaucgucaagcccggcgacauccuccucaucaacuccaccggcaaccucaucgccccccgcggcuacuucaagauccaguccggcaaguccuccaucaugcgcuccgacgcccccaucggcaagugcaaguccgagugcaucacccccaacggcuccauccccaacgacaagcccuuccagaacgucaaccgcaucaccuacggcgccugcccccgcuacgucaagcaguccacccucaagcucgccaccggcaugcgcaacguccccgagaagcagacccgcggcaucuucggcgccaucgccggcuucaucgagaacggcugggagggcaugaaggacggcugguacggcuuccgccaccagaacuccgagggccgcggccaggccgccgaccucaaguccacccaggccgccaucgaccagaucaacggcaagcucaaccgccucaucggcaagaccaacgagaaguuccaccagaucgagaaggaguucuccgaggucgagggccgcauccaggaccucgagaaguacgucgaggacaccaagaucgaccucugguccuacaacgccgagcuccucgucgcccucgagaaccagcacaccaucgaccucaccgacuccgagaugaacaagcucuucgagaagaccaagaagcagcuccgcgagaacgccgaggacaugggcaacggcugcuucaagaucuaccacaagugcgacaacgccugcaucggcuccauccgcaacggcaccuacgaccacgacgucuaccgcgacgaggcccucaacaaccgcuuccagaucaagggcgucgagcucaaguccggcuacaaggacuggauccucuggaucuccuucgccaucuccugcuuccuccucugcgucgcccuccucggcuucaucaugugggccugccagaagggcaacauccgcugcaacaucugcaucuga

SEQ ID NO: 109978 - RNA, 1701 nt, Artificial Sequence
  derived and/or modified CDS sequence (opt2) from hemagglutinin__InfluenzaA__EPI563212
augaagaccaucaucgcccucuccuacauccucugccucgucuucgcccagaagauccccggcaacgacaacaacaccgccacccucugccucggccaccacgccguccccaacggcaccaucgucaagaccaucaccaacgaccgcaucgaggucaccaacgccaccgagcucguccagaacuccuccaucggcgagaucugcgacuccccccaccagauccucgacggcgagaacugcacccucaucgacgcccuccucggcgacccccagugcgacggcuuccagaacaagaagugggaccucuucgucgagcgcuccaaggccuacuccaacugcuaccccuacgacguccccgacuacgccucccuccgcucccucgucgccuccuccggcacccucgaguucaacaacgaguccuucaacuggaccggcgucacccagaacggcaccuccuccgccugcauccgccgcuccuccuccuccuucuucucccgccucaacuggcucacccaccucaacuacaaguaccccgcccucaacgucaccaugcccaacaacgagcaguucgacaagcucuacaucuggggcguccaccaccccggcaccgacaaggaccagaucuuccccuacgcccaguccuccggccgcaucaccgucuccaccaagcgcucccagcaggccgucauccccaacaucggcucccgcccccgcauccgcggcauccccucccgcaucuccaucuacuggaccaucgucaagcccggcgacauccuccucaucaacuccaccggcaaccucaucgccccccgcggcuacuucaagauccgcuccggcaaguccuccaucaugcgcuccgacgcccccaucggcaagugcaaguccgagugcaucacccccaacggcuccauccccaacgacaagcccuuccagaacgucaaccgcaucaccuacggcgccugcccccgcuacgucaagcacuccacccucaagcucgccaccggcaugcgcaacguccccgagaagcagacccgcggcaucuucggcgccaucgccggcuucaucgagaacggcugggagggcauggucgacggcugguacggcuuccgccaccagaacuccgagggccgcggccaggccgccgaccucaaguccacccaggccgccaucgaccagaucaacggcaagcucaaccgccucaucggcaagaccaacgagaaguuccaccagaucgagaaggaguucuccgaggucgagggccgcauccaggaccucgagaaguacgucgaggacaccaagaucgaccucugguccuacaacgccgagcuccucgucgcccucgagaaccagcacaccaucgaccucaccgacuccgagaugaacaagcucuucgagaagaccaagaagcagcuccgcgagaacgccgaggacaugggcaacggcugcuucaagaucuaccacaagugcgacaacgccugcaucggcuccauccgcaacggcaccuacgaccacaacgucuaccgcgacgaggcccucaacaaccgcuuccagaucaagggcgucgagcucaaguccggcuacaaggacuggauccucuggaucuccuucgccaucuccugcuuccuccucugcgucgcccuccucggcuucaucaugugggccugccagaagggcaacauccgcugcaacaucugcaucuga

SEQ ID NO: 109979 - RNA, 1701 nt, Artificial Sequence; identical to SEQ ID NO: 109978
  derived and/or modified CDS sequence (opt2) from hemagglutinin__InfluenzaA__EPI553999

SEQ ID NO: 109980 - RNA, 1701 nt, Artificial Sequence
  derived and/or modified CDS sequence (opt2) from hemagglutinin__InfluenzaA__EPI551570
augaagaccaucaucgcccucuccuacauccucugccucgucuucgcccagaagauccccggcaacgacaacaacaccgccacccucugccucggccaccacgccguccccaacggcaccaucgucaagaccaucaccaacgaccgcaucgaggucaccaacgccaccgagcucguccagaacuccuccaucggcgagaucugcgacuccccccaccagauccucgacggcgagaacugcacccucaucgacgcccuccucggcgacccccagugcgacggcuuccagaacaagaagugggaccucuucgucgagcgcuccaaggccuacuccaacugcuaccccuacgacguccccgacuacgccucccuccgcucccucgucgccuccuccggcacccucgaguucaacaacgaguccuucaacuggaccggcgucacccagaacggcaccuccuccgccugcauccgccgcuccuccuccuccuucuucucccgccucaacuggcucacccaccucaacuacaccuaccccgcccucaacgucaccaugcccaacaacgagcaguucgacaagcucuacaucuggggcguccaccaccccggcaccgacaaggaccagaucuuccucuacgcccaguccuccggccgcaucaccgucuccaccaagcgcucccagcaggccgucauccccaacaucggcucccgcccccgcauccgcgacauccccucccgcaucuccaucuacuggaccaucgucaagcccggcgacauccuccucaucaacuccaccggcaaccucaucgccccccgcggcuacuucaagauccgcuccggcaaguccuccaucaugcgcuccgacgcccccaucggcaagugcaaguccgagugcaucacccccaacggcuccauccccaacgacaagcccuuccagaacgucaaccgcaucaccuacggcgccugcccccgcuacgucaagcacuccacccucaagcucgccaccggcaugcgcaacguccccgagaagcagacccgcggcaucuucggcgccaucgccggcuucaucgagaacggcugggagggcauggucgacggcugguacggcuuccgccaccagaacuccgagggccgcggccaggccgccgaccucaaguccacccaggccgccaucgaccagaucaacggcaagcucaaccgccucaucggcaagaccaacgagaaguuccaccagaucgagaaggaguucuccgaggucgagggccgcauccaggaccucgagaaguacgucgaggacaccaagaucgaccucugguccuacaacgccgagcuccucgucgcccucgagaaccagcacaccaucgaccucaccgacuccgagaugaacaagcucuucgagaagaccaagaagcagcuccgcgagaacgccgaggacaugggcaacggcugcuucaagaucuaccacaagugcgacaacgccugcaucggcuccauccgcaacggcaccuacgaccacaacgucuaccgcgacgaggcccucaacaaccgcuuccagaucaagggcgucgagcucaaguccggcuacaaggacuggauccucuggaucuccuucgccaucuccugcuuccuccucugcgucgcccuccucggcuucaucaugugggccugccagaagggcaacauccgcugcaacaucugcaucuga

SEQ ID NO: 109981 - RNA, 1701 nt, Artificial Sequence
  derived and/or modified CDS sequence (opt2) from hemagglutinin__InfluenzaA__EPI629738
augaagaccaucaucgcccucuccuacauccucugccucgucuucgcccagaagauccccggcaacgacaacaacaccgccacccucugccucggccaccacgccguccccaacggcaccaucgucaagaccaucaccaacgaccgcaucgaggucaccaacgccaccgagcucguccagaacuccuccaucggcgagaucugcgacuccccccaccagauccucgacggcgagaacugcacccucaucgacgcccuccucggcgacccccagugcgacggcuuccagaacaagaagugggaccucuucgucgagcgcuccaaggccuacuccaacugcuaccccuacgacguccccgacuacgccucccuccgcucccucgucgccuccuccggcacccucgaguucaacaacgaguccuucaacuggaccggcgucacccagaacggcaccuccuccgccugcauccgccgcuccuccuccuccuucuucucccgccucaacuggcucacccaccucaacuacaaguaccccgcccucaacgucaccaugcccaacaacgagcaguucgacaagcucuacaucuggggcguccaccaccccggcaccgacaaggaccagaucuuccccuacgcccaguccuccggccgcaucaucgucuccaccaagcgcucccagcaggccgucauccccaacaucggcucccgcccccgcauccgcgacauccccucccgcaucuccaucuacuggaccaucgucaagcccggcgacauccuccucaucaacuccaccggcaaccucaucgccccccgcggcuacuucaagauccgcuccggcaaguccuccaucaugcgcuccgacgcccccaucggcaagugcaaguccgagugcaucacccccaacggcuccauccccaacgacaagcccuuccagaacgucaaccgcaucaccuacggcgccugcccccgcuacgucaagcacuccacccucaagcucgccaccggcaugcgcaacguccccgagaagcagacccgcggcaucuucggcgccaucgccggcuucaucgagaacggcugggagggcauggucgacggcugguacggcuuccgccaccagaacuccgagggccgcggccaggccgccgaccucaaguccacccaggccgccaucgaccagaucaacggcaagcucaaccgccucaucggcaagaccaacgagaaguuccaccagaucgagaaggaguucuccgaggucgagggccgcauccaggaccucgagaaguacgucgaggacaccaagaucgaccucugguccuacaacgccgagcuccucgucgcccucgagaaccagcacaccaucgaccucaccgacuccgagaugaacaagcucuucgagaagaccaagaagcagcuccgcgagaacgccgaggacaugggcaacggcugcuucaagaucuaccacaagugcgacaacgccugcaucggcuccauccgcaacggcaccuacgaccacaacgucuaccgcgacgaggcccucaacaaccgcuuccagaucaagggcgucgagcucaaguccggcuacaaggacuggauccucuggaucuccuucgccaucuccugcuuccuccucugcgucgcccuccucggcuucaucaugugggccugccagaagggcaacauccgcugcaacaucugcaucuga

SEQ ID NO: 109982 - RNA, 1701 nt, Artificial Sequence
  derived and/or modified CDS sequence (opt2) from hemagglutinin__InfluenzaA__EPI631887
augaagaccaucaucgcccucuccuacauccucugccucgucuucgcccagaagauccccggcaacgacaacaacaccgccacccucugccucggccaccacgccguccccaacggcaccaucgucaagaccaucaccaacgaccgcaucgaggucaccaacgccaccgagcucguccagaacuccuccaucggcgagaucugcgacuccccccaccagauccucgacggcgagaacugcacccucaucgacgcccuccucggcgacccccagugcgacggcuuccagaacaagaagugggaccucuucgucgagcgcuccaaggccuacuccaacugcuaccccuacgacguccccgacuacgccucccuccgcucccucgucgccuccuccggcacccucgaguucaacaacgaguccuucaacuggaccggcgucacccagaacggcaccuccuccgccugcauccgccgcuccuccuccuccuucuucucccgccucaacuggcucacccaccucaacuacaaguaccccgcccucaacgucaccaugcccaacaacgagcaguucgacaagcucuacaucuggggcguccaccaccccggcaccgacaaggaccagaucuuccccuacgcccaguccuccggccgcaucaucgucuccaccaagcgcucccagcaggccgucauccccaacaucggcucccgcccccgcauccgcgacucccccucccgcaucuccaucuacuggaccaucgucaagcccggcgacauccuccucaucaacuccaccggcaaccucaucgccccccgcggcuacuucaagauccgcuccggcaaguccuccaucaugcgcuccgacgcccccaucggcaagugcaaguccgagugcaucacccccaacggcuccauccccaacgacaagcccuuccagaacgucaaccgcaucaccuacggcgccugcccccgcuacgucaagcacuccacccucaagcucgccaccggcaugcgcaacguccccgagaagcagacccgcggcaucuucggcgccaucgccggcuucaucgagaacggcugggagggcauggucgacggcugguacggcuuccgccaccagaacuccgagggccgcggccaggccgccgaccucaaguccacccaggccgccaucgaccagaucaacggcaagcucaaccgccucaucggcaagaccaacgagaaguuccaccagaucgagaaggaguucuccgaggucgagggccgcauccaggaccucgagaaguacgucgaggacaccaagaucgaccucugguccuacaacgccgagcuccucgucgcccucgagaaccagcacaccaucgaccucaccgacuccgagaugaacaagcucuucgagaagaccaagaagcagcuccgcgagaacgccgaggacaugggcaacggcugcuucaagaucuaccacaagugcgacaacgccugcaucggcuccauccgcaacggcaccuacgaccacaacgucuaccgcgacgaggcccucaacaaccgcuuccagaucaagggcgucgagcucaaguccggcuacaaggacuggauccucuggaucuccuucgccaucuccugcuuccuccucugcgucgcccuccucggcuucaucaugugggccugccagaagggcaacauccgcugcaacaucugcaucuga

SEQ ID NO: 109983 - RNA, 1701 nt, Artificial Sequence
  derived and/or modified CDS sequence (opt2) from hemagglutinin__InfluenzaA__EPI577026
augaagaccaucaucgcccucuccuacauccucugccucgucuucgcccagaagauccccggcaacgacaacaacaccgccacccucugccucggccaccacgccguccccaacggcaccaucgucaagaccaucaccaacgaccgcaucgaggucaccaacgccaccgagcucguccagaacuccuccaucggcgagaucugcgacuccccccaccagauccucgacggcgagaacugcacccucaucgacgcccuccucggcgacccccagugcgacggcuuccagaacaagaagugggaccucuucgucgagcgcuccaaggccuacuccaacugcuaccccuacgacguccccgacuacgccucccuccgcucccucgucgccuccuccggcacccucgaguucaacaacgaguccuucaacuggaccggcgucacccagaacggcaccuccuccgccugcauccgccgcuccuccuccuccuucuucucccgccucaacuggcucacccaccucaacuacaaguaccccgcccucaacgucaccaugcccaacaacgagcaguucgacaagcucuacaucuggggcguccaccaccccggcaccgacaaggaccagaucuuccccuacgcccaguccuccggccgcaucaccgucuccaccaagcgcucccagcaggccgucauccccaacaucggcucccgcccccgcauccgcggcauccccucccgcaucuccaucuacuggaccaucgucaagcccggcgacauccuccucaucaacuccaccggcaaccucaucgccccccgcggcuacuucaagauccgcuccggcaaguccuccaucaugcgcuccgacgcccccaucggcaagugcaaguccgagugcaucacccccaacggcuccauccccaacgacaagcccuuccagaacgucaaccgcaucaccuacggcgccugcccccgcuacgucaagcacuccacccucaagcucgccaccggcaugcgcaacguccccgagaagcagacccgcggcaucuucggcgccaucgccggcuucaucgagaacggcugggagggcauggucgacggcugguacggcuuccgccaccagaacuccgagggccgcggccaggccgccgaccucaaguccacccaggccgccaucgaccagaucaacggcaagcucaaccgccucaucggcaagaccaacgagaaguuccaccagaucgagaaggaguucuccgaggucgagggccgcauccaggaccucgagaaguacgucgaggacaccaagaucgaccucugguccuacaacgccgagcuccucgucgcccucgagaaccagcacaccaucgaccucaccgacuccgagaugaacaagcucuucgagaagaccaagaagcagcuccgcgagaacgccgaggacaugggcaacggcugcuucaagaucuaccacaagugcgacaacgccugcaucgaguccauccgcaacggcaccuacgaccacaacgucuaccgcgacgaggcccucaacaaccgcuuccagaucaagggcgucgagcucaaguccggcuacaaggacuggauccucuggaucuccuucgccaucuccugcuuccuccucugcgucgcccuccucggcuucaucaugugggccugccagaagggcaacauccgcugcaacaucugcaucuga

SEQ ID NO: 109984 - RNA, 1701 nt, Artificial Sequence; identical to SEQ ID NO: 106030
  derived and/or modified CDS sequence (opt2) from hemagglutinin__InfluenzaA__EPI404927

SEQ ID NO: 109985 - RNA, 1701 nt, Artificial Sequence
  derived and/or modified CDS sequence (opt2) from hemagglutinin__InfluenzaA__EPI489319
augaagaccaucaucgcccucuccuacauccucugccucgucuucgcccagaagcuccccggcaacgacaacuccaccgccacccucugccucggccaccacgccguccccaacggcaccaucgucaagaccaucaccaacgaccgcaucgaggucaccaacgccaccgagcucguccagaacuccuccaucggcgagaucugcgacuccccccaccagauccucgacggcgagaacugcacccucaucgacgcccuccucggcgacccccagugcgacggcuuccagaacaagaagugggaccucuucgucgagcgcuccaaggccuacuccaacugcuaccccuacgacguccccgacuacgccucccuccgcucccucgucgccuccuccggcacccucgaguucaacaacgaguccuucaacugggccggcgucacccagaacggcaccuccuccgccugcaagcgcggcuccaacuccuccuucuucucccgccucaacuggcucacccaccucaacuucaaguaccccgcccucaacgucaccaugcccaacaacgagcaguucgacaagcucuacaucuggggcguccaccaccccggcaccgacaaggaccagaucuuccccuacgcccaguccuccggccgcaucaccgucuccaccaagcgcucccagcaggccgucauccccaacaucggcucccgcccccgcauccgcaacauccccucccgcaucuccaucuacuggaccaucgucaagcccggcgacauccuccucaucaacuccaccggcaaccucaucgccccccgcggcuacuucaagauccgcuccggcaaguccuccaucaugcgcuccgacgcccccaucggcaagugcaaguccgagugcaucacccccaacggcuccauccccaacgacaagcccuuccagaacgucaaccgcaucaccuacggcgccugcccccgcuacgucaagcaguccacccucaagcucgccaccggcaugcgcaacguccccgagaagcagacccgcggcaucuucggcgccaucgccggcuucaucgagaacggcugggagggcauggucgacggcugguacggcuuccgccaccagaacuccgagggccgcggccaggccgccgaccucaaguccacccaggccgccaucgaccagaucaacggcaagcucaaccgccucaucggcaagaccaacgagaaguuccaccagaucgagaaggaguucuccgaggucgagggccgcauccaggaccucgagaaguacgucgaggacaccaagaucgaccucugguccuacaacgccgagcuccucgucgcccucgagaaccagcacaccaucgaccucaccgacuccgagaugaacaagcucuucgagaagaccaagaagcagcuccgcgagaacgccgaggacaugggcaacggcugcuucaagaucuaccacaagugcgacaacgccugcaucggcuccauccgcaacggcaccuacgaccacgacgucuaccgcgacgaggcccucaacaaccgcuuccagaucaagggcgucgagcucaaguccggcuacaaggacuggauccucuggaucuccuucgccaucuccugcuuccuccucugcgucgcccuccucggcuucaucaugugggccugccagaagggcaacauccgcugcaacaucugcaucuga

SEQ ID NO: 109986 - RNA, 1701 nt, Artificial Sequence; identical to SEQ ID NO: 108463
  derived and/or modified CDS sequence (opt2) from hemagglutinin__InfluenzaA__EPI530647

SEQ ID NO: 109987 - RNA, 1701 nt, Artificial Sequence; identical to SEQ ID NO: 108477
  derived and/or modified CDS sequence (opt2) from hemagglutinin__InfluenzaA__EPI541083

SEQ ID NO: 109988 - RNA, 1701 nt, Artificial Sequence
  derived and/or modified CDS sequence (opt2) from hemagglutinin__InfluenzaA__EPI684315
augaagaccaucaucgcccucuccuacauccucugccucgucuucgcccagaagauccccggcaacgacaacuccaccgccacccucugccucggccaccacgccguccccaacggcaccaucgucaagaccaucaccaacgaccgcaucgaggucaccaacgccaccgagcucguccagaacuccuccaucggcgagaucugcgacuccccccaccagauccucgacggcgagaacugcacccucaucgacgcccuccucggcgacccccagugcgacggcuuccagaacaagaagugggaccucuucgucgagcgcuccaaggccuacuccaacugcuaccccuacgacguccccgacuacgccucccuccgcucccucgucgccuccuccggcacccucgaguucaacaacgaguccuucaacuggaccggcgucacccagaacggcaccuccuccgccugcauccgccgcuccuccuccuccuucuucucccgccucaacuggcucacccaccucaacuacaaguaccccgcccucaacgucaccaugcccaacaacgagcaguucgacaagcucuacaucuggggcguccaccaccccggcaccgacaaggaccagaucuuccccuacgcccaguccuccggccgcaucaucgucuccaccaagcgcucccagcaggccgucauccccaacaucggcucccgcccccgcauccgcgacauccccucccgcaucuccaucuacuggaccaucgucaagcccggcgacauccuccucaucaacuccaccggcaaccucaucgccccccgcggcuacuucaagauccgcuccggcaaguccuccaucaugcgcuccgacgcccccaucggcaagugcaaguccgagugcaucacccccaacggcuccauccccaacgacaagcccuuccagaacgucaaccgcaucaccuacggcgccugcccccgcuacgucaagcacuccacccucaagcucgccaccggcaugcgcaacguccccgagaagcagacccgcggcaucuucggcgccaucgccggcuucaucgagaacggcugggagggcauggucgacggcugguacggcuuccgccaccagaacuccgagggccgcggccaggccgccgaccucaaguccacccaggccgccaucgaccagaucaacggcaagcucaaccgccucaucggcaagaccaacgagaaguuccaccagaucgagaaggaguucuccgaggucgagggccgcauccaggaccucgagaaguacgucgaggacaccaagaucgaccucugguccuacaacgccgagcuccucgucgcccucgagaaccagcacaccaucgaccucaccgacuccgagaugaacaagcucuucgagaagaccaagaagcagcuccgcgagaacgccgaggacaugggcaacggcugcuucaagaucuaccacaagugcgacaacgccugcaucggcuccauccgcaacggcaccuacgaccacaacgucuaccgcgacgaggcccucaacaaccgcuuccagaucaagggcgucgagcucaaguccggcuacaaggacuggauccucuggaucuccuucgccaucuccugcuuccuccucugcgucgcccuccucggcuucaucaugugggccugccagaagggcaacauccgcugcaacaucugcaucuga

SEQ ID NO: 109989 - RNA, 1701 nt, Artificial Sequence
  derived and/or modified CDS sequence (opt2) from hemagglutinin__InfluenzaA__EPI614462
augaagaccaucaucgcccucuccuacauccucugccucgucuucgcccagaagcuccccggcaacgacaacuccaccgccacccucugccucggccaccacgccguccccaacggcaccaucgucaagaccaucaccaacgaccgcaucgaggucaccaacgccaccgagcucguccagaacuccuccaucggcgagaucugcgacuccccccaccagauccucgacggcgagaacugcacccucaucgacgcccuccucggcgacccccagugcgacggcuuccagaacaagaagugggaccucuucgucgagcgcuccaaggccuacuccaacugcuaccccuacgacguccccgacuacgccucccuccgcucccucgucgccuccuccggcacccucgaguucaacaacgaguccuucaacugggccggcgucacccagaacggcaccuccuccuccugcauccgcggcuccaacuccuccuucuucucccgccucaacuggcucacccaccucaacuccaaguaccccgcccucaacgucaccaugcccaacaacgagcaguucgacaagcucuacaucuggggcguccaccaccccggcaccgacaaggaccagaucuuccucuacgcccaguccuccggccgcaucaccgucuccacccgccgcucccagcaggccgucauccccaacaucggcucccgcccccgcauccgcgacauccccucccgcaucuccaucuacuggaccaucgucaagcccggcgacauccuccucaucaacuccaccggcaaccucaucgccccccgcggcuacuucaagauccgcuccggcaaguccuccaucaugcgcuccgacgcccccaucggcaagugcaaguccgagugcaucacccccaacggcuccauccccaacgacaagcccuuccagaacgucaaccgcaucaccuacggcgccugcccccgcuacgucaagcaguccacccucaagcucgccaccggcaugcgcaacguccccgagcgccagacccgcggcaucuucggcgccaucgccggcuucaucgagaacggcugggagggcauggucgacggcugguacggcuuccgccaccagaacuccgagggccgcggccaggccgccgaccucaaguccacccaggccgccaucgaccagaucaacggcaagcucaaccgccucaucggcaagaccaacgagaaguuccaccagaucgagaaggaguucuccgaggucgagggccgcauccaggaccucgagaaguacgucgaggacaccaagaucgaccucugguccuacaacgccgagcuccucgucgcccucgagaaccagcacaccaucgaccucaccgacuccgagaugaacaagcucuucgagaagaccaagaagcagcuccgcgagaacgccgaggacaugggcaacggcugcuucaagaucuaccacaagugcgacaacgccugcaucggcuccauccgcaacggcaccuacgaccacgacgucuaccgcgacgaggcccucaacaaccgcuuccagaucaagggcgucgagcucaaguccggcuacaaggacuggauccucuggaucuccuucgccaucuccugcuuccuccucugcgucgcccuccucggcuucaucaugugggccugccagaagggcaacauccgcugcaacaucugcaucuga

SEQ ID NO: 109990 - RNA, 1701 nt, Artificial Sequence
  derived and/or modified CDS sequence (opt2) from hemagglutinin__InfluenzaA__EPI541465
augaagaccaucaucgcccucuccuacauccucugccucgucuucgcccagaagcuccccggcaacgacaacuccaccgccacccucugccucggccaccacgccguccccaacggcaccaucgucaagaccaucaccaacgaccgcaucgaggucaccaacgccaccgagcucguccagaacuccuccaucggcgagaucugcgacuccccccaccagauccucgacggcgagaacugcacccucaucgacgcccuccucggcgacccccagugcgacggcuuccagaacaagaagugggaccucuucgucgagcgcuccaaggccuacuccaacugcuaccccuacgacguccccgacuacgccucccuccgcucccucgucgccuccuccggcacccucgaguucaacaacgaguccuucaacugggccggcgucacccagaacggcaccuccuccuccugcauccgcggcuccaacaacuccuucuucucccgccucaacuggcucacccaccucaacuccaaguaccccgcccucaacgucaccaugcccaacaacgagcaguucgacaagcucuacaucuggggcguccaccaccccggcaccgacaaggaccagaucuuccucuacgcccaguccuccggccgcaucaccgucuccacccgccgcucccagcaggccgucauccccaacaucggcucccgcccccgcauccgcggcauccccucccgcaucuccaucuacuggaccaucgucaagcccggcgacauccuccucaucaacuccaccggcaaccucaucgccccccgcggcuacuucaagauccgcuccggcaaguccuccaucaugcgcuccgacgcccccaucggcaagugcaaguccgagugcaucacccccaacggcuccauccccaacgacaagcccuuccagaacgucaaccgcaucaccuacggcgccugcccccgcuacgucaagcaguccacccucaagcucgccaccggcaugcgcaacguccccgagcgccagacccgcggcaucuucggcgccaucgccggcuucaucgagaacggcugggagggcauggucgacggcugguacggcuuccgccaccagaacuccgagggccgcggccaggccgccgaccucaaguccacccaggccgccaucgaccagaucaacggcaagcucaaccgccucaucggcaagaccaacgagaaguuccaccagaucgagaaggaguucuccgaggucgagggccgcauccaggaccucgagaaguacgucgaggacaccaagaucgaccucugguccuacaacgccgagcuccucgucgcccucgagaaccagcacaccaucgaccucaccgacuccgagaugaacaagcucuucgagaagaccaagaagcagcuccgcgagaacgccgaggacaugggcaacggcugcuucaagaucuaccacaagugcgacaacgccugcaucggcuccauccgcaacggcaccuacgaccacgacgucuaccgcgacgaggcccucaacaaccgcuuccagaucaagggcgucgagcucaaguccggcuacaaggacuggauccucuggaucuccuucgccaucuccugcuuccuccucugcgucgcccuccucggcuucaucaugugggccugccagaagggcaacauccgcugcaacaucugcaucuga

SEQ ID NO: 109991 - RNA, 1701 nt, Artificial Sequence
  derived and/or modified CDS sequence (opt2) from hemagglutinin__InfluenzaA__EPI696967
augaagaccaucaucgcccucuccuacauccucugccucgucuucgcccagaagcuccccggcaacgacaacuccaccgccacccucugccucggccaccacgccguccccaacggcaccaucgucaagaccaucaccaacgaccgcaucgaggucaccaacgccaccgagcucguccagaacuccuccaucggcgagaucugcgacuccccccaccagauccucgacggcgagaacugcacccucaucgacgcccuccucggcgacccccagugcgacggcuuccagaacaagaagugggaccucuucgucgagcgcuccaaggccuacuccaacugcuaccccuacgacguccccgacuacgccucccuccgcucccucgucgccuccuccggcacccucgaguucaacaacgaguccuucaacugggccggcgucacccagaacggcaccuccuccuccugcauccgcggcuccaacuccuccuucuucucccgccucaacuggcucacccgccucaacuccaaguaccccgcccucaacgucaccaugcccaacaacgagcaguucgacaagcucuacaucuggggcguccaccaccccgagaccgacaaggaccagaucuuccucuacgcccaguccuccggccgcaucaccgucuccacccgccgcucccagcaggccgucauccccaacaucggcucccgcccccgcauccgcggcauccccucccgcaucuccaucuacuggaccaucgucaagcccggcgacauccuccucaucaacuccaccggcaaccucaucgccccccgcggcuacuucaagauccgcuccggcaaguccuccaucaugcgcuccgacgcccccaucggcaagugcaaguccgagugcaucacccccaacggcuccauccccaacgacaagcccuuccagaacgucaaccgcaucaccuacggcgccugcccccgcuacgucaagcaguccacccucaagcucgccaccggcaugcgcaacguccccgagcgccagacccgcggcaucuucggcgccaucgccggcuucaucgagaacggcugggagggcauggucgacggcugguacggcuuccgccaccagaacuccgagggccgcggccaggccgccgaccucaaguccacccaggccgccaucgaccagaucaacggcaagcucaaccgccucaucggcaagaccaacgagaaguuccaccagaucgagaaggaguucuccgaggucgagggccgcauccaggaccucgagaaguacgucgaggacaccaagaucgaccucugguccuacaacgccgagcuccucgucgcccucgagaaccagcacaccaucgaccucaccgacuccgagaugaacaagcucuucgagaagaccaagaagcagcuccgcgagaacgccgaggacaugggcaacggcugcuucaagaucuaccacaagugcgacaacgccugcaucggcuccauccgcaacggcaccuacgaccacgacgucuaccgcgacgaggcccucaacaaccgcuuccagaucaagggcgucgagcucaaguccggcuacaaggacuggauccucuggaucuccuucgccaucuccugcuuccuccucugcgucgcccuccucggcuucaucaugugggccugccagaagggcaacauccgcugcaacaucugcaucuga

SEQ ID NO: 109992 - RNA, 1701 nt, Artificial Sequence
  derived and/or modified CDS sequence (opt2) from hemagglutinin__InfluenzaA__EPI674597
augaagaccaucaucgcccucuccuacauccucugccucgucuucgcccagaagcuccccggcaacgacaacuccaccgccacccucugccucggccaccacgccguccccaacggcaccaucgucaagaccaucaccaacgaccgcaucgaggucaccaacgccaccgagcucguccagaacuccuccaucggcgagaucugcgacuccccccaccagauccucgacggcgagaacugcacccucaucgacgcccuccucggcgacccccagugcgacggcuuccagaacaagaagugggaccucuucgucgagcgcuccaaggccuacuccaacugcuaccccuacgacguccccgacuacgccucccuccgcucccucgucgccuccuccggcacccucgaguucaacaacgaguccuucaacugggccggcgucacccagaacggcaccuccuccuccugcauccgcggcuccaacaacuccuucuucucccgccucaacuggcucacccaccucaacuccaaguaccccgcccucaacgucaccaugcccaacaacgagcaguucgacaagcucuacaucuggggcguccaccaccccgucaccgacaaggaccagaucuuccucuacgcccaguccuccggccgcaucaccgucuccacccgccgcucccagcaggccgucauccccaacaucggcucccgcccccgcauccgcggcauccccucccgcaucuccaucuacuggaccaucgucaagcccggcgacauccuccucaucaacuccaccggcaaccucaucgccccccgcggcuacuucaagauccgcuccggcaaguccuccaucaugcgcuccgacgcccccaucggcaagugcaaguccgagugcaucacccccaacggcuccauccccaacgacaagcccuuccagaacgucaaccgcaucaccuacggcgccugcccccgcuacgucaagcaguccacccucaagcucgccaccggcaugcgcaacguccccgagcgccagacccgcggcaucuucggcgccaucgccggcuucaucgagaacggcugggagggcauggucgacggcugguacggcuuccgccaccagaacuccgagggccgcggccaggccgccgaccucaaguccacccaggccgccaucgaccagaucaacggcaagcucaaccgccucaucggcaagaccaacgagaaguuccaccagaucgagaaggaguucuccgaggucgagggccgcauccaggaccucgagaaguacgucgaggacaccaagaucgaccucugguccuacaacgccgagcuccucgucgcccucgagaaccagcacaccaucgaccucaccgacuccgagaugaacaagcucuucgagaagaccaagaagcagcuccgcgagaacgccgaggacaugggcaacggcugcuucaagaucuaccacaagugcgacaacgccugcaucggcuccauccgcaacggcaccuacgaccacgacgucuaccgcgacgaggcccucaacaaccgcuuccagaucaagggcgucgagcucaaguccggcuacaaggacuggauccucuggaucuccuucgccaucuccugcuuccuccucugcgucgcccuccucggcuucaucaugugggccugccagaagggcaacauccgcugcaacaucugcaucuga

SEQ ID NO: 109993 - RNA, 1701 nt, Artificial Sequence
  derived and/or modified CDS sequence (opt2) from hemagglutinin__InfluenzaA__EPI530677
augaagaccaucaucgcccucuccuacauccucugccucgucuucgcccagaagcuccccggcaacgacaacuccaccgccacccucugccucggccaccacgccguccccaacggcaccaucgucaagaccaucaccaacgaccgcaucgaggucaccaacgccaccgagcucguccagaacuccuccaucggcgagaucugcgacuccccccaccagauccucgacggcgagaacugcacccucaucgacgcccuccucggcgacccccagugcgacggcuuccagaacaagaagugggaccucuucgucgagcgcuccaaggccuacuccaacugcuaccccuacgacguccccgacuacgccucccuccgcucccucgucgccuccuccggcacccucgaguucaacaacgaguccuucaacugggccggcgucacccagaacggcaccuccuccuccugcauccgcggcuccaacuccuccuucuucucccgccucaacuggcucacccaccucaacuccaaguaccccgcccucaacgucaccaugcccaacaacgagcaguucgacaagcucuacaucuggggcguccaccaccccggcaccgacaaggaccagaucuuccucuacgcccaguccuccggccgcaucaccgucuccaccaagcgcucccagcaggccgucauccccaacaucggcucccgcccccgcauccgcgacauccccucccgcaucuccaucuacuggaccaucgucaagcccggcgacauccuccucaucaacuccaccggcaaccucaucgccccccgcggcuacuucaagauccgcuccggcaaguccuccaucaugcgcuccgacgcccccaucggcaagugcaaguccgagugcaucacccccaacggcuccauccccaacgacaagcccuuccagaacgucaaccgcaucaccuacggcgccugcccccgcuacgucaagcaguccacccucaagcucgccaccggcaugcgcaacguccccgagaagcagacccgcggcaucuucggcgccaucgccggcuucaucgagaacggcugggagggcauggucgacggcugguacggcuuccgccaccagaacuccgagggccgcggccaggccgccgaccucaaguccacccaggccgccaucgaccagaucaacggcaagcucaaccgccucaucggcaagaccaacgagaaguuccaccagaucgagaaggaguucuccgaggucgagggccgcauccaggaccucgagaaguacgucgaggacaccaagaucgaccucugguccuacaacgccgagcuccucgucgcccucgagaaccagcacaccaucgaccucaccgacuccgagaugaacaagcucuucgagaagaccaagaagcagcuccgcgagaacgccgaggacaugggcaacggcugcuucaagaucuaccacaagugcgacaacgccugcaucggcuccauccgcaacggcaccuacgaccacgacgucuaccgcgacgaggcccucaacaaccgcuuccagaucaagggcgucgagcucaaguccggcuacaaggacuggauccucuggaucuccuucgccaucuccugcuuccuccucugcgucgcccuccucggcuucaucaugugggccugccagaagggcaacauccgcugcaacaucugcaucuga

SEQ ID NO: 109994 - RNA, 1701 nt, Artificial Sequence
  derived and/or modified CDS sequence (opt2) from hemagglutinin__InfluenzaA__EPI530679
augaagaccaucaucgcccucuccuacauccucugccucgucuucgcccagaagcuccccggcaacgacaacuccaccgccacccucugccucggccaccacgccguccccaacggcaccaucgucaagaccaucaccaacgaccgcaucgaggucaccaacgccaccgagcucguccagaacuccuccaucggcgagaucugcgacuccccccaccagauccucgacggcgagaacugcacccucaucgacgcccuccucggcgacccccagugcgacggcuuccagaacaagaagugggaccucuucgucgagcgcuccaaggccuacuccaacugcuaccccuacgacguccccgacuacgccucccuccgcucccucgucgccuccuccggcacccucgaguucaacaacgaguccuucaacugggccggcgucacccagaacggcaccuccuccuccugcauccgcggcuccaacuccuccuucuucucccgccucaacuggcucacccaccucaacuucaaguaccccgcccucaacgucaccaugcccaacaacgagcaguucgacaagcucuacaucuggggcguccaccaccccggcaccgacaaggaccagaucuuccucuacgcccaguccuccggccgcaucaccgucuccaccaagcgcucccagcaggccgucauccccaacaucggcucccgcccccgcauccgcgacauccccucccgcaucuccaucuacuggaccaucgucaagcccggcgacauccuccucaucaacuccaccggcaaccucaucgccccccgcggcuacuucaagauccgcuccggcaaguccuccaucaugcgcuccgacgcccccaucggcaagugcaaguccgagugcaucacccccaacggcuccauccccaacgacaagcccuuccagaacgucaaccgcaucaccuacggcgccugcccccgcuacgucaagcaguccacccucaagcucgccaccggcaugcgcaacguccccgagaagcagacccgcggcaucuucggcgccaucgccggcuucaucgagaacggcugggagggcauggucgacggcugguacggcuuccgccaccagaacuccgagggccgcggccaggccgccgaccucaaguccacccaggccgccaucgaccagaucaacggcaagcucaaccgccucaucggcaagaccaacgagaaguuccaccagaucgagaaggaguucuccgaggucgagggccgcauccaggaccucgagaaguacgucgaggacaccaagaucgaccucugguccuacaacgccgagcuccucgucgcccucgagaaccagcacaccaucgaccucaccgacuccgagaugaacaagcucuucgagaagaccaagaagcagcuccgcgagaacgccgaggacaugggcaacggcugcuucaagaucuaccacaagugcgacaacgccugcaucggcuccauccgcaacggcaccuacgaccacgacgucuaccgcgacgaggcccucaacaaccgcuuccagaucaagggcgucgagcucaaguccggcuacaaggacuggauccucuggaucuccuucgccaucuccugcuuccuccucugcgucgcccuccucggcuucaucaugugggccugccagaagggcaacauccgcugcaacaucugcaucuga

SEQ ID NO: 109995 - RNA, 1701 nt, Artificial Sequence; identical to SEQ ID NO: 96058
  derived and/or modified CDS sequence (opt2) from hemagglutinin__InfluenzaA__AAG01785

SEQ ID NO: 109996 - RNA, 1701 nt, Artificial Sequence; identical to SEQ ID NO: 108463
  derived and/or modified CDS sequence (opt2) from hemagglutinin__InfluenzaA__EPI814528

SEQ ID NO: 109997 - RNA, 1701 nt, Artificial Sequence
  derived and/or modified CDS sequence (opt2) from hemagglutinin__InfluenzaA__EPI674736
augaagaccaucaucgcccucuccuacauccucugccucgucuucgcccagaagcuccccggcaacgacaacuccaccgccacccucugccucggccaccacgccguccccaacggcaccaucgucaagaccaucaccaacgaccgcaucgaggucaccaacgccaccgagcucguccagaacuccuccaucggcgagaucugcgacuccccccaccagauccucgacggcgagaacugcacccucaucgacgcccuccucggcgacccccagugcgacggcuuccagaacaagaagugggaccucuucgucgagcgcuccaaggccuacuccaacugcuaccccuacgacguccccgacuacgccucccuccgcucccucgucgccuccuccggcacccucgaguucaacaacgaguccuucaacugggccggcgucacccagaacggcaccuccuccuccugccgccgcggcuccaacuccuccuucuucucccgccucaacuggcucacccaccucaacuccaaguaccccgcccucaacgucaccaugcccaacaacgagcaguucgacaagcucuacaucuggggcguccaccaccccgucaccgacaaggaccagaucuuccucuacgcccaguccuccggccgcaucaccgucuccaccaagcgcucccagcaggccgucauccccaacaucggcucccgcccccgcauccgcgacauccccucccgcaucuccaucuacuggaccaucgucaagcccggcgacauccuccucaucaacuccaccggcaaccucaucgccccccgcggcuacuucaagauccgcuccggcaaguccuccaucaugcgcuccgacgcccccaucggcaagugcaaguccgagugcaucacccccaacggcuccauccccaacgacaagcccuuccagaacgucaaccgcaucaccuacggcgccugcccccgcuacgucaagcaguccacccucaagcucgccaccggcaugcgcaacguccccgagcgccagacccgcggcaucuucggcgccaucgccggcuucaucgagaacggcugggagggcauggucgacggcugguacggcuuccgccaccagaacuccgagggccgcggccaggccgccgaccucaaguccacccaggccgccaucgaccagaucaacggcaagcucaaccgccucaucggcaagaccaacgagaaguuccaccagaucgagaaggaguucuccgaggucgagggccgcauccaggaccucgagaaguacgucgaggacaccaagaucgaccucugguccuacaacgccgagcuccucgucgcccucgagaaccagcacaccaucgaccucaccgacuccgagaugaacaagcucuucgagaagaccaagaagcagcuccgcgagaacgccgaggacaugggcaacggcugcuucaagaucuaccacaagugcgacaacgccugcaucggcuccauccgcaacggcaccuacgaccacgacgucuaccgcgacgaggcccucaacaaccgcuuccagaucaagggcgucgagcucaaguccggcuacaaggacuggauccucuggaucuccuucgccaucuccugcuuccuccucugcgucgcccuccucggcuucaucaugugggccugccagaagggcaacauccgcugcaacaucugcaucuga

SEQ ID NO: 109998 - RNA, 1701 nt, Artificial Sequence; identical to SEQ ID NO: 108463
  derived and/or modified CDS sequence (opt2) from hemagglutinin__InfluenzaA__EPI614444

SEQ ID NO: 109999 - RNA, 1701 nt, Artificial Sequence
  derived and/or modified CDS sequence (opt2) from hemagglutinin__InfluenzaA__EPI551814
augaagaccaucaucgcccucuccuacauccucugccucgucuucgcccagaagcuccccggcaacgacaacuccaccgccacccucugccucggccaccacgccguccccaacggcaccaucgucaagaccaucaccaacgaccgcaucgaggucaccaacgccaccgagcucguccagaacuccuccaucggcgagaucugcgacuccccccaccagauccucgacggcgagaacugcacccucaucgacgcccuccucggcgacccccagugcgacggcuuccagaacaagaagugggaccucuucgucgagcgcuccaaggccuacuccaacugcuaccccuacgacguccccgacuacgccucccuccgcucccucgucgccuccuccggcacccucgaguucaacaacgaguccuucaacugggccggcgucacccagaacggcaccuccuccuccugccgccgcggcuccaacuccuccuucuucucccgccucaacuggcucacccgccucaacuccaaguaccccgcccucaacgucaccaugcccaacaacgagcaguucgacaagcucuacaucuggggcguccaccaccccgucaccgacaaggaccagaucuuccucuacgcccaguccuccggccgcaucaccgucuccaccaagcgcucccagcaggccgucauccccaacaucggcucccgcccccgcauccgcgacauccccucccgcaucuccaucuacuggaccaucgucaagcccggcgacauccuccucaucaacuccaccggcaaccucaucgccccccgcggcuacuucaagauccgcuccggcaaguccuccaucaugcgcuccgacgcccccaucggcaagugcaaguccgagugcaucacccccaacggcuccauccccaacgacaagcccuuccagaacgucaaccgcaucaccuacggcgccugcccccgcuacgucaagcaguccacccucaagcucgccaccggcaugcgcaacguccccgagcgccagacccgcggcaucuucggcgccaucgccggcuucaucgagaacggcugggagggcauggucgacggcugguacggcuuccgccaccagaacuccgagggccgcggccaggccgccgaccucaaguccacccaggccgccaucgaccagaucaacggcaagcucaaccgccucaucggcaagaccaacgagaaguuccaccagaucgagaaggaguucuccgaggucgagggccgcauccaggaccucgagaaguacgucgaggacaccaagaucgaccucugguccuacaacgccgagcuccucgucgcccucgagaaccagcacaccaucgaccucaccgacuccgagaugaacaagcucuucgagaagaccaagaagcagcuccgcgagaacgccgaggacaugggcaacggcugcuucaagaucuaccacaagugcgacaacgccugcaucggcuccauccgcaacggcaccuacgaccacgacgucuaccgcgacgaggcccucaacaaccgcuuccagaucaagggcgucgagcucaaguccggcuacaaggacuggauccucuggaucuccuucgccaucuccugcuuccuccucugcgucgcccuccucggcuucaucaugugggccugccagaagggcaacauccgcugcaacaucugcaucuga

SEQ ID NO: 110000 - RNA, 1701 nt, Artificial Sequence
  derived and/or modified CDS sequence (opt2) from hemagglutinin__InfluenzaA__EPI696955
augaagaccaucaucgcccucuccuacauccucugccucgucuucgcccagaagcuccccggcaacgacaacuccaccgccacccucugccucggccaccacgccguccccaacggcaccaucgucaagaccaucaccaacgaccgcaucgaggucaccaacgccaccgagcucguccagaacuccuccaucggcgagaucugcgacuccccccaccagauccucgacggcgagaacugcacccucaucgacgcccuccucggcgacccccagugcgacggcuuccagaacaagaagugggaccucuucgucgagcgcuccaaggccuacuccaacugcuaccccuacgacguccccgacuacgccucccuccgcucccucgucgccuccuccggcacccucgaguucaacaacgaguccuucaacugggccggcgucacccagaacggcaccuccuccuccugccgccgcggcuccaacuccuccuucuucucccgccucaacuggcucacccaccucaacuccaaguaccccgcccucaacgucaccaugcccaacaacgagcaguucgacaagcucuacaucuggggcguccaccaccccgucaccgacaaggaccagaucuuccucuacgcccaguccuccggccgcaucaccgucuccaccaagcgcucccagcaggccgucauccccaacaucggcuaccgcccccgcauccgcgacauccccucccgcaucuccaucuacuggaccaucgucaagcccggcgacauccuccucaucaacuccaccggcaaccucaucgccccccgcggcuacuucaagauccgcuccggcaaguccuccaucaugcgcuccgacgcccccaucggcaagugcaaguccgagugcaucacccccaacggcuccauccccaacgacaagcccuuccagaacgucaaccgcaucaccuacggcgccugcccccgcuacgucaagcaguccacccucaagcucgccaccggcaugcgcaacguccccgagcgccagacccgcggcaucuucggcgccaucgccggcuucaucgagaacggcugggagggcauggucgacggcugguacggcuuccgccaccagaacuccgagggccgcggccaggccgccgaccucaaguccacccaggccgccaucgaccagaucaacggcaagcucaaccgccucaucggcaagaccaacgagaaguuccaccagaucgagaaggaguucuccgaggucgagggccgcauccaggaccucgagaaguacgucgaggacaccaagaucgaccucugguccuacaacgccgagcuccucgucgcccucgagaaccagcacaccaucgaccucaccgacuccgagaugaacaagcucuucgagaagaccaagaagcagcuccgcgagaacgccgaggacaugggcaacggcugcuucaagaucuaccacaagugcgacaacgccugcaucggcuccauccgcaacggcaccuacgaccacgacgucuaccgcgacgaggcccucaacaaccgcuuccagaucaagggcgucgagcucaaguccggcuacaaggacuggauccucuggaucuccuucgccaucuccugcuuccuccucugcgucgcccuccucggcuucaucaugugggccugccagaagggcaacauccgcugcaacaucugcaucuga

SEQ ID NO: 110001 - RNA, 1701 nt, Artificial Sequence
  derived and/or modified CDS sequence (opt2) from hemagglutinin__InfluenzaA__EPI740790
augaagaccaucaucgcccucuccuacauccucugccucgucuucgcccagaagcuccccggcaacgacaacuccaccgccacccucugccucggccaccacgccguccccaacggcaccaucgucaagaccaucaccaacgaccgcaucgaggucaccaacgccaccgagcucguccagaacuccuccaucggcgagaucugcgacuccccccaccagauccucgacggcgagaacugcacccucaucgacgcccuccucggcgacccccagugcgacggcuuccagaacaagaagugggaccucuucgucgagcgcuccaaggccuacuccaacugcuaccccuacgacguccccgacuacgccucccuccgcucccucgucgccuccuccggcacccucgaguucaacaacgaguccuucaacugggccggcgucacccagaacggcaccuccuccuccugccgccgcggcuccaacuccuccuucuucucccgccucaacuggcucacccaccucaacuccaaguaccccgcccucaacgucaccaugcccaacaacgagcaguucgacaagcucuacaucuggggcguccaccaccccgucaccgacaaggaccagaucuuccucuacgcccaguccuccggccgcaucaccgucuccaccaagcgcucccagcaggccgucauccccaacaucggcuuccgcccccgcauccgcgacauccccucccgcaucuccaucuacuggaccaucgucaagcccggcgacauccuccucaucaacuccaccggcaaccucaucgccccccgcggcuacuucaagauccgcuccggcaaguccuccaucaugcgcuccgacgcccccaucggcaagugcaaguccgagugcaucacccccaacggcuccauccccaacgacaagcccuuccagaacgucaaccgcaucaccuacggcgccugcccccgcuacgucaagcaguccacccucaagcucgccaccggcaugcgcaacguccccgagcgccagacccgcggcaucuucggcgccaucgccggcuucaucgagaacggcugggagggcauggucgacggcugguacggcuuccgccaccagaacuccgagggccgcggccaggccgccgaccucaaguccacccaggccgccaucgaccagaucaacggcaagcucaaccgccucaucggcaagaccaacgagaaguuccaccagaucgagaaggaguucuccgaggucgagggccgcauccaggaccucgagaaguacgucgaggacaccaagaucgaccucugguccuacaacgccgagcuccucgucgcccucgagaaccagcacaccaucgaccucaccgacuccgagaugaacaagcucuucgagaagaccaagaagcagcuccgcgagaacgccgaggacaugggcaacggcugcuucaagaucuaccacaagugcgacaacgccugcaucggcuccauccgcaacggcaccuacgaccacgacgucuaccgcgacgaggcccucaacaaccgcuuccagaucaagggcgucgagcucaaguccggcuacaaggacuggauccucuggaucuccuucgccaucuccugcuuccuccucugcgucgcccuccucggcuucaucaugugggccugccagaagggcaacauccgcugcaacaucugcaucuga

SEQ ID NO: 110002 - RNA, 1701 nt, Artificial Sequence; identical to SEQ ID NO: 104745
  derived and/or modified CDS sequence (opt2) from hemagglutinin__InfluenzaA__EPI377499

SEQ ID NO: 110003 - RNA, 1701 nt, Artificial Sequence
  derived and/or modified CDS sequence (opt2) from hemagglutinin__InfluenzaA__EPI391247
augaagaccaucaucgcccucuccuacauccucugccucgucuucgcccagaagcuccccggcaacgacaacuccaccgccacccucugccucggccaccacgccguccccaacggcaccaucgucaagaccaucaccaacgaccgcaucgaggucaccaacgccaccgagcucguccagaacuccuccaucggcgagaucugcgacuccccccaccagauccucgacggcgagaacugcacccucaucgacgcccuccucggcgacccccagugcgacggcuuccagaacaagaagugggaccucuucgucgagcgcuccaaggccuacuccaacugcuaccccuacgacguccccgacuacgccucccuccgcucccucgucgccuccuccggcacccucgaguucaacaacgaguccuucaacuggaacggcgucacccagaacggcaccuccuccgccugcauccgccgcuccaacaacuccuucuucucccgccucaacuggcucacccaccucaacuucaaguaccccgcccucaacgucaccaugcccaacaacgagcaguucgacaagcucuacaucuggggcguccaccaccccgucaccgacaaggaccagaucuuccucuacgcccagcccuccggccgcaucaccgucuccaccaagcgcucccagcaggccgucauccccaacaucggcuuccgcccccgcauccgcaacauccccucccgcaucuccaucuacuggaccaucgucaagcccggcgacauccuccucaucaacuccaccggcaaccucaucgccccccgcggcuacuucaagauccgcuccggcaaguccuccaucaugcgcuccgacgcccccaucggcaagugcaaguccgagugcaucacccccaacggcuccauccccaacgacaagcccuuccagaacgucaaccgcaucaccuacggcgccugcccccgcuacgucaagcaguccacccucaagcucgccaccggcaugcgcaacguccccgagaagcagacccgcggcaucuucggcgccaucgccggcuucaucgagaacggcugggagggcauggucgacggcugguacggcuuccgccaccagaacuccgagggccgcggccaggccgccgaccucaaguccacccaggccgccaucgaccagaucaacggcaagcucaaccgccucaucggcaagaccaacgagaaguuccaccagaucgagaaggaguucuccgaggucgagggccgcauccaggaccucgagaaguacgucgaggacaccaagaucgaccucugguccuacaacgccgagcuccucgucgcccucgagaaccagcacaccaucgaccucaccgacuccgagaugaacaagcucuucgagaagaccaagaagcagcuccgcgagaacgccgaggacaugggcaacggcugcuucaagaucuaccacaagugcgacaacgccugcaucggcuccauccgcaacggcaccuacgaccacgacgucuaccgcgacgaggcccucaacaaccgcuuccagaucaagggcgucgagcucaaguccggcuacaaggacuggauccucuggaucuccuucgccaucuccugcuuccuccucugcgucgcccuccucggcuucaucaugugggccugccagaagggcaacauccgcugcaacaucugcaucuga

SEQ ID NO: 110004 - RNA, 1701 nt, Artificial Sequence
  derived and/or modified CDS sequence (opt2) from hemagglutinin__InfluenzaA__EPI407123
augaagaccaucaucgcccucuccuacauccucugccucgucuucgcccagaagcuccccggcaacgacaacuccaccgccacccucugccucggccaccacgccguccccaacggcaccaucgucaagaccaucaccaacgaccgcaucgaggucaccaacgccaccgagcucguccagaacuccuccaucggcgagaucugcgacuccccccaccagauccucgacggcgagaacugcacccucaucgacgcccuccucggcgacccccagugcgacggcuuccagaacaagaagugggaccucuucgucgagcgcuccaaggccuacuccaacugcuaccccuacgacguccccgacuacgccucccuccgcucccucgucgccuccuccggcacccucgaguucaacaacgaguccuucaacuggaacggcgucacccagaacggcaccuccuccgccugcauccgccgcuccaacaacuccuucuucucccgccucaacuggcucacccaccucaacuucaaguaccccgcccucaacgucaccaugcccaacaacgagcaguucgacaagcucuacaucuggggcguccaccaccccgucaccgacaaggaccagaucuuccucuacgcccagcccuccggccgcaucaccgucuccaccaagcgcucccagcaggccgucauccccaacaucggcuuccgcccccgcauccgcaacaaccccucccgcaucuccaucuacuggaccaucgucaagcccggcgacauccuccucaucaacuccaccggcaaccucaucgccccccgcggcuacuucaagauccgcuccggcaaguccuccaucaugcgcuccgacgcccccaucggcaagugcaaguccgagugcaucacccccaacggcuccauccccaacgacaagcccuuccagaacgucaaccgcaucaccuacggcgccugcccccgcuacgucaagcaguccacccucaagcucgccaccggcaugcgcaacguccccgagaagcagacccgcggcaucuucggcgccaucgccggcuucaucgagaacggcugggagggcauggucgacggcugguacggcuuccgccaccagaacuccgagggccgcggccaggccgccgaccucaaguccacccaggccgccaucgaccagaucaacggcaagcucaaccgccucaucggcgagaccaacgagaaguuccaccagaucgagaaggaguucuccgaggucgagggccgcauccaggaccucgagaaguacgucgaggacaccaagaucgaccucugguccuacaacgccgagcuccucgucgcccucgagaaccagcacaccaucgaccucaccgacuccgagaugaacaagcucuucgagaagaccaagaagcagcuccgcgagaacgccgaggacaugggcaacggcugcuucaagaucuaccacaagugcgacaacgccugcaucggcuccauccgcaacggcaccuacgaccacgacgucuaccgcgacgaggcccucaacaaccgcuuccagaucaagggcgucgagcucaaguccggcuacaaggacuggauccucuggaucuccuucgccaucuccugcuuccuccucugcgucgcccuccucggcuucaucaugugggccugccagaagggcaacauccgcugcaacaucugcaucuga

SEQ ID NO: 110005 - RNA, 1701 nt, Artificial Sequence
  derived and/or modified CDS sequence (opt2) from hemagglutinin__InfluenzaA__EPI407126
augaagaccaucaucgcccucuccuacauccucugccucgucuucgcccagaagcuccccggcaacgacaacuccaccgccacccucugccucggccaccacgccguccccaacggcaccaucgucaagaccaucaccaacgaccgcaucgaggucaccaacgccaccgagcucguccagaacuccuccaucggcgagaucugcgacuccccccaccagauccucgacggcgagaacugcacccucaucgacgcccuccucggcgacccccagugcgacggcuuccagaacaagaagugggaccucuucgucgagcgcuccaaggccuacuccaacugcuaccccuacgacguccccgacuacgccucccuccgcucccucgucgccuccuccggcacccucgaguucaacaacgaguccuucaacuggaacggcgucacccagaacggcaccuccuccgccugcauccgccgcuccaacaacuccuucuucucccgccucaacuggcucacccaccucaacuucaaguaccccgcccucaacgucaccaugcccaacaacgagcaguucgacaagcucuacaucuggggcguccaccaccccgucaccgacaaggaccagaucuuccucuacgcccagcccuccggccgcaucaccgucuccaccaagcgcucccagcaggccgucauccccaacaucggcuuccgcccccgcauccgcaacaaccccucccgcaucuccaucuacuggaccaucgucaagcccggcgacauccuccucaucaacuccaccggcaaccucaucgccccccgcggcuacuucaagauccgcuccggcaaguccuccaucaugcgcuccgacgcccccaucggcaagugcaaguccgagugcaucacccccaacggcuccauccccaacgacaagcccuuccagaacgucaaccgcaucaccuacggcgccugcccccgcuacgucaagcaguccacccucaagcucgccaccggcaugcgcaacguccccgagaagcagacccgcggcaucuucggcgccaucgccggcuucaucgagaacggcugggagggcauggucgacggcugguacggcuuccgccaccagaacuccgagggccgcggccaggccgccgaccucaaguccacccaggccgccaucgaccagaucaacggcaagcucaaccgccucaucggcaagaccaacgagaaguuccaccagaucgagaaggaguucuccgaggucgagggccgcauccaggaccucgagaaguacgucgaggacaccaagaucgaccucugguccuacaacgccgagcuccucgucgcccucgagaaccagcacaccaucgaccucaccgacuccgagaugaacaagcucuucgagaagaccaagaagcagcuccgcgagaacgccgaggacaugggcaacggcugcuucaagaucuaccacaagugcgacaacgccugcaucggcuccauccgcaacggcaccuacgaccacgacgucuaccgcgacgaggcccucaacaaccgcuuccagaucaagggcgucgagcucaaguccggcuacaaggacuggauccucuggaucuccuucgccaucuccugcuuccuccucugcgucgcccuccucggcuucaucaugugggccugccagaagggcaacauccgcugcaacaucugcaucuga

SEQ ID NO: 110006 - RNA, 1701 nt, Artificial Sequence; identical to SEQ ID NO: 109891
  derived and/or modified CDS sequence (opt2) from hemagglutinin__InfluenzaA__EPI562037

SEQ ID NO: 110007 - RNA, 1701 nt, Artificial Sequence; identical to SEQ ID NO: 108477
  derived and/or modified CDS sequence (opt2) from hemagglutinin__InfluenzaA__EPI562034

SEQ ID NO: 110008 - RNA, 1701 nt, Artificial Sequence
  derived and/or modified CDS sequence (opt2) from hemagglutinin__InfluenzaA__EPI653140
augaagaccaucaucgcccucuccuacauccucugccucgucuucgcccagaagauccccggcaacgacaacuccaccgccacccucugccucggccaccacgccguccccaacggcaccaucgucaagaccaucaccaacgaccgcaucgaggucaccaacgccaccgagcucguccagaacuccuccaucggcgagaucugcgacuccccccaccagauccucgacggcgagaacugcacccucaucgacgcccuccucggcgacccccagugcgacggcuuccagaacaagaagugggaccucuucgucgagcgcuccaaggccuacuccuccugcuaccccuacgacguccccgacuacgccucccuccgcucccucgucgccuccuccggcacccucgaguucaacaacgaguccuucaacuggaccggcgucacccagaacggcaccuccuccgccugcauccgccgcuccuccuccuccuucuucucccgccucaacuggcucacccaccucaacuacaaguaccccgcccucaacgucaccaugcccaacaacgagcaguucgacaagcucuacaucuggggcguccaccaccccggcaccgacaaggaccagaucuuccccuacgcccaguccuccggccgcaucaccgucuccaccaagcgcucccagcaggccgucauccccaacaucggcucccgcccccgcauccgcggcauccccucccgcaucuccaucuacuggaccaucgucaagcccggcgacauccuccucaucaacuccaccggcaaccucaucgccccccgcggcuacuucaagauccgcuccggcaaguccuccaucaugcgcuccgacgcccccaucggcaagugcaaguccgagugcaucacccccaacggcuccauccccaacgacaagcccuuccagaacgucaaccgcaucaccuacggcgccugcccccgcuacgucaagcacuccacccucaagcucgccaccggcaugcgcaacguccccgagaagcagacccgcggcaucuucggcgccaucgccggcuucaucgagaacggcugggagggcauggucgacggcugguacggcuuccgccaccagaacuccgagggccgcggccaggccgccgaccucaaguccacccaggccgccaucgaccagaucaacggcaagcucaaccgccucaucggcaagaccaacgagaaguuccaccagaucgagaaggaguucuccgaggucgagggccgcauccaggaccucgagaaguacgucgaggacaccaagaucgaccucugguccuacaacgccgagcuccucgucgcccucgagaaccagcacaccaucgaccucaccgacuccgagaugaacaagcucuucgagaagaccaagaagcagcuccgcgagaacgccgaggacaugggcaacggcugcuucaagaucuaccacaagugcgacaacgccugcaucggcuccauccgcaacggcaccuacgaccacaacgucuaccgcgacgaggcccucaacaaccgcuuccagaucaagggcgucgagcucaaguccggcuacaaggacuggauccucuggaucuccuucgccaucuccugcuuccuccucugcgucgcccuccucggcuucaucaugugggccugccagaagggcaacauccgcugcaacaucugcaucuga

SEQ ID NO: 110009 - RNA, 1707 nt, Artificial Sequence
  derived and/or modified CDS sequence (opt2) from hemagglutinin__InfluenzaA__ACR48873/m
auggagaagaucguccuccucuucgccaucgucucccucgucaaguccgaccagaucugcaucggcuaccacgccaacaacuccaccgagcaggucgacaccaucauggagaagaacgucaccgucacccacgcccaggacauccucgagaagacccacaacggcaagcucugcgaccucgacggcgucaagccccucauccuccgcgacugcuccgucgccggcuggcuccucggcaaccccaugugcgacgaguucaucaacguccccgagugguccuacaucgucgagaaggccaaccccgucaacgaccucugcuaccccggcgacuucaacgacuacgaggagcucaagcaccuccucucccgcaucaaccacuucgagaagauccagaucauccccaaguccuccugguccucccacgaggccucccucggcgucuccuccgccugccccuaccagggcaaguccuccuucuuccgcaacgucgucuggcucaucgagaagaacuccaccuaccccaccaucaagcgcuccuacaacaacaccaaccaggaggaccuccucguccucuggggcauccaccaccccaacgacgccgccgagcagaccaagcucuaccagaaccccaccaccuacaucuccgucggcaccuccacccucaaccagcgccucgucccccgcaucgccacccgcuccaaggucaacggccaguccggccgcauggaguucuucuggaccauccucaagcccaacgacgccaucaacuucgaguccaacggcaacuucaucgcccccgaguacgccuacaagaucgucaagaagggcgacuccaccaucaugaaguccgagcucgaguacggcaacugcaacaccaagugccagacccccaugggcgccaucaacuccuccaugcccuuccacaacauccacccccucaccaucggcgagugccccaaguacgucaaguccaaccgccucguccucgccaccggccuccgcaacuccccccagcgcgagcgccgccgcaagaagcgcggccucuucggcgccaucgccggcuucaucgagggcggcuggcagggcauggucgacggcugguacggcuaccaccacuccaacgagcagggcuccggcuacgccgccgacaaggaguccacccagaaggccaucgacggcgucaccaacaaggucaacuccaucaucgacaagaugaacacccaguucgaggccgucggccgcgaguucaacaaccucgagcgccgcaucgagaaccucaacaagaagauggaggacggcuuccucgacgucuggaccuacaacgccgagcuccucguccucauggagaacgagcgcacccucgacuuccacgacuccaacgucaagaaccucuacgacaagguccgccuccagcuccgcgacaacgccaaggagcucggcaacggcugcuucgaguucuaccacaagugcgacaacgagugcauggaguccguccgcaacggcaccuacgacuacccccaguacuccgaggaggcccgccucaagcgcgaggagaucuccggcgucaagcucgaguccaucggcaucuaccagauccucuccaucuacuccaccgucgccuccucccucgcccucgccaucauggucgccggccucucccucuggaugugcuccaacggcucccuccagugccgcaucugcaucuga

SEQ ID NO: 110010 - RNA, 1707 nt, Artificial Sequence
  derived and/or modified CDS sequence (opt2) from hemagglutinin__InfluenzaA__ACR48874/m
auggagaagaucguccuccucuucgccaucgucucccucgucaaguccgaccagaucugcaucggcuaccacgccaacaacuccaccgagcaggucgacaccaucauggagaagaacgucaccgucacccacgcccaggacauccucgagaagacccacaacggcaagcucugcgaccucgacggcgucaagccccucauccuccgcgacugcuccgucgccggcuggcuccucggcaaccccaugugcgacgaguucaucaacguccccgagugguccuacaucgucgagaaggccaaccccgucaacgaccucugcuaccccggcgacuucaacgacuacgaggagcucaagcaccuccucucccgcaucaaccacuucgagaagauccagaucauccccaaguccuccugguccucccacgaggccucccucggcgucuccuccgccugccccuaccagggcaaguccuccuucuuccgcaacgucgucuggcucaucaagaagaacuccaccuaccccaccaucaagcgcuccuacaacaacaccaaccaggaggaccuccucguccucuggggcauccaccaccccaaggacgccgccgagcagaccaagcucuaccagaaccccaccaccuacaucuccgucggcaccuccacccucaaccagcgccucgucccccgcaucgccacccgcuccaaggucaacggccaguccggccgcauggaguucuucuggaccauccucaagcccaacgacgccaucaacuucgaguccaacggcaacuucaucgcccccgaguacgccuacaagaucgucaagaagggcgacuccaccaucaugaaguccgagcucgaguacggcaacugcaacaccaagugccagacccccaugggcgccaucaacuccuccaugcccuuccacaacauccacccccucaccaucggcgagugccccaaguacgucaaguccaaccgccucguccucgccaccggccuccgcaacuccccccagcgcgagcgccgccgcaagaagcgcggccucuucggcgccaucgccggcuucaucgagggcggcuggcagggcauggucgacggcugguacggcuaccaccacuccaacgagcagggcuccggcuacgccgccgacaaggaguccacccagaaggccaucgacggcgucaccaacaaggucaacuccaucaucgacaagaugaacacccaguucgaggccgucggccgcgaguucaacaaccucgagcgccgcaucgagaaccucaacaagaagauggaggacggcuuccucgacgucuggaccuacaacgccgagcuccucguccucauggagaacgagcgcacccucgacuuccacgacuccaacgucaagaaccucuacgacaagguccgccuccagcuccgcgacaacgccaaggagcucggcaacggcugcuucgaguucuaccacaagugcgacaacgagugcauggaguccguccgcaacggcaccuacgacuacccccaguacuccgaggaggcccgccucaagcgcgaggagaucuccggcgucaagcucgaguccaucggcaucuaccagauccucuccaucuacuccaccgucgccuccucccucgcccucgccaucauggucgccggccucucccucuggaugugcuccaacggcucccuccagugccgcaucugcaucuga

SEQ ID NO: 110011 - RNA, 1701 nt, Artificial Sequence; identical to SEQ ID NO: 105182
  derived and/or modified CDS sequence (opt2) from hemagglutinin__InfluenzaA__ACD47234

SEQ ID NO: 110012 - RNA, 1707 nt, Artificial Sequence
  derived and/or modified CDS sequence (opt2) from hemagglutinin__InfluenzaA__ACZ36881
auggagaagaucguccuccuccucgccaucgucucccucgucaaguccgaccagaucugcaucggcuaccacgccaacaacuccaccgagcaggucgacaccaucauggagaagaacgucaccgucacccacgcccaggacauccucgagaagacccacaacggcaagcucugcgaccucgacggcgucaagccccucauccuccgcgacugcuccgucgccggcuggcuccucggcaaccccaugugcgacgaguuccucaacguccccgagugguccuacaucgucgagaagaucaaccccgccaacgaccucugcuaccccggcaacuucaacgacuacgaggagcucaagcaccuccucucccgcaucaaccacuucgagaagauccagaucauccccaaguccuccugguccgaccacgaggccuccuccggcgucuccuccgccugccccuaccagggccgcuccuccuucuuccgcaacgucgucuggcucaucaagaaggacaacgccuaccccaccaucaagcgcuccuacaacaacaccaaccaggaggaccuccucguccucuggggcauccaccaccccaacgacgccgccgagcagacccgccucuaccagaaccccaccaccuacaucuccgucggcaccuccacccucaaccagcgccucguccccaagaucgccacccgcuccaaggucaacggccaguccggccgcauggaguucuucuggaccauccucaagcccaacgacgccaucaacuucgaguccaacggcaacuucaucgcccccgagaacgccuacaagaucgucaagaagggcgacuccaccaucaugaaguccgagcucgaguacggcaacugcaacaccaagugccagacccccaucggcgccaucaacuccuccaugcccuuccacaacauccacccccucaccaucggcgagugccccaaguacgucaaguccaaccgccucguccucgccaccggccuccgcaacuccccccagggcgagcgccgccgccgcaagcgcggccucuucggcgccaucgccggcuucaucgagggcggcuggcagggcauggucgacggcugguacggcuaccaccacuccaacgagcagggcuccggcuacgccgccgacaaggaguccacccagaaggccaucgacggcgucaccaacaaggucaacuccaucaucgacaagaugaacacccaguucgaggccgucggccgcgaguucaacaaccucgagcgccgcaucgagaaccucaacaagaagauggaggacggcuuccucgacgucuggaccuacaacgccgagcuccucguccucauggagaacgagcgcacccucgacuuccacgacuccaacgucaagaaccucuacgacaagguccgccuccagcuccgcgacaacgccaaggagcucggcaacggcugcuucgaguucuaccaccgcugcgacaacgagugcauggaguccguccgcaacggcaccuacgacuacccccaguacuccgaggaggcccgccucaagcgcgaggagaucuccggcgucaagcucgaguccaucggcaccuaccagauccucuccaucuacuccaccgucgccuccucccucgcccucgccaucauggucgccggccucucccucuggaugugcuccaacggcucccuccagugccgcaucugcaucuga

SEQ ID NO: 110013 - RNA, 1704 nt, Artificial Sequence
  derived and/or modified CDS sequence (opt2) from hemagglutinin__InfluenzaA__EPI500771
auggagaagaucguccuccucuucgccaccaucucccucgucaaguccgaccacaucugcaucggcuaccacgccaacaacuccaccgagcaggucgacaccaucauggagaagaacgucaccgucacccacgcccaggacauccucgagaagacccacaacggcaagcucugcgaccucaacggcgucaagccccucauccucaaggacugcuccgucgccggcuggcuccucggcaacccccucugcgacgaguucaccaacguccccgagugguccuacaucgucgagaaggccaaccccgccaacgaccucugcuaccccggcaacuucaacgacuacgaggagcucaagcaccuccucucccgcaucaaccacuucgagaagauccagaucauccccaaggacuccugguccgaccacgaggccucccucggcgucuccgccgccugcuccuaccagggcaacuccuccuucuuccgcaacgucgucuggcucaucaagaaggacaacgccuaccccaccaucaagaagggcuacaacaacaccaaccgcgaggaccuccucauccucuggggcauccaccaccccaacgacgaggccgagcagaccaagcucuaccagaaccccaccaccuacaucuccaucggcaccuccacccucaaccagcgccucguccccaagaucgccacccgcuccaagaucaaccgccaguccggccgcaucgacuucuucuggaccauccucaagcccaacgacgccauccacuucgaguccaacggcaacuucaucgcccccgaguacgccuacaagaucgucaagaagggcgacuccaccaucaugcgcuccgaggucgaguacggcaacugcaacacccgcugccagacccccaucggcgccaucaacuccuccaugcccuuccacaacauccacccccucaccaucggcgagugccccaaguacgucaaguccaacaagcucguccucgccaccggccuccgcaacuccccccagcgcgagcgccgccgcaagcgcggccucuucggcgccaucgccggcuucaucgagggcggcuggcagggcauggucgacggcugguacggcuaccaccacuccaacgagcagggcuccggcuacgccgccgacaaggaguccacccagaaggccaucgacggcgucaccaacaaggucaacuccaucaucgacaagaugaacacccaguucgaggccgucggccgcgaguucaacaaccucgagcgccgcaucgagaaccucaacaagaagauggaggacggcuuccucgacgucuggaccuacaacgccgagcuccucguccucauggagaacgagcgcacccucgacuuccacgacuccaacgucaagaaccucuacgacaagguccgccuccagcucaaggacaacgccaaggagcucggcaacggcugcuucgaguucuaccacaagugcaacaacgagugcauggaguccguccgcaacggcaccuacgacuacccccaguacuccgaggaggcccgccucaagcgcgaggagaucuccggcgucaagcucgaguccaucggcaucuaccagauccucuccaucuacuccaccgucgccuccucccucguccucgccaucaugauggccggccucucccucuggaugugcuccaacggcucccuccagugccgcaucugcaucuga

SEQ ID NO: 110014 - RNA, 1695 nt, Artificial Sequence
  derived and/or modified CDS sequence (opt2) from hemagglutinin__InfluenzaA__ABF93441
auggagaagaucguccuccuccucgccaucgucucccucgucaaguccgaccagaucugcaucggcuaccacgccaacaacuccaccgagcaggucgacaccaucauggagaagaacgucaccgucacccacgcccaggacauccucgagaagacccacaacggcaagcucugcgaccucgacggcgucaagccccucauccuccgcgacugcuccgucgccggcuggcuccucggcaaccccaugugcgacgaguuccucaacguccccgagugguccuacaucgucgagaagaucaaccccgccaacgaccucugcuaccccggcaacuucaacgacuacgaggagcucaagcaccuccucucccgcaucaaccacuucgagaagauccagaucauccccaaguccuccugguccgaccacgaggccuccuccggcgucuccuccgccugccccuaccagggccgcuccuccuucuuccgcaacgucgucuggcucaucaagaagaacaacgccuaccccaccaucaagcgcuccuacaacaacaccaaccaggaggaccuccucguccucuggggcauccaccaccccaacgacgccgccgagcagacccgccucuaccagaaccccaccaccuacaucuccgucggcaccuccacccucaaccagcgccucguccccaagaucgccacccgcuccaaggucaacggccaguccggccgcauggaguucuucuggaccauccucaagcccaacgacgccaucaacuucgaguccaacggcaacuucaucgcccccgagaacgccuacaagaucgucaagaagggcgacuccaccaucaugaaguccgagcucgaguacggcaacugcaacaccaagugccagacccccaucggcgccaucaacuccuccaugcccuuccacaacauccacccccucaccaucggcgagugccccaaguacgucaaguccaaccgccucguccucgccaccggccuccgcaacuccccccagaucgagacccgcggccucuucggcgccaucgccggcuucaucgagggcggcuggcagggcauggucgacggcugguacggcuaccaccacuccaacgagcagggcuccggcuacgccgccgacaaggaguccacccagaaggccaucgacggcgucaccaacaaggucaacuccaucaucgacaagaugaacacccaguucgaggccgucggccgcgaguucaacaaccucgagcgccgcaucgagaaccucaacaagaagauggaggacggcuuccucgacgucuggaccuacaacgccgagcuccucguccucauggagaacgagcgcacccucgacuuccacgacuccaacgucaagaaccucuacgacaagguccgccuccagcuccgcgacaacgccaaggagcucggcaacggcugcuucgaguucuaccaccgcugcgacaacgagugcauggaguccguccgcaacggcaccuacgacuacccccaguacuccgaggaggcccgccucaagcgcgaggagaucuccggcgucaagcucgaguccaucggcaccuaccagauccucuccaucuacuccaccgucgccuccucccucgcccucgccaucauggucgccggccucucccucuggaugugcuccaacggcucccuccagugccgcaucugcaucuga

SEQ ID NO: 110015 - RNA, 1707 nt, Artificial Sequence
  derived and/or modified CDS sequence (opt2) from hemagglutinin__InfluenzaA__AGG12577
auggagaagaucguccuccucuucgccaucaucucccucgucaaguccgaccacaucugcaucggcuaccacgccaacaacuccaccgagcaggucgacaccaucauggagaagaacgucaccgucacccacgcccaggacauccucgagaagacccacaacggcaagcucugcgaccucaacggcgucaagccccucauccucaaggacugcuccgucgccggcuggcuccucggcaaccccaugugcgacgaguucaucgacguccccgagugguccuacaucgucgagaaggccaaccccgccaacgaccucugcuaccccggcaacuucaacgacuacgaggagcucaagcaccuccucucccgcaucaaccacuucgagaagauccgcaucauccccaaggacuccuggcccgaccacgaggccucccucggcgucuccgccgccugcuccuaccagggcaacuccuccuucuuccgcaacgucgucuggcuccucaagaaggacaacgccuaccccaucaucaagaaguccuacaacaacaccaacaaggaggaccuccucguccucuggggcauccaccaccccaacgacgaggccgagcagacccgccucuaccagaaccccaccaccuacgucuccaucggcaccuccacccucaaccagcgccucgucccccgcaucgccacccgcuccaaggucaacggccaguccggccgcaucgacuucuucuggaccauccucaagcccaacgacgccaucaacuucgaguccaacggcaacuucaucgcccccgaguacgccuacaagaucgucaagaagggcgacuccaccaucaugcgcuccgaggucgaguacggcaacugcuccacccgcugccagacccccaugggcgccaucaacuccuccaugcccuuccacaacauccacccccucaccaucggcgagugccccaaguacgucaaguccaacaagcucguccucgccaccggccuccgcaacuccccccagaucgagcgccgccgccgcaagcgcggccucuucggcgccaucgccggcuucaucgagggcggcuggcagggcauggucgacggcugguacggcuaccaccacuccaacgagcagggcuccggcuacgccgccgacaaggaguccacccagaaggccaucgacggcgucaccaacaaggucaacuccaucaucgacaagaugaacacccaguucgaggccgucggccgcgaguucaacaaccucgagcgccgcaucgagaaccucaacaagaagauggaggacggcuuccucgacgucuggaccuacaacgccgagcuccucguccucauggagaacgagcgcacccucgacuuccacgacuccaacgucaagaaccucuacgacaagguccgccuccagcuccgcgacaacgccaaggagcucggcaacggcugcuucgaguucuaccacaagugcgacaacgagugcauggaguccguccgcaacggcaccuacgacuacccccaguacuccgaggaggcccgccucaagcgcgaggagaucuccggcgucaagcucgaguccaucggcaccuaccagauccucuccaucuacuccaccgucgccuccucccucguccucgccaucauggucgccggccucucccucuggaugugcuccaacggcucccuccagugccgcaucugcaucuga

SEQ ID NO: 110016 - RNA, 1707 nt, Artificial Sequence; identical to SEQ ID NO: 110015
  derived and/or modified CDS sequence (opt2) from hemagglutinin__InfluenzaA__AGC13463

SEQ ID NO: 110017 - RNA, 1707 nt, Artificial Sequence; identical to SEQ ID NO: 101879
  derived and/or modified CDS sequence (opt2) from hemagglutinin__InfluenzaA__ACI06178/m1

SEQ ID NO: 110018 - RNA, 1707 nt, Artificial Sequence
  derived and/or modified CDS sequence (opt2) from hemagglutinin__InfluenzaA__AHF20402
auggagaagaucguccuccucuucgccaucgucucccucgucaaguccgaccagaucugcaucggcuaccacgccaacaacuccaccgagcaggucgacaccaucauggagaagaacgucaccgucacccacgcccaggacauccucgagaagacccacaacggcaagcucugcgaccucgacggcguccgcccccucauccuccgcgacugcuccgucgccggcuggcuccucggcaaccccaugugcgacgaguucaucaacguccccgagugguccuacaucgucgagaaggccaaccccgucaacgaccucugcuaccccggcgucuucaacgacuacgaggagcucaagcaccuccucucccgcaucaaccacuucgagaagauccagaucauccccaagaacuccuggcccucccacgaggccucccucggcgucuccgccgccugccccuaccagggccaguccuccuucuuccgcaacgucgucuggcucaucaagaagaacaacaccuaccccaccaucaagcgcuccuacaacaacaccaaccaggaggaccuccucgucauguggggcauccaccaccccaacgacgccgucgagcagaccaagcucuaccagaaccccaccaccuacaucuccgucggcaccuccacccucaaccagcgccucaccccccgcaucgccacccgcuccaaggucaagggccucuccggccgcauggaguucuucuggaccauccucaagcccaacgacgccaucaacuucgaguccaacggcaacuucaucgcccccgaguacgccuacaagaucgucaagaagggcgacuccaccaucaugcgcuccgagcucgaguacggcaacugcaacaccaagugccagacccccaugggcgccaucaacuccuccaugcccuuccacaacauccacccccucaccaucggcgagugccccaaguacgucaaguccacccgccucguccucgccaccggccuccgcaacuccccccagcgcgaggagcgccgcaagaagcgcggccucuucggcgccaucgccggcuucaucgagggcggcuggcagggcauggucgacggcugguacggcuaccaccacuccaacgagcagggcuccggcuacgccgccgacaaggaguccacccagaaggccaucgacggcgucaccaacaaggucaacuccaucaucgacaagaugaacacccaguucgaggccgucggccgcgaguucaacaaccucgagcgccgcaucgagaaccucaacaagaagauggaggacggcuuccucgacgucuggaccuacaacgccgagcuccucguccucauggagaacgagcgcacccucgacuuccacgacuccaacgucaagaaccucuacgacaagguccgccuccagcuccgcgacaacgccaaggagcucggcaacggcugcuucgaguucuaccacaagugcgacaacaagugcauggaguccguccgcaacggcaccuacgacuacccccaguacuccgaggaggcccgccucaagcgcgaggagaucuccggcgucaagcucgaguccaucggcgucuaccagauccucuccaucuacuccaccgucgccuccucccucgcccucgccaucauggucgccggccucucccucuggaugugcuccaacggcucccuccagugccgcaucugcaucuga

SEQ ID NO: 110019 - RNA, 1707 nt, Artificial Sequence
  derived and/or modified CDS sequence (opt2) from hemagglutinin__InfluenzaA__ABQ45850
auggagaagaucguccuccuccucgccaucgucucccucgucaaguccgaccagaucugcaucggcuaccacgccaacaacuccaccgagcaggucgacaccaucauggagaagaacgucaccgucacccacgcccaggacauccucgagaagacccacaacggcaagcucugcgaccucgacggcgucaagccccucauccuccgcgacugcuccgucgccggcuggcuccucggcaaccccaugugcgacgaguuccucaacguccccgagugguccuacaucgucgagaagaucaaccccgccaacgaccucugcuaccccggcaacuucaacgacuacgaggagcucaagcaccuccucucccgcaucaaccacuucgagaagauccagaucauccccaaguccuccugguccgaccacgaggccuccuccggcgucuccuccgccugccccuaccagggccgcuccuccuucuuccgcaacgucgucuggcucaucaagaagaacgacgccuaccccaccaucaagcgcuccuacaacaacaccaaccaggaggaccuccucguccucuggggcauccaccaccccaacgacgccgccgagcagacccgccucuaccagaaccccaccaccuacaucuccgucggcaccuccacccucaaccagcgccucguccccaagaucgccacccgcuccaaggucaacggccaguccggccgcauggaguucuucuggaccauccucaagcccaacgacgccaucaacuucgaguccaacggcaacuucaucgcccccgagaacgccuacaagaucgucaagaagggcgacuccaccaucaugaaguccgagcucgaguacggcaacugcaacaccaagugccagacccccaucggcgccaucaacuccuccaugcccuuccacaacauccacccccucaccaucggcgagugccccaaguacgucaaguccaaccgccucguccucgccaccggccuccgcaacuccccccagggcgagcgccgccgcaagaagcgcggccucuucggcgccaucgccggcuucaucgagggcggcuggcagggcauggucgacggcugguacggcuaccaccacuccaacgagcagggcuccggcuacgccgccgacaaggaguccacccagaaggccaucgacggcgucaccaacaaggucaacuccaucaucgacaagaugaacacccaguucgaggccgucggccgcgaguucaacaaccucgagcgccgcaucgagaaccucaacaagaagauggaggacggcuuccucgacgucuggaccuacaacgccgagcuccucguccucauggagaacgagcgcacccucgacuuccacgacuccaacgucaagaaccucuacgacaagguccgccuccagcuccgcgacaacgccaaggagcucggcaacggcugcuucgaguucuaccaccgcugcgacaacgagugcauggaguccguccgcaacggcaccuacgacuacccccaguacuccgaggaggcccgccucaagcgcgaggagaucuccggcgucaagcucgaguccaucggcaccuaccagauccucuccaucuacuccaccgucgccuccucccucgcccucgccaucauggucgccggccucucccucuggaugugcuccaacggcucccuccagugccgcaucugcaucuga

SEQ ID NO: 110020 - RNA, 1713 nt, Artificial Sequence
  derived and/or modified CDS sequence (opt2) from hemagglutinin__InfluenzaA__AKI82373
auggagaagaucgucccccuccucgccaucaucggccucgucaaguccgaccagaucugcaucggcuaccacgccaacaacuccaccgagcaggucgacaccaucauggagaagaacgucaccgucacccacgcccaggacauccucgagaagacccacaacggcaagcucugcaaccucgacggcgucaagccccucauccucaaggacugcuccgucgccggcuggcuccucggcaaccccaugugcgacgaguuccucaacgucuccgagugguccuacaucgucgagaaggccucccccgccaacggccucugcuaccccggcgacuucaacgacuacgaggagcucaagcaccuccucaaccgcaucacccaccucaagaagaucaagaucauccccaaguccuacugguccaaccacgaggccuccuccggcgucuccgccgccugcuccuacaugggcgagcccuccuucuuccgcaacgucgucuggcucaucaagaagaacaacaccuacccccccaucaaggucaacuacaccaacaccaaccaggaggaccuccucguccucuggggcauccaccaccccaacaacgaggccgagcagauccagaucuaccagaaccucaucacccacaucuccgucggcaccuccacccucaaccagcgccucauccccaagaucgccacccgcuccaaggucaacggccaguccggccgcauggaguucuucuggaccauccucaagcccaacgacuccaucaacuucgacuccaacggcaacuucaucgcccccgaguacgccuacaucgucaagaagggcgacuccgccaucaugaaguccgagcucgaguacggcaacugcaacaccaagugccagacccccaugggcgccaucaacuccuccaugcccuuccacaacauccacccccucaccaucggcgagugccccaaguacgucaaguccaaccgccucguccucgccaccggccuccgcaacgccccccagcgcgagcgcgagggcggccgccgccgcaagcgcggccucuucggcgccaucgccggcuucaucgagggcggcuggcagggcauggucgacggcugguacggcuaccaccacuccaacgagcagggcuccggcuacgccgccgacaaggaguccacccagaaggccaucgacggcaucaccaacaaggucaacuccaucaucgacaagaugaacacccaguucgaggccgucggccgcgaguucaacaaccucgagcgccgcaucgagaaccucaacaagaagauggaggacggcuuccucgacgucuggaccuacaacgccgagcuccucguccucauggagaacgagcgcacccucgacuuccacgacuccaacgucaagaaccucuacgagaagguccgccuccagcuccgcgacaacgccaaggagcucggcaacggcugcuucgaguucuaccacaagugcgacaacgagugcauggaguccguccgcaacggcaccuacgacuacucccaguacuccgaggaggcccgccucucccgcgaggagaucaacggcgucaagcucgaguccauggucaccuaccagauccucuccaucuacuccaccgucgccuccucccucgcccucgccaucauggucgccggccucucccucuggaugugcuccaacggcucccuccagugccgcaucugcaucuga

SEQ ID NO: 110021 - RNA, 1713 nt, Artificial Sequence
  derived and/or modified CDS sequence (opt2) from hemagglutinin__InfluenzaA__EPI284473
auggagaagaucguccuccuccucgccaucaucucccucgucaaguccgaccagaucugcaucggcuaccacgccaacaacuccaccgagcaggucgacaccaucauggagaagaacgucaccgucacccacgcccaggacauccucgagaagacccacaacggcaagcucugcaaccucgacggcgucaagccccucauccucaaggacugcuccgucgccggcuggcuccucggcaaccccaugugcgacgaguuccucaacgucuccgagugguccuacaucgucgagaaggccucccccgccaacggccucugcuaccccggcgacuucaacgacuacgaggagcucaagcaccuccucaaccgcaucacccaccucaagaagaucaagaucauccccaaguccuacugguccaaccacgaggccuccuccggcgucuccgccgccugcuccuacaugggcgagcccuccuucuuccgcaacgucgucuggcucaucaagaagaacaacaccuacccccccaucaaggucaacuacaccaacaccaaccaggaggaccuccucguccucuggggcauccaccaccccaacaacgaggccgagcagauccagaucuaccagaaccucaucacccacaucuccgucggcaccuccacccucaaccagcgccucauccccaagaucgccacccgcuccaaggucaacggccaguccggccgcauggaguucuucuggaccauccucaagcccaacgacuccaucaacuucgacuccaacggcaacuucaucgcccccgaguacgccuacaucgucaagaagggcgacuccgccaucaugaaguccgagcucgaguacggcaacugcaacaccaagugccagacccccaugggcgccaucaacuccuccaugcccuuccacaacauccacccccucaccaucggcgagugccccaaguacgucaaguccaaccgccucguccucgccaccggccuccgcaacgccccccagcgcgagcgcgagggcggccgccgccgcaagcgcggccucuucggcgccaucgccggcuucaucgagggcggcuggcagggcauggucgacggcugguacggcuaccaccacuccaacgagcagggcuccggcuacgccgccgacaaggaguccacccagaaggccaucgacggcaucaccaacaaggucaacuccaucaucgacaagaugaacacccaguucgaggccgucggccgcgaguucaacaaccucgagcgccgcaucgagaaccucaacaagaagauggaggacggcuuccucgacgucuggaccuacaacgccgagcuccucguccucauggagaacgagcgcacccucgacuuccacgacuccaacgucaagaaccucuacgagaagguccgccuccagcuccgcgacaacgccaaggagcucggcaacggcugcuucgaguucuaccacaagugcgacaacgagugcauggaguccguccgcaacggcaccuacgacuacucccaguacuccgaggaggcccgccucucccgcgaggagaucaacggcgucaagcucgaguccauggucaccuaccagauccucuccaucuacuccaccgucgccuccucccucgcccucgccaucauggucgccggccucucccucuggaugugcuccaacggcucccuccagugccgcaucugcaucuga

SEQ ID NO: 110022 - RNA, 1710 nt, Artificial Sequence
  derived and/or modified CDS sequence (opt2) from hemagglutinin__InfluenzaA__ACO07033
auggagaagaucguccuccuccucgccaugaucggccucgucaaguccgaccagaucugcaucggcuaccacgccaacaacuccaccgagcaggucgacaccaucauggagaagaacgucaccgucacccacgcccaggacauccucgagaagacccacaacggcaagcucugcaaccucgacggcgucaagccccucauccucaaggacugcuccgucgccggcuggcuccucggcaaccccaugugcgacgaguuccucaacgucuccgagugguccuacaucgucgagaaggccucccccgccaacggccucugcuaccccggcgacuucaacgacuacgaggagcucaagcaccuccucucccgcaucaaccaccucaagaagaucaagaucauccccaaguccuacugguccaaccacgaggccuccuccggcgucuccgccgccugcuccuaccucggcgagcccuccuucuuccgcaacgucgucuggcucaucaagaagaacaacaccuacccccccaucaaggucaacuacaccaacaccaaccaggaggaccuccucguccucuggggcauccaccaccccaacgacgagaaggagcagauccgcaucuaccagaaccccaacaccuccaucuccgucggcaccuccacccucaaccagcgccucguccccaagaucgccacccgccccaaggucaacggccaguccggccgcauggaguucuucuggaccauccucaagcccaacgacuccaucaacuucgacuccaacggcaacuucaucgcccccgaguacgccuacaagaucgccaagaagggcgacuccgucaucaugaaguccgagcucgaguacggcaacugcaacaccaagugccagacccccaugggcgccaucaacuccuccaugcccuuccacaacauccacccccucaccaucggcgagugccccaaguacgucaaguccaaccgccucguccucgccaccggccuccgcaacgccccccagcgcgagggcggccgccgccgcaagcgcggccucuucggcgccaucgccggcuucaucgagggcggcuggcagggcauggucgacggcugguacggcuaccaccacuccaacgagcagggcuccggcuacgccgccgacaaggaguccacccagaaggccaucgacggcaucaccaacaaggucaacuccaucaucgacaagaugaacacccaguucgagaucgucggccgcgaguucaacaaccucgagcgccgcaucgagaaccucaacaagaagauggaggacggcuuccucgacgucuggaccuacaacgccgagcuccucguccucauggagaacgagcgcacccucgacuuccacgacuccaacgucaagaaccucuacgagaagguccgccuccagcuccgcgacaacgccaaggagcucggcaacggcugcuucgaguucuaccacaagugcgacaacgagugcauggaguccguccgcaacggcaccuacgacuacccccaguacuccgaggaggcccgccucucccgcgaggagaucuccggcgucaagauggaguccauggucaccuaccagauccucuccaucuacuccaccgucgccuccucccucgcccucgccaucauggucgccggccucucccucuggaugugcuccaacggcucccuccagugccgcaucugcaucuga

SEQ ID NO: 110023 - RNA, 1695 nt, Artificial Sequence
  derived and/or modified CDS sequence (opt2) from hemagglutinin__InfluenzaA__EPI174803
auggagaagaucguccuccuccucgccaugaucggccucgucaaguccgaccagaucugcaucggcuaccacgccaacaacuccaccgagcaggucgacaccaucauggagaagaacgucaccgucacccacgcccaggacauccucgagaagacccacaacggcaagcucugcaaccucgacggcgucaagccccucauccucaaggacugcuccgucgccggcuggcuccucggcaaccccaugugcgacgaguuccucaacgucuccgagugguccuacaucgucgagaaggccucccccgccaacggccucugcuaccccggcgacuucaacgacuacgaggagcucaagcaccuccucucccgcaucaaccaccucaagaagaucaagaucauccccaaguccuacugguccaaccacgaggccuccuccggcgucuccgccgccugcuccuaccucggcgagcccuccuucuuccgcaacgucgucuggcucaucaagaagaacaacaccuacccccccaucaaggucaacuacaccaacaccaaccaggaggaccuccucguccucuggggcauccaccaccccaacgacgagaaggagcagauccgcaucuaccagaaccccaacaccuccaucuccgucggcaccuccacccucaaccagcgccucguccccaagaucgccacccgccccaaggucaacggccaguccggccgcauggaguucuucuggaccauccucaagcccaacgacuccaucaacuucgacuccaacggcaacuucaucgcccccgaguacgccuacaagaucgccaagaagggcgacuccgucaucaugaaguccgagcucgaguacggcaacugcaacaccaagugccagacccccaugggcgccaucaacuccuccaugcccuuccacaacauccacccccucaccaucggcgagugccccaaguacgucaaguccaaccgccucguccucgccaccggccuccgcaacgccccccagaccgagacccgcggccucuucggcgccaucgccggcuucaucgagggcggcuggcagggcauggucgacggcugguacggcuaccaccacuccaacgagcagggcuccggcuacgccgccgacaaggaguccacccagaaggccaucgacggcaucaccaacaaggucaacuccaucaucgacaagaugaacacccaguucgagaucgucggccgcgaguucaacaaccucgagcgccgcaucgagaaccucaacaagaagauggaggacggcuuccucgacgucuggaccuacaacgccgagcuccucguccucauggagaacgagcgcacccucgacuuccacgacuccaacgucaagaaccucuacgagaagguccgccuccagcuccgcgacaacgccaaggagcucggcaacggcugcuucgaguucuaccacaagugcgacaacgagugcauggaguccguccgcaacggcaccuacgacuacccccaguacuccgaggaggcccgccucucccgcgaggagaucuccggcgucaagauggaguccauggucaccuaccagauccucuccaucuacuccaccgucgccuccucccucgcccucgccaucauggucgccggccucucccucuggaugugcuccaacggcucccuccagugccgcaucugcaucuga

SEQ ID NO: 110024 - RNA, 1704 nt, Artificial Sequence
  derived and/or modified CDS sequence (opt2) from hemagglutinin__InfluenzaA__AGZ62382
auggagaagaucguccuccucuucgccgccaucucccucgucaaguccgaccacaucugcaucggcuaccacgccaacaacuccaccaagcaggucgacaccaucauggagaagaacgucaccgucacccacgcccaggacauccucgagaagacccacaacggcaagcucugcgaccucaacggcgucaagccccucauccucaaggacugcuccgucgccggcuggcuccucggcaaccccaugugcgacgaguucaucaacguccccgagugguccuacaucgucgagaaggccaaccccgccaacggccucugcuaccccggcaacuucaacgacuacgaggagcucaagcaccuccucucccgcaucaaccacuucgagaagauccgcaucauccccaaggacuccugguccgaccacgaggccucccucggcgucuccgccgccugccccuaccagggcaacuccuccuucuuccgcaacgucgucuggcucaucaagaaggacaacaccuaccccaccaucaagaaguccuacaacaacaccaaccaggaggaccuccucauccucuggggcauccaccaccccaacgacgaggccgagcagacccgccucuaccagaaccccaccaccuacaucuccaucggcaccuccacccucaaccagcgccucguccccaagaucgccacccgcuccaagaucaacggccaguccggccgcaucgacuucuucuggaccauccucaagcccaacgacgccauccacuucgaguccaacggcaacuucaucgcccccgaguacgccuacaagaucgucaagaagggcgacuccaccaucaugaaguccgaggucgaguacggcaacugcaacacccgcugccagacccccaucggcgccaucaacuccuccaugcccuuccacaacauccacccccucaccaucggcgagugccccaaguacgucaaguccaacaagcucguccucgccaccggccuccgcaacuccccccagcgcgagcgccgccgcaagcgcggccucuucggcgccaucgccggcuucaucgagggcggcuggcagggcauggucgacggcugguacggcuaccaccacuccaacgagcagggcuccggcuacgccgccgacaaggaguccacccagaaggccaucgacggcgucaccaacaaggucaacuccaucaucgacaagaugaacacccaguucgaggccgucggccgcgaguucaacaaccucgagcgccgcaucgagaaccucaacaagaagauggaggacggcuuccucgacgucuggaccuacaacgccgagcuccucguccucauggagaacgagcgcacccucgacuuccacgacuccaacguccgcaaccucuacgacaagguccgccuccagcucaaggacaacgccaaggagcucggcaacggcugcuucgaguucuaccacaagugcaacaacgagugcauggaguccguccgcaacggcaccuacgacuacccccaguacuccgaggaggcccgccuccgccgcgaggagaucuccggcgucaagcucgaguccaucggcaucuaccagauccucuccaucuacuccaccgucgccuccucccucguccucgccaucaugauggccggccucucccucuggaugugcuccaacggcucccuccagugccgcaucugcaucuga

SEQ ID NO: 110025 - RNA, 1704 nt, Artificial Sequence
  derived and/or modified CDS sequence (opt2) from hemagglutinin__InfluenzaA__ABG67978/m
auggagaagaucguccuccuccucgccaucgucucccucgucaaguccgaccagaucugcaucggcuaccacgccaacaacuccaccgagcaggucgacaccaucauggagaagaacgucaccgucacccacgcccaggacauccucgagaagacccacaacggcaagcucugcgaccucgacggcgucaagccccucauccuccgcgacugcuccgucgccggcuggcuccucggcaaccccaugugcgacgaguucaucaacguccccgagugguccuacaucgucgagaaggccaaccccgccaacgaccucugcuaccccggcaacuucaacgacuacgaggagcucaagcaccuccucucccgcaucaaccacuucgagaagauccagaucauccccaaguccuccugguccgaccacgaggccuccuccggcgucuccuccgccugccccuaccagggcacccccuccuucuuccgcaacgucgucuggcucaucaagaagaacaacaccuaccccaccaucaagcgcuccuacaacaacaccaaccaggaggaccuccucauccucuggggcauccaccacuccaacgacgccgccgagcagaccaagcucuaccagaaccccaccaccuacaucuccgucggcaccuccacccucaaccagcgccucguccccaagaucgccacccgcuccaaggucaacggccaguccggccgcauggacuucuucuggaccauccucaagcccaacgacgccaucaacuucgaguccaacggcaacuucaucgcccccgaguacgccuacaagaucgucaagaagggcgacuccgccaucaucaaguccgaggucgaguacggcaacugcaacaccaagugccagacccccaucggcgccaucaacuccuccaugcccuuccacaacauccacccccucaccaucggcgagugccccaaguacgucaaguccaacaagcucguccucgccaccggccuccgcaacuccccccuccgcgagcgccgccgcaagcgcggccucuucggcgccaucgccggcuucaucgagggcggcuggcagggcauggucgacggcugguacggcuaccaccacuccaacgagcagggcuccggcuacgccgccgacaaggaguccacccagaaggccaucgacggcgucaccaacaaggucaacuccaucaucgacaagaugaacacccaguucgaggccgucggccgcgaguucaacaaccucgagcgccgcaucgagaaccucaacaagaagauggaggacggcuuccucgacgucuggaccuacaacgccgagcuccucguccucauggagaacgagcgcacccucgacuuccacgacuccaacgucaagaaccucuacgacaagguccgccuccagcuccgcgacaacgccaaggagcucggcaacggcugcuucgaguucuaccacaagugcgacaacgagugcauggaguccguccgcaacggcaccuacgacuacccccaguacuccgaggaggcccgccucaagcgcgaggagaucuccggcgucaagcucgaguccaucggcaccuaccagauccucuccaucuacuccaccgucgccuccucccucgcccucgccaucauggucgccggccucucccucuggaugugcuccaacggcucccuccagugccgcaucugcaucuga

SEQ ID NO: 110026 - RNA, 1695 nt, Artificial Sequence
  derived and/or modified CDS sequence (opt2) from hemagglutinin__InfluenzaA__EPI827075
auggagaagaucguccuccucuucgccaccaucucccucgucaaguccgaccacaucugcaucggcuaccacgccaacaacuccaccgagcaggucgacaccaucauggagaagaacgucaccgucacccacgcccaggacauccucgagaagacccacaacggcaagcucugcgaccucaacggcgucaagccccucauccucaaggacugcuccgucgccggcuggcuccucggcaacccccucugcgacgaguucaccaacguccccgagugguccuacaucgucgagaaggccaaccccgccaacgaccucugcuaccccggcaacuucaacgacuacgaggagcucaagcaccuccucucccgcaucaaccacuucgagaagauccagaucauccccaaggacuccugguccgaccacgaggccucccucggcgucuccgccgccugcuccuaccagggcaacuccuccuucuuccgcaacgucgucuggcucaucaagaaggacaacgccuaccccaccaucaagaagggcuacaacaacaccaaccgcgaggaccuccucauccucuggggcauccaccaccccaacgacgaggccgagcagacccgccucuaccagaaccccaccaccuacaucuccaucggcaccuccacccucaaccagcgccucguccccaagaucgccacccgcuccaagaucaacggccaguccggccgcaucgacuucuucuggaccauccucaagcccaacgacgccauccacuucgaguccaacggcaacuucaucgcccccgaguacgccuacaagaucgucaagaagggcgacuccaccaucaugcgcuccgaggucgaguacggcaacugcaacacccgcugccagacccccaucggcgccaucaacuccuccaugcccuuccacaacauccacccccucaccaucggcgagugccccaaguacgucaaguccaacaagcucguccucgccaccggccuccgcaacuccccccagcgcgagacccgcggccucuucggcgccaucgccggcuucaucgagggcggcuggcagggcauggucgacggcugguacggcuaccaccacuccaacgagcagggcuccggcuacgccgccgacaaggaguccacccagaaggccaucgacggcgucaccaacaaggucaacuccaucaucgacaagaugaacacccaguucgaggccgucggccgcgaguucaacaaccucgagcgccgcaucgagaaccucaacaagaagauggaggacggcuuccucgacgucuggaccuacaacgccgagcuccucguccucauggagaacgagcgcacccucgacuuccacgacuccaacgucaagaaccucuacgacaagguccgccuccagcucaaggacaacgccaaggagcucggcaacggcugcuucgaguucuaccacaagugcaacaacgagugcauggaguccguccgcaacggcaccuacgacuacccccaguacuccgaggaggcccgccucaagcgcgaggagaucuccggcgucaagcucgaguccaucggcaucuaccagauccucuccaucuacuccaccgucgccuccucccucguccucgccaucaugauggccggccucucccucuggaugugcuccaacggcucccuccagugccgcaucugcaucuga

SEQ ID NO: 110027 - RNA, 1707 nt, Artificial Sequence
  derived and/or modified CDS sequence (opt2) from hemagglutinin__InfluenzaA__ABP96850
auggagaagaucguccuccuccucgccaucgucucccucgucaaguccgaccagaucugcaucggcuaccacgccaacaacuccaccgagcaggucgacaccaucauggagaagaacgucaccgucacccacgcccaggacauccucgagaagacccacaacggcaagcucugcgaccucgacggcgucaagccccucauccuccgcgacugcuccgucgccggcuggcuccucggcaaccccaugugcgacgaguuccucaacguccccgagugguccuacaucgucgagaagaucaaccccgccaacgaccucugcuaccccggcgacuucaacgacuacgaggagcucaagcaccuccucucccgcaucaaccacuucgagaagauccagaucauccccaaguccuccugguccgacuacgaggccuccuccggcgucuccuccgccugccccuaccagggccgcuccuccuucuuccgcaacgucgucuggcucaucaagaagaacaacgccuaccccaccaucaagcgcuccuacaacaacaccaaccaggaggaccuccucguccucuggggcauccaccaccccaacgacgccgccgagcagauccgccucuaccagaaccccaccaccuacaucuccgucggcaccuccacccucaaccagcgccucguccccaagaucgccacccgcuccaaggucaacggccaguccggccgcauggaguucuucuggaccauccucaaguccaacgacgccaucaacuucgaguccaacggcaacuucaucgcccccgaguacgccuacaagaucgucaagaagggcgacuccaccaucaugaaguccgagcucgaguacggcaacugcaacaccaagugccagacccccaucggcgccaucaacuccuccaugcccuuccacaacauccacccccucaccaucggcgagugccccaaguacgucaaguccaaccgccucguccucgccaccggccuccgcaacuccccccagggcgagcgccgccgccgcaagcgcggccucuucggcgccaucgccggcuucaucgagggcggcuggcagggcauggucgacggcugguacggcuaccaccacuccaacgagcagggcuccggcuacgccgccgacaaggaguccacccagaaggccaucgacggcgucaccaacaaggucaacuccaucaucaacaagaugaacacccaguucgaggccgucggccgcgaguucaacaaccucgagcgccgcaucgagaaccucaacaagaagauggaggacggcuuccucgacgucuggaccuacaacgccgagcuccucguccucauggagaacgagcgcacccucgacuuccacgacuccaacgucaagaaccucuacgacaagguccgccuccagcuccgcgacaacgccaaggagcucggcaacggcugcuucgaguucuaccaccgcugcgacaacgagugcauggaguccguccgcaacggcaccuacgacuacccccaguacuccgaggaggcccgccucaagcgcgaggagaucuccggcgucaagcucgaguccaucggcaucuaccagauccucuccaucuacuccaccgucgccuccucccucgcccucgccaucauggucgccggccucuuccucuggaugugcuccaacggcucccuccagugccgcaucugcaucuga

SEQ ID NO: 110028 - RNA, 1692 nt, Artificial Sequence
  derived and/or modified CDS sequence (opt2) from hemagglutinin__InfluenzaA__EPI827077
auggagaagaucguccuccuccucgccaucgucuccaucgucaaguccgaccagaucugcaucggcuaccacgccaacaacuccaccgagcaggucgacaccaucauggagaagaacgucaccgucacccacgcccaggacauccucgagaagacccacaacggcaagcucugcaaccucgacggcgucaagccccucauccuccgcgacugcuccgucgccggcuggcuccucggcaaccccaugugcgacgaguuccucaacguccccgagugguccuacaucgucgagaagaucaaccccgccaacgaccucugcuaccccggcaacuucaacgacuacgaggagcucaagcaccuccucucccgcaucaaccacuucgagaagauccagaucauccccaaggacuccugguccgaccacgaggccuccggcgucuccuccgccugccccuaccagggccgcuccuccuucuuccgcaacgucgucuggcucaccaagaagaacgacgccuaccccaccaucaagaaguccuacaacaacaccaaccaggaggaccuccucguccucuggggcauccaccaccccaacgacgccgccgagcagacccgccucuaccagaaccccaccaccuacaucuccgucggcaccuccacccucaaccagcgccucguccccaagaucgccacccgcuccaaggucaacggccaguccggccgcauggaguucuucuggaccauccucaaguccaacgacgccaucaacuucgaguccaacggcaacuucaucgcccccgagaacgccuacaagaucgucaagaagggcgacuccaccaucaugaaguccgagcucgaguacuccaacugcaacaccaagugccagacccccaucggcgccaucaacuccuccaugcccuuccacaacauccacccccucaccaucggcgagugccccaaguacgucaaguccaaccgccucguccucgccaccggccuccgcaacuccccccagcgcgagacccgcggccucuucggcgccaucgccggcuucaucgagggcggcuggcagggcauggucgacggcugguacggcuaccaccacuccaacgagcagggcuccggcuacgccgccgacaaggaguccacccagcgcgccaucgacggcgucaccaacaaggucaacuccaucaucgacaagaugaacacccaguucgaggccgucggccgcgaguucaacaaccucgagcgccgcaucgagaaccucaacaagaagauggaggacggcuuccucgacgucuggaccuacaacgccgagcuccucguccucauggagaacgagcgcacccucgacuuccacgacuccaacgucaagaaccucuacgacaagguccgccuccagcuccgcgacaacgccaaggagcucggcaacggcugcuucgaguucuaccaccgcugcgacaacgagugcauggaguccguccgcaacggcaccuacgacuacccccaguacuccgaggaggcccgccucaagcgcgaggagaucuccggcgucaagcucgaguccaucggcaccuaccagauccucuccaucuacuccaccgucgccuccucccucgcccucgccaucauggucgccggccucucccucuggaugugcuccaacggcucccuccagugccgcaucugcaucuga

SEQ ID NO: 110029 - RNA, 1704 nt, Artificial Sequence
  derived and/or modified CDS sequence (opt2) from hemagglutinin__InfluenzaA__EPI594523
auggagaagaucauccuccuccucgccaucaucggccucgucaaguccgaccagaucugcgucggcuaccacgccaacaacuccaccgagcgcgucgacaccaucauggagaagaacgucaccgucacccacgcccaggacauccucgagaagacccacaacggcaagcucugcaaccucaacggcgucaagccccucauccucgaggacugcuccgucgccggcuggcuccucggcaaccccaugugcgacaaguuccucaacgucuccgagugguccuacaucgucgagaaggccggccccgccaacggccucugcuaccccggcgacuucaacgacuacgaggagcucaagcaccuccucucccgcaucaaccacuucgagaagaucgagaucauccccaagaaccacugguccaaccacaacaccuccggcgucuccuccgccugcuccuaccucgagaaccccuccuucuuccgcaacgucgucuggcucaccaagaagaacaacaccuaccccaccaucaaggucaacuacaccaacgccaaccagaaggaccuccucguccucuggggcauccaccaccccaacaacgaggccgagcagaagaugaucuaccagaacuccaacaccuacgucuccgucggcaccuccacccucaaccagcgccucguccccaagaucgccacccgcuccaaggucaacggccaguccggccgcaucgacuucuucuggaccauccucaagcccaacgacaccaucaacuucgacuccaacggcaacuucaucgcccccaaguacgccuacaagaucgucaagaagggcgacuccgccaucaugaaguccgagcucaaguacgacaacugcaacaccaagugccagacccccaucggcgccaucaacuccuccaugcccuuccacaacauccacccccucaccaucggcgagugccccaaguacgucaaguccaaccgccucguccucgccaccggccuccgcaacgccccccagaucgagggccgccgccgcaagcgcggccucuucggcgccaucgccggcuucaucgagggcggcuggcagggcauggucgacggcugguacggcuaccaccacuccaacgagcagggcuccggcuacgccgccgacaaggaguccacccagaaggccgucgacggcaucaccaacaagaucaacuccaucaucgacaagaugaacaaccaguucgaggccgucggccgcgaguucaacaaccucgagcgccgcaucgagaaccucaacaagaagauggaggacggcuuccucgacgucuggaccuacaacgccgagcuccucguccucauggagaacgagcgcacccucgacuuccacgacuccaacgucaagaaccucuacgagaagguccgccuccagcuccgcgacaacgccaaggagcucggcaacggcugcuucgaguucuaccacaagugcgacaacgagugcauggaguccgucaagaacggcaccuacgacuacccccaguacuccgaggaggcccgccucaaccgcgaggagaucuccggcgucaagcucgaguccaccgucaccuaccagauccucuccaucuacuccaccgucgccuccucccucguccucgccaucauggucgccggccucucccucuggaugugcuccaacggcucccuccagugccgcaucugcaucuga

SEQ ID NO: 110030 - RNA, 1707 nt, Artificial Sequence
  derived and/or modified CDS sequence (opt2) from hemagglutinin__InfluenzaA__AAD37782
auggagcgcaucguccuccuccucgccaucgucucccucgucaaguccgaccagaucugcaucggcuaccacgccaacaacuccaccgagcaggucgacaccaucauggagaagaacgucaccgucacccacgcccaggacauccucgagaagacccacaacggcaagcucugcgaccucaacggcgucaagccccucauccuccgcgacugcuccgucgccggcuggcuccucggcaaccccaugugcgacgaguucaucaacguccccgagugguccuacaucgucgagaaggccucccccgccaacgaccucugcuaccccggcgacuucaacgacuacgaggagcucaagcaccuccucucccgcaccaaccacuucgagaagauccagaucaucccccccuccuccugguccaaccacgacgccuccuccggcgucuccuccgccugccccuaccacggccgcuccuccuucuuccgcaacgucgucuggcucaucaagaagaacuccgccuaccccaccaucaagcgcuccuacaacaacaccaaccaggaggaccuccucguccucuggggcauccaccaccccaacgacgccgccgagcagaccaagcucuaccagaaccccaccaccuacaucuccgucggcaccuccacccucaaccagcgccucguccccgagaucgccacccgccccaaggucaacggccaguccggccgcauggaguucuucuggaccauccucaagcccaacgacgccaucaacuucgaguccaacggcaacuucaucgcccccgaguacgccuacaagaucgucaagaagggcgacuccgccaucaugaaguccgagcucgaguacggcaacugcaacaccaagugccagacccccaugggcgccaucaacuccuccaugcccuuccacaacauccacccccucaccaucggcgagugccccaaguacgucaaguccaaccgccucguccucgccaccggccuccgcaacaccccccagcgcgagcgccgccgcaagaagcgcggccucuucggcgccaucgccggcuucaucgagggcggcuggcagggcauggucaacggcugguacggcuaccaccacuccaacgagcagggcuccggcuacgccgccgacaaggaguccacccagaaggccaucgacggcgucaccaacaaggucaacuccaucaucgacaagaugaacacccaguucgaggccgucggccgcgaguucaacaaccucgagcgccgcaucgagaaccucaacaagcagauggaggacggcuuccucgacgucuggaccuacaacgccgagcuccucguccucauggagaacgagcgcacccucgacuuccacgacuccaacgucaagcaccucuacgacaagguccgccuccagcuccgcgacaacgccaaggagcucggcaacggcugcuucgaguucuaccacaagugcgacaacgagugcauggaguccgucaagaacggcaccuacgacuacccccaguacuccgaggaggcccgccucaaccgcgaggagaucuccggcgucaagcucgaguccaugggcaccuaccagauccucuccaucuacuccaccgucgccuccucccucgcccucgccaucauggucgccggccucucccucuggaugugcuccaacggcucccuccagugccgcaucugcaucuga

SEQ ID NO: 110031 - RNA, 1707 nt, Artificial Sequence
  derived and/or modified CDS sequence (opt2) from hemagglutinin__InfluenzaA__AAD51927
auggagaagaucguccuccuccucgccaucgucucccucgucaaguccgaccagaucugcaucggcuaccacgccaacaacuccaccgagcaggucgacaccaucauggagaagaacgucaccgucacccacgcccaggacauccucgagaagacccacaacggcaagcucugcgaccucaacggcgucaagccccucauccuccgcgacugcuccgucgccggcuggcuccucggcaaccccaugugcgacgaguucaucaacguccccgagugguccuacaucgucgagaaggccucccccgccaacgaccucugcuaccccggcgacuucaacgacuacgaggagcucaagcaccuccucucccgcaccaaccacuucgagaagauccagaucauccccaaguccuccugguccaaccacgacgccuccuccggcgucuccuccgccugccccuaccacggccgcuccuccuucuuccgcaacgucgucuggcucaucaagaagaacuccgccuaccccaccaucaagcgcuccuacaacaacaccaaccaggaggaccuccucguccucuggggcauccaccaccccaacgacgccgccgagcagaccaagcucuaccagaaccccaccaccuacaucuccgucggcaccuccacccucaaccagcgccucguccccgagaucgccacccgccccaaggucaacggccaguccggccgcauggaguucuucuggaccauccucaagcccaacgacgccaucaacuucgaguccaacggcaacuucaucgcccccgaguacgccuacaagaucgucaagaagggcgacuccgccaucaugaaguccgagcucgaguacggcaacugcaacaccaagugccagacccccaugggcgccaucaacuccuccaugcccuuccacaacauccacccccucaccaucggcgagugccccaaguacgucaaguccaaccgccucguccucgccaccggccuccgcaacaccccccagcgcgagcgccgccgcaagaagcgcggccucuucggcgccaucgccggcuucaucgagggcggcuggcagggcauggucgacggcugguacggcuaccaccacuccaacgagcagggcuccggcuacgccgccgacaaggaguccacccagaaggccaucgacggcgucaccaacaaggucaacuccaucaucgacaagaugaacacccaguucgaggccgucggccgcgaguucaacaaccucgagcgccgcaucgagaaccucaacaagcagauggaggacggcuuccucgacgucuggaccuacaacgccgagcuccucguccucauggagaacgagcgcacccucgacuuccacgacuccaacgucaagaaccucuacgacaagguccgccuccagcuccgcgacaacgccaaggagcucggcaacggcugcuucgaguucuaccacaagugcgacaacgagugcauggaguccgucaagaacggcaccuacgacuacccccaguacuccgaggaggcccgccucaaccgcgaggagaucuccggcgucaagcucgaguccaugggcaccuaccagauccucuccaucuacuccaccgucgccuccucccucgcccucgccaucauggucgccggccucucccucuggaugugcuccaacggcucccuccagugccgcaucugcaucuga

SEQ ID NO: 110032 - RNA, 1704 nt, Artificial Sequence; identical to SEQ ID NO: 103753
  derived and/or modified CDS sequence (opt2) from hemagglutinin__InfluenzaA__AEO89181

SEQ ID NO: 110033 - RNA, 1707 nt, Artificial Sequence; identical to SEQ ID NO: 105207
  derived and/or modified CDS sequence (opt2) from hemagglutinin__InfluenzaA__AFM78567

SEQ ID NO: 110034 - RNA, 1707 nt, Artificial Sequence
  derived and/or modified CDS sequence (opt2) from hemagglutinin__InfluenzaA__ACR48872
auggagaagaucguccuccuccucgccaucgucucccucgucaaguccgaccagaucugcaucggcuaccacgccaacaacuccaccgagcaggucgacaccaucauggagaagaacgucaccgucacccacgcccaggacauccucgagaagacccacaacggcaagcucugcgaccucgacggcgucaagccccucauccuccgcgacugcuccgucgccggcuggcuccucggcaaccccaugugcgacgaguucaucaacguccccgagugguccuacaucgucgagaaggccaaccccaccaacgaccucugcuaccccggcuccuucaacgacuacgaggagcucaagcaccuccucucccgcaucaaccacuucgagaagauccagaucauccccaaguccuccugguccgaccacgaggccuccuccggcgucuccuccgccugccccuaccucggcucccccuccuucuuccgcaacgucgucuggcucaucaagaagaacuccaccuaccccaccaucaagaaguccuacaacaacaccaaccaggaggaccuccucguccucuggggcauccaccaccccaacgacgccgccgagcagaccaugcucuaccagaaccccaccaccuacaucuccaucggcaccuccacccucaaccagcgccucguccccaagaucgccacccgcuccaaggucaacggccaguccggccgcauggaguucuucuggaccauccucaagcccaacgacgccaucaacuucgaguccaacggcaacuucaucgcccccgaguacgccuacaagaucgucaagaagggcgacuccgccaucaugaaguccgagcucgaguacggcaacugcaacaccaagugccagacccccaugggcgccaucaacuccuccaugcccuuccacaacauccacccccucaccaucggcgagugccccaaguacgucaaguccaaccgccucguccucgccaccggccuccgcaacuccccccagcgcgagucccgccgcaagaagcgcggccucuucggcgccaucgccggcuucaucgagggcggcuggcagggcauggucgacggcugguacggcuaccaccacuccaacgagcagggcuccggcuacgccgccgacaaggaguccacccagaaggccaucgacggcgucaccaacaaggucaacuccaucaucgacaagaugaacacccaguucgaggccgucggccgcgaguucaacaaccucgagcgccgcaucgagaaccucaacaagaagauggaggacggcuuccucgacgucuggaccuacaacgccgagcuccucguccucauggagaacgagcgcacccucgacuuccacgacuccaacgucaagaaccucuacgacaagguccgccuccagcuccgcgacaacgccaaggagcucggcaacggcugcuucgaguucuaccacaagugcgacaacgagugcauggaguccauccgcaacggcaccuacaacuacccccaguacuccgaggaggcccgccucaagcgcgaggagaucuccggcgucaagcucgaguccaucggcaccuaccagauccucuccaucuacuccaccgucgccuccucccucgcccucgccaucaugauggccggccucucccucuggaugugcuccaacggcucccuccagugccgcaucugcaucuga

SEQ ID NO: 110035 - RNA, 1707 nt, Artificial Sequence; identical to SEQ ID NO: 105207
  derived and/or modified CDS sequence (opt2) from hemagglutinin__InfluenzaA__ABW06108

SEQ ID NO: 110036 - RNA, 1707 nt, Artificial Sequence
  derived and/or modified CDS sequence (opt2) from hemagglutinin__InfluenzaA__EPI341633
auggagaagaucacccuccuccucuccaucgucucccucgucaaguccgaccagaucugcaucggcuaccacgccaacaacuccaccgagcaggucgacaccaucauggagaagaacgucaccgucacccacgcccaggacauccucgagaagacccacaacggcaagcucugcgaccucgacggcgucaagccccucauccucaaggacugcuccgucgccggcuggcuccucggcaaccccaugugcgacgaguucaucaacguccccgagugguccuacaucgucgagaaggccaaccccaccaacgaccucugcuaccccggcuccuucaacgacuacgaggagcucaagcaccuccucucccgcaucaaccacuucgagaagauccagaucauccccaaguccuccugguccgaccacgaggccuccuccggcgucuccuccgccugccccuaccucggcucccccuccuucuuccgcaacgucgucuggcucaucaagaagaacuccaccuaccccaccaucaagaagaccuacaacaacaccaaccaggaggaccuccucauccucuggggcauccaccaccccaacaacggcgccgagcagaccaugcucuaccagaaccccaccaccuacaucuccaucggcaccuccacccucaaccagcgccucguccccaagaucgccacccgcuccaaggucaacggccaguccggccgcauggaguucuucuggaccauccucaagcccaacgacgccaucaacuucgaguccaacggcaacuucaucgcccccgaguacgccuacaagaucgucaagaagggcgacuccgccaucaugaaguccgagcucgaguacggcaacugcaacaccaagugccagacccccaugggcgccaucaacuccuccaugcccuuccacaacauccaccccaucaccaucggcgagugccccaaguacgucaaguccaaccgccucguccucgccaccggccuccgcaacuccccccagcgcgagucccgccgcaagaagcgcggccucuucggcgccaucgccggcuucaucgagggcggcuggcagggcauggucgacggcugguacggcuaccaccacuccaacgagcagggcuccggcuacgccgccgacaaggaguccacccagaaggccaucgacggcgucaccaacaaggucaacuccaucaucgacaagaugaacacccaguucgaggccgucggccgcgaguucuccaaccucgagcgccgcaucgagaaccucaacaagaagauggaggacggcuuccucgacgucuggaccuacaacgccgagcuccucguccucauggagaacgagcgcacccucgacuuccacgacuccaacgucaagaaccucuacgacaagguccgccuccagcuccgcgacaacgccaaggagcucggcaacggcugcuucgaguucuaccacaagugcgacaacgagugcauggaguccauccgcaacggcaccuacaacuacccccaguacuccgaggaggcccgccucaagcgcgaggagaucuccggcgucaagcucgaguccaucggcaccuaccagauccucuccaucuacuccaccgucgccuccucccucgcccucgccaucaugaucgccggccucucccucuggaugugcuccaacggcucccuccagugccgcaucugcaucuga

SEQ ID NO: 110037 - RNA, 1707 nt, Artificial Sequence
  derived and/or modified CDS sequence (opt2) from hemagglutinin__InfluenzaA__ABD95991
auggagaagaucaugcuccuccucgccaucgucucccucgucaaguccgaccagaucugcaucggcuaccacgccaacaacuccaccgagcaggucgacaccaucauggagaagaacgucaccgucacccacgcccaggacauccucgagaagacccacaacggcaagcucugcgaccucgacggcgucaagccccucauccuccgcgacugcuccgucgccggcuggcuccucggcaaccccaugugcgacgaguuccucaacguccccgagugguccuacaucgucgagaagaucaaccccgccaacgaccucugcuaccccggcaacuucaacgacuacgaggagcucaagcaccuccucucccgcaucaaccacuucgagaagauccagaucauccccaaguccuccugguccgaccacgaggccuccuccggcgucuccuccgccugccccuaccagggccgcuccuccuucuuccgcaacgucgucuggcucaucaagaaggacaacgccuaccccaccaucaagcgcuccuacaacaacaccaaccaggaggaccuccucguccucuggggcauccaccaccccaacgacgccgccgagcagacccgccucuaccagaaccccaccaccuacaucuccgucggcaccuccacccucaaccagcgccucguccccaagaucgccacccgcuccaaggucaacggccaguccggccgcauggaguucuucuggaccauccucaagcccaacgacgccaucaacuucgaguccaacggcaacuucaucgcccccgagaacgccuacaagaucgucaagaagggcgacuccaccaucaugaaguccgagcucgaguacggcaacugcaacaccaagugccagacccccaucggcgccaucaacuccuccaugcccuuccacaacauccacccccucaccaucggcgagugccccaaguacgucaaguccaaccgccucguccucgccaccggccuccgcaacuccccccagggcgagcgccgccgcaagaagcgcggccucuucggcgccaucgccggcuucaucgagggcggcuggcagggcauggucgacggcugguacggcuaccaccacuccaacgagcagggcuccggcuacgccgccgacaaggaguccacccagaaggccaucgacggcgucaccaacaaggucaacuccaucaucgacaagaugaacacccaguucgaggccgucggccgcgaguucaacaaccucgagcgccgcaucgagaaccucaacaagaagauggaggacggcuuccucgacgucuggaccuacaacgccgagcuccucguccucauggagaacgagcgcacccucgacuuccacgacuccaacgucaagaaccucuacgacaagguccgccuccagcuccgcgacaacgccaaggagcucggcaacggcugcuucgaguucuaccaccgcugcgacaacgagugcauggaguccguccgcaacggcaccuacgacuacccccaguacuccgaggaggcccgccucaagcgcgaggagaucuccggcgucaagcucgaguccaucggcaccuaccagauccucuccaucuacuccaccgucgccuccucccucgcccucgccaucauggucgccggccucucccucuggaugugcuccaacggcucccuccagugccgcaucugcaucuga

SEQ ID NO: 110038 - RNA, 1707 nt, Artificial Sequence
  derived and/or modified CDS sequence (opt2) from hemagglutinin__InfluenzaA__AGN69453
auggagaagaucguccuccuccucgccaucgucucccucgucaaguccgaccagaucugcaucggcuaccacgccaacaacuccaccgagcaggucgacaccaucauggagaagaacgucaccgucacccacgcccaggacauccucgagaagacccacaacggcaagcucugcgaccucgacggcgucaagccccucauccuccgcgacugcuccgucgccggcuggcuccucggcaaccccaugugcgacgaguuccucaacguccccgagugguccuacaucgucgagaagaucaaccccgccaacgaccucugcuaccccggcaacuucaacgacuacgaggagcucaagcaccuccucucccgcaucaaccacuucgagaagauccagaucauccccaaguccuccugguccgaccacgaggccuccgccggcgucuccuccgccugccccuaccagggcauguccuccuucuuccgcaacgucgucuggcucaucaagaaggacaacgccuaccccaccaucaagcgcuccuacaacaacaccaaccaggaggaccuccucguccucuggggcauccaccaccccaacgacgccgccgagcagaccaagcucuaccagaacuccaccaccuacaucuccgucggcaccuccacccucaaccagcgccucguccccaagaucgccacccgcuccaaggucaacggccaguccggccgcaucgaguucuucuggaccauccucaagcccaacgacaccaucaacuucgaguccaacggcaacuucaucgcccccgagaacgccuacaagaucgucaagaagggcgacuccaccaucaugaaguccgagcucgaguacggcaacugcaacaccaagugccagacccccaucggcgccaucaacuccuccaugcccuuccacaacauccacccccucaccaucggcgagugccccaaguacgucaaguccucccgccucguccucgccaccggccuccgcaacuccccccagggcgagcgccgccgcaagaagcgcggccucuucggcgccaucgccggcuucaucgagggcggcuggcagggcauggucgacggcugguacggcuaccaccacuccaacgagcagggcuccggcuacgccgccgacaaggaguccacccagaaggccaucgacggcgucaccaacaaggucaacuccaucaucgacaagaugaacacccaguucgaggccgucggccgcgaguucaacaaccucgagcgccgcaucgagaaccucaacaagaagauggaggacggcuuccucgacgucuggaccuacaacgccgagcuccucguccucauggagaacgagcgcacccucgacuuccacgacuccaacgucaagaaccucuacgacaagguccgccuccagcuccgcgacaacgccaaggagcucggcaacggcugcuucgaguucuaccaccgcugcgacaacgagugcauggaguccguccgcaacggcaccuacgacuacccccaguacuccgaggaggcccgccucaagcgcgaggagaucuccggcgucaagcucgaguccaucggcaccuaccagauccucuccaucuacuccaccgucgccuccucccucgcccucgccaucauggucgccggccucucccucuggaugugcuccaacggcucccuccagugccgcaucugcaucuga

SEQ ID NO: 110039 - RNA, 1707 nt, Artificial Sequence
  derived and/or modified CDS sequence (opt2) from hemagglutinin__InfluenzaA__AGN69452
auggagaagaucguccuccuccucgccaucgucucccucgucaaguccgaccagaucugcaucggcuaccacgccaacaacuccaccgagcaggucgacaccaucauggagaagaacgucaccgucacccacgcccaggacauccucgagaagacccacaacggcaagcucugcgaccucgacggcgucaagccccucauccuccgcgacugcuccgucgccggcuggcuccucggcaaccccaugugcgacgaguuccucaacguccccgagugguccuacaucgucgagaagaucaaccccgccaacgaccucugcuaccccggcaacuucaacgacuacgaggagcucaagcaccuccucucccgcaucaaccacuucgagaagauccagaucauccccaaguccuccugguccgaccacgaggccuccgccggcgucuccuccgccugccccuaccagggccgcuccuccuucuuccgcaacgucgucuggcucaucaagaaggacaacgccuaccccaccaucaagcgcuccuacaacaacaccaaccaggaggaccuccucguccucuggggcauccaccaccccaacgacgccgccgagcagacccgccucuaccagaacuccaccaccuacaucuccgucggcaccuccacccucaaccagcgccucguccccaagaucgccacccgcuccaaggucaacggccaguccggccgcaucgaguucuucuggaccauccucaagcccaacgacaccaucaacuucgaguccaacggcaacuucaucgcccccgagaacgccuacaagaucgucaagaagggcgacuccaccaucaugaaguccgagcucgaguacggcaacugcaacaccaagugccagacccccaucggcgccaucaacuccuccaugcccuuccacaacauccacccccucaccaucggcgagugccccaaguacgucaaguccucccgccucguccucgccaccggccuccgcaacuccccccagggcgagcgccgccgcaagaagcgcggccucuucggcgccaucgccggcuucaucgagggcggcuggcagggcauggucgacggcugguacggcuaccaccacuccaacgagcagggcuccggcuacgccgccgacaaggaguccacccagaaggccaucgacggcgucaccaacaaggucaacuccaucaucgacaagaugaacacccaguucgaggccgucggccgcgaguucaacaaccucgagcgccgcaucgagaaccucaacaagaagauggaggacggcuuccucgacgucuggaccuacaacgccgagcuccucguccucauggagaacgagcgcacccucgacuuccacgacuccaacgucaagaaccucuacgacaagguccgccuccagcuccgcgacaacgccaaggagcucggcaacggcugcuucgaguucuaccaccgcugcgacaacgagugcauggaguccguccgcaacggcaccuacgacuacccccaguacuccgaggaggcccgccucaagcgcgaggagaucuccggcgucaagcucgaguccaucggcaccuaccagauccucuccaucuacuccaccgucgccuccucccucgcccucgccaucauggucgccggccucucccucuggaugugcuccaacggcucccuccagugccgcaucugcaucuga

SEQ ID NO: 110040 - RNA, 1707 nt, Artificial Sequence
  derived and/or modified CDS sequence (opt2) from hemagglutinin__InfluenzaA__ABD73284
auggagaagaucguccuccuccucgccaucgucucccucgucaaguccgaccagaucugcaucggcuaccacgccaacaacuccaccgagcaggucgacaccaucauggagaagaacgucaccgucacccacgcccaggacauccucgagaagacccacaacggcaagcucugcgaccucgacggcgucaagccccucauccuccgcgacugcuccgucgccggcuggcuccucggcaaccccaugugcgacgaguuccucaacguccccgagugguccuacaucgucgagaagaucaaccccgccaacgaccucugcuaccccggcaacuucaacgacuacgaggagcucaagcaccuccucucccgcaucaaccacuucgagaagauccagaucauccccaaguccuccugguccgaccacgaggccuccgccggcgucuccuccgccugccccuaccagggccgcuccuccuucuuccgcaacgucgucuggcucaucaagaaggacaacgccuaccccaccaucaagcgcuccuacaacaacaccaaccaggaggaccuccucguccucuggggcauccaccaccccaacgacgccgccgagcagacccgccucuaccagaaccccaccaccuacaucuccgucggcaccuccacccucaaccagcgccucguccccaagaucgccacccgcuccaaggucaacggccaguccggccgcauggaguucuucuggaccauccucaagcccaacgacgccaucaacuucgaguccaacggcaacuucaucgcccccgagaacgccuacaagaucgucaagaagggcgacuccaccaucaugaaguccgagcucgaguacggcaacugcaacaccaagugccagacccccaucggcgccaucaacuccuccaugcccuuccacaacauccacccccucaccaucggcgagugccccaaguacgucaaguccucccgccucguccucgccaccggccuccgcaacuccccccagggcgagcgccgccgcaagaagcgcggccucuucggcgccaucgccggcuucaucgagggcggcuggcagggcauggucgacggcugguacggcuaccaccacuccaacgagcagggcuccggcuacgccgccgacaaggaguccacccagaaggccaucgacggcgucaccaacaaggucaacuccaucaucgacaagaugaacacccaguucgaggccgucggccgcgaguucaacaaccucgagcgccgcaucgagaaccucaacaagaagauggaggacggcuuccucgacgucuggaccuacaacgccgagcuccucguccucauggagaacgagcgcacccucgacuuccacgacuccaacgucaagaaccucuacgacaagguccgccuccagcuccgcgacaacgccaaggagcucggcaacggcugcuucgaguucuaccaccgcugcgacaacgagugcauggaguccguccgcaacggcaccuacgacuacccccaguacuccgaggaggcccgccucaagcgcgaggagaucuccggcgucaagcucgaguccaucggcaccuaccagauccucuccaucuacuccaccgucgccuccucccucgcccucgccaucauggucgccggccucucccucuggaugugcuccaacggcucccuccagugccgcaucugcaucuga

SEQ ID NO: 110041 - RNA, 1695 nt, Artificial Sequence
  derived and/or modified CDS sequence (opt2) from hemagglutinin__InfluenzaA__ABF93440
auggagaagaucguccuccuccucgccaucgucucccucgucaaguccgaccagaucugcaucggcuaccacgccaacaacuccaccgagcaggucgacaccaucauggagaagaacgucaccgucacccacgcccaggacauccucgagaagacccacaacggcaagcucugcgaccucgacggcgucaagccccucauccuccgcgacugcuccgucgccggcuggcuccucggcaaccccaugugcgacgaguuccucaacguccccgagugguccuacaucgucgagaagaucaaccccgccaacgaccucugcuaccccggcaacuucaacgacuacgaggagcucaagcaccuccucucccgcaucaaccacuucgagaagauccagaucauccccaaguccuccugguccgaccacgaggccuccuccggcgucuccuccgccugccccuaccagggccgcuccuccuucuuccgcaacgucgucuggcucaucaagaaggacaacgccuaccccaccaucaagcgcuccuacaacaacaccaaccaggaggaccuccucguccucuggggcauccaccaccccaacgacgccgccgagcagacccgccucuaccagaaccccaccaccuacaucuccgucggcaccuccacccucaaccagcgccucguccccaagaucgccacccgcuccaaggucaacggccaguccggccgcauggaguucuucuggaccauccucaagcccaacgacgccaucaacuucgaguccaacggcaacuucaucgcccccgagaacgccuacaagaucgucaagaagggcgacuccaccaucaugaaguccgagcucgaguacggcaacugcaacaccaagugccagacccccaucggcgccaucaacuccuccaugcccuuccacaacauccacccccucaccaucggcgagugccccaaguacgucaaguccaaccgccucguccucgccaccggccuccgcaacuccccccagaucgagacccgcggccucuucggcgccaucgccggcuucaucgagggcggcuggcagggcauggucgacggcugguacggcuaccaccacuccaacgagcagggcuccggcuacgccgccgacaaggaguccacccagaaggccaucgacggcgucaccaacaaggucaacuccaucaucgacaagaugaacacccaguucgaggccgucggccgcgaguucaacaaccucgagcgccgcaucgagaaccucaacaagaagauggaggacggcuuccucgacgucuggaccuacaacgccgagcuccucguccucauggagaacgagcgcacccucgacuuccacgacuccaacgucaagaaccucuacgacaagguccgccuccagcuccgcgacaacgccaaggagcucggcaacggcugcuucgaguucuaccaccgcugcgacaacgagugcauggaguccguccgcaacggcaccuacgacuacccccaguacuccgaggaggcccgccucaagcgcgaggagaucuccggcgucaagcucgaguccaucggcaccuaccagauccucuccaucuacuccaccgucgccuccucccucgcccucgccaucauggucgccggccucucccucuggaugugcuccaacggcucccuccagugccgcaucugcaucuga

SEQ ID NO: 110042 - RNA, 1701 nt, Artificial Sequence
  derived and/or modified CDS sequence (opt2) from hemagglutinin__InfluenzaA__AKC45369
auggagaagaucguccuccuccucgccgucgucucccucgucaaguccgaccagaucugcaucggcuaccacgccaacaacuccaccgagcaggucgacaccaucauggagaagaacgucaccgucacccacgcccaggacauccucgagaagacccacaacggccgccucugcgaccucaacggcgucaagccccucauccucaaggacugcuccgucgccggcuggcuccucggcaaccccaugugcgacgaguucauccgcguccccgagugguccuacaucgucgagcgcgccaaccccgccaacgaccucugcuaccccggcaaccucaacgacuacgaggagcucaagcaccuccucucccgcaucaaccacuucgagaagacccucaucauccccaaguccuccuggcccaaccacaccuccuccggcgucuccgccgccugccccuaccagggcacccccuccuucuuccgcaacgucgucuggcucaccaagaagaacgacgccuaccccaccaucaagauguccuacaacaacaccaaccgcgaggaccuccucauccucuggggcauccaccacuccaacaacgccgccgagcagaccaaccucuacaagaaccccaccaccuacgucuccgucggcaccuccacccucaaccagcgccucguccccaagaucgccacccgcucccaggucaacggccagcgcggccgcauggacuucuucuggaccauccucaagcccaacgacgccauccacuucgaguccaacggcaacuucaucgcccccgaguacgccuacaagaucgucaagaagggcgacuccaccaucaugaaguccgagauggaguacggccacugcaacaccaagugccagacccccaucggcgccaucaacuccuccaugcccuuccacaacauccacccccucaccaucggcgagugccccaaguacgucaaguccaacaagcucguccucgccaccggccuccgcaacuccccccuccgcgagcgccgccgcaagcgcggccucuucggcgccaucgccggcuucaucgagggcggcuggcagggcauggucgacggcugguacggcuaccaccacuccaacgagcagggcuccggcuacgccgccgaccgcgaguccacccagaaggccaucgacggcgucaccaacaaggucaacuccaucaucgacaagaugaacacccaguucgaggccgucggccgcgaguucaacaaccucgagcgccgcaucgagaaccucaacaagaagauggaggacggcuuccucgacgucuggaccuacaacgccgagcuccucguccucauggagaacgagcgcacccucgacuuccacgacuccaacgucaagaaccucuacgacaagguccgccuccagcuccgcgacaacgccaaggagcucggcaacggcugcuucgaguucuaccacaagugcgacaacgagugcauggaguccguccgcaacggcaccuacgacuacccccaguacuccgaggaggcccgccucaagcgcgaggagaucuccggcgucaagcucgaguccaucggcaccuaccagauccucuccaucuacuccaccgucgccuccucccucgcccucgccaucaucgucgccggccucucccucuggaugugcuccaacggcucccuccagugccgcaucugcaucuga

SEQ ID NO: 110043 - RNA, 1704 nt, Artificial Sequence; identical to SEQ ID NO: 108994
  derived and/or modified CDS sequence (opt2) from hemagglutinin__InfluenzaA__AJS18479

SEQ ID NO: 110044 - RNA, 1704 nt, Artificial Sequence
  derived and/or modified CDS sequence (opt2) from hemagglutinin__InfluenzaA__EPI691378
auggagaagaucguccuccuccucgccgucgucucccucgucaaguccgaccagaucugcaucggcuaccacgccaacaacuccaccgagcaggucgacaccaucauggagaagaacgucaccgucacccacgcccaggacauccucgagaagacccacaacggccgccucugcgaccucaacggcgucaagccccucauccucaaggacugcuccgucgccggcuggcuccucggcaaccccaugugcgacgaguucauccgcguccccgagugguccuacaucgucgagcgcgccaaccccgccaacgaccucugcuaccccggcaaccucaacgacuacgaggagcucaagcaccuccucucccgcaucaaccacuucgagaagacccucaucauccccaaguccuccuggcccaaccacgagaccucccucggcgucuccgccgccugccccuaccagggcguccccuccuucuuccgcaacgucgucuggcucaccaagaagaacgacgccuaccccaccaucaagauguccuacaacaacaccaaccgcgaggaccuccucauccucuggggcauccaccacuccaacaacgccgccgagcagaccaaccucuacaagaaccccaccaccuacgucuccgucggcaccuccacccucaaccagcgccucguccccaagaucgccacccgcucccaggucaacggccagcgcggccgcauggacuucuucuggaccauccucaagcccaacgacgccauccacuucgaguccaacggcaacuucaucgcccccgaguacgccuacaagaucgucaagaagggcgacuccaccaucaugaaguccgagauggaguacggccacugcaacaccaagugccagacccccaucggcgccaucaacuccuccaugcccuuccacaacauccacccccucaccaucggcgagugccccaaguacgucaaguccaacaagcucguccucgccaccggccuccgcaacuccccccuccgcgagcgccgccgcaagcgcggccucuucggcgccaucgccggcuucaucgagggcggcuggcagggcauggucgacggcugguacggcuaccaccacuccaacgagcagggcuccggcuacgccgccgaccgcgaguccacccagaaggccaucgacggcgucaccaacaaggucaacuccaucaucgacaagaugaacacccaguucgaggccgucggccgcgaguucaacaaccucgagcgccgcaucgagaaccucaacaagaagauggaggacggcuuccucgacgucuggaccuacaacgccgagcuccucguccucauggagaacgagcgcacccucgacuuccacgacuccaacgucaagaaccucuacgacaagguccgccuccagcuccgcgacaacgccaaggagcucggcaacggcugcuucgaguucuaccacaagugcgacaacgagugcauggaguccguccgcaacggcaccuacgacuacccccaguacuccgaggaggcccgccucaagcgcgaggagaucuccggcgucaagcucgaguccaucggcaccuaccagauccucuccaucuacuccaccgucgccuccucccucgcccucgccaucaucgucgccggccucucccucuggaugugcuccaacggcucccuccagugccgcaucugcaucuga

SEQ ID NO: 110045 - RNA, 1704 nt, Artificial Sequence
  derived and/or modified CDS sequence (opt2) from hemagglutinin__InfluenzaA__EPI533583
auggagaagaucguccuccuccucgccaucgucucccucgucaagggcgaccagaucugcaucggcuaccacgccaacaacuccaccgagcaggucgacaccaucauggagaagaacgucaccgucacccacgcccaggacauccucgagaagacccacaacggcaagcucugcgaccucaacggcgucaagccccucauccucaaggacugcuccgucgccggcuggcuccucggcaaccccaugugcgacgaguucauccgcguccccgagugguccuacaucgucgagcgcgccaaccccgccaacgaccucugcuaccccggcaaccucaacgacuacgaggagcucaagcaccuccucucccgcaucaaccacuucgagaagauccucaucauccccaaguccuccuggaccaaccacgagaccucccucggcgucuccgccgccugccccuaccagggcacccccuccuucuuccgcaacgucgucuggcucaucaagaagaacgacgccuaccccaccaucaagaucuccuacaacaacaccaaccaggaggaccuccucauccucuggggcguccaccacuccaacaacgccgccgagcagaccaaccucuacaagaaccccaccaccuacaucuccgucggcaccuccacccucaaccagcgccucguccccaagaucgccacccgcucccaggucaacggccagcgcggccgcauggacuucuucuggaccauccucaagcccaacgacgccauccacuucgaguccaacggcaacuucaucgcccccgaguacgccuacaagaucgucaagaagggcgacuccaccaucaugaaguccgagauggaguacggccacugcaacaccaagugccagacccccaucggcgccaucaacuccuccaugcccuuccacaacauccacccccucaccaucggcgagugccccaaguacgucaaguccaacaagcucguccucgccaccggccuccgcaacuccccccuccgcgagaagcgccgcaagcgcggccucuucggcgccaucgccggcuucaucgagggcggcuggcagggcauggucgacggcugguacggcuaccaccacuccaacgagcagggcuccggcuacgccgccgacaaggaguccacccagaaggccaucgacggcgucaccaacaaggucaacuccaucaucgacaagaugaacacccaguucgaggccgucggccgcgaguucaacaaccucgagcgccgcaucgagaaccucaacaagaagauggaggacggcuuccucgacgucuggaccuacaacgccgagcuccucguccucauggagaacgagcgcacccucgacuuccacgacuccaacgucaagaaccucuacgacaagguccgccuccagcuccgcgacaacgccaaggagcucggcaacggcugcuucgaguucuaccacaagugcgacaacaagugcauggaguccguccgcaacggcaccuacgacuacccccaguacuccgaggaggcccgccucaagcgcgaggagaucuccggcgucaagcucgaguccaucggcaccuaccagauccucuccaucuacuccaccgucgccuccucccucgcccucgccaucaucgucgccggccucucccucuggaugugcuccaacggcucccuccagugccgcaucugcaucuga

SEQ ID NO: 110046 - RNA, 1701 nt, Artificial Sequence; identical to SEQ ID NO: 109007
  derived and/or modified CDS sequence (opt2) from hemagglutinin__InfluenzaA__AKS48023

SEQ ID NO: 110047 - RNA, 1701 nt, Artificial Sequence
  derived and/or modified CDS sequence (opt2) from hemagglutinin__InfluenzaA__EPI587621
auggagaagaugguccuccuccucgccgccgucucccucgucaaguccgaccagaucugcaucggcuaccacgccaacaacuccaccgagcaggucgacaccaucauggagaagaacgucaccgucacccacgcccaggacauccucgagaagacccacaacggccgccucugcgaccucaacggcgucaagccccucauccucaaggacugcuccgucgccggcuggcuccucggcaaccccaugugcgacgaguucauccgcguccccgagugguccuacaucgucgagcgcgccaaccccgccaacgaccucugcuaccccggcaaccucaacgacuacgaggagcucaagcaccuccucucccgcaucaaccacuucgagaagacccucaucauccccaaguccuccuggcccaaccacaccuccuccggcgucuccgccgccugccccuaccagggcaugcccuccuucuuccgcaacgucgucuggcucaccaagaagaacgacgccuaccccaccaucaagauguccuacaacaacaccuaccgcgaggaccuccucauccucuggggcauccaccacuccaacaacgccgccgagcagaccaaccucuacaagaaccccaccaccuacgucuccgucggcaccuccacccucaaccagcgccucgagcccaagaucgccacccgcucccaggucaacggccagcgcggccgcauggacuucuucuggaccauccucaagcccaacgacgccauccacuucgaguccaacggcaacuucaucgcccccgaguacgccuacaagaucgucaagaagggcgacuccaccaucaugaaguccgagauggaguacggccacugcaacaccaagugccagacccccaucggcgccaucaacuccuccaugcccuuccacaacauccacccccucaccaucggcgagugccccaaguacgucaaguccaacaagcucguccucgccaccggccuccgcaacuccccccuccgcgagcgccgccgcaagcgcggccucuucggcgccaucgccggcuucaucgagggcggcuggcagggcauggucgacggcugguacggcuaccaccacuccaacgagcagggcuccggcuacgccgccgaccgcgaguccacccagaaggccaucgacggcgucaccaacaaggucaacuccaucaucgacaagaugaacacccaguucgaggccgucggccgcgaguucaacaaccucgagcgccgcaucgagaaccucaacaagaagauggaggacggcuuccucgacgucuggaccuacaacgccgagcuccucguccucauggagaacgagcgcacccucgacuuccacgacuccaacgucaagaaccucuacgacaagguccgccuccagcuccgcgacaacgccaaggagcucggcaacggcugcuucgaguucuaccacaagugcgacaacgagugcauggaguccguccgcaacggcaccuacgacuacccccaguacuccgaggaggcccgccucaagcgcgaggagaucuccggcgucaagcucgaguccaucggcaccuaccagauccucuccaucuacuccaccgucgccuccucccucgcccucgccaucaucgucgccggccucucccucuggaugugcuccaacggcucccuccagugccgcaucugcaucuga

SEQ ID NO: 110048 - RNA, 1704 nt, Artificial Sequence
  derived and/or modified CDS sequence (opt2) from hemagglutinin__InfluenzaA__AJE30333
auggagaagaucguccuccuccucgccgucaucucccucgucaaguccgaccagaucugcaucggcuaccacgccaacaacuccaccaagcaggucgacaccaucauggagaagaacgucaccgucacccacgcccaggacauccucgagaagacccacaacggcaagcucugcgaccucaacggcgucaagccccucauccucaaggacugcuccgucgccggcuggcuccucggcaaccccaugugcgacgaguucauccgcguccccgagugguccuacaucgucgagcgcgccaaccccgccaacgaccucugcuaccccggcacccucaacgacuacgaggagcucaagcaccuccucucccgcaucaaccacuucgagaagacccucaucaucccccgcuccuccuggcccaaccacgagaccucccucggcgucuccgccgccugccccuaccagggcgccuccuccuucuuccgcaacgucgucuggcucaucaagaagaacgacgccuaccccaccaucaagaucuccuacaacaacaccaaccgcgaggaccuccucauccucuggggcauccaccacuccaacaacgccgccgagcagaccaaccucuacaagaaccccgacaccuacgucuccgucggcaccuccacccucaaccagcgccucguccccaagaucgccacccgcucccaggucaacggccaguccggccgcauggacuucuucuggaccauccucaagcccaacgacgccauccacuucgaguccaacggcaacuucaucgcccccgaguacgccuacaagaucgucaagaagggcgacuccaccaucaugaaguccgagauggaguacggccacugcaacaccaagugccagacccccaucggcgccaucaacuccuccaugcccuuccacaacauccacccccucaccaucggcgagugccccaaguacgucaaguccaacaagcucguccucgccaccggccuccgcaacuccccccuccgcgagcgccgccgcaagcgcggccucuucggcgccaucgccggcuucaucgagggcggcuggcagggcauggucgacggcugguacggcuaccaccacuccaacgagcagggcuccggcuacgccgccgacaaggaguccacccagaaggccaucgacggcgucaccaacaaggucaacuccaucaucgacaagaugaacacccaguucgaggccgucggccgcgaguucaacaaccucgagcgccgcaucgagaaccucaacaagaagauggaggacggcuuccucgacgucuggaccuacaacgccgagcuccucguccucauggagaacgagcgcacccucgacuuccacgacuccaacgucaagaaccucuacgacaagguccgccuccagcuccgcgacaacgccaaggagcucggcaacggcugcuucgaguucuaccacaagugcgacaacgagugcauggaguccguccgcaacggcaccuacgacuaccccaaguacuccgaggaggccauccucaagcgcgaggagaucuccggcgucaagcucgaguccaucggcaccuaccagauccucuccaucuacuccaccgucgccuccucccucgcccucgccaucaucgucgccggccucucccucuggaugugcuccaacggcucccuccagugccgcaucugcaucuga

SEQ ID NO: 110049 - RNA, 1704 nt, Artificial Sequence
  derived and/or modified CDS sequence (opt2) from hemagglutinin__InfluenzaA__EPI459855
augaucgccaucgucgucaucgccauccucgccuccgccggcaaguccgacaagaucugcaucggcuaccacgccaacaacuccaccacccaggucgacacccuccucgagaagaacgucaccgucacccacuccgucgagcuccucgagaaccagaaggagaagcgcuucugcaagaucaugaacaaggccccccucgaccucaaggacugcaccaucgagggcuggauccucggcaaccccaagugcgaccuccuccucggcgaccaguccugguccuacaucgucgagcgccccaacgcccagaacggcaucugcuaccccggcguccucaacgagcucgaggagcucaaggccuucaucggcuccggcgagcgcgucgagcgcuucgagauguuccccaaguccaccugggccggcgucgacaccucccgcggcgucaccaacgccugccccuccuacaccaucgacuccuccuucuaccgcaaccucgucuggaucgucaagaccgacuccgccaccuaccccgucaucaagggcaccuacaacaacaccggcacccagcccauccucuacuucuggggcguccaccacccccucgacaccaccguccaggacaaccucuacggcuccggcgacaaguacguccgcaugggcaccgaguccaugaacuucgccaagucccccgagaucgccgcccgccccgccgucaacggccagcgcucccgcaucgacuacuacugguccguccuccgccccggcgagacccucaacgucgaguccaacggcaaccucaucgcccccugguacgccuacaaguucgucuccaccaacaagaagggcgccgucuucaaguccgaccuccccaucgagaacugcgacgccaccugccagaccaucaccggcguccuccgcaccaacaagaccuuccagaacgucuccccccucuggaucggcgagugccccaaguacgucaaguccgagucccuccgccucgccaccggccuccgcaacgucccccagaucgccacccgcggcaucuucggcgccaucgccggcuucaucgagggcggcuggaccggcaugaucgacggcugguacggcuaccaccacgagaacucccagggcuccggcuacgccgccgaccgcgaguccacccagaaggccaucgacggcaucaccaacaaggucaacuccaucaucaacaagaugaacacccaguucgaggccgucgaccacgaguucuccaaccucgagcgccgcaucggcaaccucaacaagcgcauggaggacggcuuccucgacgucuggaccuacaacgccgagcuccucguccuccucgagaacgagcgcacccucgaccuccacgacgccaacgucaagaaccucuacgagaaggucaagucccagcuccgcgacaacgccaacgaccucggcaacggcugcuucgaguucuggcacaagugcgacaacgagugcauggaguccgucaagaacggcaccuacgacuaccccaaguaccagaaggaguccaagcucaaccgccagggcaucgaguccgucaagcucgagaaccucggcgucuaccagauccucgccaucuacuccaccgucuccuccucccucguccucgucggccucaucauggccaucggccucuggaugugcuccaacggcuccaugcagugccgcaucugcaucuga

SEQ ID NO: 110050 - RNA, 1704 nt, Artificial Sequence; identical to SEQ ID NO: 110049
  derived and/or modified CDS sequence (opt2) from hemagglutinin__InfluenzaA__EPI459855/m1

SEQ ID NO: 110051 - RNA, 1692 nt, Artificial Sequence
  derived and/or modified CDS sequence (opt2) from hemagglutinin__InfluenzaA__ACZ36872
augaacacccagauccucgucuucgcccucgucgccgucauccacaccaacgccgacaagaucugccucggccaccacgccgucuccaacggcaccaaggucaacacccucaccgagcgcggcgucgaggucgucaacgccaccgagaccgucgagcgcaccaacauccccaagaucugcuccaagggcaagcgcaccgucgaccucggccagugcggccuccucggcaccaucaccggccccccccagugcgaccaguuccucgaguucuccgccgaccucaucaucgagcgccgcgacggcaacgacgucugcuaccccggcaaguucgucaacggcgaggcccuccgccagauccuccgcaaguccggcggcaucaacaaggagaccaugggcuucaccuacuccggcauccgcaccaacggcaccaccuccgccugccgccgcuccggcuccuccuucuacgccgagaugaaguggcuccucuccgacaccgacaacgccgccuucccccagaugaccaaguccuacaagaacacccgccgcgagcccgcccucaucgucuggggcauccaccacuccggcuccaccaccgagcagaccaagcucuacggcuccggcaacaagcucgucaccgucggcuccuccaaguaccagcaguccuucguccccucccccggcacccgcccccaggucaacggccaguccggccgcaucgacuuccacuggcucauccucgacuccaacgacaccgucaccuucuccuucaacggcgccuucaucgcccccgaccgcgccuccuuccucaagggcaaguccaugggcauccaguccgacguccaggucgacgccaacugcgagggcgagugcuaccacuccggcggcaccaucaccuccucccuccccuuccagaacaucaacucccgcgccgucggcaagugcccccgcuacgucaagcaggagucccuccuccucgccaccggcaugaagaacguccccgagcuccccaagaagcgccgcaagcgcggccucuucggcgccaucgccggcuucaucgagaacggcugggagggccucgucgacggcugguacggcuuccgccaccagaacgcccagggcgagggcaccgccgccgacuacaaguccacccaguccgccaucgaccagaucaccggcaagcucaaccgccucaucgagaagaccaaccagcaguucgagcucaucgacaacgaguucaccgaggucgagaagcagaucggcaacgucaucaacuggacccgcgacuccaucaccgaggucugguccuacaacgccgagcuccucgucgccauggagaaccagcacaccaucgaccucgccgacuccgagaugaacaagcucuacgagcgcguccgcaagcagcuccgcgagaacgccgaggaggacggcaccggcugcuucgagaucuuccacaagugcgacgacgacugcauggccuccauccgcaacaacaccuacgaccacuccaaguaccgcgaggaggccaugcagaaccgcauccagaucgaccccgucaagcucuccggcggcuacaaggacgucauccucugguucuccuucggcgccuccugcuuccuccuccucgccaucgccaugggccucgucuucaucugcgucaagaacggcaacaugcgcugcaccaucugcaucuga

SEQ ID NO: 110052 - RNA, 1692 nt, Artificial Sequence
  derived and/or modified CDS sequence (opt2) from hemagglutinin__InfluenzaA__AGB51388
augaacacccagauccucgucuucgcccucgucgccgucauccacaccaacgccgacaagaucugccucggccaccacgccgucuccaacggcaccaaggucaacacccucaccgagcgcggcgucgaggucgucaacgccaccgagaccgucgagcgcaccaacauccccaagaucugcuccaagggcaagcgcaccgucgaccucggccagugcggccuccucggcaccaucaccggccccccccagugcgaccaguuccucgaguucuccgccgaccucaucaucgagcgccgcgacggcaacgacgucugcuaccccggcaaguucgucaacggcgaggcccuccgccagauccuccgcaaguccggcggcaucaacaaggagaccaugggcuucaccuacuccggcauccgcaccaacggcaccaccuccgccugccgccgcuccggcuccuccuucuacgccgagaugaaguggcuccucuccgacaccgacaacgccgccuucccccagaugaccaaguccuacaagaacacccgccgcgagcccgcccucaucgucuggggcauccaccacuccggcuccaccaccgagcagaccaagcucuacggcuccggcaacaagcucgucaccgucggcuccuccaaguaccagcaguccuucguccccaaccccgagacccgcccccaggucaacggccaguccggccgcaucgacuuccacuggcucauccucgacuccaacgacaccgucaccuucuccuucaacggcgccuucaucgcccccgaccgcgccuccuuccucaagggcaaguccaugggcauccaguccgacguccaggucgacgccaacugcgagggcgagugcuaccacuccggcggcaccaucaccuccucccuccccuuccagaacaucaacucccgcgccgucggcaagugcccccgcuacgucaagcaggagucccuccuccucgccaccggcaugaagaacguccccgagcuccccaagaagcgccgcaagcgcggccucuucggcgccaucgccggcuucaucgagaacggcugggagggccucgucgacggcugguacggcuuccgccaccagaacgcccagggcgagggcaccgccgccgacuacaaguccacccaguccgccaucgaccagaucaccggcaagcucaaccgccucaucgagaagaccaaccagcaguucgagcucaucgacaacgaguucaccgaggucgagaagcagaccggcaacgucaucaacuggacccgcgacuccaucaccgaggucugguccuacaacgccgagcuccucgucgccauggagaaccagcacaccaucgaccucgccgacuccgagaugaacaagcucuacgagcgcguccgcaagcagcuccgcgagaacgccgaggaggacggcaccggcugcuucgagaucuuccacaagugcgacgacgacugcauggccuccauccgcaacaacaccuacgaccacuccaaguaccgcgaggaggccaugcagaaccgcauccagaucgaccccgucaagcucuccggcggcuacaaggacgucauccucugguucuccuucggcgccuccugcuuccuccuccucgccaucgccaugggccucgucuucaucugcgucaagaacggcaacaugcgcugcaccaucugcaucuga

SEQ ID NO: 110053 - RNA, 1683 nt, Artificial Sequence; identical to SEQ ID NO: 106024
  derived and/or modified CDS sequence (opt2) from hemagglutinin__InfluenzaA__EPI439507

SEQ ID NO: 110054 - RNA, 1704 nt, Artificial Sequence
  derived and/or modified CDS sequence (opt2) from hemagglutinin__InfluenzaA__EPI164216
auggagaagaucguccuccuccucgccaucgucucccucgucaaguccgaccagaucugcaucggcuaccacgccaacaacuccaccgagcaggucgacaccaucauggagaagaacgucaccgucacccacgcccaggacauccucgagaagacccacaacggcaagcucugcgaccucgacggcgucaagccccucauccuccgcgacugcuccgucgccggcuggcuccucggcaaccccaugugcgacgaguucaucaacguccccgagugguccuacaucgucgagaaggccaaccccgccaacgaccucugcuaccccggcaacuucaacgacuacgaggagcucaagcaccuccucucccgcaucaaccacuucgagaagauccagaucauccccaaguccuccugguccgaccacgaggccuccuccggcgucuccuccgccugccccuaccagggcacccccuccuucuuccgcaacgucgucuggcucaucaagaagaacaacaccuaccccaccaucaagcgcuccuacaacaacaccaaccaggaggaccuccucauccucuggggcauccaccacuccaacgacgccgccgagcagaccaagcucuaccagaaccccaccaccuacaucuccgucggcaccuccacccucaaccagcgccucguccccaagaucgccacccgcuccaaggucaacggccaguccggccgcauggacuucuucuggaccauccucaagcccaacgacgccaucaacuucgaguccaacggcaacuucaucgcccccgaguacgccuacaagaucgucaagaagggcgacuccgccaucgucaaguccgaggucgaguacggcaacugcaacaccaagugccagacccccaucggcgccaucaacuccuccaugcccuuccacaacauccacccccucaccaucggcgagugccccaaguacgucaaguccaacaagcucguccucgccaccggccuccgcaacuccccccuccgcgagcgccgccgcaagcgcggccucuucggcgccaucgccggcuucaucgagggcggcuggcagggcauggucgacggcugguacggcuaccaccacuccaacgagcagggcuccggcuacgccgccgacaaggaguccacccagaaggccaucgacggcgucaccaacaaggucaacuccaucaucgacaagaugaacacccaguucgaggccgucggccgcgaguucaacaaccucgagcgccgcaucgagaaccucaacaagaagauggaggacggcuuccucgacgucuggaccuacaacgccgagcuccucguccucauggagaacgagcgcacccucgacuuccacgacuccaacgucaagaaccucuacgacaagguccgccuccagcuccgcgacaacgccaaggagcucggcaacggcugcuucgaguucuaccacaagugcgacaacgagugcauggaguccguccgcaacggcaccuacgacuacccccaguacuccgaggaggcccgccucaagcgcgaggagaucuccggcgucaagcucgaguccaucggcaccuaccagauccucuccaucuacuccaccgucgccuccucccucgcccucgccaucauggucgccggccucucccucuggaugugcuccaacggcucccuccagugccgcaucugcaucuga

SEQ ID NO: 110055 - RNA, 1683 nt, Artificial Sequence; identical to SEQ ID NO: 108387
  derived and/or modified CDS sequence (opt2) from hemagglutinin__InfluenzaA__EPI486492

SEQ ID NO: 110056 - RNA, 1683 nt, Artificial Sequence
  derived and/or modified CDS sequence (opt2) from hemagglutinin__InfluenzaA__EPI740738
augaacacccagauccucgucuucgcccucaucgccaucauccccaccaacgccgacaagaucugccucggccaccacgccgucuccaacggcaccaaggucaacacccucaccgagcgcggcgucgaggucgucaacgccaccgagaccgucgagcgcaccaacaucccccgcaucugcuccaagggcaagcgcaccgucgaccucggccagugcggccuccucggcaccaucaccggccccccccagugcgaccaguuccucgaguucuccgccgaccucaucaucgagcgccgcgagggcuccgacgucugcuaccccggcaaguucgucaacgaggaggcccuccgccagauccuccgcgaguccggcggcaucgacaaggagaccaugggcuucaccuacuccggcauccgcaccaacggcgucaccuccgccugcaagcgcuccggcuccuccuucuacgccgagaugaaguggcuccucuccaacaccgacaacgccgccuucccccagaugaccaaguccuacaagaacacccgcaagucccccgccaucaucgucuggggcauccaccacuccgucuccaccgccgagcagaccaagcucuacggcuccggcaacaagcucgucaccgucggcuccuccaacuaccagcaguccuucguccccucccccggcgcccgcccccaggucaacggccucuccggccgcaucgacuuccacuggcucauccucaaccccaacgacaccgucaccuucuccuucaacggcgccuucaucgcccccgaccgcgccuccuuccuccgcggcaaguccaugggcauccaguccggcguccaggucgacgccaacugcgagggcgacugcuaccacuccggcggcaccaucaucuccaaccuccccuuccagaacaucgacucccgcgccgucggcaagugcccccgcuacgucaagcagcgcucccuccuccucgccaccggcaugaagaacguccccgagauccccaagggccgcggccucuucggcgccaucgccggcuucaucgagaacggcugggagggccucaucgacggcugguacggcuuccgccaccagaacgcccagggcgagggcaccgccgccgacuacaaguccacccaguccgccaucgaccagaucaccggcaagcucaaccgccucaucgccaagaccaaccagcaguucgagcucaucgacaacgaguucaacgaggucgagaagcagaucggcaacgucaucaacuggacccgcgacuccaucaccgaggucugguccuacaacgccgagcuccucaucgccauggagaaccagcacaccaucgaccucgccgacuccgagauggacaagcucuacgagcgcgucaagcgccagcuccgcgagaacgccgaggaggacggcaccggcugcuucgagaucuuccacaagugcgacgacgacugcauggccuccauccgcaacaacaccuacgaccaccgcaaguaccgcgaggaggccaugcagaaccgcauccagaucgaccccgucaagcucuccuccggcuacaaggacgucauccucugguucuccuucggcgccuccugcuucauccuccucgccaucgucaugggccucgucuucaucugcgucaagaacggcaacaugcgcugcaccaucugcaucuga

SEQ ID NO: 110057 - RNA, 1683 nt, Artificial Sequence
  derived and/or modified CDS sequence (opt2) from hemagglutinin__InfluenzaA__EPI730495
augaacauccagauccucgucuucgcccucaucgccaucauccccaccgacgccgacaagaucugccucggccaccacgccgucuccaacggcaccaaggucaacacccucaccgagcgcggcgucgaggucgucaacgccaccgagaccgucgagcgcaccaacaucccccgcaucugcuccaagggcaagcgcaccgucgaccucggccagugcggccuccucggcaccaucaccggccccccccagugcgaccaguuccucgaguucuccgccgaccucaucaucgagcgccgcgagggcuccgacgucugcuaccccggcaaguucgucaacgaggaggcccuccgccagauccuccgcaaguccggcggcaucgacaaggaggccaugggcuucaccuacuccggcauccgcaccaacggcgccaccuccgccugccgccgcuccggcuccuccuucuacgccgagaugaaguggcuccucuccaacaccgacaacgccgccuucccccagaugaccaaguccuacaagaacacccgcaagucccccgccaucaucgucuggggcauccaccacuccgucuccaccgccgagcagaccaagcucuacggcuccggcuccaagcucgucaccgucggcuccuccaacuaccagcaguccuucguccccucccccggcgcccgcccccaggucaacggccucuccggccgcaucgacuuccacuggcucauccucaaccccaacgacaccgucaccuucuccuucaacggcgccuucaucgcccccgaccgcgccuccuuccuccgcggcaaguccaugggcauccaguccggcguccaggucgacgccgacugcgagggcgacugcuaccacuccggcggcaccaucaucuccaaccuccccuuccagaacaucgacucccgcgccgucggcaagugcccccgcuacgucaagcagcgcucccuccuccucgccaccggcaugaagaacguccccgagauccccaagggccgcggccucuucggcgccaucgccggcuucaucgagaacggcugggagggccucaucgacggcugguacggcuuccgccaccagaacgcccagggcgagggcaccgccgccgacuacaaguccacccaguccgccaucgaccagaucaccggcaagcucaaccgccucaucgagaagaccaaccagcaguucgagcucaucgacaacgaguucaucgaggucgagaagcagaucggcaacgucaucaacuggacccgcgacuccaucaccgaggucugguccuacaacgccgagcuccucgucgccauggagaaccagcacaccaucgaccucgccgacuccgagauggacaagcucuacgagcgcgucaagcgccagcuccgcgagaacgccgaggaggacggcaccggcugcuucgagaucuuccacaagugcgacgacgacugcauggccuccauccgcaacaacaccuacgaccacuccaaguaccgcgaggaggccaugcagaaccgcauccagaucgaccccgucaagcucuccuccggcuacaaggacgucauccucugguucuccuucggcgccuccugcuucauccuccccgccaucgucaugggccucgucuucaugugcgucaagaacggcaacaugcgcugcaccaucugcaucuga

SEQ ID NO: 110058 - RNA, 1683 nt, Artificial Sequence
  derived and/or modified CDS sequence (opt2) from hemagglutinin__InfluenzaA__EPI712926
augaacacccagauccucgucuucgcccucaucgccaucauccccaccaacgccgacaagaucugccucggccaccacgccgucuccaacggcaccaaggucaacacccucaccgagcgcggcgucgaggucgucaacgccaccgagaccgucgagcgcaccaacaucccccgcaucugcuccaagggcaagcgcaccgucgaccucggccagugcggccuccucggcaccaucaccggccccccccagugcgaccaguuccucgaguucuccgccgaccucaucaucgagcgccgcgagggcuccgacgucugcuaccccggcaaguucgucaacgaggaggcccuccgccagauccuccgcgaguccggcggcaucgacaaggagaccaugggcuucaccuacaacggcauccgcaucaacggcgucaccuccgccugcaagcgcuccggcuccuccuucuacgccgagaugaaguggcuccucuccaacaccgacaacgccgccuucccccagaugaccaaguccuacaagaacacccgcaagucccccgccaucaucgucuggggcauccaccacuccgucuccaccgccgagcagaccaagcucuacggcuccggcaacaagcucgucaccgucggcuccuccaacuaccagcaguccuucguccccucccccggcgcccgcccccaggucaacggccucuccggccgcaucgacuuccacuggcucauccucaaccccaacgacaccgucaccuucuccuucaacggcgccuucaucgcccccgaccgcgccuccuuccuccgcggcaaguccaucggcauccaguccggcguccaggucgacgccaacugcgagggcgacugcuaccacuccggcggcaccaucaucuccaaccuccccuuccagaacaucgacucccgcgccgucggcaagugcccccgcuacgucaagcagcgcucccuccuccucgccaccggcaugaagaacguccccgagauccccaagggccgcggccucuucggcgccaucgccggcuucaucgagaacggcugggagggccucaucgacggcugguacggcuuccgccaccagaacgcccagggcgagggcaccgccgccgacuacaaguccacccaguccgccaucgaccagaucaccggcaagcucaaccgccucaucgccaagaccaaccagcaguucgagcucaucgacaacgaguucaacgaggucgagaagcagaucggcaacgucaucaacuggacccgcgacuccaucaccgaggucugguccuacaacgccgagcuccucaucgccauggagaaccagcacaccaucgaccucgccgacuccgagauggacaagcucuacgagcgcgucaagcgccagcuccgcgagaacgccgaggaggacggcaccggcugcuucgagaucuuccacaagugcgacgacgacugcauggccuccauccgcaacaacaccuacgaccaccgcaaguaccgcgaggaggccaugcagaaccgcauccagaucgaccccgucaagcucuccuccggcuacaaggacgucauccucugguucuccuucggcgccuccugcuucauccuccucgccaucgucaugggccucgucuucaucugcgucaagaacggcaacaugcgcugcaccaucugcaucuga

SEQ ID NO: 110059 - RNA, 1683 nt, Artificial Sequence; identical to SEQ ID NO: 106024
  derived and/or modified CDS sequence (opt2) from hemagglutinin__InfluenzaA__AGL44438

SEQ ID NO: 110060 - RNA, 1683 nt, Artificial Sequence
  derived and/or modified CDS sequence (opt2) from hemagglutinin__InfluenzaA__EPI445996
auggagaccgucucccucaugaccauccuccuccucgucaccaccuccaacgccgacaagaucugcaucggccaccaguccaccaacuccaccgagaccgucgacacccucaccgagaccaacguccccgucacccacgccaaggagcuccuccacaccgaccacaacggcaugcucugcgccaccaaccucggccacccccucauccucgacaccugcaacgucgagggccucaucuacggcaaccccuccugcgaccuccuccucggcggccgcgagugguccuacaucgucgagcgccccuccgccgucaacggcaccugcuaccccggcaacgucgagaaccucgaggagcuccgcacccucuucuccuccuccuccuccuaccagcgcauccagaucuuccccgacaccaucuggaacgucaccuacaccggcaccuccaaguccugcuccgacuccuucuaccgcaacaugcgcuggcucacccagaagaacggccucuaccccguccaggacgcccaguucaccaacaaccgcggcaaggacauccucuucgucuggggcauccaccacccccccaccgacaccgcccagaccaaccucuacacccgcaccgacaccaccaccuccgucaccaccgagaaccucgaccgcaccuucaagccccucaucggcccccgcccccucgucaacggccucaucggccgcaucaacuacuacugguccguccucaagcccggccagacccuccgcguccgcuccaacggcaaccucaucgcccccugguacggccacguccucuccggcgagucccacggccgcauccucaagaccaaccucaacuccggcaacugcgucguccagugccagaccgagaagggcggccucaacuccacccuccccuuccacaacaucuccaaguacgccuucggcaacugccccaaguacaucggcgucaagucccucaagcucgccaucggccuccgcaacguccccgccaaguccucccgcggccucuucggcgccaucgccggcuucaucgagggcggcuggcccggccucgucgccggcugguacggcuuccagcacuccaacgaccagggcgucggcaucgccgccgaccgcgucuccacccagaaggccgucgacaagaucaccuccaaggucaacaacaucgucgacaagaugaacaagcaguacgagaucaucgaccacgaguucuccgaggucgagacccgccucaacaugaucaacaacaagaucgacgaccagauccaggacgucugggccuacaacgccgagcuccucguccuccucgagaaccagaagacccucgacgagcacgacgccaacgucaacaaccucuacaacaaggucaagcgcgcccucggcuccaacgcccucgaggacggcaagggcugcuucgagcucuaccacaagugcgacgaccagugcauggagaccauccgcaacggcaccuacaaccgccgcaaguaccaggaggagucccgccucgagcgccagaagaucgagggcaucaagcucgaguccgagggcaccuacaagauccucaccaucuacuccaccgucgccuccucccucguccucgccaugggcuucgccgccuuccucuucugggccauguccaacggcuccugccgcugcaacaucugcaucuga

SEQ ID NO: 110061 - RNA, 1695 nt, Artificial Sequence
  derived and/or modified CDS sequence (opt2) from hemagglutinin__InfluenzaA__EPI433309
auggagaagaucguccuccuccucgccaucgccucccucgucaaguccgaccagaucugcaucggcuaccacgccaacaacuccaccgagcaggucgacaccaucauggagaagaacgucaccgucacccacgcccaggacauccucgagaagacccacaacggcaagcucugcgaccucgacggcgucaagccccucauccuccgcgacugcuccgucgccggcuggcuccucggcaaccccaugugcgacaaguucaacgacguccccgagugguccuacaucgucgagaaggccaaccccgccaacgaccucugcuaccccggcaaccucaacgacuacgaggagcucaagcaccuccucucccgcaucaaccacuucgagaagauccagaccuuccccaaguccuccugguccgaccacgaggccucccucggcgucuccgccgccugccccuaccagggcaugcccuccuucuuccgcaacgucgucuggcucaucaagaagaacaacaccuaccccaccaucaaguccuccuacaacaacaccaaccaggaggaccuccucauccucuggggcauccaccacuccaacgacgaggccgagcagacccgccucuaccagaacuccaacaccuacaucuccgucggcaccuccacccucaaccagcgccucguccccaagaucgccacccgcuccaaggucaacggccaguccggccgcauggacuucuucuggaccauccucaagcccaacgacgccaucaacuucgaguccaacggcaacuucaucgcccccgaguacgccuacaagaucgucaagaagggcgacuccgccaucaugaaguccgaggucggcuacggcgacugcaacaccaagugccagacccccaucggcgccaucaacuccuccaugcccuuccacaacauccacccccucaccaucggcgagugccccaaguacgucaaguccaacaagcucguccucgccaccggccuccgcaacuccccccagaucgagacccgcggccucuucggcgccaucgccggcuucaucgagggcggcuggcagggcauggucgacggcugguacggcuaccaccacuccaacgagcagggcuccggcuacgccgccgacaaggaguccacccagaaggccaucgacggcgucaccaacaaggucaacuccaucaucgacaagaugaacacccaguucgaggccgucgagcgcgaguucaacaaccucgagcgccgcaucgagaaccucaacaagaagauggaggacggcuuccucgacgucuggaccuacaacgccgagcuccucguccucauggagaacgagcgcacccucgacuuccacgacuccaacgucaagaaccucuacgacaagguccgccuccagcuccgcgacaacgccaaggagcucggcaacggcugcuucgaguucuaccacaagugcgacaacgagugcauggaguccguccgcaacggcaccuacgacuacccccaguacuccgaggaggcccgccucaagcgcgaggagaucuccggcgucaagcucgaguccaucggcaccuaccagauccucuccaucuacuccaccgucgccuccucccucgcccucgccaucauggucgccggccucucccucuggaugugcuccaacggcucccuccagugccgcaucugcaucuga

SEQ ID NO: 110062 - RNA, 1683 nt, Artificial Sequence
  derived and/or modified CDS sequence (opt2) from hemagglutinin__InfluenzaA__EPI470859
auggaggccaucccccucaucaccauccuccucgucgucaccgccuccaacgccgacaagaucugcaucggcuaccaguccaccaacuccaccgagaccgucgacacccucaccgagaacaacguccccgucacccacgccaaggagcuccuccacaccgagcacaacggcaugcucugcgccaccaaccucggccgcccccucauccucgacaccugcaccaucgagggccucaucuacggcaaccccuccugcgaccuccuccucggcggccgcgagugguccuacaucgucgagcgccccuccgccgucaacggcaugugcuaccccggcaacgucgagaaccucgaggagcuccgcuccuucuucuccuccgccuccuccuaccagcgcauccagaucuuccccgacaccaucuggaacgucuccuacuccggcaccuccaaggccugcuccgacuccuucuaccgcuccaugcgcuggcucacccagaagaacaacgccuaccccauccaggacgcccaguacaccaacaaccgcggcaaguccauccucuucauguggggcaucaaccacccccccaccgacaccgcccagaccaaccucuacacccgcaccgacaccaccaccuccgucgccaccgaggacaucaaccgcaccuucaagcccgucaucggcccccgcccccucgucaacggccuccagggccgcaucgacuacuacugguccguccucaagcccggccagacccuccgcguccgcuccaacggcaaccucaucgcccccugguacggccacauccucuccggcgagucccacggccgcauccucaagaccgaccucaacuccggcuccugcgucguccagugccagaccgagcgcggcggccucaacaccacccuccccuuccacaacgucuccaaguacgccuucggcaacugccccaaguacgucggcgucaagucccucaagcucgccgucggccuccgcaacguccccgcccgcuccucccgcggccucuucggcgccaucgccggcuucaucgagggcggcugguccggccucgucgccggcugguacggcuuccagcacuccaacgaccagggcgucggcaucgccgccgaccgcgacuccacccagcgcgccaucgacaagaucaccuccaaggucaacaacaucgucgacaagaugaacaagcaguacgagaucaucgaccacgaguucuccgaggucgagaaccgccucaacaugaucaacaacaagaucgacgaccagauccaggacaucugggccuacaacgccgagcuccucguccuccucgagaaccagaagacccucgacgagcacgacgccaacgucaacaaccucuacaacaaggucaagcgcgcccucggcuccaacgccauggaggacggcaagggcugcuucgagcucuaccacaagugcgacgaccagugcauggagaccauccgcaacggcaccuacaaccgccgcaaguacaaggaggagucccgccucgagcgccagaagaucgagggcgucaagcucgaguccgagggcaccuacaagauccucaccaucuacuccaccgucgccuccucccucgucaucgccaugggcuucgccgccuuccucuucugggccauguccaacggcuccugccgcugcaacaucugcaucuga

SEQ ID NO: 110063 - RNA, 1683 nt, Artificial Sequence
  derived and/or modified CDS sequence (opt2) from hemagglutinin__InfluenzaA__EPI498037
auggagaccgucucccucaucaccauccuccucgucgccaccgucuccaacgccgacaagaucugcaucggcuaccaguccaccaacuccaccgagaccgucgacacccucaccgagaacaacguccccgucacccacgccaaggagcuccuccacaccgagcacaacggcaugcucugcgccaccucccucggccagccccucauccucgacaccugcaccaucgagggccucaucuacggcaaccccuccugcgaccuccuccucgagggccgcgagugguccuacaucgucgagcgccccuccgccgucaacggccucugcuaccccggcaacgucgagaaccucgaggagcuccgcucccucuucuccuccgcccgcuccuaccagcgcauccagaucuuccccgacaccaucuggaacgucuccuacaacggcaccuccaaggccugcuccggcuccuucuaccgcuccaugcgcuggcucacccgcaagaacggcgacuaccccauccaggacguccaguacaccaacaaccagggcaagaacauccucuucauguggggcaucaaccacccccccaccgacaccacccagcgcgaccucuacacccgcaccgacaccaccaccuccgucgccaccgaggagaucaaccgcaucuucaagccccucaucggcccccgcccccucgucaacggccucaugggccgcaucgacuacuacugguccguccucaagcccggccagacccuccgcaucaaguccgacggcaaccucaucgcccccugguacggccacauccucuccggcgagucccacggccgcauccucaagaccgaccucaagcgcggcuccugcaccguccagugccagaccgagaagggcggccucaacaccacccuccccuuccagaacgucuccaaguacgccuucggcaacugcuccaaguacaucggcaucaagucccucaagcucgccgucggccuccgcaacguccccucccgcuccucccgcggccucuucggcgccaucgccggcuucaucgagggcggcugguccggccucgucgccggcugguacggcuuccagcacuccaacgaccagggcgucggcauggccgccgaccgcgacuccacccagaaggccaucgacaagaucaccuccaaggucaacaacaucgucgacaagaugaacaagcaguacgagaucaucgaccacgaguucuccgaggucgagacccgccucaacaugaucaacaacaagaucgacgaccagauccaggacaucugggccuacaacgccgagcuccucguccuccucgagaaccagaagacccucgacgagcacgacgccaacgucaacaaccucuacaacaaggucaagcgcgcccucggcuccaacgccgucgaggacggcaagggcugcuucgagcucuaccacaagugcgacaaccagugcauggagaccauccgcaacggcaccuacaacaagcgcaaguaccaggaggaguccaagcucgagcgccagaagaucgagggcgucaagcucgaguccgagggcaccuacaagauccucaccaucuacuccaccgucgccuccucccucgucaucgccaugggcuucgccgccuuccucuucugggccauguccaacggcuccugccgcugcaacaucugcaucuga

SEQ ID NO: 110064 - RNA, 1683 nt, Artificial Sequence
  derived and/or modified CDS sequence (opt2) from hemagglutinin__InfluenzaA__AGO17847
auggagaccaucucccucaugaccauccuccucaucaccaccgccuccaacgccgacaagaucugcaucggccaccaguccaccaacuccaccgagaccgucgacacccucaccgagaccaacguccccgucacccacgccaaggagcuccuccagaccgagcacaacggcaugcucugcgccaccaaccucggccacccccucauccucgacaccugcaccaucgagggccucaucuacggcaaccccuccugcgaccuccuccucgagggccgcgagugguccuacaucgucgagcgccccuccgccgucaacggcaccugcuaccccggcaacgucgagaaccucgaggagcuccgcacccucuucuccuccgccuccuccuaccagcgcauccagaucuuccccgacaccaccuggaacgucaccuacaccggcaccucccgcuccugcuccggcuccuucuaccgcuccaugcgcuggcucacccagaaguccggcuucuaccccguccaggacgccaaguacaccaacaaccgcggcaagaacauccucuucgucuggggcauccaccacccccacaccuacaccgaccagaccacccucuacauccgcaacgacaccaccaccuccgucaccaccgaggagcucaaccgcaucuucaagcccgucaucgucccccgccuccucgucaacggccagcagggccgcaucgacuacuacugguccguccucaagcccggccagacccuccgcguccgcuccaacggcaaccucaucgcccccugguacggccacguccucuccggcggcucccacggccgcauccucaagaccgaccucaaguccggcaacugcgucguccagugccagaccgagaagggcggccucaacuccacccuccccuuccacaacaucuccaaguacgccuucggcaccugccccaaguacgucaaggucaacucccucaagcucgccaucggccuccgcaacguccccgcccgcuccaaccgcggccucuucggcgccaucgccggcuucaucgagggcggcuggcccggccucgucgccggcugguacggcuuccagcacuccaacgaccagggcgucggcauggccgccgaccgcgacuccacccagaaggccgucgacaagaucaccuccaaggucaacaacaucgucgacaagaugaacaagcaguacgagaucaucgaccacgaguucuccgaggucgagacccgccucaacaugaucaacaacaagaucgacgaccagauccaggacgucugggccuacaacgccgagcuccucguccuccucgagaaccagaagacccucgacgagcacgacgccaacgucaacaaccucuacaacaaggucaagcgcgcccucggcuccaacgccauggaggacggcaagggcugcuucgagcucuaccacaagugcgacgaccagugcauggagaccauccgcaacggcaccuacgaccgccgcaaguaccgcgaggagucccgccucgagcgccagcgcaucgagggcgucaagcucgaguccgagggcaccuacaagauccucaccaucuacuccaccgucgccuccucccucgucaucgccaugggcuucgccgccuuccucuucugggccauguccaacggcuccugccgcugcaacaucugcaucuga

SEQ ID NO: 110065 - RNA, 1683 nt, Artificial Sequence
  derived and/or modified CDS sequence (opt2) from hemagglutinin__InfluenzaA__ANZ03807
auggagaccgucucccucaucaccauccuccucgucgccaccgucuccaacgccgacaagaucugcaucggcuaccaguccaccaacuccaccgagaccgucgacacccucaccgagaacaacguccccgucacccacgccaaggagcuccuccacaccgagcacaacggcaugcucugcgccaccucccucggccagccccucauccucgacaccugcaccaucgagggccucaucuacggcaaccccuccugcgaccucucccucgagggccgcgagugguccuacaucgucgagcgccccuccgccgucaacggccucugcuaccccggcaacgucgagaaccucgaggagcuccgcucccucuucuccuccgcccgcuccuaccagcgcauccagaucuuccccgacaccaucuggaacgucuccuacgacggcaccuccaccgccugcuccggcuccuucuaccgcuccaugcgcuggcucacccgcaagaacggcgacuaccccacccaggacgcccaguacaccaacaaccagggcaagaacauccucuucauguggggcaucaaccacccccccaccgacgacacccagcgcaaccucuacacccgcaccgacaccaccaccuccgucgccaccgaggagaucaaccgcaucuucaagccccucaucggcccccgcccccucgucaacggccucaugggccgcaucgacuacuacugguccguccucaagcccggccagacccuccgcaucaaguccgacggcaaccucaucgcccccugguacggccacauccucuccggcgagucccacggccgcauccucaagaccgaccucaagcgcggcuccugcaccguccagugccagaccgagaagggcggccucaacaccacccuccccuuccagaacgucuccaaguacgccuucggcaacugcuccaaguacaucggcaucaagucccucaagcucgccgucggccuccgcaacguccccucccgcuccucccgcggccucuucggcgccaucgccggcuucaucgagggcggcugguccggccucgucgccggcugguacggcuuccagcacuccaacgaccagggcgucggcauggccgccgaccgcgacuccacccagaaggccaucgacaagaucaccuccaaggucaacaacaucgucgacaagaugaacaagcaguacgagaucaucgaccacgaguucuccgaggucgagacccgccucaacaugaucaacaacaagaucgacgaccagauccaggacaucugggccuacaacgccgagcuccucguccuccucgagaaccagaagacccucgacgagcacgacgccaacgucaacaaccucuacaacaaggucaagcgcgcccucggcuccaacgccgucgaggacggcaagggcugcuucgagcucuaccacaagugcaacgaccagugcauggagaccauccgcaacggcaccuacaaccgccgcaaguaccaggaggaguccaagcucgagcgccagaagaucgagggcgucaagcucgaguccgagggcaccuacaagauccucaccaucuacuccaccgucgccuccucccucgucaucgccaugggcuucgccgccuuccucuucugggccauguccaacggcuccugccgcugcaacaucugcaucuga

SEQ ID NO: 110066 - RNA, 1683 nt, Artificial Sequence; identical to SEQ ID NO: 110065
  derived and/or modified CDS sequence (opt2) from hemagglutinin__InfluenzaA__EPI680526

SEQ ID NO: 110067 - RNA, 1683 nt, Artificial Sequence; identical to SEQ ID NO: 109721
  derived and/or modified CDS sequence (opt2) from hemagglutinin__InfluenzaA__ALT20080

SEQ ID NO: 110068 - RNA, 1410 nt, Artificial Sequence
  derived and/or modified CDS sequence (opt2) from neuraminidase__InfluenzaA__AAA43084
augaaccccaaccagaagaucaucaccaucggcuccgucucccucaccaucgccaccgucugcuuccucaugcagaucgccauccucgccaccaccgucacccuccacuucaagcagcacgagugcgacucccccgccuccaaccaggucaugcccugcgagcccaucaucaucgagcgcaacaucaccgagaucgucuaccucaacaacaccaccaucgagaaggagaucugccccgaggucgucgaguaccgcaacugguccaagccccagugccagaucaccggcuucgcccccuucuccaaggacaacuccauccgccucuccgccggcggcgacaucugggucacccgcgagcccuacgucuccugcgaccccggcaagugcuaccaguucgcccucggccagggcaccacccucgacaacaagcacuccaacggcaccauccacgaccgcaucccccaccgcacccuccucaugaacgagcucggcguccccuuccaccucggcaccaagcaggucugcgucgccugguccuccuccuccugccacgacggcaaggccuggcuccacgucugcgucaccggcgacgaccgcaacgccaccgccuccuucaucuacgacggccgccucgucgacuccaucggcuccuggucccagaacauccuccgcacccaggaguccgagugcgucugcaucaacggcaccugcaccgucgucaugaccgacggcuccgccuccggccgcgccgacacccgcauccucuucaucaaggagggcaagaucguccacaucuccccccucuccggcuccgcccagcacaucgaggagugcuccugcuacccccgcuaccccgacguccgcugcaucugccgcgacaacuggaagggcuccaaccgccccgucaucgacaucaacauggaggacuacuccaucgacuccggcuacgucugcuccggccucgucggcgacaccccccgcaacgacgacuccuccuccaacuccaacugccgcgaccccaacaacgagcgcggcaaccccggcgucaagggcugggccuucgacaacggcgacgacgucuggaugggccgcaccaucaacaaggagucccgcuccggcuacgagaccuucaaggucaucggcggcugguccacccccaacuccaagucccaggucaaccgccaggucaucgucgacaacaacaacugguccggcuacuccggcaucuucuccgucgagggcaaguccugcaucaaccgcugcuucuacgucgagcucauccgcggccgcccccaggagacccgcgucugguggaccuccaacuccaucgucgucuucugcggcaccuccggcaccuacggcaccggcuccuggcccgacggcgccaacaucaacuucaugcccaucuga

SEQ ID NO: 110069 - RNA, 1362 nt, Artificial Sequence
  derived and/or modified CDS sequence (opt2) from neuraminidase__InfluenzaA__AAA43397
augaaccccaaccagaagaucaucaccaucggcuccaucugcauggucgucggcaucaucucccucauccuccagaucggcaacaucaucuccaucuggaucucccacuccauccagaccggcaaccagaaccacaccggcaucugcaaccagggcuccaucaccuacaaggucgucgccggccaggacuccaccuccgucauccucaccggcaacuccucccucugccccauccgcggcugggccauccacuccaaggacaacggcauccgcaucggcuccaagggcgacgucuucgucauccgcgagcccuucaucuccugcucccaccucgagugccgcaccuucuuccucacccagggcgcccuccucaacgacaagcacucccgcggcaccuucaaggaccgcucccccuaccgcgcccucauguccugccccgucggcgaggcccccucccccuacaacucccgcuucgaguccgucgccugguccgccuccgccugccacgacggcgucggcuggcucaccaucggcaucuccggccccgacgacggcgccgucgccguccucaaguacaaccgcaucaucaccgagaccaucaaguccuggcgcaagaacauccuccgcacccaggaguccgagugcaccugcgucaacggcuccugcuucaccaucaugaccgacggccccuccgacggccucgccuccuacaagaucuucaagaucgagaagggcaaggucaccaaguccaucgagcucaacgcccccaacucccacuacgaggagugcuccugcuaccccgacaccggcaaggucaugugcgucugccgcgacaacuggcacggcuccaaccgccccugggucuccuucgaccagaaccucgacuacaagaucggcuacaucugcuccggcgucuucggcgacaacccccgccccaaggacggcaccggcuccugcggccccgucuccgccgacggcgccaacggcgucaagggcuucuccuacaaguacggcaacggcgucuggaucggccgcaccaaguccgacuccucccgccacggcuucgagaugaucugggaccccaacggcuggaccgagaccgacucccgcuucuccaugcgccaggacgucgucgccaucaccaaccgcuccggcuacuccggcuccuucguccagcaccccgagcucaccggccucgacugcaugcgccccugcuucugggucgagcucauccgcggccuccccgaggaggacgccaucuggaccuccggcuccaucaucuccuucugcggcgucaacuccgacaccgucgacugguccuggcccgacggcgccgagcuccccuucaccaucgacaaguga

SEQ ID NO: 110070 - RNA, 1365 nt, Artificial Sequence
  derived and/or modified CDS sequence (opt2) from neuraminidase__InfluenzaA__AAA43412
augaaccccaaccagaagaucaucaccaucggcuccaucugccucgucgucggccucaucucccucauccuccagaucggcaacaucaucuccaucuggaucucccacuccauccagaccggcucccagaaccacaccggcaucugcaaccagaacaucaucaccuacaagaacuccaccugggucaaggacaccaccuccgucauccucaccggcaacuccucccucugccccauccgcggcugggccaucuacuccaaggacaacuccauccgcaucggcuccaagggcgacgucuucgucauccgcgagcccuucaucuccugcucccaccucgagugccgcaccuucuuccucacccagggcgcccuccucaacgaccgccacuccaacggcaccgucaaggaccgcucccccuaccgcgcccucauguccugccccgucggcgaggcccccucccccuacaacucccgcuucgaguccgucgccugguccgccuccgccugccacgacggcaugggcuggcucaccaucggcaucuccggccccgacaacggcgccgucgccguccucaaguacaacggcaucaucaccgagaccaucaaguccuggcgcaagaagauccuccgcacccaggaguccgagugcgccugcgucaacggcuccugcuucaccaucaugaccgacggccccuccgacggccucgccuccuacaagaucuucaagaucgagaagggcaaggucaccaaguccaucgagcucaacgcccccaacucccacuacgaggagugcuccugcuaccccgacaccggcaaggucaugugcgucugccgcgacaacuggcacggcuccaaccgccccugggucuccuucgaccagaaccucgacuaccagaucggcuacaucugcuccggcgucuucggcgacaacccccgccccaaggacggcaccggcuccugcggccccgucuacgucgacggcgccaacggcgucaagggcuucuccuaccgcuacggcaacggcgucuggaucggccgcaccaagucccacuccucccgccacggcuucgagaugaucugggaccccaacggcuggaccgagaccgacuccaaguucuccguccgccaggacgucgucgccaugaccgacugguccggcuacuccggcuccuucguccagcaccccgagcucaccggccucgacugcauccgccccugcuucugggucgagcucauccgcggccgccccaaggagaagaccaucuggaccuccgccuccuccaucuccuucugcggcgucaacuccgacaccgucgacugguccuggcccgacggcgccgagcuccccuucaccaucgacaaguga

SEQ ID NO: 110071 - RNA, 1410 nt, Artificial Sequence
  derived and/or modified CDS sequence (opt2) from neuraminidase__InfluenzaA__AAG01743
augaaccccaaccagaagaucaucacccucggcuccgucucccucaccaucgccaccaucugcuuccucaugcagaucgccauccucgucaccaccgucacccuccacuucaagcaguacgagugcgacuaccccgccaacaaccaggccaugcccugcgagcccaucaucaucgagcgcaacaucaccgagaucgucuaccucaccaacaccaccaucgagaaggaggucugccccaagcucgucgaguaccgcaacugguccaagccccagugcaagaucaccggcuucgcccccuucuccaaggacaacuccauccgccucuccgccggcggcgacaucugggucacccgcgagcccuacgucuccugcgaccccggcaagugcuaccaguucgcccucggccagggcaccacccucgacaacaagcacuccaacgacaccauccacgaccgcaccccccaccgcacccuccucaugaacgagcucggcguccccuuccaccucggcacccgccaggucugcaucgccugguccuccuccuccugccacgacggcaaggccuggcuccacgucugcgucaccggcuacgacaagaacgccaccgccuccuucaucuacgacggccgccucgucgacuccaucggcuccuggucccagaacauccuccgcacccaggaguccgagugcgucugcaucaacggcaccugcaccgucgucaugaccgacggcuccgccuccggccgcgccgacaccaagauccucuucaucgaggagggcaagaucguccacaccuccccccucuccggcuccgcccagcacgucgaggagugcuccugcuacccccgcuaccccggcguccgcugcaucugccgcgacaacuggaagggcuccaaccgccccgucgucgacaucaacgucaaggacuacuccaucaacuccuccuacgucugcuccggccucgucggcgacaccccccgcaacaacgaccgcuccuccuccuccuacugccagaaccccaacaacgagaagggcacccacggcgucaagggcugggccuucgacgacggcaacgacgucuggaugggccgcaccaucuccgaggacucccgcuccggcuacgagaccuucaaggucaucggcggcugguccacccccaacuccaagcuccagaucaaccgccaggucaucgucgacuccgacaaccgcuccggcuacuccggcaucuucuccgucgagggcaaguccugcaucaaccgcugcuucuacgucgagcucauccgcggccgcgagcaggagacccgcgucugguggaccuccaacuccaucgucgucuucugcggcaccuccggcaccuacggcaccggcuccuggcccgacggcgccgacaucaacaucaugcccaucuga

SEQ ID NO: 110072 - RNA, 1410 nt, Artificial Sequence
  derived and/or modified CDS sequence (opt2) from neuraminidase__InfluenzaA__AAG01759
augaaccccaaccagaagaucaucaccaucggcuccgucucccucaccaucgccaccaugugcuuccucaugcagaucgccauccucgucaccaccgucacccuccacuucaagcaguacgagugcaacuccccccccaacaaccaggucauccucugcgagcccaccaucaucgagcgcaacaucaccgagaucgucuaccucaccaacaccaccaucgagaaggagaucugccccaagcucgccgaguacaagaacugguccaagccccagugcaagaucaccggcuucgcccccuucuccaaggacaacuccauccgccucuccgccggcggcgacaucugggucacccgcgagcccuacgucuccugcgaccccgacaagugcuaccaguucgcccucggccagggcaccacccucaacaaccgccacuccaacgacaccguccacgaccgcacccccuaccgcacccuccucaugaacgagcucggcguccccuuccaccucggcaccaagcaggucugcaucgccugguccuccuccuccugccacgacggcaaggccuggcuccacgucugcgucaccggccacgacgagaacgccaccgccuccuucaucuacgacggccgccucgucgacuccaucggcuccugguccaagaagauccuccgcacccaggaguccgagugcgucugcaucaacggcaccugcaccgucgucaugaccgacggcuccgccuccggccgcgccgacaccaagauccucuucaucgaggagggcaagaucguccacaucuccccccuccucggcuccgcccagcacgucgaggagugcuccugcuacccccgcuaccccggcguccgcugcgucugccgcgacaacuggaagggcuccaaccgccccaucgucgacaucaacgucaaggacuacuccaucgucuccuccuacgucugcuccggccucgucggcgacaccccccgcaagaacgaccgcuccuccuccuccaacugccucaaccccaacaacgaggagggcggccacggcgucaagggcugggccuucgacgacggcaacgacgucuggaugggccgcaccaucuccgagaagcuccgcuccggcuacgagaccuucaaggucaucgagggcugguccaagcccaacuccaagcuccagaucaaccgccaggucaucgucgaccgcggcaaccgcuccggcuacuccggcaucuucuccgucgagggcaaguccugcaucaaccgcugcuucuacgucgagcucauccgcggccgcaagcaggagaccgaggucugguggaccuccaacuccaucgucgucuucugcggcaccuccggcaccuacggcaccggcuccuggcccgacggcgccgacaucaaccucaugcccaucuga

SEQ ID NO: 110073 - RNA, 1410 nt, Artificial Sequence
  derived and/or modified CDS sequence (opt2) from neuraminidase__InfluenzaA__AAG01777
augaaccccaaccagaagaucaucaccaucggcuccgucucccucaccaucgccaccaucugcuuccucaugcagaucgccauccucgucaccaccgucacccuccacuucaagcaguacgagugcaacuccccccccaacaaccaggucauccucugcgagcccaccaucaucgagcgcaacaucaccgagaucgucuaccucaccaacaccaccaucgagaaggagaucugccccaagcucgccgaguacaagaacugguccaagccccagugcaagaucaccggcuucgcccccuucuccaaggacaacuccauccgccucuccgccggcggcgacaucugggucacccgcgagcccuacgucuccugcgaccccgacaagugcuaccaguucgcccucggccagggcaccacccucaacaaccgccacuccaacgacaccguccacgaccgcacccccuaccgcacccuccucaugaacgagcucggcguccccuuccaccucggcaccaagcaggucugcaucgccugguccuccuccuccugccacgacggcaaggccuggcuccacgucugcgucaccggccacgacgagaacgccaccgccuccuucaucuacgacggccgccucgucgacuccaucggcuccugguccaagaagauccuccgcacccaggaguccgagugcgucugcaucaacggcaccugcaccgucgucaugaccgacggcuccgccuccggccgcgccgacaccaagauccucuucaucgaggagggcaagaucguccacaucuccccccuccucggcuccgcccagcacgucgaggagugcuccugcuacccccgcuaccccggcguccgcugcgucugccgcgacaacuggaagggcuccaaccgccccaucgucgacaucaacgucaaggacuacuccaucgucuccuccuacgucugcuccggccucgucggcgacaccccccgcaagaacgaccgcuccuccuccuccaacugccucaaccccaacaacgaggagggcggccacggcgucaagggcugggccuucgacgacggcaacgacgucuggaugggccgcaccaucuccgagaagcuccgcuccggcuacgagaccuucaaggucaucgagggcugguccaagcccaacuccaagcuccagaucaaccgccccgucaucgucgaccgcggcgaccgcuccggcuacuccggcaucuucuccgucgagggcaaguccugcaucaaccgcugcuucuacgucgagcucauccgcggccgcaagcaggagaccgaggucugguggaccuccaacuccaucgucgucuucugcggcaccuccggcaccuacggcaccggcuccuggcccgacggcgccgacaucaaccucaugcccaucuga

SEQ ID NO: 110074 - RNA, 1410 nt, Artificial Sequence
  derived and/or modified CDS sequence (opt2) from neuraminidase__InfluenzaA__AAG01786
augaaccccaaccagaagaucaucaccaucggcuccgucucccucaccaucgccaccaugugcuuccucaugcagaucgccauccucgucaccaccgucacccuccacuucaagcaguacgagugcaacuccccccccaacaaccaggucauccucugcgagcccaccaucaucgagcgcaacaucaccgagaucgucuaccucaccaacaccaccaucgagaaggagaucugccccaagcucgccgaguacaagaacugguccaagccccagugcaagaucaccggcuucgcccccuucuccaaggacaacuccauccgccucuccgccggcggcgacaucugggucacccgcgagcccuacgucuccugcgaccccgacaagugcuaccaguucgcccucggccagggcaccacccucaacaaccgccacuccaacgacaccguccacgaccgcacccccuaccgcacccuccucaugaacgagcucggcguccccuuccaccucggcaccaagcaggucugcaucgccugguccuccuccuccugccacgacggcaaggccuggcuccacgucugcgucaccggccacgacgagaacgccaccgccuccuucaucuacgacggccgccucgucgacuccaucggcuccugguccaagaagauccuccgcacccaggaguccgagugcgucugcaucaacggcaccugcaccgucgucaugaccgacggcuccgccuccggccgcgccgacaccaagauccucuucaucgaggagggcaagaucguccacaucuccccccuccucggcuccgcccagcacgucgaggagugcuccugcuacccccgcuaccccggcguccgcugcgucugccgcgacaacuggaagggcuccaaccgccccaucgucgacaucaacgucaaggacuacuccaucgucuccuccuacgucugcuccggccucgucggcgacaccccccgcaagaacgaccgcuccuccuccuccaacugccucaaccccaacaacgaggagggcggccacggcgucaagggcugggccuucgacgacggcaacgacgucuggaugggccgcaccaucuccgagaagcuccgcuccggcuacgagaccuucaaggucaucgagggcugguccaagcccaacuccaagcuccagaucaaccgccaggucaucgucgaccgcggcgaccgcuccggcuacuccggcaucuucuccgucgagggcaaguccugcaucaaccgcugcuucuacgucgagcucauccgcggccgcaagcaggagaccgaggucugguggaccuccaacuccaucgucgucuucugcggcaccuccggcaccuacggcaccggcuccuggcccgacggcgccgacaucaaccucaugcccaucuga

SEQ ID NO: 110075 - RNA, 1410 nt, Artificial Sequence
  derived and/or modified CDS sequence (opt2) from neuraminidase__InfluenzaA__AAK71688
augaaccccaaccagaagaucaucaccaucggcuccgucucccucaccaucgccaccaugugcuuccucaugcagaucgccauccucgucaccaccgucacccuccacuucaagcaguacgagugcaacuccccccccaacaaccaggucauccucugcgagcccaccaucaucgagcgcaacaucaccgagaucgucuaccucaccaacgccaccaucgagaaggagaucugccccaagcucgccgaguaccgcaacugguccaagccccagugcaagaucaccggcuucgcccccuucuccaaggacaacuccauccgccucuccgccggcggcgacaucugggucacccgcgagcccuacgucuccugcgaccccgacaagugcuaccaguucgcccucggccagggcaccacccucaacaaccgccacuccaacgacaccguccacgaccgcacccccuaccgcacccuccucaugaacgagcucggcguccccuuccaccucggcaccaagcaggucugcaucgccugguccuccuccuccugccacgacggcaaggccuggcuccacgucugcgucaccggccacgacgagaacgccaccgccuccuucaucuacgacggccgccucgucgacuccaucggcuccugguccaagaagauccuccgcacccaggaguccgagugcgucugcaucaacggcaccugcaccgucgucaugaccgacggcuccgccuccggccgcgccgacaccaagauccucuucaucgaggagggcaagaucguccacaucuccccccuccucggcuccgcccagcacgucgaggagugcuccugcuacccccgcuaccccggcguccgcugcgucugccgcgacaacuggaagggcuccaaccgccccaucgucgacaucaacgucaaggacuacuccaucgucuccuccuacgucugcuccggccucgucggcgacaccccccgcaagaacgaccgcuccuccuccuccaacugccucaaccccaacaacgaggagggcggccacggcgucaagggcugggccuucgacgacggcaacgacgucuggaugggccgcaccaucuccgaggagcuccgcuccggcuacgagaccuucaaggucaucgagggcugguccaagcccaacuccaagcuccagaucaaccgccaggucaucgucgaccgcggcgaccgcuccggcuacuccggcaucuucuccgucgagggcaaguccugcaucaaccgcugcuucuacgucgagcucauccgcggccgcaagcaggagaccgaggucugguggaccuccaacuccaucgucgucuucugcggcaccuccggcaccuacggcaccggcuccuggcccgacggcgccgacaucaaccucaugcccaucuga

SEQ ID NO: 110076 - RNA, 1410 nt, Artificial Sequence
  derived and/or modified CDS sequence (opt2) from neuraminidase__InfluenzaA__AAN01169
augaaccccaaccagaagaucaucaccaucggcuccgucucccucaccaucgccaccaucugcuuccucaugcagaucgccauccucgucaccaccgucacccuccacuucaagcaguacgagugcaacucccuccccaacaaccaggucaugcucugcgagcccaccaucaucgagcgcaacaucaccgagaucgucuaccucaccaacaccaccaucgagaaggagaucugccccaagcucgccgaguaccgcaacugguccaagccccagugcaagaucaccggcuucgcccccuucuccaaggacaacuccauccgccucuccgccggcggcgacaucugggucacccgcgagcccuacgucuccugcgaccccgacaagugcuaccaguucgcccucggccagggcaccacccucaacaaccgccacuccaacgacaccguccacgaccgcacccccuaccgcacccuccucaugaacgagcucggcguccccuuccaccucggcaccaagcaggucugcaucgccugguccuccuccuccugccacgacggcaaggccuggcuccacgucugcgucaccggccacgacgagaacgccaccgccuccuucaucuacgacggccgccucgucgacuccaucggcuccugguccaagaagauccuccgcacccaggaguccgagugcgucugcaucaacggcaccugcaccgucgucaugaccgacggcuccgccuccggccgcgccgacaccaagauccucuucaucgaggagggcaagaucauccacaucucccagcucuccggcuccgcccagcacgucgaggagugcuccugcuacccccgcuaccccggcguccgcugcgucugccgcgacaacuggaagggcuccaaccgccccaucgucgacaucaacgucaaggacuacuccaucgucuccuccuacgucugcuccggccucgucggcgacaccccccgcaagaacgacuccuccuccuccucccacugccucaaccccaacaacgaggagggcggccacggcgucaagggcugggccuucgacgacggcaacgacgucuggaugggccgcaccaucuccgagaaguuccgcuccggcuacgagaccuucaaggucaucgagggcugguccaagcccaacuccaagcuccagaucaaccgccaggucaucgucgaccgcgacaaccgcuccggcuacuccggcaucuucuccgucgagggcaaguccugcaucaaccgcugcuucuacgucgagcucauccgcggccgcaagcaggagaccgaggucugguggaccuccaacuccaucgucgucuucugcggcaccuccggcaccuacggcaccggcuccuggcccgacggcgccgacaucaaccucaugcccaucuga

SEQ ID NO: 110077 - RNA, 1410 nt, Artificial Sequence; identical to SEQ ID NO: 110076
  derived and/or modified CDS sequence (opt2) from neuraminidase__InfluenzaA__AAN01170

SEQ ID NO: 110078 - RNA, 1410 nt, Artificial Sequence
  derived and/or modified CDS sequence (opt2) from neuraminidase__InfluenzaA__AAN01171
augaaccccaaccagaagaucaucaccaucggcuccgucucccucaccaucgccaccaucugcuuccucaugcagaucgccauccucgucaccaccgucacccuccacuucaagcaguacgagugcaacucccuccccaacaaccaggucaugcucugcgagcccaccaucaucgagcgcaacaucaccgagaucgucuaccucaccaacaccaccaucgagaaggagaucugccccaagcucgccgaguaccgcaacugguccaagccccagugcaagaucaccggcuucgcccccuucuccaaggacaacuccauccgccucuccgccggcggcgacaucugggucacccgcgagcccuacgucuccugcgaccccgacaagugcuaccaguucgcccucggccagggcaccacccucaacaaccgccacuccaacgacaccguccacggccgcacccccuaccgcacccuccucaugaacgagcucggcguccccuuccaccucggcaccaagcaggucugcaucgccugguccuccuccuccugccacgacggcaaggccuggcuccacgucugcgucaccggccacgacgagaacgccaccgccuccuucaucuacgacggccgccucgucgacuccaucggcuccugguccaagaagauccuccgcacccaggaguccgagugcgucugcaucaacggcaccugcaccgucgucaugaccgacggcuccgccuccggccgcgccgacaccaagauccucuucaucgaggagggcaagaucauccacaucucccagcucuccggcuccgcccagcacgucgaggagugcuccugcuacccccgcuaccccggcguccgcugcgucugccgcgacaacuggaagggcuccaaccgccccaucgucgacaucaacgucaaggacuacuccaucgucuccuccuacgucugcuccggccucgucggcgacaccccccgcaagaacgacuccuccuccuccucccacugccucaaccccaacaacgaggagggcggccacggcgucaagggcugggccuucgacgacggcaacgacgucuggaugggccgcaccaucuccgagaaguuccgcuccggcuacgagaccuucaaggucaucgagggcugguccaagcccaacuccaagcuccagaucaaccgccaggucaucgucgaccgcgacaaccgcuccggcuacuccggcaucuucuccgucgagggcaaguccugcaucaaccgcugcuucuacgucgagcucauccgcggccgcaagcaggagaccgaggucugguggaccuccaacuccaucgucgucuucugcggcaccuccggcaccuacggcaccggcuccuggcccgacggcgccgacaucaaccucaugcccaucuga

SEQ ID NO: 110079 - RNA, 1410 nt, Artificial Sequence; identical to SEQ ID NO: 110076
  derived and/or modified CDS sequence (opt2) from neuraminidase__InfluenzaA__AAN01172

SEQ ID NO: 110080 - RNA, 1410 nt, Artificial Sequence
  derived and/or modified CDS sequence (opt2) from neuraminidase__InfluenzaA__AAN01173
augaaccccaaccagaagaucaucaccaucggcuccgucucccucaccaucgccaccaucugcuuccucaugcagaucgccauccucgucaccaccgucacccuccacuucaagcaguacgagugcaacucccuccccaacaaccaggucaugcucugcgagcccaccaucaucgagcgcaacaucaccgagaucgucuaccucaccaacaccaccaucgagaaggagaugugccccaagcucgccgaguaccgcaacugguccaagccccagugcaagaucaccggcuucgcccccuucuccaaggacaacuccauccgccucuccgccggcggcgacaucugggucacccgcgagcccuacgucuccugcgaccccgacaagugcuaccaguucgcccucggccagggcaccacccucaacaaccgccacuccaacgacaccguccacgaccgcacccccuaccgcacccuccucaugaacgagcucggcguccccuuccaccucggcaccaagcaggucugcaucgccugguccuccuccuccugccacgacggcaaggccuggcuccacgucugcgucaccggccacgacgagaacgccaccgccuccuucaucuacgacggccgccucgucgacuccaucggcuccugguccaagaagauccuccgcacccaggaguccgagugcgucugcaucaacggcaccugcaccgucgucaugaccgacggcuccgccuccggccgcgccgacaccaagauccucuucaucgaggagggcaagaucauccacaucucccagcucuccggcuccgcccagcacgucgaggagugcuccugcuacccccgcuaccccggcguccgcugcgucugccgcgacaacuggaagggcuccaaccgccccaucgucgacaucaacgucaaggacuacuccaucgucuccuccuacgucugcuccggccucgucggcgacaccccccgcaagaacgacuccuccuccuccucccacugccucaaccccaacaacgaggagggcggccacggcgucaagggcugggccuucgacgacggcaacgacgucuggaugggccgcaccaucuccgagaaguuccgcuccggcuacgagaccuucaaggucaucgagggcugguccaagcccaacuccaagcuccagaucaaccgccaggucaucgucgaccgcgacaaccgcuccggcuacuccggcaucuucuccgucgagggcaaguccugcaucaaccgcugcuucuacgucgagcucauccgcggccgcaagcaggagaccgaggucugguggaccuccaacuccaucgucgucuucugcggcaccuccggcaccuacggcaccggcuccuggcccgacggcgccgacaucaaccucaugcccaucuga

SEQ ID NO: 110081 - RNA, 1410 nt, Artificial Sequence; identical to SEQ ID NO: 110076
  derived and/or modified CDS sequence (opt2) from neuraminidase__InfluenzaA__AAN01174

SEQ ID NO: 110082 - RNA, 1410 nt, Artificial Sequence; identical to SEQ ID NO: 110076
  derived and/or modified CDS sequence (opt2) from neuraminidase__InfluenzaA__AAN01175

SEQ ID NO: 110083 - RNA, 1410 nt, Artificial Sequence; identical to SEQ ID NO: 110076
  derived and/or modified CDS sequence (opt2) from neuraminidase__InfluenzaA__AAN01176

SEQ ID NO: 110084 - RNA, 1410 nt, Artificial Sequence; identical to SEQ ID NO: 110076
  derived and/or modified CDS sequence (opt2) from neuraminidase__InfluenzaA__AAN01177

SEQ ID NO: 110085 - RNA, 1410 nt, Artificial Sequence; identical to SEQ ID NO: 110076
  derived and/or modified CDS sequence (opt2) from neuraminidase__InfluenzaA__AAN01178

SEQ ID NO: 110086 - RNA, 1410 nt, Artificial Sequence; identical to SEQ ID NO: 110076
  derived and/or modified CDS sequence (opt2) from neuraminidase__InfluenzaA__AAN01179

SEQ ID NO: 110087 - RNA, 1410 nt, Artificial Sequence; identical to SEQ ID NO: 110076
  derived and/or modified CDS sequence (opt2) from neuraminidase__InfluenzaA__AAN01180

SEQ ID NO: 110088 - RNA, 1410 nt, Artificial Sequence
  derived and/or modified CDS sequence (opt2) from neuraminidase__InfluenzaA__AAN01181
augaaccccaaccagaagaucaucaccaucggcuccgucucccucaccaucgccaccaucugcuuccucaugcagaucgccauccucgucaccaccgucacccuccacuucaagcaguacgagugcaacucccuccccaacaaccaggucaugcucugcgagcccaccaucaucgagcgcaacaucaccgagaucgucuaccucaccaacaccaccaucgagaaggagaucugccccaagcucgccgaguaccgcaacugguccaagccccagugcaagaucaccggcuucgcccccuucuccaaggacaacuccauccgccucuccgccggcggcgacaucugggucacccgcgagcccuacgucuccugcgaccccgacaagugcuaccaguucgcccucggccagggcaccacccucaacaaccgccacuccaacgacaccguccacgaccgcacccccuaccgcacccuccucaugaacgagcucggcguccccuuccaccucggcaccaagcaggucugcaucgccugguccuccuccuccugccacgacggcaaggccuggcuccacgucugcgucaccggccacgacgagaacgccaccgccuccuucaucuacgacggccgccucgucgacuccaucggcuccugguccaagaagauccuccgcacccaggaguccgagugcgucugcaucaacggcaccugcaccgucgucaugaccgacggcuccgccuccggccgcgccgacaccaagauccucuucaucgaggagggcaagaucauccacaucucccagcucuccggcuccgcccagcacgucgaggagugcuccugcuacccccgcuaccccggcguccgcugcgucugccgcgacaacuggaagggcuccaaccgccccaucgucgacaucaacgucaaggacuacuccaucgucuccuccuacgucugcuccggccucgucggcgacaccccccgcaagaacgacuccuccuccuccucccacugccucaaccccaacaacgaggagggcggccacggcgucaagggcugggccuucgacgacggcaacgacgucuggaugggccgcaccaucggcgagaaguuccgcuccggcuacgagaccuucaaggucaucgagggcugguccaagcccaacuccaagcuccagaucaaccgccaggucaucgucgaccgcgacaaccgcuccggcuacuccggcaucuucuccgucgagggcaaguccugcaucaaccgcugcuucuacgucgagcucauccgcggccgcaagcaggagaccgaggucugguggaccuccaacuccaucgucgucuucugcggcaccuccggcaccuacggcaccggcuccuggcccgacggcgccgacaucaaccucaugcccaucuga

SEQ ID NO: 110089 - RNA, 1410 nt, Artificial Sequence; identical to SEQ ID NO: 110076
  derived and/or modified CDS sequence (opt2) from neuraminidase__InfluenzaA__AAN01182

SEQ ID NO: 110090 - RNA, 1410 nt, Artificial Sequence; identical to SEQ ID NO: 110076
  derived and/or modified CDS sequence (opt2) from neuraminidase__InfluenzaA__AAN01183

SEQ ID NO: 110091 - RNA, 1410 nt, Artificial Sequence; identical to SEQ ID NO: 110076
  derived and/or modified CDS sequence (opt2) from neuraminidase__InfluenzaA__AAN01184

SEQ ID NO: 110092 - RNA, 1410 nt, Artificial Sequence; identical to SEQ ID NO: 110076
  derived and/or modified CDS sequence (opt2) from neuraminidase__InfluenzaA__AAN01185

SEQ ID NO: 110093 - RNA, 1410 nt, Artificial Sequence
  derived and/or modified CDS sequence (opt2) from neuraminidase__InfluenzaA__AAN01186
augaaccccaaccagaagaucaucaccaucggcuccgucucccucaccaucgccaccaucugcuuccucaugcagaucgccauccucgucaccaccgucacccuccacuucaagcaguacgagugcaacucccuccccaacaaccaggucaugcucugcgagcccaccaucaucgagcgcaacaucaccgagaucgucuaccucaccaacaccaccaucgagaaggagaucugccccaagcucgccgaguaccgcaacugguccaagccccagugcaagaucaccggcuucgcccccuucuccaaggacaacuccauccgccucuccgccggcggcgacaucugggucacccgcgagcccuacgucuccugcgaccccgacaagugcuaccaguucgcccucggccagggcaccacccucaacaaccgccacuccaacgacaccguccacgaccgcacccccuaccgcacccuccucaugaacgagcucggcguccccuuccaccucggcaccaagcaggucugcaucgccugguccuccuccuccugccacgacggcaaggccuggcuccacgucugcgucaccggccacgacgagaacgccaccgccuccuucaucuacgacggccgccucgucgacuccaucggcuccugguccaagaagauccuccgcacccaggaguccgagugcgucugcaucaacggcaccugcaccgucgucaugaccgacggcuccgccuccggccgcgccgacaccaagauccucuucaucgaggagggcaagaucauccacaucucccagcucuccggcuccgcccagcacgucgaggagugcuccugcuacccccgcuaccccggcguccgcugcgucugccgcgacaacuggaagggcuccaaccgccccaucgucgacaucaacgucaaggacuacuccaucgucuccuccuacgucugcuccggccucgucggcgacaccccccgcaagaacgacuccuccuccuccucccacugccucaaccccaacaacgaggagggcggccacggcgucaagggcugggccuucgacgacggcaacgacgucuggaugggccgcaccaucuccgagaaguuccgccucggcuacgagaccuucaaggucaucgagggcugguccaaguccaacuccaagcuccagaucaaccgccaggucaucgucgaccgcgacaaccgcuccggcuacuccggcaucuucuccgucgagggcaaguccugcaucaaccgcugcuucuacgucgagcucauccgcggccgcaagcaggagaccgaggucugguggaccuccaacuccaucgucgucuucugcggcaccuccggcaccuacggcaccggcuccuggcccgacggcgccgacaucaaccucaugcccaucuga

SEQ ID NO: 110094 - RNA, 1410 nt, Artificial Sequence
  derived and/or modified CDS sequence (opt2) from neuraminidase__InfluenzaA__AAN01187
augaaccccaaccagaagaucaucaccaucggcuccgucucccucaccaucgccaccaucugcuuccucaugcagaucgccauccucgucaccaccgucacccuccacuucaagcaguacgagugcgacucccuccccaacaaccaggucaugcucugcgagcccaccaucaucgagcgcaacaucaccgagaucgucuaccucaccaacaccaccaucgagaaggagaugugccccaagcucgccgaguaccgcaacugguccaagccccagugcaagaucaccggcuucgcccccuucuccaaggacaacuccauccgccucuccgccggcggcgacaucugggucacccgcgagcccuacgucuccugcgaccccgacaagugcuaccaguucgcccucggccagggcaccacccucaacaaccgccacuccaacgacaccguccacgaccgcacccccuaccgcacccuccucaugaacgagcucggcguccccuuccaccucggcaccaagcaggucugcaucgccugguccuccuccuccugccacgacggcaaggccuggcuccacgucugcgucaccggccacgacgagaacgccaccgccuccuucaucuacgacggccgccucgucgacuccaucggcuccugguccaagaagauccuccgcacccaggaguccgagugcgucugcaucaacggcaccugcaccgucgucaugaccgacggcuccgccuccggccgcgccgacaccaagauccucuucaucgaggagggcaagaucauccacaucucccagauguccggcuccgcccagcacgucgaggagugcuccugcuacccccgcuaccccggcguccgcugcgucugccgcgacaacuggaagggcuccaaccgccccaucgucgacaucaacgucaaggacuacuccaucgucuccuccuacgucugcuccggccucgucggcgacaccccccgcaagaacgacuccuccuccuccucccacugccucaaccccaacaacgaggagggcggccacggcgucaagggcugggccuucgacgacggcaacgacgucuggaugggccgcaccaucuccgagaaguuccgcuccggcuacgagaccuucaaggucaucgagggcugguccaagcccaacuccaagcuccagaucaaccgccaggucaucgucgaccgcgacaaccgcuccggcuacuccggcaucuucuccgucgagggcaaguccugcaucaaccgcugcuucuacgucgagcucauccgcggccgcaagcaggagaccgaggucugguggaccuccaacuccaucgucgucuucugcggcaccuccggcaccuacggcaccggcuccuggcccgacggcgccgacaucaaccucaugcccaucuga

SEQ ID NO: 110095 - RNA, 1410 nt, Artificial Sequence; identical to SEQ ID NO: 110076
  derived and/or modified CDS sequence (opt2) from neuraminidase__InfluenzaA__AAN01188

SEQ ID NO: 110096 - RNA, 1410 nt, Artificial Sequence
  derived and/or modified CDS sequence (opt2) from neuraminidase__InfluenzaA__AAN64883
augaaccccaaccagaagaucaucaccaucggcuccgucucccucaccaucgccaccaucugcuuccucaugcagaucgccauccucgucaccaccgucacccuccacuucaagcaguacgagugcaacuccccccccaacaaccaggucaugcucugcgagcccaccaucaucgagcgcaacaucaccgagaucgucuaccucaccaacaccaccaucgagaaggagaucugccccaagcucgccgaguaccgcaacugguccaagccccagugcaacaucaccggcuucgcccccuucuccaaggacaacuccauccgccucuccgccggcggcgacaucugggucacccgcgagcccuacgucuccugcgaccccgacaagugcuaccaguucgcccucggccagggcaccacccucaacaacggccacuccaacgacaccguccacgaccgcacccccuaccgcacccuccucaugaacgagcucggcguccccuuccaccucggcaccaagcaggucugcaucgccugguccuccuccuccugccacgacggcaaggccuggcuccacgucugcgucaccggcgacgacgagaacgccaccgccuccuucaucuacaacggccgccucgucgacuccaucggcuccugguccaagaagauccuccgcacccaggaguccgagugcgucugcaucaacggcaccugcaccgucgucaugaccgacggcuccgccuccggcaaggccgacaccaagauccucuucaucgaggagggcaagaucguccacaccucccuccucuccggcuccgcccagcacgucgaggagugcuccugcuacccccgcuaccccggcguccgcugcgucugccgcgacaacuggaagggcuccaaccgccccaucgucgacaucaacgucaaggacuacuccaucgucuccuccuacgucugcuccggccucgucggcgacaccccccgcaagaacgacuccuccuccuccucccacugccucgaccccaacaacgaggagggcggccacggcgucaagggcugggccuucgacgacggcgacgacgucuggaugggccgcaccaucuccgagaagcuccgcuccggcuacgagaccuucaaggucaucgagggcugguccaagcccaacuccaagcuccagaucaaccgccaggucaucgucgaccgcggcaaccgcuccggcuacuccggcaucuucuccgucgagggcaaguccugcaucaaccgcugcuucuacgucgagcucauccgcggccgcaagcaggagaccgagguccucuggaccuccaacuccaucgucgucuucugcggcaccuccggcaccuacggcaccggcuccuggcccgacggcgccgacaucaaccucaugcccaucuga

SEQ ID NO: 110097 - RNA, 1410 nt, Artificial Sequence
  derived and/or modified CDS sequence (opt2) from neuraminidase__InfluenzaA__AAN64884
augaaccccaaccagaagaucaucaccaucggcuccgucucccucaccaucgccaccaucugcuuccucaugcagaucgccauccucgucaccaccgucacccuccacuucaagcaguacgagugcaacuccccccccaacaaccaggucaugcucugcgagcccaccaucaucgagcgcaacaucaccgagaucgucuaccucaccaacaccaccaucgagaaggagaucugccccaagcucgccgaguaccgcaacugguccaagccccagugcaacaucaccggcuucgcccccuucuccaaggacaacuccauccgccucuccgccggcggcgacaucugggucacccgcgagcccuacgucuccugcgaccccgacaagugcuaccaguucgcccucggccagggcaccacccucaacaacggccacuccaacgacaccguccacgaccgcacccccuaccgcacccuccucaugaacgagcucggcguccccuuccaccucggcaccaagcaggucugcaucgccugguccuccuccuccugccacgacggcaaggccuggcuccacgucugcgucaccggcgacgacgagaacgccaccgccuccuucaucuacaacggccgccucgucgacuccaucggcuccugguccaagaagauccuccgcacccaggaguccgagugcgucugcaucaacggcaccugcaccgucgucaugaccgacggcuccgccuccggcaaggccgacaccaagauccucuucaucgaggagggcaagaucguccacaccucccuccucuccggcuccgcccagcacgucgaggagugcuccugcuacccccgcuaccccggcguccgcugcgucugccgcgacaacuggaagggcuccaaccgccccaucgucgacaucaacgucaaggacuacuccaucgucuccuccuacgucugcuccggccucgucggcgacaccccccgcaagaacgacuccuccuccuccucccacugccucgaccccaacaacgaggagggcggccacggcgucaagggcugggccuucgacgacggcaacgacgucuggaugggccgcaccaucuccgagaagcuccgcuccggcuacgagaccuucaaggucaucgagggcugguccaagcccaacuccaagcuccagaucaaccgccaggucaucgucgaccgcggcaaccgcuccggcuacuccggcaucuucuccgucgagggcaaguccugcaucaaccgcugcuucuacgucgagcucauccgcggccgcaagcaggagaccgagguccucuggaccuccaacuccaucgucgucuucugcggcaccuccggcaccuacggcaccggcuccuggcccgacggcgccgacaucaaccucaugcccaucuga

SEQ ID NO: 110098 - RNA, 1410 nt, Artificial Sequence; identical to SEQ ID NO: 110097
  derived and/or modified CDS sequence (opt2) from neuraminidase__InfluenzaA__AAN64885

SEQ ID NO: 110099 - RNA, 1410 nt, Artificial Sequence; identical to SEQ ID NO: 110097
  derived and/or modified CDS sequence (opt2) from neuraminidase__InfluenzaA__AAN64886

SEQ ID NO: 110100 - RNA, 1410 nt, Artificial Sequence; identical to SEQ ID NO: 110097
  derived and/or modified CDS sequence (opt2) from neuraminidase__InfluenzaA__AAN64887

SEQ ID NO: 110101 - RNA, 1410 nt, Artificial Sequence
  derived and/or modified CDS sequence (opt2) from neuraminidase__InfluenzaA__AAN64888
augaaccccaaccagaagaucaucaccaucggcuccgucucccucaccaucgccaccaucugcuuccucaugcagaucgucauccucgucaccaccgucacccuccacuucaagcaguacgagugcaacuccccccccaacaaccaggucaugcucugcgagcccaccaucaucgagcgcaacaucaccgagaucgucuaccucaccaacaccaccaucgagaaggagaucugccccaagcucgccgaguaccgcaacugguccaagccccagugcaacaucaccggcuucgcccccuucuccaaggacaacuccauccgccucuccgccggcggcgacaucugggucacccgcgagcccuacgucuccugcgaccccgacaagugcuaccaguucgcccucggccagggcaccacccucaacaacggccacuccaacgacaccguccacgaccgcacccccuaccgcacccuccucaugaacgagcucggcguccccuuccaccucggcaccaagcaggucugcaucgccugguccuccuccuccugccacgacggcaaggccuggcuccacgucugcgucaccggcgacgacaagaacgccaccgccuccuucaucuacaacggccgccucgucgacuccaucggcuccugguccaagaagauccuccgcacccaggaguccgagugcgucugcaucaacggcaccugcaccgucgucaugaccgacggcuccgccuccggcaaggccgacaccaagauccucuucaucgaggagggcaagaucguccacaccucccuccucuccggcuccgcccagcacgucgaggagugcuccugcuacccccgcuaccccggcguccgcugcgucugccgcgacaacuggaagggcuccaaccgccccaucgucgacaucaacgucaaggacuacuccaucgucuccuccuacgucugcuccggccucgucggcgacaccccccgcaagaacgacuccuccuccuccucccacugccucgaccccaacaacgaggagggcggccacggcgucaagggcugggccuucgacgacggcaacgacgucuggaugggccgcaccaucuccgagaagcuccgcuccggcuacgagaccuucaaggucaucgagggcugguccaagcccaacuccaagcuccagaucaaccgccaggucaucgucgaccgcggcaaccgcuccggcuacuccggcaucuucuccgucgagggcaaguccugcaucaaccgcugcuucuacgucgagcucauccgcggccgcaaccaggagaccgagguccucuggaccuccaacuccaucgucgucuucugcggcaccuccggcaccuacggcaccggcuccuggcccgacggcgccgacaucaaccucaugcccaucuga

SEQ ID NO: 110102 - RNA, 1410 nt, Artificial Sequence; identical to SEQ ID NO: 110097
  derived and/or modified CDS sequence (opt2) from neuraminidase__InfluenzaA__AAN64889

SEQ ID NO: 110103 - RNA, 1410 nt, Artificial Sequence
  derived and/or modified CDS sequence (opt2) from neuraminidase__InfluenzaA__AAN64890
augaaccccaaccagaagaucaucaccaucggcuccgucucccucaccaucgccaccaucugcuuccucaugcagaucgccauccucgucaccaccgucacccuccacuucaagcaguacgagugcaacuccccccccaacaaccaggagaugcucugcgagcccaccaucaucgagcgcaacaucaccgagaucgucuaccucaccaacaccaccaucgagaaggagaucugccccaagcucgccgaguaccgcaacugguccaagccccagugcaacaucaccggcuucgcccccuucuccaaggacaacuccauccgccucuccgccggcggcgacaucugggucacccgcgagcccuacgucuccugcgaccccgacaagugcuaccaguucgcccucggccagggcaccacccucaacaacggccacuccaacgacaccguccacgaccgcacccccuaccgcacccuccucaugaacgagcucggcguccccuuccaccucggcaccaagcaggucugcaucgccugguccuccuccuccugccacgacggcaaggccuggcuccacgucugcgucaccggcgacgacgagaacgccaccgccuccuucaucuacaacggccgccucgucgacuccaucggcuccugguccaagaagauccuccgcacccaggaguccgagugcgucugcaucaacggcaccugcaccgucgucaugaccgacggcuccgccuccggcaaggccgacaccaagauccucuucaucgaggagggcaagaucguccacaccucccuccucuccggcuccgcccagcacgucgaggagugcuccugcuacccccgcuaccccggcguccgcugcgucugccgcgacaacuggaagggcuccaaccgccccaucgucgacaucaacgucaaggacuacuccaucgucuccuccuacgucugcuccggccucgucggcgacaccccccgcaagaacgacuccuccuccuccucccacugccucgaccccaacaacgaggagggcggccacggcgucaagggcugggccuucgacgacggcaacgacgucuggaugggccgcaccaucuccgagaagcuccgcuccggcuacgagaccuucaaggucaucgagggcugguccaagcccaacuccaagcuccagaucaaccgccaggucaucgucgaccgcggcaaccgcuccggcuacuccggcaucuucuccgucgagggcaaguccugcaucaaccgcugcuucuacgucgagcucauccgcggccgcaagcaggagaccgagguccucuggaccuccaacuccaucgucgucuucugcggcaccuccggcaccuacggcaccggcuccuggcccgacggcgccgacaucaaccucaugcccaucuga

SEQ ID NO: 110104 - RNA, 1410 nt, Artificial Sequence; identical to SEQ ID NO: 110097
  derived and/or modified CDS sequence (opt2) from neuraminidase__InfluenzaA__AAN64891

SEQ ID NO: 110105 - RNA, 1410 nt, Artificial Sequence
  derived and/or modified CDS sequence (opt2) from neuraminidase__InfluenzaA__AAO46212
augaaccccaaccagaagaucaucaccaucggcuccgucucccucaccaucgagaccgucugcuuccucaugcagaucgccauccucgccaccaccgucacccuccacuucaagcagcacgagugcgacucccccgccuccaaccaggucaugcccugcgagcccaucaucaucgagcgcaacaucaccgagaucgucuaccucaacaacaccaccaucgagaaggagaucugccccgaggucgucgaguaccgcaacugguccaagccccagugccagaucaccggcuucgcccccuucuccaaggacaacuccauccgccucuccgccggcggcgacaucugggucacccgcgagcccuacgucuccugcgacaccggcaagugcuaccaguucgcccucggccagggcaccacccucgacaacaagcacuccaacggcaccauccacgaccgcaucccccaccgcacccuccucaugaacgagcucggcguccccuuccaccucggcaccaagcaggucugcgucgccugguccuccuccuccugccacgacggcaaggccuggcuccacgucugcgucaccggcgacgaccgcaacgccaccgccuccuucaucuacgacggccgccucgucgacuccaucggcuccuggucccagaacauccuccgcacccaggaguccgagugcgucugcaucaacggcaccugcaccgucgucaugaccgacggcuccgccuccggccgcgccgacacccgcauccucuucaucaaggagggcaagaucguccacaucuccccccucuccggcuccgcccagcacaucgaggagugcuccugcuacccccgcuaccccgacguccgcugcaucugccgcgacaacuggaagggcuccaaccgccccgucaucgacaucaacauggaggacuacuccaucgacuccuccuacgucugcuccggccucgucggcgacaccccccgcaacgacgacuccuccuccaacuccaacugccgcgaccccaacaacgagcgcggcaaccccggcgucaagggcugggccuucgacaacggcgacgacgucuggaugggccgcaccaucuccaaggaccuccgcuccggcuacgagaccuucaaggucaucggcggcugguccacccccaacuccaagucccaggucaaccgccaggucaucgucgacaacaacaacugguccggcuacuccggcaucuucuccgucgagggcaaguccugcaucaaccgcugcuucuacgucgagcucauccgcggccgcccccaggagacccgcgucugguggaccuccaacuccaucgucgucuucugcggcaccuccggcaccuacggcaccggcuccuggcccgacggcgccaacaucaacuucaugcccaucuga

SEQ ID NO: 110106 - RNA, 1410 nt, Artificial Sequence
  derived and/or modified CDS sequence (opt2) from neuraminidase__InfluenzaA__AAO46213
augaaccccaaccagaagaucaucaccaucgacuccgucucccucaccaucgccaccgucugcuuccucaugcagaucgccauccucgccaccaccgucacccuccacuucaagcagcacgagugcgacucccccgccuccaaccaggucaugcccugcgagcccaucaucaucgagcgcaacaucaccgagaucgucuaccucaacaacaccaccaucgagaaggagaucugccccgaggucgucgaguaccgcaacugguccaagccccagugccagaucaccggcuucgcccccuucuccaaggacaacuccauccgccucuccgccggcggcgacaucugggucacccgcgagcccuacgucuccugcgacaccggcaagugcuaccaguucgcccucggccagggcaccacccucgacaacaagcacuccaacggcaccauccacgaccgcaucccccaccgcacccuccucaugaacgagcucggcguccccuuccaccucggcaccaagcaggucugcgucgccugguccuccuccuccugccacgacggcaaggccuggcuccacgucugcgucaccggcgacgaccgcaacgccaccgccuccuucaucuacgacggccgccucgucgacuccaucggcuccuggucccagaacauccuccgcacccaggaguccgagugcgucugcaucaacggcaccugcaccgucgucaugaccgacggcuccgccuccggccgcgccgacacccgcauccucuucaucaaggagggcaagaucguccacaucuccccccucuccggcuccgcccagcacaucgaggagugcuccugcuacccccgcuaccccgacguccgcugcaucugccgcgacaacuggaagggcuccaaccgccccgucaucgacaucaacauggaggacuacuccaucgacuccuccuacgucugcuccggccucgucggcgacaccccccgcaacgacgacuccuccuccaacuccaacugccgcgaccccaacaacgagcgcggcaaccccggcgucaagggcugggccuucgacaacggcgacgacgucuggaugggccgcaccaucuccaaggaccuccgcuccggcuacgagaccuucaaggucaucggcggcugguccacccccaacuccaagucccaggucaaccgccaggucaucgucgacaacaacaacugguccggcuacuccggcaucuucuccgucgagggcaaguccugcaucaaccgcugcuucuacgucgagcucauccgcggccgcccccaggagacccgcgucugguggaccuccaacuccaucgucgucuucugcggcaccuccggcaccuacggcaccggcuccuggcccgacggcgccaacaucaacuucaugcccaucuga

SEQ ID NO: 110107 - RNA, 1410 nt, Artificial Sequence
  derived and/or modified CDS sequence (opt2) from neuraminidase__InfluenzaA__AAO46214
augaaccccaaccagaagaucaucaccaucggcuccgucucccucaccaucgccaccgucugcuuccucaugcagaucgccauccucgccaccaccgucacccuccacuucaagcagcacgagugcgacucccccgccuccaaccaggucaugcccugcgagcccaucaucaucgagcgcaacaucaccgagaucgucuaccucaacaacaccaccaucgagaaggagaucugccccgaggccgucgaguaccgcaacugguccaagccccagugccagaucaccggcuucgcccccuucuccaaggacaacuccauccgccucuccgccggcggcgacaucugggucacccgcgagcccuacgucuccugcgaccccggcaagugcuaccaguucgcccucggccagggcaccacccucgacaacaagcacuccaacggcaccauccacgaccgcaucccccaccgcacccuccucaugaacgagcucggcguccccuuccaccucggcaccaagcaggucugcgucgccugguccuccuccuccugccacgacggcaaggccuggcuccacgucugcgucaccggcgacgaccgcaacgccaccgccuccuucaucuacgacggccgccucgucgacuccaucggcuccuggucccagaacauccuccgcacccaggaguccgagugcgucugcaucaacggcaucugcaccgucgucaugaccgacggcuccgccuccggccgcgccgacacccgcauccucuucaucgaggagggcaagaucguccacaucuccccccucuccggcuccgcccagcacgucgaggagugcuccugcuacccccgcuaccccgacguccgcugcaucugccgcgacaacuggaagggcuccaaccgccccgucaucgacaucaacauggaggacuacuccaucgacuccuccuacgucugcuccggccucgucggcgacaccccccgcaacgacgaccgcuccuccaacuccaacugccgcgaccccaacaacgagcgcggcaaccccggcgucaagggcugggccuucgacaacggcgacgacgucuggaugggccgcaccaucuccaaggaccuccgcuccggcuacgagaccuucaaggucaucggcggcugguccacccccaacuccaagucccaggucaaccgccaggucaucgucgacaacaacaacugguccggcuacuccggcaucuucuccgucgagggcaaguccugcaucaaccgcugcuucuacgucgagcucauccgcggccgccagcaggagacccgcgucugguggaccuccaacuccaucgucgucuucugcggcaccuccggcaccuacggcaccggcuccuggcccgacggcgccaacaucaacuucaugcccaucuga

SEQ ID NO: 110108 - RNA, 1410 nt, Artificial Sequence
  derived and/or modified CDS sequence (opt2) from neuraminidase__InfluenzaA__AAO46215
augaaccccaaccagaagaucaucaccaucggcuccgucucccucaccaucgccaccgucugcuuccucaugcagaucgccauccucgccaccaccgucacccuccacuucaagcagcacgagugcgacucccccaccuccaaccaggucaugcccugcgagcccaucaucaucgagcgcaacaucaccgagaucgucuaccucaacaacaccaccaucgagaaggagaucugccccgaggucgucgaguaccgcaacugguccaagccccagugccagaucaccggcuucgcccccuucuccaaggacaacuccauccgccucuccgccggcggcgacaucugggucacccgcgagcccuacgucuccugcgaccccggcaagugcuaccaguucgcccucggccagggcaccacccucgacaacaagcacuccaacggcaccauccacgaccgcaucccccaccgcacccuccucaugaacgagcucggcguccccuuccaccucggcaccaagcaggucugcgucgccugguccuccuccuccugccacgacggcaaggccuggcuccacgucugcgucaccggcgacgaccgcaacgccaccgccuccuucaucuacgacggccgccucgucgacuccaucggcuccuggucccagaacauccuccgcacccaggaguccgagugcgucugcaucaacggcaccugcaccgucgucaugaccgacggcuccgccuccggccgcgccgacacccgcauccucuucaucaaggagggcaagaucguccacaucuccccccucuccggcuccgcccagcacaucgaggagugcuccugcuacccccgcuaccccgacguccgcugcaucugccgcgacaacuggaagggcuccaaccgccccgucaucgacaucaacauggaggacuacuccaucgacuccuccuacgucugcuccggccucgucggcgacaccccccgcaacggcgacuccuccuccaacuccaacugccgcgaccccaacaacgagcgcggcaaccccggcgucaagggcugggccuucgacaacggcgacgacgucuggaugggccgcaccaucuccaaggagucccgcuccggcuacgagaccuucaaggucaucggcggcugguccacccccaacuccaagucccaggucaaccgccaggucaucgucgacaacaacaacugguccggcuacuccggcaucuucuccgucgagggcaaguccugcaucaaccgcugcuucuacgucgagcucauccgcggccgcccccaggagacccgcgucugguggaccuccaacuccaucgucgucuucugcggcaccuccggcaccuacggcaccggcuccuggcccgacggcgccaacaucaacuucaugcccaucuga

SEQ ID NO: 110109 - RNA, 1410 nt, Artificial Sequence
  derived and/or modified CDS sequence (opt2) from neuraminidase__InfluenzaA__AAO46216
augaaccccaaccagaagaucaucaccaucggcuccgucucccucaccaucgccaccgucugcuuccucaugcagaucgccauccucgccaccaccgucacccuccacuucaagcagcacgagugcgacucccccgccuccaaccaggucaugcccugcgagcccaucaucaucgagcgcaacaucaccgagaucgucuaccucaacaacaccaccaucgagaaggagaucugccccgaggucgucgaguaccgcaacugguccaagccccagugccagaucaccggcuucgcccccuucuccaaggacaacuccauccgccucuccgccggcggcgacaucugggucacccgcgagcccuacgucuccugcgaccccuccaagugcuaccaguucgcccucggccagggcaccacccucgagaacaagcacuccaacggcaccaagcacgaccgcaucccccaccgcacccuccucaugaacgagcucggcguccccuuccaccucggcaccaagcaggucugcgucgccugguccuccuccuccugccacgacggcaaggccuggcuccacgucugcgucaccggcgacgaccgcaacgccaccgccuccuucaucuacgagggccgccucgucgacuccaucgucuccuggucccagaacauccuccgcacccaggaguccgagugcgucugcaucaacggcaccugcaccgucgucaugaccgacggcuccgccuccggccgcgccgacacccgcauccucuucaucaaggagggcaagaucguccacaucuccccccucuccggcuccgcccagcacaucgaggagugcuccugcuacccccgcuaccccgacguccgcugcaucugccgcgacaacuggaagggcuccaaccgccccgucaucgacaucaacauggaggacuacuccaucgacuccuccuacgucugcuccggccucgucggcgacaccccccgcaacgacgacuccuccuccaacuccaacugccgcgaccccaacaacgagcgcggcaaccccggcgucaagggcugggccuucgacaacggcgacgacgucuggaugggccgcaccaucuccaaggacucccgcuccggcuacgagaccuucaaggucaucggcggcugguccacccccaacuccaagucccaggucaaccgccaggucaucgucgacuccaacaacugguccggcuacuccggcaucuucuccgucgagggcaaguccugcaucaaccgcugcuucuacgucgagcucauccgcggccgcccccaggagacccgcgucugguggaccuccaacuccaucgucgucuucugcggcaccuccggcaccuacggcaccggcuccuggcccgacggcgccaacaucaacuucaugcccaucuga

SEQ ID NO: 110110 - RNA, 1410 nt, Artificial Sequence
  derived and/or modified CDS sequence (opt2) from neuraminidase__InfluenzaA__AAO46217
augaaccccaaccagaagaucaucaccaucggcuccgucucccucaccaucgccaccgucugcuuccucaugcagaucgccauccucgccaccaccgucacccuccacuucaagcagcacgagugcgacucccccgccuccaaccaggucaugcccugcgagcccaucaucaucgagcgcaacaucaccgagaucgucuaccucaacaacaccaccaucgagaaggagaucugccccgaggucgucgaguaccgcaacugguccaagccccagugccagaucaccggcuucgcccccuucuccaaggacaacuccauccgccucuccgccggcggcgacaucugggucacccgcgagcccuacgucuccugcgaccccuccaagugcuaccaguucgcccucggccagggcaccacccucgacaacaagcacuccaacggcaccauccacgaccgcaucccccaccgcacccuccucaugaacgagcucggcguccccuuccaccucggcaccaagcaggucugcgucgccugguccuccuccuccugccacgacggcaaggccuggcuccacgucugcgucaccggcgacgaccgcaacgccaccgccuccuucaucuacgacggccgccucgaggacuccaucggcuccuggucccagaacauccuccgcacccaggaguccgagugcgucugcaucaacggcaccugcaccgucgucaugaccgacggcuccgccuccggccgcgccgacacccgcauccucuucaucaaggagggcaagaucguccacaucuccccccucuccggcuccgcccagcacaucgaggagugcuccugcuacccccgcuaccccgacguccgcugcaucugccgcgacaacuggaagggcuccaaccgccccguccucgacaucuccauggaggacuacuccaucgacuccuccuacgucugcuccggccucgucggcgacaccccccgcaacgacgacuccuccuccaacuccaacugccgcgaccccaacaacgagcgcggcaaccccggcgucaagggcugggccuucgacaacggcgacgacgucuggaugggccgcaccaucuccaaggaccuccgcuccggcuacgagaccuucaaggucaucggcggcugguccacccccaacuccaagucccaggucaaccgccaggucaucgucgacaacaacaacugguccggcuacuccggcaucuucuccgucgagggcaaguccugcaucaaccgcugcuucuacgucgagcucauccgcggccgcucccaggagacccgcgucugguggaccuccaacuccaucgucgucuucugcggcaccuccggcaccuacggcaccggcuccuggcccgacggcgccaacaucaacuucaugcccaucuga

SEQ ID NO: 110111 - RNA, 1410 nt, Artificial Sequence
  derived and/or modified CDS sequence (opt2) from neuraminidase__InfluenzaA__AAO46218
augaaccccaaccagaagaucaucaccaucggcuccgucucccucaccaucgccaccgucugcuuccucaugcagaucgccauccucgccaccaccgucacccuccacuucaagcagcacgagugcgacucccccgccuccaaccaggucaugcccugcgagcccaucaucaucgagcgcaacaucaccgagaucgucuaccucaacaacaccaccaucgagaaggagaucugccccgaggucgucgaguaccgcaacugguccaagccccagugccagaucaccggcuucgcccccuucuccaaggacaacuccauccgccucuccgccggcggcgacaucugggucacccgcgagcccuacgucuccugcgaccccggcaagugcuaccaguucgcccucggccagggcaccacccucgacaacaagcacuccaacggcaccauccacgaccgcaucccccaccgcacccuccucaugaacgagcucggcguccccuuccaccucggcaccaagcaggucugcgucgccugguccuccuccuccugccacgacggcaaggccuggcuccacgucugcgucaccggcgacgaccgcaacgccaccgccuccuucaucuacgacggccgccucgaggacuccaucggcuccuggucccagaacauccuccgcacccaggaguccgagugcgucugcaucaacggcaccugcaccgucgucaugaccgacggcuccgccuccggccgcgccgacacccgcauccucuucaucaaggagggcaagaucguccacaucuccccccucuccggcuccgcccagcacaucgaggagugcuccugcuacccccgcuaccccgacguccgcugcaucugccgcgacaacuggaagggcuccaaccgccccguccucgacaucuccauggaggacuacuccaucggcuccuccuacgucugcuccggccucgucggcgacaccccccgcaacgacgacuccuccuccaacuccaacugccgcgaccccaacaacgagcgcggcaaccccggcgucaagggcugggccuucgacaacggcgacgacgucuggaugggccgcaccaucuccaaggaccuccgcuccggcuacgagaccuucaaggucaucggcggcugguccacccccaacuccaagucccaggucaaccgccaggucaucgucgacaacaacaacugguccggcuacuccggcaucuucuccgucgagggcaaguccugcaucaaccgcugcuucuacgucgagcucauccgcggccgcucccaggagacccgcgucugguggaccuccaacuccaucgucgucuucugcggcaccuccggcaccuacggcaccggcuccuggcccgacggcgccaacaucaacuucaugcccaucuga

SEQ ID NO: 110112 - RNA, 1410 nt, Artificial Sequence
  derived and/or modified CDS sequence (opt2) from neuraminidase__InfluenzaA__AAO46220
augaaccccaaccagaagaucaucaccaucggcuccgucucccucaccaucgccaccgucugcuuccucaugcagaucgccauccucgccaccaccgucacccuccacuucaagcagcacgagugcgacucccccgccuccaaccaggucaugcccugcgagcccaucaucaucgagcgcaacaucaccgagaucgucuaccucaacaacaccaccaucgagaaggagaucugccccgaggccgucgaguaccgcaacugguccaagccccagugccagaucaccggcuucgcccccuucuccaaggacaacuccauccgccucuccgccggcggcgacaucugggucacccgcgagcccuacgucuccugcgaccccggcaagugcuaccaguucgcccucggccagggcaccacccucgacaacaagcacuccaacgacaccauccacgaccgcaucccccaccgcacccuccucaugaacgagcucggcguccccuuccaccucggcacccgccaggucugcgucgccugguccuccuccuccugccacgacggcaaggccuggcuccacgucugcgucaccggcgacgaccgcaacgccaccgccuccuucaucuacgacggccgccucgucgacuccaucggcuccuggucccagaacauccuccgcacccaggaguccgagugcgucugcaucaacggcaucugcaccgucgucaugaccgacggcuccgccuccggccgcgccgacacccgcauccucuucaucgaggagggcaagaucguccacaucuccccccucuccggcuccgcccagcacgucgaggagugcuccugcuacccccgcuaccccgacguccgcugcaucugccgcgacaacuggaagggcuccaaccgccccgucaucgacaucaacauggaggacuacuccaucgacuccuccuacgucugcuccggccucgucggcgacaccccccgcaacgacgaccgcuccuccaacuccaacugccgcgaccccaacaacgagcgcggcaaccccggcgucaagggcugggccuucgacaacggcgacgacgucuggaugggccgcaccaucuccaaggaccuccgcuccggcuacgagaccuucaaggucaucggcggcugguccacccccaacuccaagucccaggucaaccgccaggucaucgucgacaacaacaacugguccggcuacuccggcaucuucuccgucgagggcaaguccugcaucaaccgcugcuucuacgucgagcucauccgcggccgccagcaggagacccgcgucugguggaccuccaacuccaucgucgucuucugcggcaccuccggcaccuacggcaccggcuccuggcccgacggcgccaacaucaacuucaugcccaucuga

SEQ ID NO: 110113 - RNA, 1410 nt, Artificial Sequence
  derived and/or modified CDS sequence (opt2) from neuraminidase__InfluenzaA__AAO46221
augaaccccaaccagaagaucaucaccaucggcuccgucucccucaccaucgccaccgucugcuuccucaugcagaucgccauccucgccaccaccgucacccuccacuucaagcagcacgagugcgacucccccgccuccaaccaggucaugcccugcgagcccaucaucaucgagcgcaacaucaccgagaucgucuaccucaacaacaccaccaucgagaaggagaucugccccgaggccgccgaguaccgcaacugguccaagccccagugccagaucaccggcuucgcccccuucuccaaggacaacuccauccgccucuccgccggcggcgacaucugggucacccgcgagcccuacgucuccugcgaccccggcaagugcuaccaguucgcccucggccagggcaccacccucgacaacaagcacuccaacgacaccauccacgaccgcaucccccaccgcacccuccucaugaacgagcucggcguccccuuccaccucggcacccgccaggucugcgucgccugguccuccuccuccugccacgacggcaaggccuggcuccacgucugcgucaccggcgacgaccgcaacgccaccgccuccuucaucuacgacggccgccucgucgacuccaucggcuccuggucccagaacauccuccgcacccaggaguccgagugcgucugcaucaacggcaucugcaccgucgucaugaccgacggcuccgccuccggccgcgccgacacccgcauccucuucaucgaggagggcaagaucguccacaucuccccccucuccggcuccgcccagcacgucgaggagugcuccugcuacccccgcuaccccgacguccgcugcaucugccgcgacaacuggaagggcuccaaccgccccgucaucgacaucaacauggaggacuacuccaucgacuccuccuacgucugcuccggccucgucggcgacaccccccgcaacgacgaccgcuccuccaacuccaacugccgcgaccccaacaacgagcgcggcaaccccggcgucaagggcugggccuucgacaacggcgacgacgucuggaugggccgcaccaucuccaaggaccuccgcuccggcuacgagaccuucaaggucaucggcggcugguccacccccaacuccaagucccaggucaaccgccaggucaucgucgacaacaacaacugguccggcuacuccggcaucuucuccgucgagggcaaguccugcaucaaccgcugcuucuacgucgagcucauccgcggccgccagcaggagacccgcgucugguggaccuccaacuccaucgucgucuucugcggcaccuccggcaccuacggcaccggcuccuggcccgacggcgccaacaucaacuucaugcccaucuga

SEQ ID NO: 110114 - RNA, 1410 nt, Artificial Sequence
  derived and/or modified CDS sequence (opt2) from neuraminidase__InfluenzaA__AAO46223
augaaccccaaccagaagaucaucaccaucggcuccgucucccucaccaucgccaccgucugcuuccucaugcagaucgccauccucgucaccaccgucacccuccacuucaagcagcacgagugcgacucccccgccuccaaccaggucaugcccugcgagcccaucaucaucgagcgcaacaucaccgagaucgucuaccucaacaacaccaccaucgagaaggagaucugccccgaggucgucgaguaccgcaacugguccaagccccagugccagaucaccggcuucgcccccuucuccaaggacaacuccauccgccucuccgccggcggcgacaucugggucacccgcgagcccuacgucuccugcgaccccggcaagugcuaccaguucgcccucggccagggcaccacccucgacaacaagcacuccaacgacaccauccacgaccgcaucccccaccgcacccuccucaugaacgagcucggcguccccuuccaccucggcacccgccaggucugcgucgccugguccuccuccuccugccacgacggcaaggccuggcuccacgucugcgucaccggcgacgacaagaacgccaccgccuccuucaucuacgacggccgccucgucgacuccaucggcuccuggucccagaacauccuccgcacccaggaguccgagugcgucugcaucaacggcaccugcaccgucgucaugaccgacggcuccgccuccggccgcgccgacacccgcauccucuucaucgaggagggcaagaucguccacaucuccccccucuccggcuccgcccagcacgucgaggagugcuccugcuacccccgcuaccccgacguccgcugcaucugccgcgacaacuggaagggcuccaaccgccccgucaucgacaucaacauggaggacuacuccaucgacuccuccuacgucugcuccggccucgucggcgacaccccccgcaacgacgaccgcuccuccaacuccaacugccgcgaccccaacaacgagcgcggcaaccccggcgucaagggcugggccuucgacaacggcgacgacgucuggaugggccgcaccaucuccaaggaccuccgcuccggcuacgagaccuucaaggucaucggcggcugguccacccccaacuccaagucccagaucaaccgccaggucaucgucgacuccaacaacugguccggcuacuccggcaucuucuccgucgagggcaaguccugcaucaaccgcugcuucuacgucgagcucauccgcggccgcaagcaggagacccgcgucugguggaccuccaacuccaucgucgucuucugcggcaccuccggcaccuacggcaccggcuccuggcccgacggcgccaacaucaacuucaugcccaucuga

SEQ ID NO: 110115 - RNA, 1410 nt, Artificial Sequence; identical to SEQ ID NO: 110114
  derived and/or modified CDS sequence (opt2) from neuraminidase__InfluenzaA__AAO46224

SEQ ID NO: 110116 - RNA, 1410 nt, Artificial Sequence
  derived and/or modified CDS sequence (opt2) from neuraminidase__InfluenzaA__AAO46225
augaaccccaaccagaagaucaucaccaucggcuucgucucccucaucaucgccaccgucugcuuccucaugcagaucgccauccucgccaccaccgucacccuccacuucaagcagcacgagugcgacucccccgccuccaaccaggucaugcccugcgagcccaucaucaucgagcgcaacaucaccaagaucgucuaccucaacaacaccaccaucgagaaggagaucugccccgaggucgucgaguaccgcaacugguccaagccccagugccacaucaccggcuucgcccccuucuccaaggacaacuccauccgccucuccgccggcggcgacaucugggucacccgcgagcccuacgucuccugcgaccccggcaagugcuaccaguucgcccucggccagggcaccacccucgacaacaagcacuccaacgacaccauccacgaccgcaucccccaccgcacccuccucaugaacgagcucggcguccccuuccaccucggcacccgccaggucugcgucgccugguccuccuccuccugccacgacggcaaggccuggcuccacgucugcgucaccggcgacgacaagaacgccaccgccuccuucaucuacgacggccgccucgucgacuccaucggcuccuggucccacaacauccuccgcacccaggaguccgagugcgucugcaucaacggcaccugcaccgucgucaugaccgacggcuccgccuccggccgcgccgacacccgcauccucuucaucaaggagggcaagaucguccacaucuccccccucuccggcuccgcccagcacgucgaggagugcuccugcuacccccgcuaccccgacguccgcugcaucugccgcgacaacuggaagggcuccaaccgccccgucaucgacaucaacauggaggacuacuccaucgacuccuccuacgucugcuccggccucgucggcgacaccccccgcaacaacgacggcuccuccaacuccaacugccgcgaccccaacaacgagcgcggcaaccccggcgucaagggcugggccuucgacaacggcgacgacgucuggaugggccgcaccaucuccaaggaccuccgcuccggcuacgagaccuucaaggucaucggcggcugguccacccccaacuccaagucccaggucaaccgccaggucaucgucgacaacaacaacugguccggcuacuccggcaucuucuccgucgagggcaaguccugcaucaaccgcugcuucuacgucgagcucauccgcggccgccagcaggagacccgcgucugguggaccuccaacuccaucgucgucuucugcggcaccuccggcaccuacggcaccggcuccuggcccgacggcgccaacaucaacuucaugcccaucuga

SEQ ID NO: 110117 - RNA, 1410 nt, Artificial Sequence
  derived and/or modified CDS sequence (opt2) from neuraminidase__InfluenzaA__AAO46226
augaaccccaaccagaagaucaucaccaucggcuccgucucccucaccaucgccaccgucugcuuccucaugcagaucgccauccucgucaccaccgucacccuccacuucaagcagcacgagugcgacucccccgccuccaaccaggucaugcccugcgagcccaucaucaucgagcgcaacaucaccgagaucgucuaccucaacaacaccaccaucgagaaggagaucugccccgaggucgucgaguaccgcaacugguccaagccccagugccagaucaccggcuucgcccccuucuccaaggacaacuccauccgccucuccgccggcggcgacaucugggucacccgcgagcccuacgucuccugcgaccccggcaagugcuaccaguucgcccucggccagggcaccacccucgacaacaagcacuccaacgacaccauccacgaccgcaucccccaccgcacccuccucaugaacgagcucggcguccccuuccaccucggcacccgccaggucugcgucgccugguccuccuccuccugccacgacggcaaggccuggcuccacgucugcgucaccggcgacgacgagaacgccaccgccuccuucaucuacgacggccgccucgucgacuccaucggcuccuggucccagaacauccuccgcacccaggaguccgagugcgucugcaucaacggcaccugcaccgucgucaugaccgacggcuccgccuccggccgcgccgacacccgcauccucuucaucgaggagggcaagaucguccacaucuccccccucuccggcuccgcccagcacgucgaggagugcuccugcuacccccgcuaccccgacguccgcugcaucugccgcgacaacuggaagggcuccaaccgccccgucaucgacaucaacauggaggacuacuccaucgacuccuccuacgucugcuccggccucgucggcgacaccccccgcaacgacgaccgcuccuccaacuccaacugccgcgaccccaacaacgagcgcggcaaccccggcgucaagggcugggccuucgacaacggcgacgacgucuggaugggccgcaccaucuccaaggaccuccgcuccggcuacgagaccuucaaggucaucggcggcugguccacccccaacuccaagucccagaucaaccgccaggucaucgucgacuccaacaacugguccggcuacuccggcaucuucuccgucgagggcaaguccugcaucaaccgcugcuucuacgucgagcucauccgcggccgccagcaggagacccgcgucugguggaccuccaacuccaucgucgucuucugcggcaccuccggcaccuacggcaccggcuccuggcccgacggcgccaacaucaacuucaugcccaucuga

SEQ ID NO: 110118 - RNA, 1410 nt, Artificial Sequence
  derived and/or modified CDS sequence (opt2) from neuraminidase__InfluenzaA__AAO46229
augaaccccaaccagaagaucaucaccaucggcuccgucucccucaccaucgccaccgucugcuuccucaugcagaucgccauccucgucaccaccgucacccuccacuucaagcagcacgagugcgacucccccgccuccaaccaggucaugcccugcgagcccaucaucaucgagcgcaacaucaccgagaucauguaccucaacaacaccaccaucgagaaggagaucugccccgaggucgucgaguaccgcaacugguccaagccccagugccagaucaccggcuucgcccccuucuccaaggacaacuccauccgccucuccgccggcggcgacaucugggucacccgcgagcccuacgucuccugcgaccccggcaagugcuaccaguucgcccucggccagggcaccacccucgacaacaagcacuccaacgacaccauccacgaccgcaucccccaccgcacccuccucaugaacgagcucggcguccccuuccaccucggcacccgccaggucugcgucgccugguccuccuccuccugccacgacggcaaggccuggcuccacgucugcgucaccggcgacgacaagaacgccaccgccuccuucaucuacgacggccgccucgucgacuccaucggcuccuggucccagaacauccuccgcacccaggaguccgagugcgucugcaucaacggcaccugcaccgucgucaugaccgacggcuccgccuccggccgcgccgacacccgcauccucuucaucgaggagggcaagaucguccacaucuccccccucuccggcuccgcccagcacgucgaggagugcuccugcuacccccgcuaccccgacguccgcugcaucugccgcgacaacuggaagggcuccaaccgccccaucaucgacaucaacauggaggacuacuccaucgacuccuccuacgucugcuccggccucgucggcgacaccccccgcaacgacgaccgcuccuccaacuccaacugccgcaaccccaacaacgagcgcggcaaccccggcgucaagggcugggccuucgacaacggcgacgacgucuggaugggccgcaccaucuccaaggaccuccgcuccggcuacgagaccuucaaggucaucggcggcugguccacccccaacuccaagucccagaucaaccgccaggucaucgucgacuccaacaacugguccggcuacuccggcaucuucuccgucgagggcaaguccugcaucaaccgcugcuucuacgucgagcucauccgcggccgccagcaggagacccgcgucugguggaccuccaacuccaucgucgucuucugcggcaccuccggcaccuacggcaccggcuccuggcccgacggcgccaacaucaacuucaugcccaucuga

SEQ ID NO: 110119 - RNA, 1410 nt, Artificial Sequence
  derived and/or modified CDS sequence (opt2) from neuraminidase__InfluenzaA__AAO46230
augaaccccaaccagaagaucaucaccaucggcuccgucucccucaccaucgccaccgucugcuuccucaugcagaucgccauccucgucaccaccgucacccuccacuucaagcagcacgagugcgacucccccgccuccaaccaggucaugcccugcgagcccaucaucaucgagcgcaaccucaccgagaucgucuaccucaacaacaccaccaucgagaaggagaucugccccgaggucgucgaguaccgcaacugguccaagccccagugccagaucaccggcuucgcccccuucuccaaggacaacuccauccgccucuccgccggcggcgacaucugggucacccgcgagcccuacgucuccugcgaccccggcaagugcuaccaguucgcccucggccagggcaccacccucgacaacaagcacuccaacgacaccauccacgaccgcaucccccaccgcacccuccucaugaacgagcucggcguccccuuccaccucggcacccgccaggucugcgucgccugguccuccuccuccugccacgacggcaaggccuggcuccacgucugcgucaccggcgacgacaagaacgccaccgccuccuucaucuacgacggccgccucgucgacuccaucggcuccuggucccagaacauccuccgcacccaggaguccgagugcgucugcaucaacggcaccugcaccgucgucaugaccgacggcuccgccuccggccgcgccgacacccgcauccucuucaucgaggagggcaagaucguccacaucuccccccucuccggcuccgcccagcacgucgaggagugcuccugcuacccccgcuaccccgacguccgcugcaucugccgcgacaacuggaagggcuccaaccgccccgucaucgacaucaacauggaggacuacuccaucgacuccuccuacgucugcuccggccucgucggcgacaccccccgcaacgacgaccgcuccuccaacuccaacugccgcgaccccaacaacgagcgcggcaaccccggcgucaagggcugggccuucgacaacggcgacgacgucuggaugggccgcaccaucuccaaggaccuccgcuccggcuacgagaccuucaaggucaucggcggcugguccacccccaacuccaagucccagaucaaccgccaggucaucgucgacuccaacaacugguccggcuacuccggcaucuucuccgucgagggcaaguccugcaucaaccgcugcuucuacgucgagcucauccgcggccgccagcaggagacccgcgucugguggaccuccaacuccaucgucgucuucugcggcaccuccggcaccuacggcaccggcuccuggcccgacggcgccaacaucaacuucaugcccaucuga

SEQ ID NO: 110120 - RNA, 1410 nt, Artificial Sequence
  derived and/or modified CDS sequence (opt2) from neuraminidase__InfluenzaA__AAO46231
augaaccccaaccagaagaucaucaccaucggcuccgucucccucaccaucgccaccgucugcuuccucaugcagaucgccauccucgucaccaccgucacccuccacuucaagcagcacgacugcgacucccccgccuccaaccaggucaugcccugcgagcccaucaucaucgagcgcaacaucaccgagaucgucuaccucaacaacaccaccaucgagaaggagaucugccccaaggucgucgaguaccgcaacugguccaagccccagugccagaucaccggcuucgcccccuucuccaaggacaacuccauccgccucuccgccggcggcgacaucugggucacccgcgagcccuacgucuccugcgaccccgucaagugcuaccaguucgcccucggccagggcaccacccucgacaacaagcacuccaacgacaccguccacgaccgcaucccccaccgcacccuccucaugaacgagcucggcguccccuuccaccucggcacccgccaggucugcaucgccugguccuccuccuccugccacgacggcaaggccuggcuccacgucugcgucaccggcgacgacaagaacgccaccgccuccuucaucuacgacggccgccucgucgacuccaucggcuccuggucccagaacauccuccgcacccaggaguccgagugcgucugcaucaacggcaccugcaccgucgucaugaccgacggcuccgccuccggccgcgccgacacccgcauccucuucaucgaggagggcaagaucguccacaucuccccccucuccggcuccgcccagcacgucgaggagugcuccugcuacccccgcuaccccgacguccgcugcaucugccgcgacaacuggaagggcuccaaccgccccgucaucgacaucaacauggaggacuacuccaucgacuccuccuacgucugcuccggccucgucggcgacaccccccgcaacgacgaccgcuccuccaacuccaacugccgcaaccccaacaacgagcgcggcaaccccggcgucaagggcugggccuucgacaacggcgacgacgucuggaugggccgcaccaucuccaaggaccuccgcuccggcuacgagaccuucaaggucaucggcggcugguccacccccaacuccaagucccagaucaaccgccaggucaucgucgacuccaacaacugguccggcuacuccggcaucuucuccgucgagggcaaguccugcaucaaccgcugcuucuacgucgagcucauccgcggccgccagcaggagacccgcgucugguggaccuccaacuccaucgucgucuucugcggcaccuccggcaccuacggcaccggcuccuggcccgacggcgccaacaucaacuucaugcccaucuga

SEQ ID NO: 110121 - RNA, 1410 nt, Artificial Sequence
  derived and/or modified CDS sequence (opt2) from neuraminidase__InfluenzaA__AAO46232
augaaccccaaccagaagaucaucaccaucggcuccgucucccucaccaucgccaccgucugcuuccucaugcagaucgccauccucgucaccaccgucacccuccacuucaagcagcacgagugcgacucccccgccuccaaccaggucaugcccugcgagcccaccaucaucgagcgcaacaucaccgagaucgucuaccucaacaacaccaccaucgagaaggagaucugccccaaggucgucgaguaccgcaacugguccaagccccagugccagaucaccggcuucgcccccuucuccaaggacaacuccauccgccucuccgccggcggcgacaucugggucacccgcgagcccuacgucuccugcgaccccggcaagugcuaccaguucgcccucggccagggcaccacccucgacaacaagcacuccaacgacaccauccacgaccgcaucccccaccgcacccuccucaugaacgagcucggcguccccuuccaccucggcacccgccaggucugcaucgccugguccuccuccuccugccacgacggcaaggccuggcuccacgucugcgucaccggcgacgacaagaacgccaccgccuccuucaucuacgacggccgccucgucgacuccaucggcuccuggucccagaacauccuccgcacccaggaguccgagugcgucugcaucaacggcaccugcaccgucgucaugaccgacggcuccgccuccggccgcgccgacacccgcauccucuucaucgaggagggcaagaucguccacaucuccccccucuccggcuccgcccagcacgucgaggagugcuccugcuacccccgcuaccccgacguccgcugcaucugccgcgacaacuggaagggcuccaaccgccccaucaucgacaucaacauggaggacuacuccaucgacuccuccuacgucugcuccggccucgucggcgacaccccccgcaacgacgaccgcuccuccaacuccaacugccgcaaccccaacaacgagcgcggcaaccccggcgucaagggcugggccuucgacaacggcgacgacgucuggaugggccgcaccaucuccaaggaccuccgcuccggcuacgagaccuucaaggucaucggcggcugguccacccccaacuccaagucccagaucaaccgccaggucaucgucgacuccaacaacugguccggcuacuccggcaucuucuccgucgagggcaaguccugcaucaaccgcugcuucuacgucgagcucauccgcggccgccagcaggagacccgcgucugguggaccuccaacuccaucgucgucuucugcggcaccuccggcaccuacggcaccggcuccuggcccgacggcgccaacaucaacuucaugcccaucuga

SEQ ID NO: 110122 - RNA, 1410 nt, Artificial Sequence
  derived and/or modified CDS sequence (opt2) from neuraminidase__InfluenzaA__AAO46233
augaaccccaaccagaagaucaucaccaucggcuccgucucccucaccaucgccgccgucugcuuccucaugcagaucgccauccucgucaccaccgucacccuccacuucaagcagcacgagugcgacucccccgccuccaaccaggucaugcccugcgagcccaucaucaucgagcgcaacaucaccgagaucgucuaccucaacaacaccaccaucgagaaggagaucugccccaaggucgucgaguaccgcaacugguccaagccccagugccagaucaccggcuucgcccccuucuccaaggacaacuccauccgccucuccgccggcggcgacaucugggucacccgcgagcccuacgucuccugcgaccccggcaagugcuaccaguucgcccucggccagggcaccacccucgacaacaagcacuccaacgacaccauccacgaccgcaucccccaccgcacccuccucaugaacgagcucggcguccccuuccaccucggcacccgccaggucugcaucgccugguccuccuccuccugccacgacggcaaggccuggcuccacgucugcgucaccggcgacgacaagaacgccaccgccuccuucaucuacgacggccgccucgucgacuccaucggcuccuggucccagaacauccuccgcacccaggaguccgagugcgucugcaucaacggcaccugcaccgucgucaugaccgacggcuccgccuccggccgcgccgacacccgcauccucuucaucgaggagggcaagaucguccacaucuccccccucuccggcuccgcccagcacgucgaggagugcuccugcuacccccgcuaccccgacguccgcugcaucugccgcgacaacuggaagggcuccaaccgccccgucgucgacaucaacauggaggacuacuccaucgacuccuccuacgucugcuccggccucgucggcgacaccccccgcaacgacgaccgcuccuccaacuccaacugccgcaaccccaacaacgagcgcggcaaccccggcgucaagggcugggccuucgacaacggcgacgacgucuggaugggccgcaccaucuccaaggaccuccgcuccggcuacgagaccuucaaggucaucggcggcugguccacccccaacuccaagucccagaucaaccgccaggucaucgucgacuccaacaaccgcuccggcuacuccggcaucuucuccgucgagggcaagggcugcaucaaccgcugcuucuacgucgagcucauccgcggccgccagcaggagacccgcgucugguggaccuccaacuccaucgucgucuucugcggcaccuccggcaccuacggcaccggcuccuggcccgacggcgccaacaucaacuucaugcccaucuga

SEQ ID NO: 110123 - RNA, 1410 nt, Artificial Sequence
  derived and/or modified CDS sequence (opt2) from neuraminidase__InfluenzaA__AAO46235
augaaccccaaccagaagaucaucaccaucggcuccgucucccucaccaucgccaccgucugcuuccucaugcagaucgccauccucgucaccaccgucacccuccacuucaagcagcacgagugcgacucccccgccuccaaccaggucaugcccugcgagcccaucaucaucgagcgcaacaucaccgagaucgucuaccucaacaacaccaccaucgagaaggagaucugccccaaggucgucgaguaccgcaacugguccaagccccagugccagaucaccggcuucgcccccuucuccaaggacaacuccauccgccucuccgccggcggcgacaucugggucacccgcgagcccuacgucuccugcgaccccggcaagugcuaccaguucgcccucggccagggcaccacccucgacaacaagcacuccaacgacaccauccacgaccgcaucccccaccgcacccuccucaugaacgagcucggcguccccuuccaccucggcacccgccaggucugcaucgccugguccuccuccuccugccacgacggcaaggccuggcuccacgucugcaucaccggcgacgacaagaacgccaccgccuccuucaucuacgacggccgccucgucgacuccaucggcuccuggucccagaacauccuccgcacccaggaguccgagugcgucugcaucaacggcaccugcaccgucgucaugaccgacggcuccgccuccggccgcgccgacacccgcauccucuucaucgaggagggcaagaucguccacaucuccccccucuccggcuccgcccagcacgucgaggagugcuccugcuacccccgcuaccccggcguccgcugcaucugccgcgacaacuggaagggcuccaaccgccccgucgucgacaucaacauggaggacuacuccaucgacuccuccuacgucugcuccggccucgucggcgacaccccccgcaacgacgaccgcuccuccaacuccaacugccgcaaccccaacaacgagcgcggcaaccagggcgucaagggcugggccuucgacaacggcgacgacgucuggaugggccgcaccaucuccaaggaccuccgcuccggcuacgagaccuucaaggucaucggcggcugguccacccccaacuccaagucccagaucaaccgccaggucaucgucgacuccgacaaccgcuccggcuacuccggcaucuucuccgucgagggcaaguccugcaucaaccgcugcuucuacgucgagcucauccgcggccgcaagcaggagacccgcgucugguggaccuccaacuccaucgucgucuucugcggcaccuccggcaccuacggcaccggcuccuggcccgacggcgccaacaucaacuucaugcccaucuga

SEQ ID NO: 110124 - RNA, 1410 nt, Artificial Sequence
  derived and/or modified CDS sequence (opt2) from neuraminidase__InfluenzaA__AAO46236
augaaccccaaccagaagaucaucaccaucggcuccgucucccucaccaucgccaccgucugcuuccucaugcacaucgccauccucgucaccaccgucacccuccacuucaagcagcacgagugcgacucccccgccuccaaccaggucaugcccugcgagcccaucaucaucgagcgcaacaucaccgagaucgucuaccucaacaacaccaccaucgagaaggagaucugccccaaggucgucgaguaccgcaacugguccaagccccagugccagaucaccggcuucgcccccuucuccaaggacaacuccauccgccucuccgccggcggcgacaucugggucacccgcgagcccuacgucuccugcgaccccggcaagugcuaccaguucgcccucggccagggcaccacccucgacaacaagcacuccaacgacaccauccacgaccgcaucccccaccgcacccuccucaugaacgagcucggcguccccuuccaccucggcacccgccaggucugcaucgccugguccuccuccuccugccacgacggcaaggccuggcuccacgucugcaucaccggcgacgacaagaacgccaccgccuccuucaucuacgacggccgccucgucgacuccaucggcuccuggucccagaacauccuccgcacccaggaguccgagugcgucugcaucaacggcaccugcaccgucgucaugaccgacggcuccgccuccggccgcgccgacacccgcauccucuucaucgaggagggcaagaucguccacaucuccccccucuccggcuccgcccagcacgucgaggagugcuccugcuacccccgcuaccccggcguccgcugcaucugccgcgacaacuggaagggcuccaaccgccccgucgucgacaucaacauggaggacuacuccaucgacuccuccuacgucugcuccggccucgucggcgacaccccccgcaacgacgaccgcuccuccaacuccaacugccgcaaccccaacaacgagcgcggcaaccagggcgucaagggcugggccuucgacaacggcgacgacgucuggaugggccgcaccaucuccaaggaccuccgcuccggcuacgagaccuucaaggucaucggcggcugguccacccccaacuccaagucccagaucaaccgccaggucaucgucgacuccgacaaccgcuccggcuacuccggcaucuucuccgucgagggcaaguccugcaucaaccgcugcuucuacgucgagcucauccgcggccgcaagcaggagacccgcgucugguggaccuccaacuccaucgucgucuucugcggcaccuccggcaccuacggcaccggcuccuggcccgacggcgccaacaucaacuucaugcccaucuga

SEQ ID NO: 110125 - RNA, 1410 nt, Artificial Sequence
  derived and/or modified CDS sequence (opt2) from neuraminidase__InfluenzaA__AAO46237
augaaccccaaccagaagaucaucaccaucggcuccgucucccucaccaucgccaccgucugcuuccucaugcagaucgccauccucgucaccaccgucacccuccacuucaagcagcacgagugcgacucccccgccuccaaccaggucaugcccugcgagcccaucaucaucgagcgcaacaucaccgagaucgucuaccucaacaacaccaccaucgagaaggagaucugccccaagaucgucgaguaccgcaacugguccaagccccagugccagaucaccggcuucgcccccuucuccaaggacaacuccauccgccucuccgccggcggcgacaucugggucacccgcgagcccuacgucuccugcgaccccggcaagugcuaccaguucgcccucggccagggcaccacccucgacaacaagcacuccaacgacaccauccacgaccgcaucccccaccgcacccuccucaugaacgagcucggcguccccuuccaccucggcacccgccaggucugcaucgccugguccuccuccuccugccacgacggcaaggccuggcuccacgucugcaucaccggcgacgacaagaacgccaccgccuccuucaucuacgacggccgccucgucgacuccaucggcuccuggucccagaacauccuccgcacccaggaguccgagugcgucugcaucaacggcaccugcaccgucgucaugaccgacggcuccgccuccggccgcgccgacacccgcauccucuucaucgaggagggcaagaucguccacaucuccccccucuccggcuccgcccagcacgucgaggagugcuccugcuacccccgcuaccccggcguccgcugcaucugccgcgacaacuggaagggcuccaaccgccccgucgucgacaucaacauggaggacuacuccaucgacuccuccuacgucugcuccggccucgucggcgacaccccccgcaacgacgaccgcuccuccaacuccaacugccgcaaccccaacaacgagcgcggcaaccagggcgucaagggcugggccuucgacaacggcgacgacgucuggaugggccgcaccaucuccaaggaccuccgcuccggcuacgagaccuucaaggucaucggcggcugguccacccccaacuccaagucccagaucaaccgccaggucaucgucgacuccgacaaccgcuccggcuacuccggcaucuucuccgucgagggcaaguccugcaucaaccgcugcuucuacgucgagcucauccgcggccgcaagcaggagacccgcgucugguggaccuccaacuccaucgucgucuucugcggcaccuccggcaccuacggcaccggcuccuggcccgacggcgccaacaucaacuucaugcccaucuga

SEQ ID NO: 110126 - RNA, 1410 nt, Artificial Sequence
  derived and/or modified CDS sequence (opt2) from neuraminidase__InfluenzaA__AAO46238
augaaccccaaccagaagaucaucaccaucggcuccgccucccucaccaucgccaccgucugcuuccucaugcagaucgccauccucgucaccaccgucacccuccacuucaagcagcacgagugcgacucccccgccuccaaccaggucaugcccugcgagcccaucaucaucgagcgcaacaucaccgagaucgucuaccucaacaacaccaccaucgagaaggagaucugccccaagaucgucgaguaccgcaacugguccaagccccagugcaagaucaccggcuucgcccccuucuccaaggacaacuccauccgccucuccgccggcggcgacaucugggucacccgcgagcccuacgucuccugcgaccccggcaagugcuaccaguucgcccucggccagggcaccacccucgacaacaagcacuccaacgacaccauccacgaccgcaucccccaccgcacccuccucaugaacgagcucggcguccccuuccaccucggcacccgccaggucugcaucgccugguccuccuccuccugccacgacggcaaggccuggcuccacgucugcgucaccggcgacgacaagaacgccaccgccuccuucaucuacgacggccgccucgucgacuccaucggcuccuggucccagaacauccuccgcacccaggaguccgagugcgucugcaucaacggcaccugcaccgucgucaugaccgacggcuccgccuccggccgcgccgacacccgcauccucuucaucgaggagggcaagaucguccacaucuccccccucuccggcuccgcccagcacgucgaggagugcuccugcuacccccgcuaccccgacguccgcugcaucugccgcgacaacuggaagggcuccaaccgccccgucgucgacaucaacauggaggacuacuccaucgacuccuccuacgucugcuccggccucgucggcgacaccccccgcaacgacgaccgcuccuccaacuccaacugccgcaaccccaacaacgagaagggcaaccagggcgucaagggcugggccuucgacaacggcgacgacgucuggaugggccgcaccaucuccaaggaccuccgcuccggcuacgagaccuucaaggucaucggcggcugguccacccccaacuccaagucccagaucaaccgccaggucaucgucgacuccgacaaccgcuccggcuacuccggcaucuucuccgucgagggcaaguccugcaucaaccgcugcuucuacgucgagcucauccgcggccgcaagcaggagacccgcgucugguggaccuccaacuccaucgucgucuucugcggcaccuccggcaccuacggcaccggcuccuggcccgacggcgccaacaucaaccucaugcccaucuga

SEQ ID NO: 110127 - RNA, 1410 nt, Artificial Sequence
  derived and/or modified CDS sequence (opt2) from neuraminidase__InfluenzaA__AAO46241
augaaccccaaccagaagaucaucaccaucggcuccgucucccucaccaucgccaccgucugcuuccucaugcagaucgccauccucgucaccaccgucacccuccacuucaagcagcacgagugcgacucccccgccuccaaccaggucaugcccugcgagcccaucaucaucgagcgcaacaucaccgagaucgucuaccucaacaacaccaccaucgagaaggagaucugccccaaggucgucggcuaccgcaacugguccaagccccagugccagaucaccggcuucgcccccuucuccaaggacaacuccauccgccucuccgccggcggcgacaucugggucacccgcgagcccuacgucuccugcgaccccggcaagugcuaccaguucgcccucggccagggcaccacccucgacaacaagcacuccaacgacaccauccacgaccgcaucccccaccgcacccuccucaugaacgagcucggcguccccuuccaccucggcacccgccaggucugcaucgccugguccuccuccuccugccacgacggcaaggccuggcuccacgucugcaucaccggcgacgacaagaacgccaccgccuccuucaucuacgacggccgccucgucgacuccaucggcuccuggucccagaacauccuccgcacccaggaguccgagugcgucugcaucaacggcaccugcaccgucgucaugaccgacggcuccgccuccggccgcgccgacacccgcauccucuucaucgaggagggcaagaucguccacaucuccccccucuccggcuccgcccagcacgucgaggagugcuccugcuacccccgcuaccccggcguccgcugcaucugccgcgacaacuggaagggcuccaaccgccccgucgucgacaucaacauggaggacuacuccaucgacuccuccuacgucugcuccggccucgucggcgacaccccccgcaacgacgaccgcuccuccaacuccaacugccgcaaccccaacaacgagcgcggcaaccagggcgucaagggcugggccuucgacaacggcgacgacgucuggaugggccgcaccaucuccaaggaccuccgcuccggcuacgagaccuucaaggucaucggcggcugguccacccccaacuccaagucccagaucaaccgccaggucaucgucgacuccgacaaccgcuccggcuacuccggcaucuucuccgucgagggcaaguccugcaucaaccgcugcuucuacgucgagcucauccgcggccgcaagcaggagacccgcgucugguggaccuccaacuccaucgucgucuucugcggcaccuccggcaccuacggcaccggcuccuggcccgacggcgccaacaucaacuucaugcccaucuga

SEQ ID NO: 110128 - RNA, 1410 nt, Artificial Sequence
  derived and/or modified CDS sequence (opt2) from neuraminidase__InfluenzaA__AAO46245
augaaccccaaccagaagaucaucaccaucggcuccgucucccucaccaucgccaccgucugcuuccucaugcagaucgccauccucgucaccaccgucacccuccacuucaagcagcacgacugcgacucccccgccuccaaccaggucaugcccugcgagcccaucaucaucgagcgcaacaucaccgagaucgucuaccucaacaacaccaccaucgagaaggagaucugccccaaggucgucgaguaccgcaacugguccaagccccagugccagaucaccggcuucgcccccuucuccaaggacaacuccauccgccucuccgccggcggcgacaucugggucacccgcgagcccuacgucuccugcgaccccgucaagugcuaccaguucgcccucggccagggcaccacccucgacaacaagcacuccaacgacaccguccacgaccgcaucccccaccgcacccuccucaugaacgagcucggcguccccuuccaccucggcacccgccaggucugcaucgccugguccuccuccuccugccacgacggcaaggccuggcuccacgucugcaucaccggcgacgacaagaacgccaccgccuccuucaucuacgacggccgccucgucgacuccaucggcuccuggucccagaacauccuccgcacccaggaguccgagugcgucugcaucaacggcaccugcaccgucgucaugaccgacggcuccgccuccggccgcgccgacacccgcauccucuucaucgaggagggcaagaucguccacaucuccccccucgccggcuccgcccagcacgucgaggagugcuccugcuacccccgcuaccccggcguccgcugcaucugccgcgacaacuggaagggcuccaaccgccccgucgucgacaucaacauggaggacuacuccaucgacuccuccuacgucugcuccggccucgucggcgacaccccccgcaacgacgaccgcuccuccaacuccaacugccgcaaccccaacaacgagcgcggcacccagggcgucaagggcugggccuucgacaacggcaacgaccucuggaugggccgcaccaucuccaaggaccuccgcuccggcuacgagaccuucaaggucaucggcggcugguccacccccaacuccaagucccagaucaaccgccaggucaucgucgacuccgacaaccgcuccggcuacuccggcaucuucuccgucgagggcaaguccugcaucaaccgcugcuucuacgucgagcucauccgcggccgcaagcaggagacccgcgucugguggaccuccaacuccaucgucgucuucugcggcaccuccggcaccuacggcaccggcuccuggcccgacggcgccaacaucaacuucaugcccaucuga

SEQ ID NO: 110129 - RNA, 1410 nt, Artificial Sequence
  derived and/or modified CDS sequence (opt2) from neuraminidase__InfluenzaA__AAO46246
augaaccccaaccagaagaucaucaccaucggcuccgucucccucaccaucgccaccgucugcuuccucaugcagaucgccauccucgccaccaccgucacccuccacuucaagcagcacgagugcgacucccccgccuccaaccaggucaugcccugcgagcccaucaucaucgagcgcaacaucaccgagaucgucuaccucaacaacaccaucaucgagaaggagaucugccccaaggucgucgaguaccgcaacugguccaagccccagugccagaucaccggcuucgcccccuucuccaaggacaacuccauccgccucuccgccggcggcgacaucugggucacccgcgagcccuacgucuccugcgaccccggcaagugcuaccaguucgcccucggccagggcaccacccucgacaacaagcacuccaacgacaccauccacgaccgcaccccccaccgcacccuccucaugaacgagcucggcguccccuuccaccucggcacccgccaggucugcaucgccugguccuccuccuccugccacgacggcaaggccuggcuccacgucugcaucaccggcgacgacaagaacgccaccgccuccuucaucuacgacggccgccucgucgacuccaucggcuccuggucccagaacauccuccgcacccaggaguccgagugcgucugcaucaacggcaccugcaccgucgucaugaccgacggcuccgccuccggccgcgccgacacccgcauccucuucaucgaggagggcaagaucguccacaucuccccccucuccggcuccgcccagcacgucgaggagugcuccugcuacccccgcuaccccggcguccgcugcaucugccgcgacaacuggaagggcuccaaccgccccgucgucgacaucaacauggaggacuacuccaucgacuccuccuacgucugcuccggccucgucggcgacaccccccgcaacgacgaccgcuccuccaacuccaacugccgcaaccccaacaacgagcgcggcaaccagggcgucaagggcugggccuucgacaacggcgacgacgucuggaugggccgcaccaucuccaaggaccuccgcuccggcuacgagaccuucaaggucaucggcggcugguccacccccaacuccaagucccagaucaaccgccaggucaucgucgacuccgacaaccgcuccggcuacuccggcaucuucuccgucgagggcaaguccugcaucaaccgcugcuucuacgucgagcucauccgcggccgcaagcaggagacccgcgucugguggaccuccaacuccaucgccgucuucugcggcaccuccggcaccuacggcaccggcuccuggcccgacggcgccaacaucaacuucaugcccaucuga

SEQ ID NO: 110130 - RNA, 1410 nt, Artificial Sequence
  derived and/or modified CDS sequence (opt2) from neuraminidase__InfluenzaA__AAO46247
augaaccccaaccagaagaucaucaccaucggcuccgucucccucaccaucgccaccgucugcuuccucaugcagaucgccauccucgucaccaccgucacccuccacuucaagcagcacgagugcgacucccccgccuccaaccaggucaugcccugcgagcccaucaucaucgagcgcaacaucaccgagaucgucuaccucaacaacaccaccaucgagaaggagaucugccccaaggucgucgaguaccgcaacugguccaagccccagugccagaucaccggcuucgcccccuucuccaaggacaacuccauccgccucuccgccggcggcgacaucugggucacccgcgagcccuacgucuccugcgaccccggcaagugcuaccaguucgcccucggccagggcaccacccucgacaacaagcacuccaacgacaccauccacgaccgcaucccccaccgcacccuccucaugaacgagcucggcguccccuuccaccucggcacccgccaggucugcaucgccugguccuccuccuccugccacgacggcaaggccuggcuccacgucugcaucaccggcgacgacaagaacgccaccgccuccuucaucuacgacggccgccucgucgacuccaucggcuccuggucccagaacauccuccgcacccaggaguccgagugcgucugcaucaacggcaccugcaccgucgucaugaccgacggcuccgccuccggccgcgccgacacccgcauccucuucaucgaggagggcaagaucguccacaucuccccccucuccggcuccgcccagcacgucgaggagugcuccugcuacccccgcuaccccggcguccgcugcaucugccgcgacaacuggaagggcuccaaccgccccgucaucgacaucaacauggaggacuacuccaucgacuccuccuacgucugcuccggccucgucggcgacaccccccgcaacgacgaccgcuccuccaacuccaacugccgcaaccccaacaacgagcgcggcaaccagggcgucaagggcugggccuucgacaacggcgacgacgucuggaugggccgcaccaucuccaaggaccuccgcuccggcuacgagaccuucaaggucaucggcggcugguccacccccaacuccaagucccagaucaaccgccaggucaucgucgacuccgacaaccgcuccggcuacuccggcaucuucuccgucgagggcaaguccugcaucaaccgcugcuucuacgucgagcucauccgcggccgcaagcaggagacccgcgucugguggaccuccaacuccaucgucgucuucugcggcaccuccggcaccuacggcaccggcuccuggcccgacggcgccaacaucaacuucaugcccaucuga

SEQ ID NO: 110131 - RNA, 1410 nt, Artificial Sequence
  derived and/or modified CDS sequence (opt2) from neuraminidase__InfluenzaA__AAO46462
augaaccccaaccagaagaucaucaccaucggcuccgucucccucaccaucgccaccgucugcuuccucaugcagaucgccauccucgucaccaccgucacccuccacuucaagcaguacgagugcgacucccccgccuccaaccaggucaugcccugcgagcccaucaucaucgagcgcaacaucaccgagaucgucuaccucaacaacaccaccaucgagaaggagaucugccccaaggucgucgaguaccgcaacugguccaagccccagugccagaucaccggcuucgcccccuucuccaaggacaacuccauccgccucuccgccggcggcgacaucugggucacccgcgagcccuacgucuccugcgaccacggcaagugcuaccaguucgcccucggccagggcaccacccucgacaacaagcacuccaacgacaccauccacgaccgcaucccccaccgcacccuccucaugaacgagcucggcguccccuuccaccucggcacccgccaggucugcaucgccugguccuccuccuccugccacgacggcaaggccuggcuccacgucugcaucaccggcgacgacaagaacgccaccgccuccuucaucuacgacggccgccucgucgacuccaucggcuccuggucccagaacauccuccgcacccaggaguccgagugcgucugcaucaacggcaccugcaccgucgucaugaccgacggcuccgccuccggccgcgccgacacccgcauccucuucaucgaggagggcaagaucguccacaucuccccccucuccggcuccgcccagcacgucgaggagugcuccugcuacccccgcuaccccggcguccgcugcaucugccgcgacaacuggaagggcuccaaccgccccgucgucgacaucaacauggaggacuacuccaucgacuccuccuacgucugcuccggccucgucggcgacaccccccgcaacgacgaccgcuccuccaacuccaacugccgcaaccccaacaacgagcgcggcaaccagggcgucaagggcugggccuucgacaacggcgacgacgucuggaugggccgcaccaucuccaaggaccuccgcuccggcuacgagaccuucaaggucaucggcggcugguccacccccaacuccaagucccagaucaaccgccaggucaucgucgacuccgacaaccgcuccggcuacuccggcaucuucuccgucgagggcaaguccugcaucaaccgcugcuucuacgucgagcucauccgcggccgcaagcaggagacccgcgucugguggaccuccaacuccaucgucgucuucugcggcaccuccggcaccuacggcaccggcuccuggcccgacggcgccaacaucaacuucaugcccaucuga

SEQ ID NO: 110132 - RNA, 1410 nt, Artificial Sequence; identical to SEQ ID NO: 110131
  derived and/or modified CDS sequence (opt2) from neuraminidase__InfluenzaA__AAO46463

SEQ ID NO: 110133 - RNA, 1410 nt, Artificial Sequence; identical to SEQ ID NO: 110131
  derived and/or modified CDS sequence (opt2) from neuraminidase__InfluenzaA__AAO46464

SEQ ID NO: 110134 - RNA, 1410 nt, Artificial Sequence; identical to SEQ ID NO: 110131
  derived and/or modified CDS sequence (opt2) from neuraminidase__InfluenzaA__AAO46465

SEQ ID NO: 110135 - RNA, 1410 nt, Artificial Sequence; identical to SEQ ID NO: 110131
  derived and/or modified CDS sequence (opt2) from neuraminidase__InfluenzaA__AAO46466

SEQ ID NO: 110136 - RNA, 1410 nt, Artificial Sequence
  derived and/or modified CDS sequence (opt2) from neuraminidase__InfluenzaA__AAO46467
augaaccccaaccagaagaucaucaccaucggcuccgucucccucaccaucgccaccgucugcuuccucaugcagaucgccauccucgucaccaccgucacccuccacuucaagcaguacgagugcgacucccccgccuccaaccaggucaugcccugcgagcccaucaucaucgagcgcaacaucaccgagaucgucuaccucaacaacaccaccaucgagaaggagaucugccccaaggucgucgaguaccgcaacugguccaagccccagugccagaucaccggcuucgcccccuucuccaaggacaacuccauccgccucuccgccggcggcgacaucugggucacccgcgagcccuacgucuccugcgaccacggcaagugcuaccaguucgcccucggccagggcaccacccucgacaacaagcacuccaacgacaccauccacgaccgcaucccccaccgcacccuccucaugaacgagcucggcguccccuuccaccucggcacccgccaggucugcaucgccugguccuccuccuccugccacgacggcaaggccuggcuccacgucugcaucaccggcgacgacaagaacgccaccgccuccuucaucuacgacggccgccucgucgacuccaucggcuccuggucccagaacauccuccgcacccaggaguccgagugcgucugcaucaacggcaccugcaccgucgucaugaccgacggcuccgccuccggccgcgccgacacccgcauccucuucaucgaggagggcaagaucguccacaucuccccccucaccggcuccgcccagcacgucgaggagugcuccugcuacccccgcuaccccggcguccgcugcaucugccgcgacaacuggaagggcuccaaccgccccgucgucgacaucaacauggaggacuacuccaucgacuccuccuacgucugcuccggccucgucggcgacaccccccgcaacgacgaccgcuccuccaacuccaacugccgcaaccccaacaacgagcgcggcaaccagggcgucaagggcugggccuucgacaacggcgacgacgucuggaugggccgcaccaucuccaaggaccuccgcuccggcuacgagaccuucaaggucaucggcggcugguccacccccaacuccaagucccagaucaaccgccaggucaucgucgacuccgacaaccgcuccggcuacuccggcaucuucuccgucgagggcaaguccugcaucaaccgcugcuucuacgucgagcucauccgcggccgcaagcaggagacccgcgucugguggaccuccaacuccaucgucgucuucugcggcaccuccggcaccuacggcaccggcuccuggcccgacggcgccaacaucaacuucaugcccaucuga

SEQ ID NO: 110137 - RNA, 1410 nt, Artificial Sequence
  derived and/or modified CDS sequence (opt2) from neuraminidase__InfluenzaA__AAO46468
augaaccccaaccagaagaucaucaccaucggcuccgucucccucaccaucgccaccgucugcuuccucaugcagaucgccauccucgucaccaccgucacccuccacuucaagcaguacgagugcgacuuccccgccuccaaccaggucaugcccugcgagcccaucaucaucgagcgcaacaucaccgagaucgucuaccucaacaacaccaccaucgagaaggagaucugccccaaggucgucgaguaccgcaacugguccaagccccagugccagaucaccggcuucgcccccuucuccaaggacaacuccauccgccucuccgccggcggcgacaucugggucacccgcgagcccuacgucuccugcgaccacggcaagugcuaccaguucgcccucggccagggcaccacccucgacaacaagcacuccaacgacaccauccacgaccgcaucccccaccgcacccuccucaugaacgagcucggcguccccuuccaccucggcacccgccaggucugcaucgccugguccuccuccuccugccacgacggcaaggccuggcuccacgucugcaucaccggcgacgacaagaacgccaccgccuccuucaucuacgacggccgccucgucgacuccaucggcuccuggucccagaacauccuccgcacccaggaguccgagugcgucugcaucaacggcaccugcaccgucgucaugaccgacggcuccgccuccggccgcgccgacacccgcauccucuucaucgaggagggcaagaucguccacaucuccccccucuccggcuccgcccagcacgucgaggagugcuccugcuacccccgcuaccccggcguccgcugcaucugccgcgacaacuggaagggcuccaaccgccccgucgucgacaucaacauggaggacuacuccaucgacuccuccuacgucugcuccggccucgucggcgacaccccccgcaacgacgaccgcuccuccaacuccaacugccgcaaccccaacaacgagcgcggcaaccagggcgucaagggcugggccuucgacaacggcgacgacgucuggaugggccgcaccaucuccaaggaccuccgcuccggcuacgagaccuucaaggucaucggcggcugguccacccccaacuccaagucccagaucaaccgccaggucaucgucgacuccgacaaccgcuccggcuacuccggcaucuucuccgucgagggcaaguccugcaucaaccgcugcuucuacgucgagcucauccgcggccgcaagcaggagacccgcgucugguggaccuccaacuccaucgucgucuucugcggcaccuccggcaccuacggcaccggcuccuggcccgacggcgccaacaucaacuucaugcccaucuga

SEQ ID NO: 110138 - RNA, 1410 nt, Artificial Sequence; identical to SEQ ID NO: 110131
  derived and/or modified CDS sequence (opt2) from neuraminidase__InfluenzaA__AAO46469

SEQ ID NO: 110139 - RNA, 1410 nt, Artificial Sequence
  derived and/or modified CDS sequence (opt2) from neuraminidase__InfluenzaA__AAO46471
augaaccccaaccagaagaucaucaccaucggcuccgucucccucaccaucgccaccgucugcuuccucaugcagaucgccauccucgucaccaccgucacccuccacuucaagcaguacgagugcgacucccccgccuccaaccaggucaugcccugcgagcccaucaucaucgagcgcaacaucaccgagaucgucuaccucaacaacaccaccaucgagaaggagaucugccccaaggucgucgaguaccgcaacugguccaagccccagugccagaucaccggcuucgcccccuucuccaaggacaacuccauccgccucuccgccggcggcgacaucugggucacccgcgagcccuacgucuccugcgaccccggcaagugcuaccaguucgcccucggccagggcaccacccucgacaacaagcacuccaacgacaccauccacgaccgcaucccccaccgcacccuccucaugaacgagcucggcguccccuuccaccucggcacccgccaggucugcaucgccugguccuccuccuccugccacgacggcaaggccuggcuccacgucugcaucaccggcgacgacaagaacgccaccgccuccuucaucuacgacggccgccucgucgacuccaucggcuccuggucccagaacauccuccgcacccaggaguccgagugcgucugcaucaacggcaccugcaccgucgucaugaccgacggcuccgccuccggccgcgccgacacccgcauccucuucaucgaggagggcaagaucguccacaucuccccccucuccggcuccgcccagcacgucgaggagugcuccugcuacccccgcuaccccggcguccgcugcaucugccgcgacaacuggaagggcuccaaccgccccgucgucgacaucaacauggaggacuacuccaucgacuccuccuacgucugcuccggccucgucggcgacaccccccgcaacgacgaccgcuccuccaacuccaacugccgcaaccccaacaacgagcgcggcaaccagggcgucaagggcugggccuucgacaacggcgacgacgucuggaugggccgcaccaucuccaaggaccuccgcuccggcuacgagaccuucaaggucaucggcggcugguccacccccaacuccaagucccagaucaaccgccaggucaucgucgacuccgacaaccgcuccggcuacuccggcaucuucuccgucgagggcaaguccugcaucaaccgcugcuucuacgucgagcucauccgcggccgcaagcaggagacccgcgucugguggaccuccaacuccaucgucgucuucugcggcaccuccggcaccuacggcaccggcuccuggcccgacggcgccaacaucaacuucaugcccaucuga

SEQ ID NO: 110140 - RNA, 1410 nt, Artificial Sequence
  derived and/or modified CDS sequence (opt2) from neuraminidase__InfluenzaA__AAO46472
augaaccccaaccagaagaucaucaccaucggcuccgucucccucaccaucgccaccgucugcuuccucaugcagaucgccauccucgucaccaccgucacccuccacuucaagcaguacgagugcgacucccccgccuccaaccaggucaugcccugcgagcccaucaccaucgagcgcaacaucaccgagaucgucuaccucaacaacaccaccaucgagaaggagaucugccccaaggucgucgaguaccgcaacugguccaagccccagugccagaucaccggcuucgcccccuucuccaaggacaacuccauccgccucuccgccggcggcgacaucugggucacccgcgagcccuacgucuccugcgaccccggcaagugcuaccaguucgcccucggccagggcaccacccucgacaacaagcacuccaacgacaccauccacgaccgcaucccccaccgcacccuccucaugaacgagcucggcguccccuuccaccucggcacccgccaggucugcaucgccugguccuccuccuccugccacgacggcaaggccuggcuccacgucugcaucaccggcgacgacaagaacgccaccgccuccuucaucuacgacggccgccucgucgacuccaucggcuccuggucccagaacauccuccgcacccaggaguccgagugcgucugcaucaacggcaccugcaccgucgucaugaccgacggcuccgccuccggccgcgccgacacccgcauccucuucaucgaggagggcaagaucguccacaucuccccccucuccggcuccgcccagcacgucgaggagugcuccugcuacccccgcuaccccggcguccgcugcaucugccgcgacaacuggaagggcuccaaccgccccgucgucgacaucaacauggaggacuacuccaucgacuccuccuacgucugcuccggccucgucggcgacaccccccgcaacgacgaccgcuccuccaacuccaacugccgcaaccccaacaacgagcgcggcaaccagggcgucaagggcugggccuucgacaacggcgacgacgucuggaugggccgcaccaucuccaaggaccuccgcuccggcuacgagaccuucaaggucaucuccggcugguccacccccaacuccaagucccagaucaaccgccaggucaucgucgacuccgacaaccgcuccggcuacuccggcaucuucuccgucgagggcaaguccugcaucaaccgcugcuucuacgucgagcucauccgcggccgcaagcaggagacccgcgucugguggaccuccaacuccaucgucgucuucugcggcaccuccggcaccuacggcaccggcuccuggcccgacggcgccaacaucaacuucaugcccaucuga

SEQ ID NO: 110141 - RNA, 1410 nt, Artificial Sequence; identical to SEQ ID NO: 110131
  derived and/or modified CDS sequence (opt2) from neuraminidase__InfluenzaA__AAO46473

SEQ ID NO: 110142 - RNA, 1410 nt, Artificial Sequence; identical to SEQ ID NO: 110131
  derived and/or modified CDS sequence (opt2) from neuraminidase__InfluenzaA__AAO46474

SEQ ID NO: 110143 - RNA, 1410 nt, Artificial Sequence; identical to SEQ ID NO: 110131
  derived and/or modified CDS sequence (opt2) from neuraminidase__InfluenzaA__AAO46475

SEQ ID NO: 110144 - RNA, 1410 nt, Artificial Sequence
  derived and/or modified CDS sequence (opt2) from neuraminidase__InfluenzaA__AAO46476
augaaccccaaccagaagaucaucaccaucggcuccgucucccucaccaucgccaccgucugcuuccucaugcagaucgccauccucgucaccaccgucacccuccacuuccgccaguacgagugcgacucccccgccaacaaccaggucaugcccugcgagcccaccaucaucgagcgcaacaucaccgagaucgucuaccucaacaacaccaccaucgagaaggagaucugccccaagcucgucgaguaccgcaacugguccaagccccagugcaagaucaccggcuucgcccccuucuccaaggacaacuccauccgccucuccgccggcggcgacaucugggucacccgcgagcccuacgucuccugcgaccccggcaagugcuaccaguucgcccucggccagggcaccacccucgacaacaagcacuccaacgacaccauccacgaccgcaucccccaccgcacccuccucaugaacgagcucggcguccccuuccaccucggcacccgccaggucugcaucgccugguccuccuccuccugccacgacggcaaggccuggcuccacgucugcgucaccggcgacgacaagaacgccaccgccuccuucaucuacgacggccgccucgucgacuccaucggcuccuggucccagaacauccuccgcacccaggaguccgagugcgucugcaucaacggcaccugcaccgucgucaugaccgacggcuccgccuccggccgcgccgacacccgcauccucuucaucgaggagggcaagaucguccacaucuccccccucuccggcuccgcccagcacgucgaggagugcuccugcuacccccgcuaccccggcguccgcugcaucugccgcgacaacuggaagggcuccaaccgccccgucgucgacaucaacgucgaggacuacuccaucgacuccuccuacgucugcuccggccucgucggcgacaccccccgcaacaacgaccgcuccuccaacuccaacugccgcaaccccaacaacgagcgcggcaaccacggcgucaagggcugggccuucgacgacggcaacgacgucuggaugggccgcaccaucuccaaggaccuccgcuccggcuacgagaccuucaaggucaucggcggcugguccacccccaacuccaagucccagaucaaccgccaggucaucgucgacuccgacaaccgcuccggcuacuccggcaucuucuccgucgagggcaaguccugcaucaaccgcugcuucuacgucgagcucauccgcggccgcgagcaggagacccgcgucugguggaccuccaacuccaucgucgucuucugcggcaccuccggcaccuacggcaccggcuccuggcccgacggcgccgacaucaaccucaugcccaucuga

SEQ ID NO: 110145 - RNA, 1410 nt, Artificial Sequence; identical to SEQ ID NO: 110131
  derived and/or modified CDS sequence (opt2) from neuraminidase__InfluenzaA__AAO46477

SEQ ID NO: 110146 - RNA, 1410 nt, Artificial Sequence
  derived and/or modified CDS sequence (opt2) from neuraminidase__InfluenzaA__AAO46478
augaaccccaaccagaagaucaucaccaucggcuccgucucccucaucaucgccaccgucugcuuccucaugcagaucgccauccucgucaccaccgucacccuccacuucaagcagcacgagugcgacucccccuccuccaaccaggucaugcccugcgagcccaucaucaucgagcgcaacaucaccgagaucgucuaccucaacaacaccaccaucgagaaggagaccugccccaagcucgucgaguaccgcaacugguccaagccccagugcaagaucaccggcuucgcccccuucuccaaggacaacuccauccgccucuccgccggcggcgacaucugggucacccgcgagcccuacgucuccugcgaccccggcaagugcuaccaguucgcccucggccagggcaccacccucgacaacaagcacuccaacgacaccauccacgaccgcaucccccaccgcacccuccucaugaacgagcucggcguccccuuccaccucggcacccgccaggucugcaucgccugguccuccuccuccugccacgacggcaaggccuggcuccacgucugcgucaccggcgacgacaagaacgccaccgccuccuucaucuacgacggccgccucgucgacuccaucggcuccuggucccagaacauccuccgcacccaggaguccgagugcgucugcaucaacggcaccugcaccgucgucaugaccgacggcaacgccuccggccgcgccgacacccgcauccucuucaucgaggagggcaagaucguccacaucuccccccucuccggcuccgcccagcacgucgaggagugcuccugcuacccccgcuaccccgacguccgcugcaucugccgcgacaacuggaagggcuccaaccgccccaucgucgacaucaacaugaaggacuacuccaucgacuccuccuacgucugcuccggccucgucggcgacaccccccgcaacgacgaccgcuccuccaaguccaacugccgcaaccccaacaacgagcgcggcaaccacggcgucaagggcugggccuucgacaacggcaacgacgucuggaugggccgcaccaucuccaaggaccuccgcuccggcuacgagaccuucaaggucaucggcggcugguccacccccaacuccaagucccagaucaaccgccaggucaucgucgacuccgacaaccgcuccggcuacuccggcaucuucuccgucgagggcaaguccugcaucaaccgcugcuucuacgucgagcucauccgcggccgcgagcaggagacccgcgucugguggaccuccaacuccaucgucgucuucugcggcaccuccggcaccuacggcaccggcuccuggcccgacggcgccaacaucaacuucaugcccaucuga

SEQ ID NO: 110147 - RNA, 1410 nt, Artificial Sequence
  derived and/or modified CDS sequence (opt2) from neuraminidase__InfluenzaA__AAO46479
augaaccccaaccagaagaucaucaccaucggcuccgucucccucaccaucgccaccgucugcuuccucaugcagaucgccauccucgucaccaccgucacccuccacuucaagcaguacgagugcgacucccccgccuccaaccgcgucaugcccugcgagcccaucaucaucgagcgcaacaucaccgagaucgucuaccucaacaacaccaccaucgagaaggagaucugccccaaggucgucgaguaccgcaacugguccaagccccagugccagaucaccggcuucgcccccuucuccaaggacaacuccauccgccucuccgccggcggcgacaucugggucacccgcgagcccuacgucuccugcgaccccggcaagugcuaccaguucgcccucggccagggcaccacccucgacaacaagcacuccaacgacaccauccacgaccgcaucccccaccgcacccuccucaugaacgagcucggcguccccuuccaccucggcacccgccaggucugcaucgccugguccuccuccuccugccacgacggcaaggccuggcuccacgucugcaucaccggcgacgacaagaacgccaccgccuccuucaucuacgacggccgccucgucgacuccaucggcuccuggucccagaacauccuccgcacccaggaguccgagugcgucugcaucaacggcaccugcaccgucgucaugaccgacggcuccgccuccggccgcgccgacacccgcauccucuucaucgaggagggcaagaucguccacaucuccccccucuccggcuccgcccagcacgucgaggagugcuccugcuacccccgcuaccccggcguccgcugcaucugccgcgacaacuggaagggcuccaaccgccccgucgucgacaucaacauggaggacuacuccaucgacuccuccuacgucugcuccggccucgucggcgacaccccccgcaacgacgaccgcuccuccaacuccaacugccgcaaccccaacaacgagcgcggcaaccagggcgucaagggcugggccuucgacaacggcgacgacgucuggaugggccgcaccaucuccaaggaccuccgcuccggcuacgagaccuucaaggucaucggcggcugguccacccccaacuccaagucccagaucaaccgccaggucaucgucgacuccggcaaccgcuccggcuacuccggcaucuucuccgucgagggcaaguccugcaucaaccgcugcuucuacgucgagcucauccgcggccgcaagcaggagacccgcgucugguggaccuccaacuccaucgucgucuucugcggcaccuccggcaccuacggcaccggcuccuggcccgacggcgccaacaucaacuucaugcccaucuga

SEQ ID NO: 110148 - RNA, 1410 nt, Artificial Sequence
  derived and/or modified CDS sequence (opt2) from neuraminidase__InfluenzaA__AAO46481
augaaccccaaccagaagaucaucaccaucggcuccgucucccucaccaucgccaccgucugcuuccucaugcagaucgccauccucgucaccaccgucacccuccacuucaagcaguacgagugcgacucccccgccaacaaccaggucaugcccugcgagcccaucaucaucgagcgcaacaucaccgagaucgucuaccucaccaacaccaccaucgagaaggagaucugccccaagcucgucgaguaccgcaacugguccaagccccagugcaagaucaccggcuucgcccccuucuccaaggacaacuccauccgccucuccgccggcggcgacaucugggucacccgcgagcccuacgucuccugcgaccccggcaagugcuaccaguucgcccucggccagggcaccacccucgacaacaagcacuccaacgacaccauccacgaccgcaucccccaccgcacccuccucaugaacgagcucggcguccccuuccaccucggcacccgccaggucugcaucgccugguccuccuccuccugccacgacggcaaggccuggcuccacgucugcgucaccggcgacgacaagaacgccaccgccuccuucaucuacgacggccgccucgucgacuccaucggcuccuggucccagaacauccuccgcacccaggaguccgagugcgucugcaucaacggcaccugcaccgucgucaugaccgacggcuccgccuccggccgcgccgacacccgcauccucuucaucgaggagggcaagaucguccacaucuccccccucuccggcuccgcccagcacgucgaggagugcuccugcuacccccgcuaccccggcguccgcugcaucugccgcgacaacuggaagggcuccaaccgccccgucgucgacaucaacgucaaggacuacuccaucgacucccgcuacgucugcuccggccucgucggcgacaccccccgcaacaacgaccgcuccuccaacuccaacugccgcaaccccaacaacgagcgcggcaaccacggcgucaagggcugggccuucgacgacggcaacgacgucuggaugggccgcaccaucuccaaggacucccgcuccggcuacgagaccuucaaggucaucggcggcugguccacccccaacuccaagucccagaucaaccgccaggucaucgucgacuccgacaaccgcuccggcuacuccggcaucuucuccgucgaguccaaguccugcaucaaccgcugcuucuacgucgagcucauccgcggccgcgagcaggagacccgcgucugguggaccuccaacuccaucgucgucuucugcggcaccuccggcaccuacggcaccggcuccuggcccgacggcgccgacaucaaccucaugcccaucuga

SEQ ID NO: 110149 - RNA, 1410 nt, Artificial Sequence
  derived and/or modified CDS sequence (opt2) from neuraminidase__InfluenzaA__AAO46482
augaaccccaaccagaagaucaucaccaucggcuccgucucccucaccaucgccaccgucugcuuccucaugcagaucgccauccucgucaccaccgucacccuccacuucaagcaguacgagugcgacucccccgccaacaaccaggucaugcccugcgagcccaugaucaucgagcgcaacaucaccgagaucgucuaccucaccaacaccaccaucgagaaggagaucugccccaagcucgucgaguaccgcaacugguccaagccccagugcaagaucaccggcuucgcccccuucuccaaggacaacuccauccgccucuccgccggcggcgacaucugggucacccgcgagcccuacgucuccugcgaccccggcaagugcuaccaguucgcccucggccagggcaccacccucgacaacaagcacuccaacgacaccauccacgaccgcaucccccaccgcacccuccucaugaacgagcucggcguccccuuccaccucggcacccgccaggucugcaucgccugguccuccuccuccugccacgacggcaaggccuggcuccacgucugcgucaccggcgacgacaagaacgccaccgccuccuucaucuacgacggccgccucgucgacuccaucggcuccuggucccagaacauccuccgcacccaggaguccgagugcgucugcaucaacggcaccugcaccgucgucaugaccgacggcuccgccuccggccgcgccgacacccgcauccucuucaucgaggagggcaagaucguccacaucuccccccucuccggcuccgcccagcacgucgaggagugcuccugcuacccccgcuaccccggcguccgcugcaucugccgcgacaacuggaagggcuccaaccgccccgucgucgacaucaacgucaaggacuacuccaucgacucccgcuacgucugcuccggccucgucggcgacaccccccgcaacaacgaccgcuccuccaacuccaacugccgcaaccccaacaacgacaagggcaaccacggcgucaagggcugggccuucgacgacggcaacgacgucuggaugggccgcaccaucuccaaggacucccgcuccggcuacgagaccuucaaggucaucggcggcugguccacccccaacuccaagucccagaucaaccgccaggucaucgucgacuccgacaaccgcuccggcuacuccggcaucuucuccgucgagggcaaguccugcaucaaccgcugcuucuacgucgagcucauccgcggccgcgagcaggagacccgcgucugguggaccuccaacuccaucgucgucuucugcggcaccuccggcaccuacggcaccggcuccuggcccgacggcgccgacaucaaccucaugcccaucuga

SEQ ID NO: 110150 - RNA, 1410 nt, Artificial Sequence
  derived and/or modified CDS sequence (opt2) from neuraminidase__InfluenzaA__AAO46483
augaaccccaaccagaagaucaucaccaucggcuccgucucccucaccaucgccaccgucugcuuccucaugcagaucgccauccucgucaccaccgucacccuccacuuccgccaguacgagugcgacucccccgccaacaaccaggucaugcccugcgagcccaucaucaucgagcgcaacaucaccgagaucgucuaccucaacaacaccaccaucgagaaggagaucugccccaagcucgucgaguaccgcaacugguccaagccccagugcaagaucaccggcuucgcccccuucuccaaggacaacuccauccgccucuccgccggcggcgacaucugggucacccgcgagcccuacgucuccugcgaccccggcaagugcuaccaguucgcccucggccagggcaccacccucgacaacaagcacuccaacgacaccauccacgaccgcaucccccaccgcacccuccucaugaacgagcucggcguccccuuccaccucggcacccgccaggucugcaucgccugguccuccuccuccugccacgacggcaaggccuggcuccacgucugcgucaccggcgacgacaagaacgccaccgccuccuucaucuacgacggccgccucgucgacuccaucggcuccuggucccagaacauccuccgcacccaggaguccgagugcgucugcaucaacggcaccugcaccgucgucaugaccgacggcuccgccuccggccgcgccgacacccgcauccucuucaucgaggagggcaagaucguccacaucuccccccucuccggcuccgcccagcacgucgaggagugcuccugcuacccccgcuaccccggcguccgcugcaucugccgcgacaacuggaagggcuccaaccgccccgucgucgacaucaacgucgaggacuacuccaucgacuccuccuacgucugcuccggccucgucggcgacaccccccgcaacaacgaccgcuccuccaacuccaacugccgcaaccccaacaacgagcgcggcaaccacggcgucaagggcugggccuucgacgacggcaacgacgucuggaugggccgcaccaucuccaaggaccuccgcuccggcuacgagaccuucaaggucaucggcggcugguccacccccaacuccaagucccagaucaaccgccaggucaucgucgacuccgacaaccgcuccggcuacuccggcaucuucuccgucgagggcaaguccugcaucaaccgcugcuucuacgucgagcucauccgcggccgcgagcaggagacccgcgucugguggaccuccaacuccaucgucgucuucugcggcaccuccggcaccuacggcaccggcuccuggcccgacggcgccgacaucaaccucaugcccaucuga

SEQ ID NO: 110151 - RNA, 1410 nt, Artificial Sequence
  derived and/or modified CDS sequence (opt2) from neuraminidase__InfluenzaA__AAO46485
augaaccccaaccagaagaucaucaccaucggcuccgucucccucaccaucgccaccgucugcuuccucaugcagaucgccauccucgucaccaccgucacccuccacuucaagcaguacgagugcgacucccccgccaacaaccaggucaugcccugcgagcccaucaucaucgagcgcaacaucaccgagaucgucuaccucaccaacaccaccaucgagaaggagaucugccccaagcucgucgaguaccgcaacugguccaagccccagugcaagaucaccggcuucgcccccuucuccaaggacaacuccauccgccucuccgccggcggcgacaucugggucacccgcgagcccuacgucuccugcgaccccggcaagugcuaccaguucgcccucggccagggcaccacccucgacaacaagcacuccaacgacaccauccacgaccgcaucccccaccgcacccuccucaugaacgagcucggcguccccuuccaccucggcacccgccaggucugcaucgccugguccuccuccuccugccacgacggcaaggccuggcuccacgucugcgucaccggcgacgacaagaacgccaccgccuccuucaucuacgacggccgccucgucgacuccaucggcuccuggucccagaacauccuccgcacccaggaguccgagugcgucugcaucaacggcaccugcaccgucgucaugaccgacggcuccgccuccggccgcgccgacacccgcauccucuucaucgaggagggcaagaucguccacaucuccccccucuccggcuccgcccagcacgucgaggagugcuccugcuacccccgcuaccccggcguccgcugcaucugccgcgacaacuggaagggcuccaaccgccccgucgucgacaucaacgucaaggacuacuccaucgacucccgcuacgucugcuccggccucgucggcgacaccccccgcaacaacgaccgcuccuccaacuccaacugccgcaaccccaacaacgacaagggcaaccacggcgucaagggcugggccuucgacgacggcaacgacgucuggaugggccgcaccaucuccaaggacucccgcuccggcuacgagaccuucaaggucaucggcggcugguccacccccaacuccaagucccagaucaaccgccaggucaucgucgacuccgacaaccgcuccggcuacuccggcaucuucuccgucgagggcaaguccugcaucaaccgcugcuucuacgucgagcucauccgcggccgcgagcaggagacccgcgucugguggaccuccaacuccaucgucgucuucugcggcaccuccggcaccuacggcaccggcuccuggcccgacggcgccgacaucaaccucaugcccaucuga

SEQ ID NO: 110152 - RNA, 1410 nt, Artificial Sequence
  derived and/or modified CDS sequence (opt2) from neuraminidase__InfluenzaA__AAO46486
augaaccccaaccagaagaucaucaccaucggcuccgucucccucaccaucgccaccaucugcuuccucaugcagaucgccauccucgucaccaccgucacccuccacuucaagcaguacgagugcgacucccccgccaacaaccaggucaugcccugcgagcccaucaucaucgagcgcaacaucaccgagaucgucuaccucaccaacaccaccaucgagaaggagaucugccccaagcucgucgaguaccgcaacugguccaagccccagugcaagaucaccggcuucgcccccuucuccaaggacaacuccauccgccucuccgccggcggcgacaucugggucacccgcgagcccuacgucuccugcgaccccggcaagugcuaccaguucgcccucggccagggcaccacccucgacaacaagcacuccaacgacaccauccacgaccgcaucccccaccgcacccuccucaugaacgagcucggcguccccuuccaccucggcacccgccaggucugcaucgccugguccuccuccuccugccacgacggcaaggccuggcuccacgucugcgucaccggcgacgacaagaacgccaccgccuccuucaucuacgacggccgccucgucgacuccaucggcuccuggucccagaacauccuccgcacccaggaguccgagugcgucugcaucaacggcaccugcaccgucgucaugaccgacggcuccgccuccggccgcgccgacacccgcauccucuucaucgaggagggcaagaucguccacaucuccccccucuccggcuccgcccagcacgucgaggagugcuccugcuacccccgcuaccccggcguccgcugcaucugccgcgacaacuggaagggcuccaaccgccccgucgucgacaucaacgucaaggacuacuccaucgacuccuccuacgucugcuccggccucgucggcgacaccccccgcaacaacgaccgcuccuccaacuccuacugccgcaaccccaacaacgagcgcggcaaccacggcgucaagggcugggccuucgacgacggcaacgacgucuggaugggccgcaccaucuccaaggacucccgcuccggcuacgagaccuucaaggucaucggcggcugguccacccccaacuccaagucccagaucaaccgccaggucaucgucgacuccgacaaccgcuccggcuacuccggcaucuucuccgucgagggcaaguccugcaucaaccgcugcuucuacgucgagcucauccgcggccgcgagcaggagacccgcgucugguggaccuccaacuccaucgucgucuucugcggcaccuccggcaccuacggcaccggcuccuggcccgacggcgccgacaucaaccucaugcccaucuga

SEQ ID NO: 110153 - RNA, 1410 nt, Artificial Sequence
  derived and/or modified CDS sequence (opt2) from neuraminidase__InfluenzaA__AAO46489
augaaccccaaccagaagaucaucaccaucggcuccgucucccucaccaucgccaccaucugcuuccucaugcagaucgccauccucgucaccaccgucacccuccacuucaagcaguacgagugcgacucccccgccaacaaccaggucaugcccugcgagcccaucaucaucgagcgcaacaucaccgagaucgucuaccucaccaacaccaccaucgagaaggagaucugccccaagcucgucgaguaccgcaacugguccaagccccagugcaagaucaccggcuucgcccccuucuccaaggacaacuccauccgccucuccgccggcggcgacaucugggucacccgcgagcccuacgucuccugcgaccccggcaagugcuaccaguucgcccucggccagggcaccacccucaacaacaagcacuccaacgacaccauccacgaccgcaucccccaccgcacccuccucaugaacgagcucggcguccccuuccaccucggcacccgccaggucugcaucgccugguccuccuccuccugccacgacggcaaggccuggcuccacgucugcgucaccggcgacgacaagaacgccaccgccuccuucaucuacgacggccgccucgucgacuccaucggcuccuggucccagaacauccuccgcacccaggaguccgagugcgucugcaucaacggcaccugcaccgucgucaugaccgacggcuccgccuccggcaaggccgacacccgcauccucuucaucgaggagggcaagaucguccacaucuccccccucuccggcuccgcccagcacgucgaggagugcuccugcuacccccgcuaccccggcguccgcugcaucugccgcgacaacuggaagggcuccaaccgccccgucgucgacaucaacgucaaggacuacuccaucgacuccuccuacgucugcuccggccucgucggcgacaccccccgcaacaacgaccgcuccuccuccuccuacugccgcaaccccaacaacgagcgcggcaaccacggcgucaagggcugggccuucgacgacggcaacgacgucuggaugggccgcaccaucuccaaggacucccgcuccggcuacgagaccuucaaggucaucggcggcugguccacccccaacuccaagucccagaucaaccgccaggucaucgucgacuccgacaaccgcuccggcuacuccggcaucuucuccgucgagggcaaguccugcaucaaccgcugcuucuacgucgagcucauccgcggccgcgagcaggagacccgcgucugguggaccuccaacuccaucgucgucuucugcggcaccuccggcaccuacggcaccggcuccuggcccgacggcgccgacaucaaccucaugcccaucuga

SEQ ID NO: 110154 - RNA, 1410 nt, Artificial Sequence
  derived and/or modified CDS sequence (opt2) from neuraminidase__InfluenzaA__AAO46491
augaaccccaaccagaagaucaucaccaucggcuccgucucccucaccaucgccaccaucugcuuccucaugcagaucgccauccucgucaccaccgucacccuccacuucaagcaguacgagugcgacucccccgccaacaaccaggucaugcccugcgagcccaucaucaucgagcgcaacaucaccgagaucgucuaccucaccaacaccaccaucgagaaggagaucugccccaagcucgucgaguaccgcaacugguccaagccccagugcaagaucaccggcuucgcccccuucuccaaggacaacuccauccgccucuccgccggcggcgacaucugggucacccgcgagcccuacgucuccugcgaccccggcaagugcuaccaguucgcccucggccagggcaccacccucgacaacaagcacuccaacgacaccauccacgaccgcaccccccaccgcacccuccucaugaacgagcucggcguccccuuccaccucggcacccgccaggucugcaucgccugguccuccuccuccugccacgacggcaaggccuggcuccacgucugcgucaccggcuacgacaagaacgccaccgccuccuucaucuacgacggccgccucgucgacuccaucggcuccuggucccagaacauccuccgcacccaggaguccgagugcgucugcaucaacggcaccugcaccgucgucaugaccgacggcuccgccuccggccgcgccgacaccaagauccucuucaucgaggagggcaagaucguccacaucuccccccucuccggcuccgcccagcacgucgaggagugcuccugcuacccccgcuaccccggcguccgcugcaucugccgcgacaacuggaagggcuccaaccgccccgucgucgacaucaacgucaaggacuacuccaucgacuccuccuacgucugcuccggccucgucggcgacaccccccgcaacaacgaccgcuccuccaacuccuacugccgcaaccccaacaacgagaagggcaaccacggcgucaagggcugggccuucgacgacggcaacgacgucuggaugggccgcaccaucuccgaggacucccgcuccggcuacgagaccuucaaggucaucggcggcugguccacccccaacuccaagcuccagaucaaccgccaggucaucgucgacuccgacaaccgcuccggcuacuccggcaucuucuccgucgagggcaaguccugcaucaaccgcugcuucuacgucgagcucauccgcggccgcgagcaggagacccgcgucugguggaccuccaacuccaucgucgucuucugcggcaccuccggcaccuacggcaccggcuccuggcccgacggcgccgacaucaaccucaugcccaucuga

SEQ ID NO: 110155 - RNA, 1410 nt, Artificial Sequence; identical to SEQ ID NO: 110154
  derived and/or modified CDS sequence (opt2) from neuraminidase__InfluenzaA__AAO46492

SEQ ID NO: 110156 - RNA, 1410 nt, Artificial Sequence
  derived and/or modified CDS sequence (opt2) from neuraminidase__InfluenzaA__AAO88264
augaacaccaaccagcgcaucaucaccaucggcaccgucugccucaucgucggcaucgucucccuccuccuccagaucggcaacaucgucucccucuggaucucccacuccauccagaccggcaagaagaacuacuccaagaucugcuccaaguccgucaucaccuacgagaacaacaccugggucaaccagaccuacgucaacaucuccaacaucaacaucgccgacggccagggcgucaacuccaucauccucgccggcaacuccucccucugccccaucuccggcugggccaucuacuccaaggacaacuccauccgcaucggcuccaagggcgacaucuucgucauccgcgagcccuucaucuccugcucccaccucgagugccgcaccuucuuccucacccagggcgcccuccucaacgaccgccacuccaacggcaccgucaaggaccgcucccccuaccgcacccucauguccugccccaucggcgaggcccccucccccuacaacucccgcuucgaguccgucgccugguccgccuccgccugccacgacggcaugggcuggcucaccaucggcaucuccggccccgacaacggcgccgucgccguccucaaguacaacggcaucaucaccgacaccaucaaguccuggcgcaacaagauccuccgcacccaggaguccgagugcgucugcaucaacggcuccugcuucaccaucaugaccgacggccccuccaacggccaggccuccuacaagaucuucaagauggagaagggcaagaucaucaaguccgucgagcucgacgcccccaacuaccacuacgaggagugcuccugcuaccccgacaccggcaaggucgucugcgucugcuccgacaacuggcacgccuccaaccgccccugggucuccuucgaccagaaccucgacuaccagaucggcuacaucugcuccggcgucuucggcgacaacccccgcuccaacgacggccgcggcaacugcggccccguccucuccaacggcgccaacggcgucaagggcuucuccuuccgcuacggcaacggcgucuggaucggccgcaccaaguccaucuccucccgcuccggcuucgagaugaucugggaccccaacggcuggaccgagaccgacuccuccuucuccaucaagcaggacgucaucgcccucaccgacugguccggcuacuccggcuccuucguccagcaccccgagcucaccggcaugaacugcauccgccccugcuucugggucgagcucauccgcggccagcccaaggaguccaccaucuggaccuccggcuccuccaucuccuucugcggcgucgacuccgagaccgccuccugguccuggcccgacggcgccgaccuccccuucaccaucgacaaguga

SEQ ID NO: 110157 - RNA, 1410 nt, Artificial Sequence
  derived and/or modified CDS sequence (opt2) from neuraminidase__InfluenzaA__AAQ10334
augaaccccaaccagaagaucaucaccaucggcuccgucucccucaccaucgccaccaucugcuuccucaugcagaucgccauccucgucaccaccgucacccuccacuucaagcaguacgagugcaaccccccccccaacaaccaggucaugcucugcgagcccaccaucaucgagcgcaacaucaccgagaucgucuaccucaccaacaccaccaucgagaaggagaucugccccaagcucgccgaguaccgcaacugguccaagccccagugcaagaucaccggcuucgcccccuucuccaaggacaacuccauccgccucuccgccggcggcgacaucugggucacccgcgagcccuacgucuccugcgaccccggcaagugcuaccaguucgcccucggccagggcaccacccucaacaaccgccacuccaacgacaccguccacgaccgcacccccuaccgcacccuccucaugaacgagcucggcguccccuuccaccucggcaccaagcaggucugcaucgccugguccuccuccuccugccacgacggcaaggccuggcuccacgucugcgucaccggccacaacgagaacgccaccgccuccuucaucuacaacggccgccucgucgacuccaucggcuccugguccaagaacauccuccgcacccaggaguccgagugcgucugcaucaacggcaccugcaccgucgucaugaccgacggcuccgccuccggccgcgccgacaccaagauccucuucaucgaggagggcaagaucguccacaucuccccccucuccggcuccgcccagcacgucgaggagugcuccugcuacccccgcuaccccggcguccgcugcgucugccgcgacaacuggaagggcuccaaccgccccaucgucgacaucaacgucaaggacuacuccaucgucuccuccuacgucugcuccggccucgucggcgacaccccccgcaagaacgacuccuccuccuccuccuacugccucaaccccaacaacgaggagggcggccacggcgucaagggcugggccuucgacgacggcaacgacgucuggaugggccgcaccaucuccgagaagcuccgcuccggcuacgagaccuucaaggucaucggcggcugguccaagcccaacuccaagcuccagaucaaccgccaggucaucgucgaccgcggcaaccgcuccggcuacuccggcaucuucuccgucgagggcaaguccugcaucaaccgcugcuucuacgucgagcucauccgcggccgcaagcaggagaccgaggucugguggaccuccaacuccaucgucgucuucugcggcaccuccggcaccuacggcaccggcuccuggcccgacggcgccgacaucaaccucaugcccaucuga

SEQ ID NO: 110158 - RNA, 1410 nt, Artificial Sequence; identical to SEQ ID NO: 110157
  derived and/or modified CDS sequence (opt2) from neuraminidase__InfluenzaA__AAQ10335

SEQ ID NO: 110159 - RNA, 1410 nt, Artificial Sequence
  derived and/or modified CDS sequence (opt2) from neuraminidase__InfluenzaA__AAQ10336
augaaccccaaccagaagaucaucaccaucggcuccgucucccucaccaucgccaccaucugcuuccucaugcagaucgccauccucgucaccaccgucacccuccacuucaagcaguacgagugcaaccccccccccaacaaccaggucaugcucugcgagcccaccaucaucgagcgcaacaucaccgagaucgucuaccucaccaacaccaccaucgagaaggagaucugccccaagcucgccgaguaccgcaacugguccaagccccagugcaagaucaccggcuucgcccccuucuccaaggacaacuccauccgccucuccgccggcggcgacaucugggucacccgcgagcccuacgucuccugcgaccccggcaagugcuaccaguucgcccucggccagggcaccacccucaacaaccgccacuccaacgacaccguccacgaccgcacccccuaccgcacccuccucaugaacgagcucggcguccccuuccaccucggcaccaagcaggucugcaucgccugguccuccuccuccugccacgacggcaaggccuggcuccacgucugcgucaccggccacaacgagaacgccaccgccuccuucaucuacaacggccgccucgucgacuccaucggcuccugguccaagaacauccuccgcacccaggaguccgagugcgucugcaucaacggcaccugcaccgucgucaugaccgacggcuccgccuccggccgcgccgacaccaagauccucuucaucgaggagggcaagaucguccacaucuccccccucuccggcuccgcccagcacgucgaggagugcuccugcuacccccgcuaccccggcguccgcugcgucugccgcgacaacuggaagggcuccaaccgccccaucgucgacaucaacgucaaggacuacuccaucgucuccuccuacgucugcuccggccucgucggcgacaccccccgcaagaacgacuccuccuccuccuccuacugccucaaccccaacaacgaggagggcggccacggcgucaagggcugggccuucgacgacggcaacgacgucuggaugggccgcaccaucuccgagaagcuccgcuccggcuacgagaccuucaaggucaucggcggcugguccaagcccaacuccaagcuccagaucaaccgccaggucaucgucgaccgcggcaaccgcuccggcuacuccggcaucuucuccgucgagggcaaguccugcaucaaccgcugcuucuacgucgagcucauccgcggccgcaagcaggagaccgaggucugguggaccuccaacuccaucgucgucuucugcggcaccuccggcaccuacggcaccggcuccuggcccgacggcgccgagaucaaccucaugcccaucuga

SEQ ID NO: 110160 - RNA, 1410 nt, Artificial Sequence; identical to SEQ ID NO: 110157
  derived and/or modified CDS sequence (opt2) from neuraminidase__InfluenzaA__AAQ10337

SEQ ID NO: 110161 - RNA, 1410 nt, Artificial Sequence
  derived and/or modified CDS sequence (opt2) from neuraminidase__InfluenzaA__AAQ10339
augaaccccaaccagaagaucaucaccaucggcuccgucucccucaccaucgccaccaucugcuuccucaugcagaucgccauccucgucaccaccgucacccuccacuucaagcaguacgagugcaacuccccccccaacaaccaggucaugcucugcgagcccaccaucaucgagcgcaacaucaccgagaucgucuaccucaccaacaccaccaucgagaaggagaucugccccaagcucgccgaguaccgcaacugguccaagccccagugcaagaucaccggcuucgcccccuucuccaaggacaacuccauccgccucuccgccggcggcgacaucugggucacccgcgagcccuacgucuccugcgaccccgacaagugcuaccaguucgcccucggccagggcaccacccucaacaaccgccacuccaacgacaccguccacgaccgcacccccuaccgcacccuccucaugaacgagcucggcguccccuuccaccucggcaccaagcaggucugcaucgccugguccuccuccuccugccacgacggcaaggccuggcuccacgucugcgucaccggccacgacgagaacgccaccgccuccuucaucuacgacggccgccucgucgacuccaucggcuccugguccaagaagauccuccgcacccaggaguccgagugcgucugcaucaacggcaccugcaccgucgucaugaccgacggcuccgccuccggccgcgccgacaccaagauccucuucaucgaggagggcaagaucguccacaucuccccccucuccggcuccgcccagcacgucgaggagugcuccugcuacccccgcuaccccggcguccgcugcgucugccgcgacaacuggaagggcuccaaccgccccaucgucgacaucaacgucaaggacuacuccaucgucuccuccuacgucugcuccggccucgucggcgacaccccccgcaagaacgacuccuccuccuccucccacugccucaaccccaacaacgaggagggcggccacggcgucaagggcugggccuucgacgacggcaacgacgucuggaugggccgcaccaucuccgagacccuccgcuccggcuacgagaccuucaaggucaucgagggcugguccaagcccaacuccaagcuccagaucaaccgccaggucaucgucgaccgcggcaaccgcuccggcuacuccggcaucuucuccgucgagggcaaguccugcaucaaccgcugcuucuacgucgagcucauccgcggccgcaagcaggagaccgaggucugguggaccuccaacuccaucgucgucuucugcggcaccuccggcaccuacggcaccggcuccuggcccgacggcgccgacaucaaccucaugcccaucuga

SEQ ID NO: 110162 - RNA, 1410 nt, Artificial Sequence
  derived and/or modified CDS sequence (opt2) from neuraminidase__InfluenzaA__AAQ10341
augaaccccaaccagaagaucaucaccaucggcuccgucucccucaccaucgccaccaucugcuuccucaugcagaucgccauccucgucaccaccgucacccuccacuucaagcaguacgagugcaacuccccccccaacaaccaggucaugcucugcgagcccaccaucaucgagcgcaacaucaccgagaucgucuaccucaccaacaccaccaucgagaaggagaucugccccaagcucgccgaguaccgcaacugguccaagccccagugcaagaucaccggcuucgcccccuucuccaaggacaacuccauccgccucuccgccggcggcgacaucugggucacccgcgagcccuacgucuccugcgaccccgacaagugcuaccaguucgcccucggccagggcaccacccucaacaaccgccacuccaacgacaccguccacgaccgcacccccuaccgcacccuccucaugaacgagcucggcguccccuuccaccucggcaccaagcaggucugcaucgccugguccuccuccuccugccacgacggcaaggccuggcuccacgucugcgucaccggccacgacgagaacgccaccgccuccuucaucuacgacggccgccucgucgacuccaucggcuccugguccaagaagauccuccgcacccaggaguccgagugcgucugcaucaacggcaccugcaccgucgucaugaccgacggcuccgccuccggccgcgccgacaccaagauccucuucaucgaggagggcaagaucguccacaucuccccccucuccggcuccgcccagcacgucgaggagugcuccugcuacccccgcuaccccggcguccgcugcgucugccgcgacaacuggaagggcuccaaccgccccaucgucgacaucaacgucaaggacuacuccaucgucuccuccuacgucugcuccggccucgucggcgacaccccccgcaagaacgacuccuccuccuccucccacugccucaaccccaacaacgaggagggcggccacggcgucaagggcugggccuucgacgacggcaacgacgucuggaugggccgcaccaucuccgagaagcuccgcuccggcuacgagaccuucaaggucaucgagggcugguccaagcccaacuccaagcuccagaucaaccgccaggucaucgucgaccgcggcaaccgcuccggcuacuccggcaucuucuccgucgagggcaaguccugcaucaaccgcugcuucuacgucgagcucauccgcggccgcaagcaggagaccgaggucugguggaccuccaacuccaucgucgucuucugcggcaccuccggcaccuacggcaccggcuccuggcccgacggcgccgacaucaaccucaugcccaucuga

SEQ ID NO: 110163 - RNA, 1410 nt, Artificial Sequence
  derived and/or modified CDS sequence (opt2) from neuraminidase__InfluenzaA__AAQ10343
augaaccccaaccagaagaucaucaccaucggcuccgucucccucaccaucgccaccaucugcuuccucaugcagaucgccauccucgucaccaccgucacccuccacuucaagcaguacgagugcuccuccccccccaacaaccaggucaugcucugcgagcccaccaucaucgagcgcaacaucaccgagaucgucuaccucaccaacaccaccaucgagaaggagaucugccccaagcucgccgaguaccgcaacugguccaagccccagugcaagaucaccggcuucgcccccuucuccaaggacaacuccauccgccucuccgccggcggcgacaucugggucacccgcgagcccuacgucuccugcgaccccgacaagugcuaccaguucgcccucggccagggcaccacccucaacaaccgccacuccaacgacaccguccacgaccgcacccccuaccgcacccuccucaugaacgagcucggcguccccuuccaccucggcaccaagcaggucugcaucgccugguccuccuccuccugccacgacggcaaggccuggcuccacgucugcgucaccggccacgacgagaacgccaccgccuccuucaucuacgacggccgccucgucgacuccaucggcuccugguccaagaagauccuccgcacccaggaguccgagugcgucugcaucaacggcaccugcaccgucgucaugaccgacggcuccgccuccggccgcgccgacaccaagauccucuucaucgaggagggcaagaucguccacaucuccccccucuccggcuccgcccagcacgucgaggagugcuccugcuacccccgcuaccccggcguccgcugcgucugccgcgacaacuggaagggcuccaaccgccccaucgucgacaucaacgucaaggacuacuccaucgucuccuccuacgucugcuccggccucgucggcgacaccccccgcaagaacgacuccuccuccuccucccacugccucaaccccaacaacgaggagggcggccacggcgucaagggcugggccuucgacgacggcaacgacgucuggaugggccgcaccaucuccgagaaguuccgcuccggcuacgagaccuucaaggucaucgagggcugguccaagcccaacuccaagcuccagaucaaccgccaggucaucgucgaccgcggcaaccgcuccggcuacuccggcaucuucuccgucgagggcaaguccugcaucaaccgcugcuucuacgucgagcucauccgcggccgcaagcaggagaccgaggucugguggaccuccaacuccaucgucgccuucugcggcaccuccggcaccuacggcaccggcuccuggcccgacggcgccgacaucaaccucaugcccaucuga

SEQ ID NO: 110164 - RNA, 1191 nt, Artificial Sequence
  derived and/or modified CDS sequence (opt2) from neuraminidase__InfluenzaA__AAQ10344
augaaccccaaccagaagaucaucaccaucggcuccgucucccucaccaucgccaccaucugcuuccucaugcagaucgccauccucgucaccaccgucacccuccacuucaagcaguacgagugcaacuccccccccaacaaccaggccaugcucugcgagcccaccaucaucgagcgcaacaucaccgagaucgucuaccucaccaacaccaccaucgagaaggagaucugccccaagcucgccgaguaccgcaacugguccaagccccagugcaagaucaccggcuucgcccccuucuccaaggacaacuccauccgccucuccgccggcggcgacaucugggucacccgcgagcccuacgucuccugcgaccccgacaagugcuaccaguucgcccucggccagggcaccacccucaacaaccgccacuccaacgacaccguccacgaccgcacccccuaccgcacccuccucaugaacgagcucggcguccccuuccaccucggcaccaagcaggucugcaucgccugguccuccuccuccugccacgacggcaaggccuggcuccacgucugcgucaccggccacgacgagaacgccaccgccuccuucaucuacgacggccgccucgucgacuccaucggcuccugguccaagaagauccuccgcacccaggaguccgagugcgucugcaucaacggcaccugcaccgucgucaugaccgacggcuccgccuccggccgcgccgacaccaagauccucuucaucgaggagggcaagaucguccacaccuccaagcucuccggcuccgcccagcacgucgaggagugcuccugcuacccccgcuaccccggcguccgcugcgucugccgcgacaacuggaagggcuccaaccgccccaucgucgacaucaacgucaaggacuacuccaucgucuccuccuacgucugcuccggccucgucggcgacaccccccgcaagaacgacuccuccuccuccucccacugccucaaccccaacaacgaggagggcggccacggcgucaagggcugggccuucgacgacggcaacgacgucuggaugggccgcaccaucuccgagaaguuccgcuccggcuacgagaccuucaaggucaucgagggcugguccaagcccaacuccaagcuccagaucaacuccaaguccuga

SEQ ID NO: 110165 - RNA, 1416 nt, Artificial Sequence
  derived and/or modified CDS sequence (opt2) from neuraminidase__InfluenzaA__AAR11366
augaaccccaaccagaagcucuucgcccucuccggcgucgccaucgcccucuccguccucaaccuccucaucggcaucuccaacgucggccucaacgucucccuccaccucaaggagaagggccccaagcaggaggagaaccucaccugcaccaccaucaaccagaacaacaccaccgucgucgagaacaccuacgucaacaacaccaccaucaucaccaagggcaccgaccucaagacccccuccuaccuccuccucaacaagucccucugcaacgucgagggcugggucgucaucgccaaggacaacgccguccgcuucggcgaguccgagcagaucaucgucacccgcgagcccuacgucuccugcgaccccaccggcugcaagauguacgcccuccaccagggcaccaccauccgcaacaagcacuccaacggcaccauccacgaccgcaccgccuuccgcggccucaucuccaccccccucggcaccccccccaccgucuccaacuccgacuucaugugcgucggcugguccuccaccaccugccacgacggcaucgcccgcaugaccaucugcauccagggcaacaacgacaacgccaccgccaccgucuacuacaaccgccgccucaccaccaccaucaagaccugggcccgcaacauccuccgcacccaggaguccgagugcgucugccacaacggcaccugcgccgucgucaugaccgacggcuccgccuccucccaggccuacaccaaggucauguacuuccacaagggccucgucgucaaggaggaggagcuccgcggcuccgcccgccacaucgaggagugcuccugcuacggccacaaccagaaggucaccugcgucugccgcgacaacuggcagggcgccaaccgccccaucaucgagaucgacaugaacacccucgagcacaccucccgcuacgucugcaccggcauccucaccgacaccucccgccccggcgacaaguccuccggcgacugcuccaaccccaucaccggcucccccggcgcccccggcgucaagggcuucggcuuccucaacggcgacaacaccuggcucggccgcaccaucuccccccgcucccgcuccggcuucgagaugcucaagauccccaacgccggcaccgaccccaacucccgcaucgccgagcgccaggagaucgucgacaacaacaacugguccggcuacuccggcuccuucaucgacuacuggaacgacaacuccgagugcuacaaccccugcuucuacgucgagcucauccgcggccgccccgaggaggccaaguacgucugguggaccuccaacucccucaucgcccucugcggcucccccuuccccgucggccccggcuccuuccccgacggcgcccagauccaguacuucuccuga

SEQ ID NO: 110166 - RNA, 1350 nt, Artificial Sequence
  derived and/or modified CDS sequence (opt2) from neuraminidase__InfluenzaA__AAS89005
augaaccccaacaagaagaucaucaccaucggcuccaucugcauggucaccggcauggucucccucaugcuccagaucggcaaccucaucuccaucugggucucccacuccauccacaccggcaaccagcagaaggccgagcccaucuccaacaccaacuuccucaccgagaaggccgucgccuccgucaagcucgccggcaacuccucccucugccccaucaacggcugggccgucuacuccaaggacaacuccauccgcaucggcuccaagggcgacgucuucgucauccgcgagcccuucaucuccugcucccaccucgagugccgcaccuucuuccucacccagggcgcccuccucaacgacaagcacuccaacggcaccgucaaggaccgcuccccccaccgcacccucauguccugccccgucggcgaggcccccucccccuacaacucccgcuucgaguccgucgccugguccgccuccgccugccacgacggcaccuccuggcucaccaucggcaucuccggccccgacuccggcgccgucgccguccucaaguacaacggcaucaucaccgacaccaucaaguccuggcgcaacaacauccuccgcacccaggaguccgagugcgccugcgucaacggcuccugcuucaccgucaugaccgacggccccuccaacggccaggccucccacaagaucuucaagauggagaagggcaaggucgucaaguccgucgagcucgacgcccccaacuaccacuacgaggagugcuccugcuaccccgacgccggcgagaucaccugcgucugccgcgacaacuggcacggcuccaaccgccccugggucuccuucaaccagaaccucgaguaccagaucggcuacaucugcuccggcgucuucggcgacaacccccgccccaacgacggcaccggcuccugcggccccgucuccuccaacggcgccuacggcgucaagggcuucuccuucaaguacggcaacggcgucuggaucggccgcaccaaguccaccaacucccgcuccggcuucgagaugaucugggaccccaacggcuggaucgagaccgacuccuccuucuccgucaagcaggacaucgucgccaucaccgacugguccggcuacuccggcuccuucguccagcaccccgagcucaccggccucgacugcauccgccccugcuucugggucgagcucauccgcggccgccccaaggaguccaccaucuggaccuccggcuccuccaucuccuucugcggcgucaacuccgacaccgucggcugguccuggcccgacggcgccgagcuccccuucaccaucgacaaguga

SEQ ID NO: 110167 - RNA, 1350 nt, Artificial Sequence
  derived and/or modified CDS sequence (opt2) from neuraminidase__InfluenzaA__AAS89006
augaaccccaacaagaagaucaucaccaucggcuccaucugcauggucaccggcauggucucccucaugcuccagaucggcaaccucaucuccaucugggucucccacuccauccacaccggcaaccagcacaaggccgagcccaucuccaacaccaacuuccucaccgagaaggccgucgccuccgucaagcucgccggcaacuccucccucugccccaucaacggcugggccgucuacuccaaggacaacuccauccgcaucggcuccaagggcgacgucuucgucauccgcgagcccuucaucuccugcucccaccucgagugccgcaccuucuuccucacccagggcgcccuccucaacgacaagcacuccaacggcaccgucaaggaccgcuccccccaccgcacccucauguccugccccgucggcgaggcccccucccccuacaacucccgcuucgaguccgucgccugguccgccuccgccugccacgacggcaccuccuggcucaccaucggcaucuccggccccgacaacggcgccgucgccguccucaaguacaacggcaucaucaccgacaccaucaaguccuggcgcaacaacauccuccgcacccaggaguccgagugcgccugcgucaacggcuccugcuucaccgucaugaccgacggccccuccaacggccaggccucccacaagaucuucaagauggagaagggcaaggucgucaaguccgucgagcucgacgcccccaacuaccacuacgaggagugcuccugcuaccccgacgccggcgagaucaccugcgucugccgcgacaacuggcacggcuccaaccgccccugggucuccuucaaccagaaccucgaguaccagaucggcuacaucugcuccggcgucuucggcgacaacccccgccccaacgacggcaccggcuccugcggccccgucuccuccaacggcgccuacggcgucaagggcuucuccuucaaguacggcaacggcgucuggaucggccgcaccaaguccaccaacucccgcuccggcuucgagaugaucugggaccccaacggcuggaccgagaccgacuccuccuucuccgucaagcaggacaucgucgccaucaccgacugguccggcuacuccggcuccuucguccagcaccccgagcucaccggccucgacugcauccgccccugcuucugggucgagcucauccgcggccgccccaaggaguccaccaucuggaccuccggcuccuccaucuccuucugcggcgucaacuccgacaccgucggcugguccuggcccgacggcgccgagcuccccuucaccaucgacaaguga

SEQ ID NO: 110168 - RNA, 1410 nt, Artificial Sequence
  derived and/or modified CDS sequence (opt2) from neuraminidase__InfluenzaA__AAT38822
augaaccccaaccagaagaucaucaccaucggcgucgucaacaccacccucuccaccaucgcccucuucaucggcgucggcaaccucgucuucaacaccgucauccacgagaagaucggcgaccaccagaucgucacccaccccaccaucaugacccccgagguccccaacugcuccgacaccaucaucaccuacaacaacaccgucaucaacaacaucaccaccaccaucaucaccgaggccgagcgccccuucaaguccccccucccccucugccccuuccgcggcuucuuccccuuccacaaggacaacgccauccgccucggcgagaacaaggacgucaucgucacccgcgagcccuacgucuccugcgacaacgacaacugcugguccuucgcccucgcccagggcgcccuccucggcaccaagcacuccaacggcaccaucaaggaccgcacccccuaccgcucccucauccgcuuccccaucggcaccgcccccguccucggcaacuacaaggagaucugcaucgccugguccuccuccuccugcuucgacggcaaggaguggaugcacgucugcaugaccggcaacgacaacgacgccuccgcccagaucaucuacggcggccgcaugaccgacuccaucaaguccuggcgcaaggacauccuccgcacccaggaguccgagugccagugcaucgacggcaccugcgucgucgccgucaccgacggccccgccgccaacuccgccgaccaccgcgucuacuggauccgcgagggccgcaucaucaaguacgagaacguccccaagaccaagauccagcaccucgaggagugcuccugcuacgucgacaucgacgucuacugcaucugccgcgacaacuggaagggcuccaaccgccccuggaugcgcaucaacaacgagaccauccucgagaccggcuacgucugcuccaaguuccacuccgacaccccccgccccgccgaccccuccaucauguccugcgacucccccuccaacgucaacggcggccccggcgucaagggcuucggcuucaaggccggcaacgacgucuggcucggccgcaccgucuccaccuccggccgcuccggcuucgagaucaucaaggucaccgagggcuggaucaacucccccaaccacgucaaguccaucacccagacccucgucuccaacaacgacugguccggcuacuccggcuccuucaucgucaaggccaaggacugcuuccagcccugcuucuacgucgagcucauccgcggccgccccaacaagaacgacgacgucuccuggaccuccaacuccaucgucaccuucugcggccucgacaacgagcccggcuccggcaacuggcccgacggcuccaacaucggcuucaugcccaaguga

SEQ ID NO: 110169 - RNA, 1350 nt, Artificial Sequence; identical to SEQ ID NO: 110167
  derived and/or modified CDS sequence (opt2) from neuraminidase__InfluenzaA__AAV65827

SEQ ID NO: 110170 - RNA, 1410 nt, Artificial Sequence
  derived and/or modified CDS sequence (opt2) from neuraminidase__InfluenzaA__AAX11488
augaaccccaaccagaagaucaucaccaucggcuccgucucccucaccaucgccgccaucugcuuccucaugcagaucgccauccucgucaccaccgucacccuccacuucaagcagcacgagugcaacuccccccccaacaaccaggucaugcucugcgagcccaccaucaucgagcgcaacaucaccgagaucgucuaccucaccaacaccaccaucgagaaggagaucugccccaagcucgccgaguaccgcaacugguccaagccccagugcaacaucaccggcuucgcccccuucuccaaggacaacuccauccgccucuccgccggcggcgacaucugggucacccgcgagcccuacgucuccugcgaccccgacaagugcuaccaguucgcccucggccagggcaccacccucaacaacggccacuccaacgacaccguccacgaccgcacccccuaccgcacccuccucaugaacgagcucggcguccccuuccaccucggcacccgccaggucugcaucgccugguccuccuccuccugccacgacggcaaggccuggcuccacgucugcgucaccggcgacgacaagaacgccaccgccuccuucaucuacaacggccgccucgucgacuccaucggcuccugguccaagaagauccuccgcacccaggaguccgagugcgucugcaucaacggcaccugcaccgucgucaugaccgacggcuccgccuccggcaaggccgacaccaagauccucuucaucgaggagggcaagaucguccacaucuccgcccucuccggcuccgcccagcacgucgaggagugcuccugcuacccccgcuaccccggcguccgcugcgucugccgcgacaacuggaagggcuccaaccgccccaucgucgacaucaacgucaaggacuacuccaucgucuccuccuacgucugcuccggccucgucggcgacaccccccgcaagaacgacuccuucuccuccucccacugccucgaccccaacaacgaggagggcggccacggcgucaagggcugggccuucgacgacggcaacgacgucuggaugggccgcaccaucuccgagaagcuccgcuccggcuacgagaccuucaaggucaucgagggcugguccaagcccaacuccaagcuccagaucaaccgccaggucaucgucgagcgcggcaaccgcuccggcuacuccggcaucuucuccgucgagggcaaguccugcaucaaccgcugcuucuacgucgagcucauccgcggccgcaaggaggagaccgaggucugguggaccuccaacuccaucgucgucuucugcggcaccuccggcaccuacggcaccggcuccuggcccgacggcgccgacaucaaccucaugcccaucuga

SEQ ID NO: 110171 - RNA, 1410 nt, Artificial Sequence
  derived and/or modified CDS sequence (opt2) from neuraminidase__InfluenzaA__AAX11508
augaaccccaaccagaagaucaucaccaucggcuccgucucccucaccaucgccaccaucugcuuccucaugcagaucgccauccucgucaccaccgucacccuccacuucaagcagcacgagugcaacuccccccccaacaaccaggucaugcucugcgagcccaccaucaucgagcgcaacaucaccgagaucgucuaccucaccaacaccaccaucgagaaggagaucugccccaagcucgccgaguaccgcaacugguccaagccccagugcaacaucaccggcuucgcccccuucuccaaggacaacuccauccgccucuccgccggcggcgacaucugggucacccgcgagcccuacgucuccugcgaccccgacaagugcuaccaguucgcccucggccagggcaccacccucaacaacggccacuccaacaacaccguccacgaccgcacccccuaccgcacccuccucaugaacgagcucggcguccccuuccaccucggcacccgccaggucugcaucgccugguccuccuccuccugccacgacggcaaggccuggcuccacgucugcgucaccggcgacgacaagaacgccaccgccuccuucaucuacaacggccgccucgucgacuccaucggcuccugguccaagaagauccuccgcacccaggaguccgagugcgucugcaucaacggcaccugcaccgucgucaugaccgacggcuccgccuccggcaaggccgacaccaagauccucuucaucgaggagggcaagaucguccacaucuccacccucuccggcuccgcccagcacgucgaggagugcuccugcuacccccgcuaccccggcguccgcugcgucugccgcgacaacuggaagggcuccaaccgccccaucgucgacaucaacgucaaggacuacuccaucgucuccuccuacgucugcuccggccucgucggcgacaccccccgcaagaacgacuccuucuccuccucccacugccucgaccccaacaacgaggagggcggccacggcgucaagggcugggccuucgacgacggcaacgacgucuggaugggccgcaccaucuccgagaagcuccgcuccggcuacgagaccuucaaggucaucgagggcugguccaagcccaacuccaagcuccagaucaaccgccaggucaucgucgagcgcggcaaccgcuccggcuacuccggcaucuucuccgucgagggcaaguccugcaucaaccgcugcuucuacgucgagcucauccgcggccgcaaggaggagaccgaggucugguggaccuccaacuccaucgucgucuucugcggcaccuccggcaccuacggcaccggcuccuggcccgacggcgccgacaucaaccucaugcccaucuga

SEQ ID NO: 110172 - RNA, 1410 nt, Artificial Sequence
  derived and/or modified CDS sequence (opt2) from neuraminidase__InfluenzaA__AAX11538
augaaccccaaccagaagaucaucaccaucggcuccgucucccucaccaucgccaccaucugcuuccucaugcagaucgccauccucgucaccaccgucacccuccacuucaagcagcacgagugcaacuccccccccaacaaccaggucaugcucugcgagcccaccaucaucgagcgcaacaucaccgagaucgucuaccucaccaacaccaccaucgagaaggagaucugccccaagcucgccgaguaccgcaacugguccaagccccagugcaacaucaccggcuucgcccccuucuccaaggacaacuccauccgccucuccgccggcggcgacaucugggucacccgcgagcccuacgucuccugcgaccccgacaagugcuaccaguucgcccucggccagggcaccacccucaacaacggccacuccaacgacaccguccacgagcgcacccccuaccgcacccuccucaugaacgagcucggcguccccuuccaccucggcacccgccaggucugcaucgccugguccuccuccuccugccacgacggcaaggccuggcuccacgucugcgucaccggcgacgacaagaacgccaccgccuccuucaucuacaacggccgccucgucgacuccaucggcuccugguccaagaagauccuccgcacccaggaguccgagugcgucugcaucaacggcaccugcaccgucgucaugaccgacggcuccgccuccggcaaggccgacaccaagauccucuucaucgaggagggcaagaucguccacaucuccacccucuccggcuccgcccagcacgucgaggagugcuccugcuacccccgcuaccccggcguccgcugcgucugccgcgacaacuggaagggcuccaaccgccccaucgucgacaucaacgucaaggacuacuccaucgucuccuccuacgucugcuccggccucgucggcgacaccccccgcaagaacgacuccuccuccuccucccacugccucgaccccaacaacgaggagggcggccacggcgucaagggcugggccuucgacgacggcaacgacgucuggaugggccgcaccaucuccgagaagcuccgcuccggcuacgagaccuucaaggucaucgagggcugguccaagcccaacuccaagcuccagaucaaccgccaggucaucgucgagcgcggcaaccgcuccggcuacuccggcaucuucuccgucgagggcaaguccugcaucaaccgcugcuucuacgucgagcucauccgcggccgcaaggaggagaccgaggucugguggaccuccaacuccaucgucgucuucugcggcaccuccggcaccuacggcaccggcuccuggcccgacggcgccgacaucaaccucaugcccaucuga

SEQ ID NO: 110173 - RNA, 1410 nt, Artificial Sequence
  derived and/or modified CDS sequence (opt2) from neuraminidase__InfluenzaA__AAX11548
augaaccccaaccagaagaucaucaccaucggcuccgucucccucaccaucgccaccaucugcuuccucaugcagaucgccauccucgucaccaccgucacccuccacuucaagcagcacgagugcaacuccccccccaacaaccaggucaugcucugcgagcccaccaucaucgagcgcaacaucaccgagaucgucuaccucaccaacaccaccaucgagaaggagaucugccccaagcucgccgaguaccgcaacugguccaagccccagugcaacaucaccggcuucgcccccuucuccaaggacaacuccauccgccucuccgccggcggcgacaucugggucacccgcgagcccuacgucuccugcgaccccgacaagugcuaccaguucgcccucggccagggcaccacccucaacaacggccacuccaacgacaccguccacgaccgcacccccuaccgcacccuccucaugaacgagcucggcguccccuuccaccucggcacccgccaggucugcaucgccugguccuccuccuccugccacgacggcaaggccuggcuccacgucugcgucaccggcgacgacaagaacgccaccgccuccuucaucuacaacggccgccucgucgacuccaucggcuccugguccaagaagauccuccgcacccaggaguccgagugcgucugcaucaacggcaccugcaccgucgucaugaccgacggcuccgccuccggcaaggccgacaccaagauccucuucaucgaggagggcaagaucguccacaucuccacccucuccggcuccgcccagcacgucgaggagugcuccugcuacccccgcuaccccggcguccgcugcgucugccgcgacaacuggaagggcuccaaccgccccaucgucgacaucaacgucaaggacuacuccaucgucuccuccuacgucugcuccggccucgucggcgacaccccccgcaagaacgacuccuccuccuccucccacugccucgaccccaacaacgaggagggcggccacggcgucaagggcugggccuucgacgacggcaacgacgucuggaugggccgcaccaucuccgagaagcuccgcuccggcuacgagaccuucaaggucaucgagggcugguccaagcccaacuccaagcuccagaucaaccgccaggucaucgucgagcgcggcaaccgcuccggcuacuccggcaucuucuccgucgagggcaaguccugcaucaaccgcugcuucuacgucgagcucauccgcggccgcaaggaggagaccgaggucugguggaccuccaacuccaucgucgucuucugcggcaccuccggcaccuacggcaccggcuccuggcccgacggcgccgacaucaaccucaugcccaucuga

SEQ ID NO: 110174 - RNA, 1410 nt, Artificial Sequence; identical to SEQ ID NO: 110171
  derived and/or modified CDS sequence (opt2) from neuraminidase__InfluenzaA__AAX11558

SEQ ID NO: 110175 - RNA, 1410 nt, Artificial Sequence
  derived and/or modified CDS sequence (opt2) from neuraminidase__InfluenzaA__AAX11568
augaaccccaaccagaagaucaucaccaucggcuccgucucccucaccaucgccaccaucugcuuccucaugcagaucgccauccucgucaccaccgucacccuccacuucaagcagcacgagugcuacuccccccccaacaaccaggucaugcucugcgagcccaccaucaucgagcgcaacaucaccgagaucgucuaccucaccaacaccaccaucgagaaggagaucugccccaagcucgccgaguaccgcaacugguccaagccccagugcaacaucaccggcuucgcccccuucuccaaggacaacuccauccgccucuccgccggcggcgacaucugggucacccgcgagcccuacgucuccugcgaccccgacaagugcuaccaguucgcccucggccagggcaccacccucaacaacggccacuccaacgacaccguccacgaccgcacccccuaccgcacccuccucaugaacgagcucggcguccccuuccaccucggcacccgccaggucugcaucgccugguccuccuccuccugccacgacggcaaggccuggcuccacgucugcgucaccggcgacgacaagaacgccaccgccuccuucaucuacaacggccgccucgucgacuccaucggcuccugguccaagaagauccuccgcacccaggaguccgagugcgucugcaucaacggcaccugcaccgucgucaugaccgacggcuccgccuccggcaaggccgacaccaagauccucuucaucgaggagggcaagaucguccacaucuccacccucuccggcuccgcccagcacgucgaggagugcuccugcuacccccgcuaccccggcguccgcugcgucugccgcgacaacuggaagggcuccaaccgccccaucgucgacaucaacgucaaggacuacuccaucgucuccuccuacgucugcuccggccucgucggcgacaccccccgcaagaacgacuccuucuccuccucccacugccucgaccccaacaacgaggagggcggccacggcgucaagggcugggccuucgacgacggcaacgacgucuggaugggccgcaccaucuccgagaagcuccgcuccggcuacgagaccuucaaggucaucgagggcugguccaagcccaacuccaagcuccagaucaaccgccaggucaucgucgagcgcggcaaccgcuccggcuacuccggcaucuucuccgucgagggcaaguccugcaucaaccgcugcuucuacgucgagcucauccgcggccgcaaggaggagaccgaggucugguggaccuccaacuccaucgucgucuucugcggcaccuccggcaccuacggcaccggcuccuggcccgacggcgccgacaucaaccucaugcccaucuga

SEQ ID NO: 110176 - RNA, 1410 nt, Artificial Sequence; identical to SEQ ID NO: 110171
  derived and/or modified CDS sequence (opt2) from neuraminidase__InfluenzaA__AAX11578

SEQ ID NO: 110177 - RNA, 1410 nt, Artificial Sequence
  derived and/or modified CDS sequence (opt2) from neuraminidase__InfluenzaA__AAX11588
augaaccccaaccagaagaucaucaccaucggcuccgucucccucaccaucgccgccaucugcuuccucaugcagaucgccauccucgucaccaccgucacccuccacuucaagcagcacgagugcaacuccccccccaacaaccaggucaugcucugcgagcccaccaucaucgagcgcaacaucaccgagaucgucuaccucaccaacaccaccaucgagaaggagaucugccccaagcucgccgaguaccgcaacugguccaagccccagugcaacaucaccggcuucgcccccuucuccaaggacaacuccauccgccucuccgccggcggcgacaucugggucacccgcgagcccuacgucuccugcgaccccgacaagugcuaccaguucgcccucggccagggcaccacccucaacaacggccacuccaacgacaccguccacgaccgcacccccuaccgcacccuccucaugaacgagcucggcguccccuuccaccucggcacccgccaggucugcaucgccugguccuccuccuccugccacgacggcaaggccuggcuccacgucugcgucaccggcgacgacaagaacgccaccgccuccuucaucuacaacggccgccucgucgacuccaucggcuccugguccaagaagauccuccgcacccaggaguccgagugcaucugcaucaacggcaccugcaccgucgucaugaccgacggcuccgccuccggcaaggccgacaccaagauccucuucaucgaggagggcaagaucguccacaucuccacccucuccggcuccgcccagcacgucgaggagugcuccugcuacccccgcuaccccggcguccgcugcgucugccgcgacaacuggaagggcuccaaccgccccaucgucgacaucaacgucaaggacuacuccaucgucuccuccuacgucugcuccggccucgucggcgacaccccccgcaagaacgacuccuucuccuccucccacugccucgaccccaacaacgaggagggcggccacggcgucaagggcugggccuucgacgacggcaacgacgucuggaugggccgcaccaucuccgagaagcuccgcuccggcuacgagaccuucaaggucaucgagggcugguccaagcccaacuccaagcuccagaucaaccgccaggucaucgucgagcgcggcaaccgcuccggcuacuccggcaucuucuccgucgagggcaaguccugcaucaaccgcugcuucuacgucgagcucauccgcggccgcaaggagaagaccgaggucugguggaccuccaacuccaucgucgucuucugcggcaccuccggcaccuacggcaccggcuccuggcccgacggcgccgacaucaaccucaugcccaucuga

SEQ ID NO: 110178 - RNA, 1410 nt, Artificial Sequence; identical to SEQ ID NO: 110173
  derived and/or modified CDS sequence (opt2) from neuraminidase__InfluenzaA__AAX11598

SEQ ID NO: 110179 - RNA, 1410 nt, Artificial Sequence; identical to SEQ ID NO: 110173
  derived and/or modified CDS sequence (opt2) from neuraminidase__InfluenzaA__AAX11608

SEQ ID NO: 110180 - RNA, 1410 nt, Artificial Sequence
  derived and/or modified CDS sequence (opt2) from neuraminidase__InfluenzaA__AAX11618
augaaccccaaccagaagaucaucaccaucggcuccgucucccucaccaucgccaccaucugcuuccucaugcagaucgccauccucgucaccaccgucacccuccacuucaagcagcacgagugcaacuccccccccaacaaccaggucaugcucugcgagcccaccaucaucgagcgcaacaucaccgagaucgucuaccucaccaacaccaccaucgagaaggagaucugccccaagcucgccgaguaccgcaacugguccaagccccagugcaacaucaccggcuucgcccccuucuccaaggacaacuccauccgccucuccgccggcggcgacaucugggucacccgcgagcccuacgucuccugcgaccccgacaagugcuaccaguucgcccucggccagggcaccacccucaacaacggccacuccaacgacaccguccacgaccgcacccccuaccgcacccuccucaugaacgagcucggcguccccuuccaccucggcacccgccaggucugcaucgccugguccuccuccuccugccacgacggcaaggccuggcuccacgucugcgucaccggcgacgacaagaacgccaccgccuccuucaucuacaacggccgccucgucgacuccaucggcuccugguccaagaagauccuccgcacccaggaguccgagugcgucugcaucaacggcaccugcaccgucgucaugaccgacggcuccgccuccggcaaggccgacaccaagauccucuucaucgaggagggcaagaucguccacaucuccgcccucuccggcuccgcccagcacgucgaggagugcuccugcuacccccgcuaccccggcguccgcugcgucugccgcgacaacuggaagggcuccaaccgccccaucgucgacaucaacgucaaggacuacuccaucgucuccuccuacgucugcuccggccucgucggcgacaccccccgcaagaacgacuccuccuccuccucccacugccucgaccccaacaacgaggagggcggccacggcgucaagggcugggccuucgacgacggcaacgacgucuggaugggccgcaccaucuccgagaagcuccgcuccggcuacgagaccuucaaggucaucgagggcugguccaagcccaacuccaagcuccagaucaaccgccaggucaucgucgagcgcggcaaccgcuccggcuacuccggcaucuucuccgucgagggcaaguccugcaucaaccgcugcuucuacgucgagcucauccgcggccgcaaggaggagaccgaggucugguggaccuccaacuccaucgucgucuucugcggcaccuccggcaccuacggcaccggcuccuggcccgacggcgccgacaucaaccucaugcccaucuga

SEQ ID NO: 110181 - RNA, 1410 nt, Artificial Sequence
  derived and/or modified CDS sequence (opt2) from neuraminidase__InfluenzaA__AAX12744
augaaccccaaccagaagaucaucaccaucggcuccgucucccucaccaucgccaccaucugcuuccucaugcagaucgccauccucgucaccaccgucacccuccacuucaagcagcacgagugcaacuccccccccaacaaccaggucaugcucugcgagcccaccaucaucgagcgcaacaucaccgagaucgucuaccucaccaacaccaccaucgagaaggagaucugccccaagcucgccgaguaccgcaacugguccaagccccagugcaacaucaccggcuucgcccccuucuccaaggacaacuccauccgccucuccgccggcggcgacaucugggucacccgcgagcccuacgucuccugcgaccccgacaagugcuaccaguucgcccucggccagggcaccacccucaacaacggccacuccaacgacaccguccacgaccgcacccccuaccgcacccuccucaugaacgagcucggcguccccuuccaccucggcacccgccaggucugcaucgccugguccuccuccuccugccacgacggcaaggccuggcuccacgucugcgucaccggcgacgacaagaacgccaccgccuccuucaucuacaacggccgccucgucgacuccaucggcuccugguccaagaagauccuccgcacccaggaguccgagugcgucugcaucaacggcaccugcaccgucgucaugaccgacggcuccgccuccggcaaggccgacaccaagauccucuucaucgaggagggcaagaucguccacaucuccacccucuccggcuccgcccagcacgucgaggagugcuccugcuacccccgcuaccccggcguccgcugcgucugccgcgacaacuggaagggcuccaaccgccccaucgucgacaucaacgucaaggacuacuccaucgucuccuccuacgucugcuccggccucgucggcgacaccccccgcaagaacgacuccuucuccuccucccacugccucgaccccaacaacgaggagggcggccacggcgucaagggcugggccuucgacgacggcaacgacgucuggaugggccgcaccaucuccgagaagcuccgcuccggcuacgagaccuucaaggucaucgagggcugguccaagcccaacuccaagcuccagaucaaccgccaggucaucgucgagcgcggcaaccgcuccggcuacuccggcaucuucuccgucgagggcaaguccugcaucaaccgcugcuucuacgucgagcucauccgcggccgcaaggaggagaccgaggucugguggaccuccaacuccaucgucgucuucugcggcaccuccggcaccuacggcaccggcuccuggcccgacggcgccgacaucaaccucaugcccaucuga

SEQ ID NO: 110182 - RNA, 1410 nt, Artificial Sequence; identical to SEQ ID NO: 110173
  derived and/or modified CDS sequence (opt2) from neuraminidase__InfluenzaA__AAX12754

SEQ ID NO: 110183 - RNA, 1410 nt, Artificial Sequence
  derived and/or modified CDS sequence (opt2) from neuraminidase__InfluenzaA__AAX12774
augaaccccaaccagaagaucaucaccaucggcuccgucucccucaccaucgccaccaucugcuuccucaugcagaucgccauccucgucaccaccgucacccuccacuucaagcaguacgagugcaacuccccccccaacaaccaggucaugcucugcgagcccgccaucaucgagcgcaacaucaccgagaucgucuaccucaccaacaccaccaucgagaaggagaucugccccaagcucgccgaguaccgcaacugguccaagccccagugcaacaucaccggcuucgcccccuucuccaaggacaacuccauccgccucuccgccggcggcgacaucugggucacccgcgagcccuacgucuccugcgaccccgacaagugcuaccaguucgcccucggccagggcaccacccucaacaacggccacuccaacgacaccguccacgaccgcacccccuaccgcacccuccucaugaacgagcucggcguccccuuccaccucggcacccgccaggucugcaucgccugguccuccuccuccugccacgacggcaaggccuggcuccacgucugcgucaccggcgacgacaagaacgccaccgccuccuucaucuacaacggccgccucgucgacuccaucggcuccugguccaagaagauccuccgcacccaggaguccgagugcgucugcaucaacggcaccugcaccgucgucaugaccgacggcuccgccuccggcaaggccgacaccaagauccucuucaucgaggagggcaagaucgucaacaucuccacccucuccggcuccgcccagcacgucgaggagugcuccugcuacccccgcuaccccggcguccgcugcgucugccgcgacaacuggaagggcuccaaccgccccaucgucgacaucaacgucaaggacuacuccaucgucuccuccuacgucugcuccggccucgucggcgacaccccccgcaagaacgacuccuucuccuccucccacugccucgaccccaacaacgaggagggcggccacggcgucaagggcugggccuucgacgacggcaacgacgucuggaugggccgcaccaucuccgagaagcuccgcuccggcuacgagaccuucaaggucaucgagggcugguccaagcccaacuccaagcuccagaucaaccgccaggucaucgucgagcgcggcaaccgcuccggcuacuccggcaucuucuccgucgagggcaaguccugcaucaaccgcugcuucuacgucgagcucauccgcggccgcaaggaggagaccgaggucugguggaccuccaacuccaucgucgucuucugcggcaccuccggcaccuacggcaccggcuccuggcccgacggcgccgacaucaaccucaugcccaucuga

SEQ ID NO: 110184 - RNA, 1410 nt, Artificial Sequence
  derived and/or modified CDS sequence (opt2) from neuraminidase__InfluenzaA__AAX12804
augaaccccaaccagaagaucaucaccaucggcuccgucucccucaccaucgccaccaucugcuuccucaugcagaucgccauccucgucaccaccgucacccuccacuucaagcaguacgagugcaacuccccccccaacaaccaggucaugcucugcgagcccaccaucaucgagcgcaacaucaccgagaucgucuaccucaccaacaccaccaucgagaaggagaucugccccaagcucgccgaguaccgcaacugguccaagccccagugcaacaucaccggcuucgcccccuucuccaaggacaacuccauccgccucuccgccggcggcgacaucugggucacccgcgagcccuacgucuccugcgaccccgacaagugcuaccaguucgcccucggccagggcaccacccucaacaacggccacuccaacgacaccguccacgaccgcacccccuaccgcacccuccucaugaacgagcucggcguccccuuccaccucggcacccgccaggucugcaucgccugguccuccuccuccugccacgacggcaaggccuggcuccacgucugcgucaccggcgacgacgagaacgccaccgccuccuucaucuacaacggccgccucgucgacuccaucggcuccugguccaagaagauccuccgcacccaggaguccgagugcgucugcaucaacggcaccugcaccgucgucaugaccgacggcuccgccuccggcaaggccgacaccaagauccucuucaucgaggagggcaagaucguccacaucuccacccucuccggcuccgcccagcacgucgaggagugcuccugcuacccccgcuaccccggcguccgcugcgucugccgcgacaacuggaagggcuccaaccgccccaucgucgacaucaacgucaaggacuacuccaucgucuccuccuacgucugcuccggccucgucggcgacaccccccgcaagaacgacaacuucuccuccucccacugccucgaccccaacaacgaggagggcggccacggcgucaagggcugggccuucgacgacggcaacgacgucuggaugggccgcaccaucuccgagaagcuccgcuccggcuacgagaccuucaaggucaucgagggcugguccaagcccaacuccaagcuccagaccaaccgccaggucaucgucgagcgcggcaaccgcuccggcuacuccggcaucuucuccgucgagggcaaguccugcaucaaccgcugcuucuacgucgagcucauccgcggccgcaaggaggagaccgaggucugguggaccuccaacuccaucgucgucuucugcggcaccuccggcaccuacggcaccggcuccuggcccgacggcgccgacaucaaccucaugcccaucuga

SEQ ID NO: 110185 - RNA, 1410 nt, Artificial Sequence
  derived and/or modified CDS sequence (opt2) from neuraminidase__InfluenzaA__AAX12814
augaaccccaaccagaagaucaucaccaucggcuccgucucccucaccaucgccaccaucugcuuccucaugcagaucgccauccucgucaccaccgucacccuccacuucaagcaguacgagugcaacuccccccccaacaaccaggucaugcucugcgagcccgccaucaucgagcgcaacaucaccgagaucgucuaccucaccaacaccaccaucgagaaggagaucugccccaagcucgccgaguaccgcaacugguccaagccccagugcaacaucaccggcuucgcccccuucuccaaggacaacuccauccgccucuccgccggcggcgacaucugggucacccgcgagcccuacgucuccugcgaccccgacaagugcuaccaguucgcccucggccagggcaccacccucaacaacggccacuccaacgacaccguccacgaccgcacccccuaccgcacccuccucaugaacgagcucggcguccccuuccaccucggcacccgccaggucugcaucgccugguccuccuccuccugccacgacggcaaggccuggcuccacgucugcgucaccggcgacgacgagaacgccaccgccuccuucaucuacaacggccgccucgucgacuccaucggcuccugguccaagaagauccuccgcacccaggaguccgagugcgucugcaucaacggcaccugcaccgucgucaugaccgacggcuccgccuccggcaaggccgacaccaagauccucuucaucgaggagggcaagaucgucaacaucuccacccucuccggcuccgcccagcacgucgaggagugcuccugcuacccccgcuaccccggcguccgcugcgucugccgcgacaacuggaagggcuccaaccgccccaucgucgacaucaacgucaaggacuacuccaucgucuccuccuacgucugcuccggccucgucggcgacaccccccgcaagaacgacuccuucuccuccucccacugccucgaccccaacaacgaggagggcggccacggcgucaagggcugggccuucgacgacggcaacgacgucuggaugggccgcaccaucuccgagaagcuccgcuccggcuacgagaccuucaaggucaucgagggcugguccaagcccaacuccaagcuccagaucaaccgccaggucaucgucgagcgcggcaaccgcuccggcuacuccggcaucuucuccgucgagggcaaguccugcaucaaccgcugcuucuacgucgagcucauccgcggccgcaaggaggagaccgaggucugguggaccuccaacuccaucgucgucuucugcggcaccuccggcaccuacggcaccggcuccuggcccgacggcgccgacaucaaccucaugcccaucuga

SEQ ID NO: 110186 - RNA, 1410 nt, Artificial Sequence
  derived and/or modified CDS sequence (opt2) from neuraminidase__InfluenzaA__AAX34064
augaaccccaaccagaagaucaucaccaucggcuccgucucccucaccaucgccaccaucugcuuccucaugcagaucgccauccucgucaccaccgucacccuccacuucaagcagcacgagugcaacuccccccccaacaaccaggucaugcucugcgagcccaccaucaucgagcgcaacaucaccgagaucgucuaccucaccaacaccaccaucgagcgcgagaucugccccaagcucgccgaguaccgcaacugguccaagccccagugcaacaucaccggcuucgcccccuucuccaaggacaacuccauccgccucuccgccggcggcgacaucugggucacccgcgagcccuacgucuccugcgaccccgacaagugcuaccaguucgcccucggccagggcaccacccucaacaacggccacuccaacgacaccguccacgaccgcacccccuaccgcacccuccucaugaacgagcucggcguccccuuccaccucggcacccgccaggucugcaucgccugguccuccuccuccugccacgacggcaaggccuggcuccacgucugcgucaccggcgacgacaagaacgccaccgccuccuucaucuacaacggccgccucgucgacuccaucggcuccugguccaagaagauccuccgcacccaggaguccgagugcgucugcaucaacggcaccugcaccgucgucaugaccgacggcuccgccuccggcaaggccgacaccaagauccucuucaucgaggagggcaagaucguccacaucuccacccucuccggcuccgcccagcacgucgaggagugcuccugcuacccccgcuaccccggcguccgcugcgucugccgcgacaacuggaagggcuccaaccgccccaucgucgacaucaacgucaaggacuacuccaucgucuccuccuacgucugcuccggccucgucggcgacaccccccgcaagaacgacuccuccuccuccucccacugccucgaccccaacaacgaggagggcggccacggcgucaagggcugggccuucgacgacggcaacgacgucuggaugggccgcaccaucuccgagaagcuccgcuccggcuacgagaccuucaaggucaucgagggcugguccaagcccaacuccaagcuccagaucaaccgccaggucaucgucgagcgcggcaaccgcuccggcuacuccggcaucuucuccgucgagggcaaguccugcaucaaccgcugcuucuacgucgagcucauccgcggccgcaaggaggagaccgaggucugguggaccuccaacuccaucgucgucuucugcggcaccuccggcaccuacggcaccggcuccuggcccgacggcgccgacaucaaccucaugcccaucuga

SEQ ID NO: 110187 - RNA, 1410 nt, Artificial Sequence
  derived and/or modified CDS sequence (opt2) from neuraminidase__InfluenzaA__AAX35824
augaaccccaaccagaagaucaucaccaucggcuccgucucccucaccaucgccaccaucugcuuccucaugcagaucgccauccucgucaccaccgucacccuccacuucaagcaguacgagugcaacuccccccccaacaaccaggucaugcucugcgagcccaccaucaucgagcgcaacaucaccgagaucgucuaccucgccaacaccaccaucgagaaggagaucugccccaagcucgccgaguaccgcaacugguccaagccccagugcaacaucaccggcuucgcccccuucuccaaggacaacuccauccgccucuccgccggcggcgacaucugggucacccgcgagcccuacgucuccugcgaccccgacaagugcuaccaguucgcccucggccagggcaccacccucaacaacggccacuccaacgacaccguccacgaccgcacccccuaccgcacccuccucaugaacgagcucggcguccccuuccaccucggcacccgccaggucugcaucgccugguccuccuccuccugccacgacggcaaggccuggcuccacgucugcgucaccggcgacgacaagaacgccaccgccuccuucaucuacaacggccgccucgucgacuccaucggcuccugguccaagaagauccuccgcacccaggaguccgagugcgucugcaucaacggcaccugcaccgucgucaugaccgacggcuccgccuccggcaaggccgacaccaagauccucuucaucgaggagggcaagaucauccacaucuccacccucuccggcuccgcccagcacgucgaggagugcuccugcuacccccgcuaccccggcguccgcugcgucugccgcgacaacuggaagggcuccaaccgccccaucgucgacaucaacgucaaggacuacuccaucgucuccuccuacgucugcuccggccucgucggcgacaccccccgcaagaacgacuccuccuccuccucccacugccucgaccccaacaacgaggagggcggccacggcgucaagggcugggccuucgacgacggcaacgacgucuggaugggccgcaccaucuccgagaagcuccgcuccggcuacgagaccuucaaggucaucgagggcugguccaagcccaacuccaagcuccagaucaaccgccaggucaucgucgagcgcggcaaccgcuccggcuacuccggcaucuucuccgucgagggcaaguccugcaucaaccgcugcuucuacgucgagcucauccgcggccgcaaggaggagaccgaggucugguggaccuccaacuccaucgucgucuucugcggcaccuccggcaccuacggcaccggcuccuggcccgacggcgccgacaucaaccucaugcccaucuga

SEQ ID NO: 110188 - RNA, 1410 nt, Artificial Sequence; identical to SEQ ID NO: 110171
  derived and/or modified CDS sequence (opt2) from neuraminidase__InfluenzaA__AAX35834

SEQ ID NO: 110189 - RNA, 1410 nt, Artificial Sequence
  derived and/or modified CDS sequence (opt2) from neuraminidase__InfluenzaA__AAX35844
augaaccccaaccagaagaucaucaccaucggcuccgucucccucaccaucgccaccaucugcuuccucaugcagaucgccauccucgucaccaccgucacccuccacuucaagcaguacgagugcaacuccccccccaacaaccaggucaugcucugcgagcccaccaucaucgagcgcaacaucaccgagaucgucuaccucaccaacaccaccaucgagaaggagaucugccccaagcucgccgaguaccgcaacugguccaagccccagugcaacaucaccggcuucgcccccuucuccaaggacaacuccauccgccucuccgccggcggcgacaucugggucacccgcgagcccuacgucuccugcgaccccgacaagugcuaccaguucgcccucggccagggcaccacccucaacaacggccacuccaacgacaccguccacgaccgcacccccuaccgcacccuccucaugaacgagcucggcguccccuuccaccucggcacccgccaggucugcaucgccugguccuccuccuccugccacgacggcaaggccuggcuccacgucugcgucaccggcgacgacgagaacgccaccgccuccuucaucuacaacggccgccucgucgacuccaucggcuccugguccaagaagauccuccgcacccaggaguccgagugcgucugcaucaacggcaccugcaccgucgucaugaccgacggcuccgccuccggcaaggccgacaccaagauccucuucaucgaggagggcaagaucguccacaucuccacccucuccggcuccgcccagcacgucgaggagugcuccugcuacccccgcuaccccggcguccgcugcgucugccgcgacaacuggaagggcuccaaccgccccaucgucgacaucaacgucaaggacuacuccaucgucuccuccuacgucugcuccggccucgucggcgacaccccccgcaagaacgacuccuucuccaacucccacugccucgaccccaacaacgaggagggcggccacggcgucaagggcugggccuucgacgacggcaacgacgucuggaugggccgcaccaucuccgagaagcuccgcuccggcuacgagaccuucaaggucaucgagggcugguucaagcccaacuccaagcuccagaucaaccgccaggucaucgucgagcgcggcaaccgcuccggcuacuccggcaucuucuccgucgagggcaaguccugcaucaaccgcugcuucuacgucgagcucauccgcggccgcaaggaggagaccgaggucugguggaccuccaacuccaucgucgucuucugcggcaccuccggcaccuacggcaccggcuccuggcccgacggcgccgacaucaaccucaugcccaucuga

SEQ ID NO: 110190 - RNA, 1410 nt, Artificial Sequence
  derived and/or modified CDS sequence (opt2) from neuraminidase__InfluenzaA__AAX35854
augaaccccaaccagaagaucaucaccaucggcuccgucucccucaccaucgccaccaucugcuuccucaugcagaucgccauccucgucaccaccgucacccuccacuucaagcaguacgagugcaacuccccccccaacaaccaggucaugcucugcgagcccaccaucaucgagcgcaacaucaccgagaucgucuaccucaccaacaccaccaucgagaaggagaucugccccaagcucgccgaguaccgcaacugguccaagccccagugcaacaucaccggcuucgcccccuucuccaaggacaacuccauccgccucuccgccggcggcgacaucugggucacccgcgagcccuacgucuccugcgaccccgacaagugcuaccaguucgcccucggccagggcaccacccucaacaacggccacuccaacgacaccguccacgaccgcacccccuaccgcacccuccucaugaacgagcucggcguccccuuccaccucggcacccgccaggucugcaucgccugguccuccuccuccugccacgacggcaaggccuggcuccacgucugcgucaccggcgacgacgagaacgccaccgccuccuucaucuacaacggccgccucgucgacuccaucggcuccugguccaagaagauccuccgcacccaggaguccgagugcgucugcaucaacggcaccugcaccgucgucaugaccgacggcuccgccuccggcaaggccgacaccaagauccucuucaucgaggagggcaagaucguccacaucuccacccucuccggcuccgcccagcacgucgaggagugcuccugcuacccccgcuaccccggcguccgcugcgucugccgcgacaacuggaagggcuccaaccgccccaucgucgacaucaacgucaaggacuacuccaucgucuccuccuacgucugcuccggccucgucggcgacaccccccgcaagaacgacuccuucuccuccucccacugccucgaccccaacaacgaggagggcggccacggcgucaagggcugggccuucgacgacggcaacgacgucuggaugggccgcaccaucuccgagaagcuccgcuccggcuacgagaccuucaaggucaucgagggcugguccaagcccaacuccaagcuccagaucaaccgccaggucaucgucgagcgcggcaaccgcuccggcuacuccggcaucuucuccgucgagggcaaguccugcaucaaccgcugcuucuacgucgagcucauccgcggccgcaaggaggagaccgaggucugguggaccuccaacuccaucgucgucuucugcggcaccuccggcaccuacggcaccggcuccuggcccgacggcgccgacaucaaccucaugcccaucuga

SEQ ID NO: 110191 - RNA, 1410 nt, Artificial Sequence
  derived and/or modified CDS sequence (opt2) from neuraminidase__InfluenzaA__AAX35864
augaaccccaaccagaagaucaucaccaucggcuccgucucccucaccaucgccaccaucugcuuccucaugcagaucgccauccucgucaccaccgucacccuccacuucaagcaguacgagugcaacuccccccccaacaaccaggucaugcucugcgagcccgccaucaucgagcgcaacaucaccgagaucgucuaccucaccaacaccaccaucgagaaggagaucugccccaagcucgccgaguaccgcaacugguccaagccccagugcaacaucaccggcuucgcccccuucuccaaggacaacuccauccgccucuccgccggcggcgacaucugggucacccgcgagcccuacgucuccugcgaccccgacaagugcuaccaguucgcccucggccagggcaccacccucaacaacggccacuccaacgacaccguccacgaccgcacccccuaccgcacccuccucaugaacgagcucggcguccccuuccaccucggcacccgccaggucugcaucgccugguccuccuccuccugccacgacggcaaggccuggcuccacgucugcgucaccggcgacgacgagaacgccaccgccuccuucaucuacaacggccgccucgucgacuccaucggcuccugguccaagaacauccuccgcacccaggaguccgagugcgucugcaucaacggcaccugcaccgucgucaugaccgacggcuccgccuccggcaaggccgacaccaagauccucuucaucgaggagggcaagaucgucaacaucuccacccucuccggcuccgcccagcacgucgaggagugcuccugcuacccccgcuaccccggcguccgcugcgucugccgcgacaacuggaagggcuccaaccgccccaucgucgacaucaacgucaaggacuacuccaucgucuccuccuacgucugcuccggccucgucggcgacaccccccgcaagaacgacuccuucuccuccucccacugccucgaccccaacaacgaggagggcggccacggcgucaagggcugggccuucgacgacggcaacgacgucuggaugggccgcaccaucuccgagaagcuccgcuccggcuacgagaccuucaaggucaucgagggcugguccaagcccaacuccaagcuccagaucaaccgccaggucaucgucgagcgcggcaaccgcuccggcuacuccggcaucuucuccgucgagggcaaguccugcaucaaccgcugcuucuacgucgagcucauccgcggccgcaaggaggagaccgaggucugguggaccuccaacuccaucgucgucuucugcggcaccuccggcaccuacggcaccggcuccuggcccgacggcgccgacaucaaccucaugcccaucuga

SEQ ID NO: 110192 - RNA, 1410 nt, Artificial Sequence
  derived and/or modified CDS sequence (opt2) from neuraminidase__InfluenzaA__AAX47538
augaaccccaaccagaagaucaucaccaucggcuccgucucccucaccaucgccaccaucugcuuccucaugcagaucgccauccucgucaccaccgucacccuccacuucaagcaguacgagugcaacuccccccccaacaaccaggucaugcucugcgagcccgccaucaucgagcgcaacaucaccgagaucgucuaccucaccaacaccaccaucgaggaggagaucugccccaagcucgccgaguaccgcaacugguccaagccccagugcaacaucaccggcuucgcccccuucuccaaggacaacuccauccgccucuccgccggcggcgacaucugggucacccgcgagcccuacgucuccugcgaccccgacaagugcuaccaguucgcccucggccagggcaccacccucaacaacggccacuccaacgacaccguccacgaccgcacccccuaccgcacccuccucaugaacgagcucggcguccccuuccaccucggcacccgccaggucugcaucgccugguccuccuccuccugccacgacggcaaggccuggcuccacgucugcgucaccggcgacgacaagaacgccaccgccuccuucaucuacaacggccgccucgucgacuccaucggcuccugguccaagaagauccuccgcacccaggaguccgagugcgucugcaucaacggcaccugcaccgucgucaugaccgacggcuccgccuccggcaaggccgacaccaagauccucuucaucgaggagggcaagaucgucaacaucuccacccucuccggcuccgcccagcacgucgaggagugcuccugcuacccccgcuaccccggcguccgcugcgucugccgcgacaacuggaagggcuccaaccgccccaucgucgacaucaacgucaaggacuacuccaucgucuccuccuacgucugcuccggccucgucggcgacaccccccgcaagaacgacuccuucuccuccucccacugccucgaccccaacaacgaggagggcggccacggcgucaagggcugggccuucgacgacggcaacgacgucuggaugggccgcaccaucuccgagaagcuccgcuccggcuacgagaccuucaaggucaucgagggcugguccaagcccaacuccaagcuccagaucaaccgccaggucaucgucgagcgcggcaaccgcuccggcuacuccggcaucuucuccgucgagggcaaguccugcaucaaccgcugcuucuacgucgagcucauccgcggccgcaaggaggagaccgaggucugguggaccuccaacuccaucgucgucuucugcggcaccuccggcaccuacggcaccggcuccuggcccgacggcgccgacaucaaccucaugcccaucuga

SEQ ID NO: 110193 - RNA, 1410 nt, Artificial Sequence; identical to SEQ ID NO: 110171
  derived and/or modified CDS sequence (opt2) from neuraminidase__InfluenzaA__AAX56383

SEQ ID NO: 110194 - RNA, 1410 nt, Artificial Sequence
  derived and/or modified CDS sequence (opt2) from neuraminidase__InfluenzaA__AAX56393
augaaccccaaccagaagaucaucaccaucggcuccgucucccucaccaucgccaccaucugcuuccucaugcagaucgccauccucgucaccaccgucacccuccacuucaagcagcacgagugcaacuccccccccaacaaccaggucaugcucugcgagcccaccaucaucgagcgcaacaucaccgagaucgucuaccucaccaacaccaccaucgagaaggagaucugccccaagcucgccgaguaccgcaacugguccaagccccagugcaacaucaccggcuucgcccccuucuccaaggacaacuccauccgccucuccgccggcggcgacaucugggucacccgcgagcccuacgucuccugcgaccccgacaagugcuaccaguucgcccucggcaagggcaccacccucaacaacggccacuccaacaacaccguccacgaccgcacccccuaccgcacccuccucaugaacgagcucggcguccccuuccaccucggcacccgccaggucugcaucgccugguccuccuccuccugccacgacggcaaggccuggcuccacgucugcgucaccggcgacgacaagaacgccaccgccuccuucaucuacaacggccgccucgucgacuccaucggcuccugguccaagaagauccuccgcacccaggaguccgagugcgucugcaucaacggcaccugcaccgucgucaugaccgacggcuccgccuccggcaaggccgacaccaagauccucuucaucgaggagggcaagaucguccacaucuccacccucuccggcuccgcccagcacgucgaggagugcuccugcuacccccgcuaccccggcguccgcugcgucugccgcgacaacuggaagggcuccaaccgccccaucgucgacaucaacgucaaggacuacuccaucgucuccuccuacgucugcuccggccucgucggcgacaccccccgcaagaacgacuccuucuccuccucccacugccucgaccccaacaacgaggagggcggccacggcgucaagggcugggccuucgacgacggcaacgacgucuggaugggccgcaccaucuccgagaagcuccgcuccggcuacgagaccuucaaggucaucgagggcugguccaagcccaacuccaagcuccagaucaaccgccaggucaucgucgagcgcggcaaccgcuccggcuacuccggcaucuucuccgucgagggcaaguccugcaucaaccgcugcuucuacgucgagcucauccgcggccgcaaggaggagaccgaggucugguggaccuccaacuccaucgucgucuucugcggcaccuccggcaccuacggcaccggcuccuggcccgacggcgccgacaucaaccucaugcccaucuga

SEQ ID NO: 110195 - RNA, 1410 nt, Artificial Sequence; identical to SEQ ID NO: 110171
  derived and/or modified CDS sequence (opt2) from neuraminidase__InfluenzaA__AAX56413

SEQ ID NO: 110196 - RNA, 1410 nt, Artificial Sequence; identical to SEQ ID NO: 110173
  derived and/or modified CDS sequence (opt2) from neuraminidase__InfluenzaA__AAX56423

SEQ ID NO: 110197 - RNA, 1410 nt, Artificial Sequence; identical to SEQ ID NO: 110171
  derived and/or modified CDS sequence (opt2) from neuraminidase__InfluenzaA__AAX56433

SEQ ID NO: 110198 - RNA, 1410 nt, Artificial Sequence; identical to SEQ ID NO: 110190
  derived and/or modified CDS sequence (opt2) from neuraminidase__InfluenzaA__AAX56443

SEQ ID NO: 110199 - RNA, 1410 nt, Artificial Sequence
  derived and/or modified CDS sequence (opt2) from neuraminidase__InfluenzaA__AAX56473
augaaccccaaccagaagaucaucaccaucggcuccgucucccucaccaucgccaccaucugcuuccucaugcagaucgccauccucgucaccaccgucacccuccacuucaagcaguacgagugcaacuccccccccaacaaccaggucaugcucugcgagcccaccaucaucgagcgcaacaucaccgagaucgucuaccucaccaacaccaccaucgagaaggagaucugccccaagcucgccgaguaccgcaacugguccaagccccagugcaacaucaccggcuucgcccccuucuccaaggacaacuccauccgccucuccgccggcggcgacaucugggucacccgcgagcccuacgucuccugcgaccccgacaagugcuaccaguucgcccucggccagggcaccacccucaacaacggccacuccaacgacaccguccacgaccgcacccccuaccgcacccuccucaugaacgagcucggcguccccuuccaccucggcacccgccaggucugcaucgccugguccuccuccuccugccacgacggcaaggccuggcuccacgucugcgucaccggcgacgacgagaacgccaccgccuccuucaucuacaacggccgccucgucgacuccaucggcuccugguccaagaagauccuccgcacccaggaguccgagugcgucugcaucaacggcaccugcaccgucgucaugaccgacggcuccgccuccggcaaggccgacaccaagauccucuucaucgaggagggcaagaucguccacaucuccacccucuccggcuccgcccagcacgucgaggagugcuccugcuacccccgcuaccccggcguccgcugcgucugccgcgacaacuggaagggcuccaaccgccccaucgucgacaucaacgucaaggacuacuccaucgucuccuccuacgucugcuccggccucgucggcgacaccccccgcaagaacgacuccuucuccuccucccacugccucgaccccaacaacgaggagggcggccacggcgucaagggcugggccuucgacgacggcaacgacgucuggaugggccgcaccaucuccgagaagcuccgcuccggcuacgagaccuucaaggucaucgagggcugguccaagcccaacuccaagcuccagaucaaccgccaggucaucgucgagcgcggcaaccgcuccggcuacuccggcaucuucuccgucgagggcaagaacugcaucaaccgcugcuucuacgucgagcucauccgcggccgcaaggaggagaccgaggucugguggaccuccaacuccaucgucgucuucugcggcaccuccggcaccuacggcaccggcuccuggcccgacggcgccgacaucaaccucaugcccaucuga

SEQ ID NO: 110200 - RNA, 1410 nt, Artificial Sequence
  derived and/or modified CDS sequence (opt2) from neuraminidase__InfluenzaA__AAX56483
augaaccccaaccagaagaucaucaccaucggcuccgucucccucaccaucgccaccaucugcuuccucaugcagaucgccauccucgucaccaccgucacccuccacuucaagcaguacgagugcgacuccccccccaacaaccaggucaugcucugcgagcccaccaucaucgagcgcaacaucaccgagaucgucuaccucaccaacaccaccaucgagaaggagaucugccccaagcucgccgaguaccgcaacugguccaagccccagugcaacaucaccggcuucgcccccuucuccaaggacaacuccauccgccucuccgccggcggcgacaucugggucacccgcgagcccuacgucuccugcgaccccgacaagugcuaccaguucgcccucggccagggcaccacccucaacaacggccacuccaacgacaccguccacgaccgcacccccuaccgcacccuccucaugaacgagcucggcguccccuuccaccucggcacccgccaggucugcaucgccugguccuccuccuccugccacgacggcaaggccuggcuccacgucugcgucaccggcgacgacgagaacgccaccgccuccuucaucuacaacggccgccucgucgacuccaucggcuccugguccaagaagauccuccgcacccaggaguccgagugcgucugcaucaacggcaccugcaccgucgucaugaccgacggcuccgccuccggcaaggccgacaccaagauccucuucaucgaggagggcaagaucguccacaucuccacccucuccggcuccgcccagcacgucgaggagugcuccugcuacccccgcuaccccggcguccgcugcgucugccgcgacaacuggaagggcuccaaccgccccaucgucgacaucaacgucaaggacuacuccaucgucuccuccuacgucugcuccggccucgucggcgacaccccccgcaagaacgacuccuucuccuccucccacugccucgaccccaacaacgaggagggcggccacggcgucaagggcugggccuucgacgacggcaacgacgucuggaugggccgcaccaucuccgagaagcuccgcuccggcuacgagaccuucaaggucaucgagggcugguccaagcccaacuccaagcuccagaucaaccgccaggucaucgucgagcgcggcaaccgcuccggcuacuccggcaucuucuccgucgagggcaaguccugcaucaaccgcugcuucuacgucgagcucauccgcggccgcaaggaggagaccgaggucugguggaccuccaacuccaucgucgucuucugcggcaccuccggcaccuacggcaccggcuccuggcccgacggcgccgacaucaaccucaugcccaucuga

SEQ ID NO: 110201 - RNA, 1410 nt, Artificial Sequence; identical to SEQ ID NO: 110200
  derived and/or modified CDS sequence (opt2) from neuraminidase__InfluenzaA__AAX56503

SEQ ID NO: 110202 - RNA, 1410 nt, Artificial Sequence
  derived and/or modified CDS sequence (opt2) from neuraminidase__InfluenzaA__AAX56513
augaaccccaaccagaagaucaucaccaucggcuccgucucccucaccaucgccaccaucugcuuccucaugcagaucgccauccucgucaccaccgucacccuccacuucaagcaguacgagugcaacuccccccccaacaaccaggucaugcucugcgagcccaccaucaucgagcgcaacaucaccgagaucgucuaccucaccaacaccaccaucgagaaggagaucugccccaagcucgccgaguaccgcaacugguccaagccccagugcaacaucaccggcuucgcccccuucuccaaggacaacuccauccgccucuccgccggcggcgacaucugggucacccgcgagcccuacgucuccugcgaccccgacaagugcuaccaguucgcccucggccagggcaccacccucaacaacggccacuccaacgacaccguccacgaccgcacccccuaccgcacccuccucaugaacgagcucggcguccccuuccaccucggcacccgccaggucugcaucgccugguccuccuccuccugccacgacggcaaggccuggcuccacgucugcgucaccggcgacgacgagaacgccaccgccuccuucaucuacaacggccgccucgucgacuccaucggcuccugguccaagaagauccuccgcacccaggaguccgagugcgucugcaucaacggcaccugcaccgucgucaugaccgacggcuccgccuccggcaaggccgacaccaagauccucuucaucgaggagggcaagaucguccacaucuccacccucuccggcuccgcccagcacgucgaggagugcuccugcuacccccgcuaccccggcguccgcugcgucugccgcgacaacuggaagggcuccaaccgccccaucgucgacaucaacgucaaggacuacuccaucgucuccuccuacgucugcuccggccucgucggcgacaccccccgcaagaacgacuccuucuccuccucccacugccucgaccccaacaacgaggagggcggccacggcgucaagggcugggccuucgacgacggcaacgacgucuggaugggccgcaccaucuccgagaagcuccgcuccggcuacgagaccuucaaggucaucgagggcugguccaagcccaacuccaagcuccagaccaaccgccaggucaucgucgagcgcggcaaccgcuccggcuacuccggcaucuucuccgucgagggcaaguccugcaucaaccgcugcuucuacgucgagcucauccgcggccgcaaggaggagaccgaggucugguggaccuccaacuccaucgucgucuucugcggcaccuccggcaccuacggcaccggcuccuggcccgacggcgccgacaucaaccucaugcccaucuga

SEQ ID NO: 110203 - RNA, 1413 nt, Artificial Sequence
  derived and/or modified CDS sequence (opt2) from neuraminidase__InfluenzaA__AAX56533
augaaccccaaccagaagaucaucaccaucggcuccaucuccgucgccaucggcaucaucucccucauccuccagaucggcaacaucaucuccaucugggccucccacuccauccagaccggcucccagaacuacaccggcaucugcaaccagcgcaucaucaccuacgagaaccgcaccugggucaaccagaccuacgucaacaucaacaacaccaacgucgucgccggcaaggacaagaccuccaugacccucgccggcaacuccucccucugccccauccgcggcugggccaucuacaccaaggacaacuccauccgcaucggcuccaagggcgacgucuucgucauccgcgagcccuucaucuccugcucccaccucgagugccgcaccuucuuccucacccagggcgcccuccucaacgacaagcacuccaacggcaccaucaaggaccgcucccccuuccgcgcccucauguccugcccccucggcgaggcccccucccccuacaacucccgcuucgaguccgucgccugguccgccuccgccugccacgacggccucggcuggcucaccaucggcaucuccggccccgacaacggcgccgucgccguccucaaguacaacggcaucaucaccgagaccaucaaguccuggaagaagcagauccuccgcacccaggaguccgagugcgucugcgucaacggcuccugcuucaccaucaugaccgacggccccuccaaccgcgccgccuccuaccgcaucuucaagaucgagaagggccgcgucaccaaguccaucgagcucgacgcccccaacuaccacuacgaggagugcuccugcuaccccgacaccggcaccgucaugugcgucugccgcgacaacuggcacggcuccaaccgccccugggucuccuucaaccagaaccucgacuaccagaucggcuacaucugcuccggcgucuucggcgacaacccccgccccaaggacggcgagggcuccugcaaccccgucaccgucgacggcgccgacggcgucaagggcuucuccuaccgcuacggcaacggcgucuggaucggccgcaccaaguccaaccgccuccgcaagggcuucgagaugaucugggaccccaacggcuggaccgacaccgacuccgacuucuccaugaagcaggacgucgucgccaugaacgacugguccggcuacuccggcuccuucguccagcaccccgagcucaccggccucgacugcaugcgccccugcuucugggucgagcucguccgcggccucccccgcgagaacaccaccaucuggaccuccggcuccuccaucuccuucugcggcgucaacuccgagaccgccaacugguccuggcccgacggcgccgagcuccccuucaccaucgacaaguga

SEQ ID NO: 110204 - RNA, 1410 nt, Artificial Sequence
  derived and/or modified CDS sequence (opt2) from neuraminidase__InfluenzaA__AAX56543
augaaccccaaccagaagaucaucaccaucggcuccgucucccucaccaucgccaccaucugcuuccucaugcagaucgccauccucgucaccaccgucacccuccacuucaagcaguacgagugcaacuccccccccaacaaccaggucaugcucugcgagcccaccaucaucgagcgcaacaucaccgagaucgucuaccucaccaacaccaccaucgagaaggagaucugccccaagcucgccgaguaccgcaacugguccaagccccagugcaacaucaccggcuucgcccccuucuccaaggacaacuccauccgccucuccgccuccggcgacaucugggucacccgcgagcccuacgucuccugcgaccccgacaagugcuaccaguucgcccucggccagggcaccacccucaacaacggccacuccaacgacaccguccacgaccgcacccccuaccgcacccuccucaugaacgagcucggcguccccuuccaccucggcaccaagcaggucugcaucgccugguccuccuccuccugccacgacggcaaggccuggcuccacgucugcgucaccggcgacgacgagaacgccaccgccuccuucaucuacaacggccgccucgucgacuccaucggcuccugguccaagaagauccuccgcacccaggaguccgagugcgucugcaucaacggcaccugcaccgucgucaugaccgacggcuccgccuccggcaaggccgacaccaagauccucuucaucgaggagggcaagaucguccacaccuccucccucuccggcuccgcccagcacgucgaggagugcuccugcuacccccgcuaccccggcguccgcugcgucugccgcgacaacuggaagggcuccaaccgccccaucgucgacaucaacgucaaggacuacuccaucgucuccuccuacgucugcuccggccucgucggcgacaccccccgcaagaacgacuccuccuccuccucccacugccucgaccccaacaacgaggagggcggccacggcgucaagggcugggccuucgacgacggcaacgacgucuggaugggccgcaccaucuccgaggagcuccgcuccggcuacgagaccuucaaggucaucgagggcugguccaagcccaacuccaagcuccagaucaaccgccaggucaucgucgaccgcggcaaccgcuccggcuacuccggcaucuucuccgucgagggcaaguccugcaucaaccgcugcuucuacgucgagcucauccgcggccgcaagcaggagaccgagguccucuggaccuccaacuccaucgucgucuucugcggcaccuccggcaccuacggcaccggcuccuggcccgacggcgccgacaucaaccucaugcccaucuga

SEQ ID NO: 110205 - RNA, 1410 nt, Artificial Sequence; identical to SEQ ID NO: 110097
  derived and/or modified CDS sequence (opt2) from neuraminidase__InfluenzaA__AAX56553

SEQ ID NO: 110206 - RNA, 1410 nt, Artificial Sequence
  derived and/or modified CDS sequence (opt2) from neuraminidase__InfluenzaA__AAX56563
augaaccccaaccagaagaucaucaccaucggcuccgucucccucaccaucgccgccaucugcuuccucaugcagaucgccauccucgucaccaccgucacccuccacuucaagcagcacgagugcaacuccccccccaacaaccaggucaugcucugcgagcccaccaucaucgagcgcaacaucaccgagaucgucuaccucaccaacaccaccaucgagaaggagaucugccccaagcucgccgaguaccgcaacugguccaagccccagugcaacaucaccggcuucgcccccuucuccaaggacaacuccauccgccucuccgccggcggcgacaucugggucacccgcgagcccuacgucuccugcgaccccgacaagugcuaccaguucgcccucggccagggcaccacccucaacaacggccacuccaacgacaccguccacgaccgcacccccuaccgcacccuccucaugaacgagcucggcguccccuuccaccucggcacccgccaggucugcaucgccugguccuccuccuccugccacgacggcaaggccuggcuccacgucugcgucaccggcgacgacaagaacgccaccgccuccuucaucuacaacggccgccucgucgacuccaucggcuccugguccaagaagauccuccgcacccaggaguccgagugcgucugcaucaacggcaccugcaccgucgucaugaccgacggcuccgccuccggcaaggccgacaccaagauccucuucaucgaggagggcaagaucguccacaucuccgcccucuccggcuccgcccagcacgucgaggagugcuccugcuacccccgcuaccccggcguccgcugcgucugccgcgacaacuggaagggcuccaaccgccccaucgucgacaucaacgucaaggacuacuccaucgucuccuccuacgucugcuccggccucgucggcgacaccccccgcaagaacgacuccuucuccuccucccacugccucgaccccaacaacgaggagggcggccacggcgucaagggcugggccuucgacgacggcaacgacgucuggaugggccgcaccaucuccgagaagcuccgcuccggcuacgagaccuucaaggucaucgagggcugguccaagcccaacuccaagcuccagaucaaccgccaggucaucgucgagcgcgacaaccgcuccggcuacuccggcaucuucuccgucgagggcaaguccugcaucaaccgcugcuucuacgucgagcucauccgcggccgcaaggaggagaccgaggucugguggaccuccaacuccaucgucgucuucugcggcaccuccggcaccuacggcaccggcuccuggcccgacggcgccgacaucaaccucaugcccaucuga

SEQ ID NO: 110207 - RNA, 1410 nt, Artificial Sequence
  derived and/or modified CDS sequence (opt2) from neuraminidase__InfluenzaA__AAX56573
augaaccccaaccagaagaucaucaccaucggcuccgucucccucaccaucgccaccaucugcuuccucaugcagaucgccauccucgucaccaccgucacccuccacuucaagcaguacgagugcaacuccccccccaacaaccaggucaugcucugcgagcccgccaucaucgagcgcaacaucaccgagaucgucuaccucaccaacaccaccaucgagaaggagaucugccccaagcucgccgaguaccgcaacugguccaagccccagugcaacaucaccggcuucgcccccuucuccaaggacaacuccauccgccucuccgccggcggcgacaucugggucacccgcgagcccuacgucuccugcgaccccgacaagugcuaccaguucgcccucggccagggcaccacccucaacaacggccacuccaacgacaccguccacgaccgcacccccuaccgcacccuccucaugaacgagcucggcguccccuuccaccucggcacccgccaggucugcaucgccugguccuccuccuccugccacgacggcaaggccuggcuccacgucugcgucaccggcgacgacgagaacgccaccgccuccuucaucuacaacggccgccucgucgacuccaucggcuccugguccaagaagauccuccgcacccaggaguccgagugcgucugcaucaacggcaccugcaccgucgucaugaccgacggcuccgccuccggcaaggccgacaccaagauccucuucaucgaggagggcaagaucguccacaucuccacccucuccggcuccgcccagcacgucgaggagugcuccugcuacccccgcuaccccggcguccgcugcgucugccgcgacaacuggaagggcuccaaccgccccaucgucgacaucaacgucaaggacuacuccaucgucuccuccuacgucugcuccggccucgucggcgacaccccccgcaagaacgacuccuucuccuccucccacugccucgaccccaacaacgaggagggcggccacggcgucaagggcugggccuucgacgacggcaacgacgucuggaugggccgcaccaucuccgagaagcuccgcuccggcuacgagaccuucaaggucaucgagggcugguccaagcccaacuccaagcuccagaucaaccgccaggucaucgucgagcgcggcaaccgcuccggcuacuccggcaucuucuccgucgagggcaaguccugcaucaaccgcugcuucuacgucgagcucauccgcggccgcaaggaggagaccgaggucugguggaccuccaacuccaucgucgucuucugcggcaccuccggcaccuacggcaccggcuccuggcccgacggcgccgacaucaaccucaugcccaucuga

SEQ ID NO: 110208 - RNA, 1410 nt, Artificial Sequence
  derived and/or modified CDS sequence (opt2) from neuraminidase__InfluenzaA__AAX56583
augaaccccaaccagaagaucaucaccaucggcuccgucucccucaccaucgccaccaucugcuuccucaugcagaucgccauccucgucaccaccgucacccuccacuucaagcaguacgagugcaacuccccccccaacaaccaggucaugcucugcgagcccaccaucaucgagcgcaacaucaccgagaucgucuaccucaccaacaccaccaucgagaaggagaucugccccaagcucgccgaguaccgcaacugguccaagccccagugcaacaucaccggcuucgcccccuucuccaaggacaacuccauccgccucuccgccggcggcgacaucugggucacccgcgagcccuacgucuccugcgaccccgacaagugcuaccaguucgcccucggccagggcaccacccucaacaacggccacuccaacgacaccguccacgaccgcacccccuaccgcacccuccucaugaacgagcucggcguccccuuccaccucggcacccgccaggucugcaucgccugguccuccuccuccugccacgacggcaaggccuggcuccacgucugcgucaccggcgacgacgagaacgccaccgccuccuucaucuacaacggccgccucgucgacuccaucggcuccugguccaagaagauccuccgcacccaggaguccgagugcgucugcaucaacggcaccugcaccgucgucaugaccgacggcuccgccuccggcaaggccgacaccaagauccucuucaucgaggagggcaagaucguccacaucuccacccucuccggcuccgcccagcacgucgaggagugcuccugcuacccccgcuaccccggcguccgcugcgucugccgcgaccacuggaagggcuccaaccgccccaucgucgacaucaacgucaaggacuacuccaucgucuccuccuacgucugcuccggccucgucggcgacaccccccgcaagaacgacuccuucuccuccucccacugccucgaccccaacaacgaggagggcggccacggcgucaagggcugggccuucgacgacggcaacgacgucuggaugggccgcaccaucuccgagaagcuccgcuccggcuacgagaccuucaaggucaucgagggcugguccaagcccaacuccaagcuccagaccaaccgccaggucaucgucgagcgcggcaaccgcuccggcuacuccggcaucuucuccgucgagggcaaguccugcaucaaccgcugcuucuacgucgagcucauccgcggccgcaaggaggagaccgaggucugguggaccuccaacuccaucgucgucuucugcggcaccuccggcaccuacggcaccggcuccuggcccgacggcgccgacaucaaccucaugcccaucuga

SEQ ID NO: 110209 - RNA, 1410 nt, Artificial Sequence
  derived and/or modified CDS sequence (opt2) from neuraminidase__InfluenzaA__AAX56593
augaaccccaaccagaagaucaucaccaucggcuccgucucccucaccaucgccaccaucugcuuccucaugcagaucgccauccucgucaccaccgucacccuccacuucaagcaguacgagugcaacuccccccccaacaaccaggucaugcucugcgagcccgccaucaucgagcgcaacaucaccgagaucgucuaccucaccaacaccaccaucgagaaggagaucugccccaagcucgccgaguaccgcaacugguccaagccccagugcaacaucaccggcuucgcccccuucuccaaggacaacuccauccgccucuccgccggcggcgacaucugggucacccgcgagcccuacgucuccugcgaccccgacaagugcuaccaguucgcccucggccagggcaccacccucaacaacggccacuccaacgacaccguccacgaccgcacccccuaccgcacccuccucaugaacgagcucggcguccccuuccaccucggcacccgccaggucugcaucgccugguccuccuccuccugccacgacggcaaggccuggcuccacgucugcgucaccggcgacgacgagaacgccaccgccuccuucaucuacaacggccgccucgucgacuccaucggcuccugguccaagaagauccuccgcacccaggaguccgagugcgucugcaucaacggcaccugcaccgucgucaugaccgacggcuccgccuccggcaaggccgacaccaagauccucuucaucgaggagggcaagaucgucaacaucuccacccucuccggcuccgcccagcacgucgaggagugcuccugcuacccccgcuaccccggcguccgcugcgucugccgcgacaacuggaagggcuccaaccgccccaucgucgacaucaacgucaaggacuacuccaucgucuccuccuacgucugcuccggccucgucggcgacaccccccgcaagaacgacuccuucuccuccucccacugccucgaccccaacaacgaggagggcggccacggcgucaagggcugggccuucgacgacggcaacgacgucuggaugggccgcaccaucuccgagaaguuccgcuccggcuacgagaccuucaaggucaucgagggcugguccaagcccaacuccaagcuccagaucaaccgccaggucaucgucgagcgcggcaaccgcuccggcuacuccggcaucuucuccgucgagggcaaguccugcaucaaccgcugcuucuacgucgagcucauccgcggccgcaaggaggagaccgaggucugguggaccuccaacuccaucgucgucuucugcggcaccuccggcaccuacggcaccggcuccuggcccgacggcgccgacaucaaccucaugcccaucuga

SEQ ID NO: 110210 - RNA, 1410 nt, Artificial Sequence
  derived and/or modified CDS sequence (opt2) from neuraminidase__InfluenzaA__AAX56603
augaaccccaaccagaagaucaucaccaucggcuccgucucccucaccaucgccgccaucugcuuccucaugcagaucgccauccucgucaccaccgucacccuccacuucaagcagcacgagugcaacuccccccccaacaaccaggucaugcucugcgagcccaccaucaucgagcgcaacaucaccgagaucgucuaccucaccaacaccaccaucgagaaggagaucugccccaagcucgccgaguaccgcaacugguccaagccccagugcaacaucaccggcuucgcccccuucuccaaggacaacuccauccgccucuccgccggcggcgacaucugggucacccgcgagcccuacgucuccugcgaccccgacaagugcuaccaguucgcccucggccagggcaccacccucaacaacggccacuccaacgacaccgcccacgaccgcacccccuaccgcacccuccucaugaacgagcucggcguccccuuccaccucggcacccgccaggucugcaucgccugguccuccuccuccugccacgacggcaaggccuggcuccacgucugcgucaccggcgacgacaagaacgccaccgccuccuucaucuacaacggccgccucgucgacuccaucggcuccugguccaagaagauccuccgcacccaggaguccgagugcgucugcaucaacggcaccugcaccgucgucaugaccgacggcuccgccuccggcaaggccgacaccaagauccucuucaucgaggagggcaagaucguccacaucuccacccucuccggcuccgcccagcacgucgaggagugcuccugcuacccccgcuaccccggcguccgcugcgucugccgcgacaacuggaagggcuccaaccgccccaucgucgacaucaacgucaaggacuacuccaucgucuccuccuacgucugcuccggccucgucggcgacaccccccgcaagaacgacuccuucuccuccucccacugccucgaccccaacaacgaggagggcggccacggcgucaagggcugggccuucgacgacggcaacgacgucuggaugggccgcaccaucuccgagaagcuccgcuccggcuacgagaccuucaaggucaucgagggcugguccaagcccaacuccaagcuccagaucaaccgccaggucaucgucgagcgcggcaaccgcuccggcuacuccggcaucuucuccgucgagggcaaguccugcaucaaccgcugcuucuacgucgagcucauccgcggccgcaaggaggagaccgaggucugguggaccuccaacuccaucgucgucuucugcggcaccuccggcaccuacggcaccggcuccuggcccgacggcgccgacaucaaccucaugcccaucuga

SEQ ID NO: 110211 - RNA, 1410 nt, Artificial Sequence; identical to SEQ ID NO: 110181
  derived and/or modified CDS sequence (opt2) from neuraminidase__InfluenzaA__AAX57647

SEQ ID NO: 110212 - RNA, 1410 nt, Artificial Sequence; identical to SEQ ID NO: 110171
  derived and/or modified CDS sequence (opt2) from neuraminidase__InfluenzaA__AAX57657

SEQ ID NO: 110213 - RNA, 1410 nt, Artificial Sequence; identical to SEQ ID NO: 110209
  derived and/or modified CDS sequence (opt2) from neuraminidase__InfluenzaA__AAX57667

SEQ ID NO: 110214 - RNA, 1410 nt, Artificial Sequence; identical to SEQ ID NO: 110190
  derived and/or modified CDS sequence (opt2) from neuraminidase__InfluenzaA__AAX57677

SEQ ID NO: 110215 - RNA, 1410 nt, Artificial Sequence
  derived and/or modified CDS sequence (opt2) from neuraminidase__InfluenzaA__AAX57687
augaaccccaaccagaagaucaucaccaucggcuccgucucccucaccaucgccaccaucugcuuccucaugcagaucgccauccucgucaccaccgucacccuccacuucaagcaguacgagugcaacuccccccccaacaaccaggucaugcucugcgagcccgccaucaucgagcgcaacaucaccgagaucgucuaccucaccaacaccaccaucgagaaggagaucugccccaagcucgccgaguaccgcaacugguccaagccccagugcaacaucaccggcuucgcccccuucuccaaggacaacuccauccgccucuccgccggcggcgacaucugggucacccgcgagcccuacgucuccugcgaccccgacaagugcuaccaguucgcccucggccagggcaccacccucaacaacggccacuccaacgacaccguccacgaccgcacccccuaccgcacccuccucaugaacgagcucggcguccccuuccaccucggcacccgccaggucugcaucgccugguccuccuccuccugccacgacggcaaggccuggcuccacgucugcgucaccggcgacgacgagaacgccaccgccuccuucaucuacgacggccgccucgucgacuccaucggcuccugguccaagaagauccuccgcacccaggaguccgagugcgucugcaucaacggcaccugcaccgucgucaugaccgacggcuccgccuccggcaaggccgacaccaagauccucuucaucgaggagggcaagaucgucaacaucuccacccucuccggcuccgcccagcacgucgaggagugcuccugcuacccccgcuaccccggcguccgcugcgucugccgcgacaacuggaagggcuccaaccgccccaucgucgacaucaacgucaaggacuacuccaucgucuccuccuacgucugcuccggccucgucggcgacaccccccgcaagaacgacuccuucuccuccucccacugccucgaccccaacaacgaggagggcggccacggcgucaagggcugggccuucgacgacggcaacgacgucuggaugggccgcaccaucuccgagaagcuccgcuccggcuacgagaccuucaaggucaucgagggcugguccaagcccaacuccaagcuccagaucaaccgccaggucaucgucgagcgcggcaaccgcuccggcuacuccggcaucuucuccgucgagggcaaguccugcaucaaccgcugcuucuacgucgagcucauccgcggccgcaaggaggagaccgaggucugguggaccuccaacuccaucgucgucuucugcggcaccuccggcaccuacggcaccggcuccuggcccgacggcgccgacaucaaccucaugcccaucuga

SEQ ID NO: 110216 - RNA, 1410 nt, Artificial Sequence
  derived and/or modified CDS sequence (opt2) from neuraminidase__InfluenzaA__AAX57697
augaaccccaaccagaagaucaucaccaucggcuccgucucccucaccaucgccaccaucugcuuccucaugcagaucgccauccucgucaccaccgucacccuccacuucaagcaguacgagugcaacuccccccccaacaaccaggucaugcucugcgagcccaccaucaucgagcgcaacaucaccgagaucgucuaccucaccaacaccaccaucgagaaggagaucugccccaagcucgccgaguaccgcaacugguccaagccccagugcaacaucaccggcuucgcccccuucuccaaggacaacuccauccgccucuccgccggcggcgacaucugggucacccgcgagcccuacgucuccugcgaccccgacaagugcuaccaguucgcccucggccagggcaccacccucaacaacggccacuccaacgacaccguccacgaccgcacccccuaccgcacccuccucaugaacgagcucggcguccccuuccaccucggcacccgccaggucugcaucgccugguccuccuccuccugccacgacggcaaggccuggcuccacgucugcgucaccggcgacgacgagaacgccaccgccuccuucaucuacaacggccgccucgucgacuccaucggcuccugguccaagaagauccuccgcacccaggaguccgagugcgucugcaucaacggcaccugcaccgucgucaugaccgacggcuccgccuccggcaaggccgacaccaagauccucuucaucgaggagggcaagaucguccacaucuccacccucuccggcuccgcccagcacgucgaggagugcuccugcuacccccgcuaccccggcguccgcugcgucugccgcgacaacuggaagggcuccaaccgccccaucgucgacaucaacgucaaggaccacuccaucgucuccuccuacgucugcuccggccucgucggcgacaccccccgcaagaacgacuccuucuccuccucccacugccucgaccccaacaacgaggagggcggccacggcgucaagggcugggccuucgacgacggcaacgacgucuggaugggccgcaccaucuccgagaagcuccgcuccggcuacgagaccuucaaggucaucgagggcugguccaagcccaacuccaagcuccagaucaaccgccaggucaucgucgagcgcggcaaccgcuccggcuacuccggcaucuucuccgucgagggcaaguccugcaucaaccgcugcuucuacgucgagcucauccgcggccgcaaggaggagaccgaggucugguggaccuccaacuccaucgucgucuucugcggcaccuccggcaccuacggcaccggcuccuggcccgacggcgccgacaucaaccucaugcccaucuga

SEQ ID NO: 110217 - RNA, 1410 nt, Artificial Sequence
  derived and/or modified CDS sequence (opt2) from neuraminidase__InfluenzaA__AAX57707
augaaccccaaccagaagaucaucaccaucggcuccgucucccucaccaucgccgccaucugcuuccucaugcagaucgccauccucgucaccaccgucacccuccacuucaagcagcacgagugcaacuccccccccaacaaccaggucaugcucugcgagcccaccaucaucgagcgcaacaucaccgagaucgucuaccucaccaacaccaccaucgagaaggagaucugccccaagcucgccgaguaccgcaacugguccaagccccagugcaacaucaccggcuucgcccccuucuccaaggacaacuccauccgccucuccgccggcggcgacaucugggucacccgcgagcccuacgucuccugcgaccccgacaagugcuaccaguucgcccucggccagggcaccacccucaacaacggccacuccaacgacaccguccacgaccgcacccccuaccgcacccuccucaugaacgagcucggcguccccuuccaccucggcacccgccaggucugcaucgccugguccuccuccuccugccacgacggcaaggccuggcuccacgucugcgucaccggcgacgacaagaacgccaccgccuccuucaucuacaacggccgccucgucgacuccaucggcuccugguccaagaagauccuccgcacccaggaguccgagugcgucugcaucaacggcaccugcaccgucgucaugaccgacggcuccgccuccggcaaggccgacaccaagauccucuucaucgaggagggcaagaucguccacaucuccacccucuccggcuccgcccagcacgucgaggagugcuccugcuacccccgcuaccccggcguccgcugcgucugccgcgacaacuggaagggcuccaaccgccccaucgucgacaucaacgucaaggacuacuccaucgucuccuccuacgucugcuccggccucgucggcgacaccccccgcaagaacgaccgcuucuccuccucccacugccucgaccccaacaacgaggagggcggccacggcgucaagggcugggccuucgacgacggcaacgacgucuggaugggccgcaccaucuccgagaagcuccgcuccggcuacgagaccuucaaggucaucgagggcugguccaagcccaacuccaagcuccagaucaaccgccaggucaucgucgagcgcggcaaccgcuccggcuacuccggcaucuucuccgucgagggcaaguccugcaucaaccgcugcuucuacgucgagcucauccgcggccgcaaggaggagaccgaggucugguggaccuccaacuccaucgucgucuucugcggcaccuccggcaccuacggcaccggcuccuggcccgacggcgccgacaucaaccucaugcccaucuga

SEQ ID NO: 110218 - RNA, 1410 nt, Artificial Sequence; identical to SEQ ID NO: 110190
  derived and/or modified CDS sequence (opt2) from neuraminidase__InfluenzaA__AAX57717

SEQ ID NO: 110219 - RNA, 1410 nt, Artificial Sequence; identical to SEQ ID NO: 110209
  derived and/or modified CDS sequence (opt2) from neuraminidase__InfluenzaA__AAX57726

SEQ ID NO: 110220 - RNA, 1410 nt, Artificial Sequence; identical to SEQ ID NO: 110209
  derived and/or modified CDS sequence (opt2) from neuraminidase__InfluenzaA__AAX57737

SEQ ID NO: 110221 - RNA, 1410 nt, Artificial Sequence; identical to SEQ ID NO: 110097
  derived and/or modified CDS sequence (opt2) from neuraminidase__InfluenzaA__AAX57747

SEQ ID NO: 110222 - RNA, 1410 nt, Artificial Sequence; identical to SEQ ID NO: 110097
  derived and/or modified CDS sequence (opt2) from neuraminidase__InfluenzaA__AAX57757

SEQ ID NO: 110223 - RNA, 1410 nt, Artificial Sequence
  derived and/or modified CDS sequence (opt2) from neuraminidase__InfluenzaA__AAX57767
augaaccccaaccagaagaucaucaccaucggcuccgucucccucaccaucgccaccaucugcuuccucaugcagaucgccauccucgucaccaccgucacccuccacuucaagcaguacgagugcaaccccccccccaacaaccaggucaugcucugcgagcccaccaucaucgagcgcaacaucaccgagaucgucuaccucaccaacaccaccaucgagaaggagaucugccccaagcucgccgaguaccgcaacugguccaagccccagugcaacaucaccggcuucgcccccuucuccaaggacaacuccauccgccucuccgccggcggcgacaucugggucacccgcgagcccuacgucuccugcgaccccgacaagugcuaccaguucgcccucggccagggcaccacccucaacaacggccacuccaacgacaccguccacgaccgcacccccuaccgcacccuccucaugaacgagcucggcguccccuuccaccucggcaccaagcaggucugcaucgccugguccuccuccuccugccacgacggcaaggccuggcuccacgucugcgucaccggcgacgacgagaacgccaccgccuccuucaucuacaacggccgccucgucgacuccaucggcuccugguccaagaagauccuccgcacccaggaguccgagugcgucugcaucaacggcaccugcaccgucgucaugaccgacggcuccgccuccggcaaggccgacaccaagauccucuucaucgaggagggcaagaucguccacaccucccuccucuccggcuccgcccagcacgucgaggagugcuccugcuacccccgcuaccccggcguccgcugcgucugccgcgacaacuggaagggcuccaaccgccccaucgucgacaucaacgucaaggacuacuccaucgucuccuccuacgucugcuccggccucgucggcgacaccccccgcaagaacgacuccuccuccuccucccacugccucgaccccaacaacgaggagggcggccacggcgucaagggcugggccuucgacgacggcaacgacgucuggaugggccgcaccaucuccgagaagcuccgcuccggcuacgagaccuucaaggucaucgagggcugguccaagcccaacuccaagcuccagaucaaccgccaggucaucgucgaccgcggcaaccgcuccggcuacuccggcaucuucuccgucgagggcaaguccugcaucaaccgcugcuucuacgucgagcucauccgcggccgcaagcaggagaccgagguccucuggaccuccaacuccaucgucgucuucugcggcaccuccggcaccuacggcaccggcuccuggcccgacggcgccgacaucaaccucaugcccaucuga

SEQ ID NO: 110224 - RNA, 1410 nt, Artificial Sequence
  derived and/or modified CDS sequence (opt2) from neuraminidase__InfluenzaA__AAX57777
augaaccccaaccagaagaucaucaccaucggcuccgucucccucaucaucgccaccaucugcuuccucaugcagaucgccauccucgucaccaccgucacccuccacuucaagcaguacgagugcaacuccccccccaacaaccaggucaugcucugcgagcccaccaucaucgagcgcaacaucaccgagaucgucuaccucaccaacaccaccaucgagaaggagaucugccccaagcucgccgaguaccgcaacugguccaagccccagugcaacaucaccggcuucgcccccuucuccaaggacaacuccauccgccucuccgccggcggcgacaucugggucacccgcgagcccuacgucuccugcgaccccgacaagugcuaccaguucgcccucggccagggcaccacccucaacaacggccacuccaacgacaccguccacgaccgcacccccuaccgcacccuccucaugaacgagcucggcguccccuuccaccucggcaccaagcaggucugcaucgccugguccuccuccuccugccacgacggcaaggccuggcuccacgucugcgucaccggcgacgacgagaacgccaccgccuccuucaucuacaacggccgccucgucgacuccaucggcuccugguccaagaagauccuccgcacccaggaguccgagugcgucugcaucaacggcaccugcaccgucgucaugaccgacggcuccgccuccggcaaggccgacaccaagauccucuucaucgaggagggcaagaucguccacaccuccucccucuccggcuccgcccagcacgucgaggagugcuccugcuacccccgcuaccccggcguccgcugcgucugccgcgacaacuggaagggcuccaaccgccccaucgucgacaucaacgucaaggacuacuccaucgucuccuccuacgucugcuccggccucgucggcgacaccccccgcaagaacgacuccuccuccuccucccacugccucgaccccaacaacgaggagggcggccacggcgucaagggcugggccuucgacgacggcaacgacgucuggaugggccgcaccaucuccgagaagcuccgcuccggcuacgagaccuucaaggucaucgagggcugguccaagcccaacuccaagcuccagaucaaccgccaggucaucgucgaccgcggcaaccgcuccggcuacuccggcaucuucuccgucgagggcaaguccugcaucaaccgcugcuucuacgucgagcucauccgcggccgcaagcaggagaccgagguccucuggaccuccaacuccaucgucgucuucugcggcaccuccggcaccuacggcaccggcuccuggcccgacggcgccgacaucaaccucaugcccaucuga

SEQ ID NO: 110225 - RNA, 1410 nt, Artificial Sequence
  derived and/or modified CDS sequence (opt2) from neuraminidase__InfluenzaA__AAX57787
augaaccccaaccagaagaucaucaccaucggcuccgucucccucaccaucgccaccaucugcuuccucaugcagaucgccauccucgucaccaccgucacccuccacuucaagcaguacgagugcaacuccccccccaacaaccaggucaugcucugcgagcccgccaucaucgagcgcaacaucaccgagaucgucuaccucaccaacaccaccaucgagaaggagaucugccccaagcucgccgaguaccgcaacugguccaagccccagugcaacaucaccggcuucgcccccuucuccaaggacaacuccauccgccucuccgccggcggcgacaucugggucacccgcgagcccuacgucuccugcgaccccgacaagugcuaccaguucgcccucggccagggcaccacccucaacaacggccacuccaacgacaccguccacgaccgcacccccuaccgcacccuccucaugaacgagcucggcguccccuuccaccucggcacccgccaggucugcaucgccugguccuccuccuccugccacgacggcaaggccuggcuccacgucugcgucaccggcgacgacgagaacgccaccgccuccuucaucuacaacggccgccucgucgacuccaucggcuccugguccaagaagauccuccgcacccaggaguccgagugcgucugcaucaacggcaccugcaccgucgucaugaccgacggcuccgccuccggcaaggccaacaccaagauccucuucaucgaggagggcaagaucgucaacaucuccacccucuccggcuccgcccagcacgucgaggagugcuccugcuacccccgcuaccccggcguccgcugcgucugccgcgacaacuggaagggcuccaaccgccccaucgucgacaucaacgucaaggacuacuccaucgucuccuccuacgucugcuccggccucgucggcgacaccccccgcaagaacgacuccuucuccuccucccacugccucgaccccaacaacgaggagggcggccacggcgucaagggcugggccuucgacgacggcaacgacgucuggaugggccgcaccaucuccgagaaguuccgcuccggcuacgagaccuucaaggucaucgagggcugguccaagcccaacuccaagcuccagaucaaccgccaggucaucgucgagcgcggcaaccgcuccggcuacuccggcaucuucuccgucgagggcaaguccugcaucaaccgcugcuucuacgucgagcucauccgcggccgcaaggaggagaccgaggucugguggaccuccaacuccaucgucgucuucugcggcaccuccggcaccuacggcaccggcuccuggcccgacggcgccgacaucaaccucaugcccaucuga

SEQ ID NO: 110226 - RNA, 1410 nt, Artificial Sequence; identical to SEQ ID NO: 110097
  derived and/or modified CDS sequence (opt2) from neuraminidase__InfluenzaA__AAX57797

SEQ ID NO: 110227 - RNA, 1410 nt, Artificial Sequence; identical to SEQ ID NO: 110097
  derived and/or modified CDS sequence (opt2) from neuraminidase__InfluenzaA__AAX57807

SEQ ID NO: 110228 - RNA, 1410 nt, Artificial Sequence
  derived and/or modified CDS sequence (opt2) from neuraminidase__InfluenzaA__AAX57817
augaaccccaaccagaagaucaucaccaucggcuccgucucccucaccaucgccaccaucugcuuccucaugcagaucgccauccucgucaccaccgucacccuccacuucaagcaguacgagugcaacuccccccccaacaaccaggucaugcucugcgagcccaccaucaucgagcgcaacaucaccgagaucgucuaccucaccaacaccaccaucgagaaggagaucugccccaagcucgccgaguaccgcaacugguccaagccccagugcaacaucaccggcuucgcccccuucuccaaggacaacuccauccgccucuccgccggcggcgacaucugggucacccgcgagcccuacgucuccugcgaccccgacaagugcuaccaguucgcccucggccagggcaccacccucaacaacggccacuccaacgacaccguccacgaccgcacccccuaccgcacccuccucaugaacgagcucggcguccccuuccaccucggcaccaagcaggucugcaucgccugguccuccuccuccugccacgacggcaaggccuggcuccacgucugcgucaccggcgacgacgagaacgccaccgccuccuucaucuacaacggccgccucgucgacuccaucuccuccugguccaagaagauccuccgcacccaggaguccgagugcgucugcaucaacggcaccugcaccgucgucaugaccgacggcuccgccuccggcaaggccgacaccaagauccucuucaucgaggagggcaagaucguccacaccuccucccucuccggcuccgcccagcacgucgaggagugcuccugcuacccccgcuaccccggcguccgcugcgucugccgcgacaacuggaagggcuccaaccgccccaucgucgacaucaacgucaaggacuacuccaucgucuccuccuacgucugcuccggccucgucggcgacaccccccgcaagaacgacuccuccuccuccucccacugccucgaccccaacaacgaggagggcggccacggcgucaagggcugggccuucgacgacggcaacgacgucuggaugggccgcaccaucuccgagaagcuccgcuccggcuacgagaccuucaaggucaucgagggcugguccaagcccaacuccaagcuccagaucaaccgccaggucaucgucgaccgcggcaaccgcuccggcuacuccggcaucuucuccgucgagggcaaguccugcaucaaccgcugcuucuacgucgagcucauccgcggccgcaagcaggagaccgagguccucuggaccuccaacuccaucgucgucuucugcggcaccuccggcaccuacggcaccggcuccuggcccgacggcgccgacaucaaccucaugcccaucuga

SEQ ID NO: 110229 - RNA, 1410 nt, Artificial Sequence; identical to SEQ ID NO: 110097
  derived and/or modified CDS sequence (opt2) from neuraminidase__InfluenzaA__AAX57837

SEQ ID NO: 110230 - RNA, 1410 nt, Artificial Sequence
  derived and/or modified CDS sequence (opt2) from neuraminidase__InfluenzaA__AAX57847
augaaccccaaccagaagaucaucaccaucggcuccgucucccucaccaucgccaccaucugcuuccucaugcagaucgccauccucgucaccaccgucacccuccacuucaagcaguacgagugcaacuccccccccaacaaccaggucaugcucugcgagcccaccaucaucgagcgcaacaucaccgagaucgucuaccucaccaacaccaccaucgagaaggagaucugccccaagcucgccgaguaccgcaacugguccaagccccagugcaacaucaccggcuucgcccccuucuccaaggacaacuccauccgccucuccgccggcggcgacaucugggucacccgcgagcccuacgucuccugcgaccccgacaagugcuaccaguucgcccucggccagggcaccacccucaacaacggccacuccaacgacaccguccacgaccgcacccccuaccgcacccuccucaugaacgagcucggcguccccuuccaccucggcaccaagcaggucugcaucgccugguccuccuccuccugccacgacggcaaggccuggcuccacgucugcgucaccggcgacgacgagaacgccaccgccuccuucaucuacaacggccgccucgucgacuccaucggcuccugguccaagaagauccuccgcacccaggaguccgagugcgucugcaucaacggcaccugcaccgucgucaugaccgacggcuccgccuccggcaaggccgacaccaagauccucuucaucgaggagggcaagaucguccacaccucccuccucuccggcuccgcccagcacgucgaggagugcuccugcuacccccgcuaccccggcguccgcugcgucugccgcgacaacuggaagggcuccaaccgccccaucgucgacaucaacgucaaggacuacuccaucgucuccuccuacgucugcuccggccucgucggcgacaccccccgcaagaacgacuccuccuccuccucccacugccucgaccccaacaacgaggagggcggccacggcgucaagggcugggccuucgacgacggcaacgacgucuggaugggccgcaccaucuccgagaagcuccgcuccggcuacgagaccuucaaggucaucgagggcugguccaagcccaacuccaagcuccagaucaaccgccaggucaucgucgaccgcggcaaccgcuccggcuacuccggcaucuucuccgucgaguccaaguccugcaucaaccgcugcuucuacgucgagcucauccgcggccgcaagcaggagaccgagguccucuggaccuccaacuccaucgucgucuucugcggcaccuccggcaccuacggcaccggcuccuggcccgacggcgccgacaucaaccucaugcccaucuga

SEQ ID NO: 110231 - RNA, 1410 nt, Artificial Sequence
  derived and/or modified CDS sequence (opt2) from neuraminidase__InfluenzaA__AAX57857
augaaccccaaccagaagaucaucaccaucggcuccgucucccucaccaucgccaccaucugcuuccucaugcagaucgccauccucgucaccaccgucacccuccacuucaagcaguacgagugcaacuccccccccaacaaccaggucaugcucugcgagcccaccaccaucgagcgcaacaucaccgagaucgucuaccucaccaacaccaccaucgagaaggagaucugccccaagcucgccgaguaccgcaacugguccaagccccagugcaacaucaccggcuucgcccccuucuccaaggacaacuccauccgccucuccgccggcggcgacaucugggucacccgcgagcccuacgucuccugcgaccccgacaagugcuaccaguucgcccucggccagggcaccacccucaacaacggccacuccaacgacaccguccacgaccgcacccccuaccgcacccuccucaugaacgagcucggcguccccuuccaccucggcaccaagcaggucugcaucgccugguccuccuccuccugccacgacggcaaggccuggcuccacgucugcgucaccggcgacgacgagaacgccaccgccuccuucaucuacaacggccgccucgucgacuccaucggcuccugguccaagaagauccuccgcacccaggaguccgagugcgucugcaucaacggcaccugcaccgucgucaugaccgacggcuccgccuccggcaaggccgacaccaagauccucuucaucgaggagggcaagaucguccacaccuccucccucuccggcuccgcccagcacgucgaggagugcuccugcuacccccgcuaccccggcguccgcugcgucugccgcgacaacuggaagggcuccaaccgccccaucgucgacaucaacgucaaggacuacuccaucgucuccuccuacgucugcuccggccucgucggcgacaccccccgcaagaacgacuccuccuccuccucccacugccucgaccccaacaacgaggagggcggccacggcgucaagggcugggccuucgacgacggcaacgacgucuggaugggccgcaccaucuccgagaagcuccgcuccggcuacgagaccuucaaggucaucgagggcugguccaagcccaacuccaagcuccagaucaaccgccaggucaucgucgaccgcggcaaccgcuccggcuacuccggcaucuucuccgucgagggcaaguccugcaucaaccgcugcuucuacgucgagcucauccgcggccgcaagcaggagaccgagguccucuggaccuccaacuccaucgucgucuucugcggcaccuccggcaccuacggcaccggcuccuggcccgacggcgccgacaucaaccucaugcccaucuga

SEQ ID NO: 110232 - RNA, 1410 nt, Artificial Sequence; identical to SEQ ID NO: 110097
  derived and/or modified CDS sequence (opt2) from neuraminidase__InfluenzaA__AAX57867

SEQ ID NO: 110233 - RNA, 1410 nt, Artificial Sequence
  derived and/or modified CDS sequence (opt2) from neuraminidase__InfluenzaA__AAX57877
augaaccccaaccagaagaucaucaccaucggcuccgucucccucaccaucgccaccaucugcuuccucaugcagaucgccauccucgucaccaccgucacccuccacuucaagcaguacgagugcaacuccccccccaacaaccaggucaugcucugcgagcccaccaucaucgagcgcaacaucaccgagaucgucuaccucaccaacaccaccaucgagaaggagaucugccccaagcucgccgaguaccgcaacugguccaagccccagugcaacaucaccggcuucgcccccuucuccaaggacaacuccauccgccucuccgccggcggcgacaucugggucacccgcgagcccuacgucuccugcgaccccgacaagugcuaccaguucgcccucggccagggcaccacccucaacaacggccacuccaacgacaccguccacgaccgcacccccuaccgcacccuccucaugaacgagcucggcguccccuuccaccucggcaccaagcaggucugcaucgccugguccuccuccuccugccacgacggcaaggccuggcuccacgucugcgucaccggcgacgacgagaacgccaccgccuccuucaucuacaacggccgccucgucgacuccaucggcuccugguccaagaagauccuccgcacccaggaguccgagugcgucugcaucaacggcaccugcaccgucgucaugaccgacggcuccgccuccggcaaggccgacaccaagauccucuucaucgaggagggcaagaucguccacaccuccucccucuccggcuccgcccagcacgucgaggagugcuccugcuacccccgcuaccccggcguccgcugcgucugccgcgacaacuggaagggcuccaaccgccccaucgucgacaucaacgucaaggacuacuccaucgucuccuccuacgucugcuccggccucgucggcgacaccccccgcaagaacgacuccuccuccuccucccacugccucgaccccaacaacgaggagggcggccacggcgucaagggcugggccuucgacgacggcaacgacgucuggaugggccgcaccaucuccgagaagcuccgcuccggcuacgagaccuucaaggucaucgagggcugguccaagcccaacuccaagcuccagaucaaccgccaggucaucgucgaccgcggcaaccgcuccggcuacuccggcaucuucuccgucgagggcaaguccugcaucaaccgcugcuucuacgucgagcucauccgcggccgcaagcaggagaccgagguccucuggaccuccaacuccaucgucgucuucugcggcaccuccggcaccuacggcaccggcuccuggcccgacggcgccgacaucaaccucaugcacaucuga

SEQ ID NO: 110234 - RNA, 1410 nt, Artificial Sequence; identical to SEQ ID NO: 110097
  derived and/or modified CDS sequence (opt2) from neuraminidase__InfluenzaA__AAX57887

SEQ ID NO: 110235 - RNA, 1410 nt, Artificial Sequence
  derived and/or modified CDS sequence (opt2) from neuraminidase__InfluenzaA__AAX57897
augaaccccaaccagaagaucaucaccaucggcuccgucucccucaccaucgccaccaucugcuuccucaugcagaucgccauccucgucaccaccgucacccuccacuucaagcaguacgagugcaacuccccccccaacaaccaggucaugcucugcgagcccaccaucaucgagcgcaacaucaccgagaucgucuaccucaccaacaccaccaucgagaaggagaucugccccaagcucgccgaguaccgcaacugguccaagccccagugcaacaucaccggcuucgcccccuucuccaaggacaacuccauccgccucuccgccggcggcgacaucugggucacccgcgagcccuacgucuccugcgaccccgacaagugcuaccaguucgcccucggccagggcaccacccucaacaacggccacuccaacgacaccguccacgaccgcacccccuaccgcacccuccucaugaacgagcucggcguccccuuccaccucggcaccaagcaggucugcaucgccugguccuccuccuccugccacgacggcaaggccuggcuccacgucugcgucaccggcgacgacgagaacgccaccgccuccuucaucuacaacggccgccucgucgacuccaucggcuccugguccaagaagauccuccgcacccaggaguccgagugcgucugcaucaacggcaccugcaccgucgucaugaccgacggcuccgccuccggcaaggccgacaccaagauccucuucaucgaggagggcaagaucguccacaccuccucccucuccggcuccgcccagcacgucgaggagugcuccugcuacccccgcuaccccggcguccgcugcgucugccgcgacaacuggaagggcuccaaccgccccaucgucgacaucaacgucaaggacuacuccaucgucuccuccuacgucugcuccggccucgucggcgacaccccccgcaagaacgacuccuccuccuccucccacugccucgaccccaacaacgaggagggcggccacggcgucaagggcugggccuucgacuccggcaacgacgucuggaugggccgcaccaucuccgagaagcuccgcuccggcuacgagaccuucaaggucaucgagggcugguccaagcccaacuccaagcuccagaucaaccgccaggucaucgucgaccgcggcaaccgcuccggcuacuccggcaucuucuccgucgagggcaaguccugcaucaaccgcugcuucuacgucgagcucauccgcggccgcaagcaggagaccgagguccucuggaccuccaacuccaucgucgucuucugcggcaccuccggcaccuacggcaccggcuccuggcccgacggcgccgacaucaaccucaugcccaucuga

SEQ ID NO: 110236 - RNA, 1410 nt, Artificial Sequence
  derived and/or modified CDS sequence (opt2) from neuraminidase__InfluenzaA__AAX57907
augaaccccaaccagaagaucaucaccaucggcuccgucucccucaccaucgccaccaucugcuuccucaugcagaucgccauccucgucaccaccgucacccuccacuucaagcaguacgagugcaacuccccccccaacaaccaggucaugcucugcgagcccaccaucaucgagcgcaacaucaccgagaucgucuaccucaccaacaccaccaucgagaaggagaucugccccaagcucgccgaguaccgcaacugguccaagccccagugcaacaucaccggcuucgcccccuucuccaaggacaacuccauccgccucuccgccggcggcgacaucugggucacccgcgagcccuacgucuccugcgaccccgacaagugcuaccaguucgcccucggccagggcaccacccucaacaacggccacuccaacgacaccguccacgaccgcacccccuaccgcacccuccucaugaacgagcucggcguccccuuccaccucggcaccaagcaggucugcaucgccugguccuccuccuccugccacgacggcaaggccuggcuccacgucugcgucaccggcgacgacgagaacgccaccgccuccuucaucuacaacggccgccucgucgacuccaucggcuccugguccaagaagauccuccgcacccaggaguccgagugcgucugcaucaacggcaccugcaccgucgucaugaccgacggcuccgccuccggcaaggccgacaccaagauccucuucaucgaggagggcaagaucguccacaccuccucccucuccggcuccgcccagcacgucgaggagugcuccugcuacccccgcuaccccggcguccgcugcgucugccgcgacaacuggaagggcuccaaccgccccaucgucgacaucaacgucaaggacuacuccaucgucuccuccuacgucugcuccggccucgucggcgacaccccccgcaagaacgacuccuccuccuccucccacugccucgaccccaacaacgaggagggcggccacggcgucaagggcugggccuucgacgacggcaacgacgucuggaugggccgcaccaucuccgagaagcuccgcuccggcuacgagaccuucaaggucaucgagggcugguccaagcccaacuccaagcuccagaugaaccgccaggucaucgucgaccgcggcaaccgcuccggcuacuccggcaucuucuccgucgagggcaaguccugcaucaaccgcugcuucuacgucgagcucauccgcggccgcaagcaggagaccgagguccucuggaccuccaacuccaucgucgucuucugcggcaccuccggcaccuacggcaccggcuccuggcccgacggcgccgacaucaaccucaugcccaucuga

SEQ ID NO: 110237 - RNA, 1410 nt, Artificial Sequence; identical to SEQ ID NO: 110097
  derived and/or modified CDS sequence (opt2) from neuraminidase__InfluenzaA__AAX57917

SEQ ID NO: 110238 - RNA, 1410 nt, Artificial Sequence; identical to SEQ ID NO: 110097
  derived and/or modified CDS sequence (opt2) from neuraminidase__InfluenzaA__AAX57927

SEQ ID NO: 110239 - RNA, 1410 nt, Artificial Sequence
  derived and/or modified CDS sequence (opt2) from neuraminidase__InfluenzaA__AAX57937
augaaccccaaccagaagaucaucaccaucggcuccgucucccucaccaucgccaccaucugcuuccucaugcagaucgccauccucgucaccaccgucacccuccacuucaagcaguacgagugcaacuccccccccaacaaccaggucaugcucugcgagcccaccaucaucgagcgcaacaucaccgagauggucuaccucaccaacaccaccaucgagaaggagaucugccccaagcucgccgaguaccgcaacugguccaagccccagugcaacaucaccggcuucgcccccuucuccaaggacaacuccauccgccucuccgccggcggcgacaucugggucacccgcgagcccuacgucuccugcgaccccgacaagugcuaccaguucgcccucggccagggcaccacccucaacaacggccacuccaacgacaccguccacgaccgcacccccuaccgcacccuccucaugaacgagcucggcguccccuuccaccucggcaccaagcaggucugcaucgccugguccuccuccuccugccacgacggcaaggccuggcuccacgucugcgucaccggcgacgacgagaacgccaccgccuccuucaucuacaacggccgccucgucgacuccaucggcuccugguccaagaagauccuccgcacccaggaguccgagugcgucugcaucaacggcaccugcaccgucgucaugaccgacggcuccgccuccggcaaggccgacaccaagauccucuucaucgaggagggcaagaucguccacaccucccuccucuccggcuccgcccagcacgucgaggagugcuccugcuacccccgcuaccccggcguccgcugcgucugccgcgacaacuggaagggcuccaaccgccccaucgucgacaucaacgucaaggacuacuccaucgucuccuccuacgucugcuccggccucgucggcgacaccccccgcaagaacgacuccuccuccuccucccacugccucgaccccaacaacgaggagggcggccacggcgucaagggcugggccuucgacgacggcaacgacgucuggaugggccgcaccaucuccgagaagcuccgcuccggcuacgagaccuucaaggucaucgagggcugguccaagcccaacuccaagcuccagaucaaccgccaggucaucgucgaccgcggcaaccgcuccggcuacuccggcaucuucuccgucgagggcaaguccugcaucaaccgcugcuucuacgucgagcucauccgcggccgcaagcaggagaccgagguccucuggaccuccaacuccaucgucgucuucugcggcaccuccggcaccuacggcaccggcuccuggcccgacggcgccgacaucaaccucaugcgcaucuga

SEQ ID NO: 110240 - RNA, 1410 nt, Artificial Sequence
  derived and/or modified CDS sequence (opt2) from neuraminidase__InfluenzaA__AAX57947
augaaccccaaccagaagaucaucaccaucggcuccgucucccucaccaucgccaccaucugcuuccucaugcagaucgccauccucgucaccaccgucacccuccacuucaagcaguacgagugcaacuccccccccaacaaccaggucaugcucugcgagcccaccaucaucgagcgcaacaucaccgagaucgucuaccucaccaacaccaccaucgagaaggagaucugccccaagcucgccgaguaccgcaacugguccaagccccagugcaacaucaccggcuucgcccccuucuccaaggacaacuccauccgccucuccgccggcggcgacaucugggucacccgcgagcccuacgucuccugcgaccccgacaagugcuaccaguucgcccucggccagggcaccacccucaacaacggccacuccaacgacaccguccacgaccgcacccccuaccgcacccuccucaugaacgagcucggcguccccuuccaccucggcacccgccaggucugcaucgccugguccuccuccuccugccacgacggcaaggccuggcuccacgucugcgucaccggcgacgacgagaacgccaccgccuccuucaucuacaacggccgccucgucgacuccaucggcuccuggucccgcaagauccuccgcacccaggaguccgagugcgucugcaucaacggcaccugcaccgucgucaugaccgacggcuccgccuccggcaaggccgacaccaagauccucuucaucgaggagggcaagaucguccacaucuccacccucuccggcuccgcccagcacgucgaggagugcuccugcuacccccgcuaccccggcguccgcugcgucugccgcgacaacuggaagggcuccaaccgccccaucgucgacaucaacgucaaggacuacuccaucgccuccuccuacaugugcuccggccucgucggcgacaccccccgcaagaacgacuccuucuccuccucccacugccucgaccccaacaacgaggagggcggccacggcgucaagggcugggccuucgacgacggcaacgacgucuggaugggccgcaccaucuccgagaagcuccgcuccggcuacgagaccuucaaggucaucgagggcugguccaagcccaacuccaagcuccagaucaaccgccaggucaucgucgagcgcggcaaccgcuccggcuacuccggcaucuucuccgucgagggcaaguccugcaucaaccgcugcuucuacgucgagcucauccgcggccgcaaggaggagaccgaggucugguggaccuccaacuccaucgucgucuucugcggcaccuccggcaccuacggcaccggcuccuggcccgacggcgccgacaucaaccucaugcccaucuga

SEQ ID NO: 110241 - RNA, 1410 nt, Artificial Sequence; identical to SEQ ID NO: 110181
  derived and/or modified CDS sequence (opt2) from neuraminidase__InfluenzaA__AAX76626

SEQ ID NO: 110242 - RNA, 1410 nt, Artificial Sequence
  derived and/or modified CDS sequence (opt2) from neuraminidase__InfluenzaA__AAX76646
augaaccccaaccagaagaucaucaccaucggcuccgucucccucaccaucgccaccaucugcuuccucaugcagaucgccauccucgucaccaccgucacccuccacuucaagcagcacgagugcaacuccccccccaacaaccaggucaugcucugcgagcccaccaucaucgagcgcaacaucaccgagaucgucuaccucaccaacaccaccaucgagaaggagaucugccccaagcucgccgaguaccgcaacugguccaagccccagugcaacaucaccggcuucgcccccuucuccaaggacaacuccauccgccucuccgccggcggcgacaucugggucacccgcgagcccuacgucuccugcgaccccgacaagugcuaccaguucgcccucggccagggcaccacccucaacaacggccacuccaacaacaccguccacgaccgcacccccuaccgcacccuccucaugaacgagcucggcguccccuuccaccucggcacccgccaggucugcaucgccugguccuccuccggcugccacgacggcaaggccuggcuccacgucugcgucaccggcgacgacaagaacgccaccgccuccuucaucuacaacggccgccucgucgacuccaucggcuccugguccaagaagauccuccgcacccaggaguccgagugcgucugcaucaacggcaccugcaccgucgucaugaccgacggcuccgccuccggcaaggccgacaccaagauccucuucaucgaggagggcaagaucguccacaucuccacccucuccggcuccgcccagcacgucgaggagugcuccugcuacccccgcuaccccggcguccgcugcgucugccgcgacaacuggaagggcuccaaccgccccaucgucgacaucaacgucaaggacuacuccaucgucuccuccuacgucugcuccggccucgucggcgacaccccccgcaagaacgacuccuucuccuccucccacugccucgaccccaacaacgaggagggcggccacggcgucaagggcugggccuucgacgacggcaacgacgucuggaugggccgcaccaucuccgagaagcuccgcuccggcuacgagaccuucaaggucaucgagggcugguccaagcccaacuccaagcuccagaucaaccgccaggucaucgucgagcgcggcaaccgcuccggcuacuccggcaucuucuccgucgagggcaaguccugcaucaaccgcugcuucuacgucgagcucauccgcggccgcaaggaggagaccgaggucugguggaccuccaacuccaucgucgucuucugcggcaccuccggcaccuacggcaccggcuccuggcccgacggcgccgacaucaaccucaugcccaucuga

SEQ ID NO: 110243 - RNA, 1410 nt, Artificial Sequence; identical to SEQ ID NO: 110171
  derived and/or modified CDS sequence (opt2) from neuraminidase__InfluenzaA__AAX76656

SEQ ID NO: 110244 - RNA, 1410 nt, Artificial Sequence; identical to SEQ ID NO: 110216
  derived and/or modified CDS sequence (opt2) from neuraminidase__InfluenzaA__AAX76666

SEQ ID NO: 110245 - RNA, 1410 nt, Artificial Sequence; identical to SEQ ID NO: 110097
  derived and/or modified CDS sequence (opt2) from neuraminidase__InfluenzaA__AAX76696

SEQ ID NO: 110246 - RNA, 1410 nt, Artificial Sequence
  derived and/or modified CDS sequence (opt2) from neuraminidase__InfluenzaA__AAX76736
augaaccccaaccagaagaucaucaccaucggcuccgucucccucaccaucgccaccaucugcuuccucaugcagaucgccauccucgucaccaccgucacccuccacuucaagcaguacgagugcaacuccccccccaacaaccaggucaugcucugcgagcccaccaucaucgagcgcaacaucaccgagaucgucuaccucaccaacaccaccaucgagaaggagaucugccccaagcucuccgaguaccgcaacugguccaagccccagugcaacaucaccggcuucgcccccuucuccaaggacaacuccauccgccucuccgccggcggcgacaucugggucacccgcgagcccuacgucuccugcgaccccgacaagugcuaccaguucgcccucggccagggcaccacccucaacaacggccacuccaacgacaccguccacgaccgcacccccuaccgcacccuccucaugaacgagcucggcguccccuuccaccucggcaccaagcaggucugcaucgccugguccuccuccuccugccacgacggcaaggccuggcuccacgucugcgucaccggcgacgacgagaacgccaccgccuccuucaucuacaacggccgccucgucgacuccaucggcuccugguccaagaagauccuccgcacccaggaguccgagugcgucugcaucaacggcaccugcaccgucgucaugaccgacggcuccgccuccggcaaggccgacaccaagauccucuucaucgaggagggcaagaucguccacaucuccacccucucccgcuccgcccagcacgucgaggagugcuccugcuacccccgcuaccccggcguccgcugcgucugccgcgacaacuggaagggcuccaaccgccccaucgucgacaucaacgucaaggaccacuccaucgucuccuccuacgucugcuccggccucgucggcgacaccccccgcaagaacgacuccuucuccuccucccacugccucgaccccaacaacgaggagggcggccacggcgucaagggcugggccuucgacgacggcaacgacgucuggaugggccgcaccaucuccgagaagcuccgcuccggcuacgagaccuucaaggucaucgagggcugguccaagcccaacuccaagcuccagaucaaccgccaggucaucgucgagcgcggcaaccgcuccggcuacuccggcaucuucuccgucgagggcaaguccugcaucaaccgcugcuucuacgucgagcucauccgcggccgcaaggaggagaccgaggucugguggaccuccaacuccaucgucgucuucugcggcaccuccggcaccuacggcaccggcuccuggcccgacggcgccgacaucaaccucaugcccaucuga

SEQ ID NO: 110247 - RNA, 1410 nt, Artificial Sequence
  derived and/or modified CDS sequence (opt2) from neuraminidase__InfluenzaA__AAX76766
augaaccccaaccagaagaucaucaccaucggcuccgucucccucaccaucgccaccaucugcuuccucaugcagaucgccauccucgucaccaccgucacccuccacuucaagcagcacgagugcaacuccccccccaacaaccaggucaugcucugcgagcccaccaucaucgagcgcaacaucaccgagaucgucuaccucaccaacaccaccaucgagaaggagaucugccccaagcucgccgaguaccgcaacugguccaagccccagugcaacaucaccggcuucgcccccuucuccaaggacaacuccauccgccucuccgucggcggcgacaucugggucacccgcgagcccuacgucuccugcgaccccgacaagugcuaccaguucgcccucggccagggcaccacccucaacaacggccacuccaacgacaccguccacgaccgcacccccuaccgcacccuccucaugaacgagcucggcguccccuuccaccucggcacccgccaggucugcaucgccugguccuccuccuccugccacgacggcaaggccuggcuccacgucugcgucaccggcgacgacaagaacgccaccgccuccuucaucuacaacggccgccucgucgacuccaucggcuccugguccaagaagauccuccgcacccaggaguccgagugcgucugcaucaacggcaccugcaccgucgucaugaccgacggcuccgccuccggcaaggccgacaccaagauccucuucaucgaggagggcaagaucguccacaucuccacccucuccggcuccgcccagcacgucgaggagugcuccugcuacccccgcuaccccggcguccgcugcgucugccgcgacaacuggaagggcuccaaccgccccaucgucgacaucaacgucaaggacuacuccaucgucuccuccuacgucugcuccggccucgucggcgacaccccccgcaagaacgacuccuucuccuccucccacugccucgaccccaacaacgaggagggcggccacggcgucaagggcugggccuucgacgacggcaacgacgucuggaugggccgcaccaucuccgagaagcuccgcuccggcuacgagaccuucaaggucaucgagggcugguccaagcccaacuccaagcuccagaucaaccgccaggucaucgucgagcgcggcaaccgcuccggcuacuccggcaucuucuccgucgagggcaaguccugcaucaaccgcugcuucuacgucgagcucauccgcggccgcaaggaggagaccgaggucugguggaccuccaacuccaucgucgucuucugcggcaccuccggcaccuacggcaccggcuccuggcccgacggcgccgacaucaaccucaugcccaucuga

SEQ ID NO: 110248 - RNA, 1410 nt, Artificial Sequence; identical to SEQ ID NO: 110173
  derived and/or modified CDS sequence (opt2) from neuraminidase__InfluenzaA__AAY18089

SEQ ID NO: 110249 - RNA, 1410 nt, Artificial Sequence
  derived and/or modified CDS sequence (opt2) from neuraminidase__InfluenzaA__AAY18099
augaaccccaaccagaagaucaucaccaucggcuccgucucccucaccaucgccaccaucugcuuccucaugcagaucgccauccucgucaccaccgucacccuccacuucaagcagcacgagugcaacuccccccccaacaaccaggucaugcucugcgagcccaccaucaucgagcgcaacaucaccgagaucgucuaccucaccaacaccaccaucgagaaggagaucugccccaagcucgccgaguaccgcaacugguccaagccccagugcaacaucaccggcuucgcccccuucuccaaggacaacuccauccgccucuccgccggcggcgacaucugggucacccgcgagcccuacgucuccugcgaccccgacaagugcuaccaguucgcccucggccagggcaccacccucaacaacggccacuccaacaacaccguccacgaccgcacccccuaccgcacccuccucaugaacgagcucggcguccccuuccaccucggcacccgccaggucugcaucgccugguccuccuccuccugccacgacggcaaggccuggcuccacgucugcgucaccggcgacgacaagaacgccaccgccuccuucaucuacaacggccgccucgucgacuccaucggcuccugguccaagaagauccuccgcacccaggaguccgagugcgucugcaucaacggcaccugcaccgucgucaugaccgacggcuccgccuccggcaaggccgacaccaagauccucuucgucgaggagggcaagaucguccacaucuccacccucuccggcuccgcccagcacgucgaggagugcuccugcuacccccgcuaccccggcguccgcugcgucugccgcgacaacuggaagggcuccaaccgccccaucgucgacaucaacgucaaggacuacuccaucgucuccuccuacgucugcuccggccucgucggcgacaccccccgcaagaacgacuccuucuccuccucccacugccucgaccccaacaacgaggagggcggccacggcgucaagggcugggccuucgacgacggcaacgacgucuggaugggccgcaccaucuccgagaagcuccgcuccggcuacgagaccuucaaggucaucgagggcugguccaagcccaacuccaagcuccagaucaaccgccaggucaucgucgagcgcggcaaccgcuccggcuacuccggcaucuucuccgucgagggcaaguccugcaucaaccgcugcuucuacgucgagcucauccgcggccgcaaggaggagaccgaggucugguggaccuccaacuccaucgucgucuucugcggcaccuccggcaccuacggcaccggcuccuggcccgacggcgccgacaucaaccucaugcccaucuga

SEQ ID NO: 110250 - RNA, 1410 nt, Artificial Sequence
  derived and/or modified CDS sequence (opt2) from neuraminidase__InfluenzaA__AAY18109
augaaccccaaccagaagaucaucaccaucggcuccgucucccucaccaucgccaccaucugcuuccucaugcagaucgccauccucgucaccacccucacccuccacuucaagcaguacgagugcaacuccccccccaacaaccaggucaugcucugcgagcccgccaucaucgagcgcaacaucaccgagaucgucuaccucaccaacaccaccaucgagaaggagaagugccccaagcucgccgaguaccgcaacugguccaagccccagugcaacaucaccggcuucgcccccuucuccaaggacaacuccauccgccucuccgccggcggcgacaucugggucacccgcgagcccuacgucuccugcgaccccgacaagugcuaccaguucgcccucggccagggcaccacccucaacaacggccacuccaacgacaccguccacgaccgcacccccuaccgcacccuccucaugaacgagcucggcguccccuuccaccucggcacccgccaggucugcaucgccugguccuccuccuccugccacgacggcaaggccuggcuccacgucugcgucaccggcgacgacgagaacgccaccgccuccuucaucuacaacggccgccucgucgacuccaucggcuccugguccaagaagauccuccgcacccaggaguccgagugcgucugcaucaacggcaccugcaccgucgucaugaccgacggcuccgccuccggcaaggccgacaccaagauccucuucaucgaggagggcaagaucgucaacaucuccacccucuccggcuccgcccagcacgucgaggagugcuccugcuacccccgcuaccccggcguccgcugcgucugccgcgacaacuggaagggcuccaaccgccccaucgucgacaucaacgucaaggacuacuccaucgucuccuccuacgucugcuccggccucgucggcgacaccccccgcaagaacgacuccuucuccuccucccacugccucgaccccaacaacgaggagggcggccacggcgucaagggcugggccuucgacgacggcaacgacgucuggaugggccgcaccaucuccgagaagcuccgcuccggcuacgagaccuucaaggucaucgagggcugguccaagcccaacuccaagcuccagaucaaccgccaggucaucgucgagcgcggcaaccgcuccggcuacuccggcaucuucuccgucgagggcaaguccugcaucaaccgcugcuucuacgucgagcucauccgcggccgcaaggaggagaccgaggucugguggaccuccaacuccaucgucgucuucugcggcaccuccggcaccuacggcaccggcuccuggcccgacggcgccgacaucaaccucaugcccaucuga

SEQ ID NO: 110251 - RNA, 1410 nt, Artificial Sequence; identical to SEQ ID NO: 110209
  derived and/or modified CDS sequence (opt2) from neuraminidase__InfluenzaA__AAY18119

SEQ ID NO: 110252 - RNA, 1410 nt, Artificial Sequence
  derived and/or modified CDS sequence (opt2) from neuraminidase__InfluenzaA__AAY18129
augaaccccaaccagaagaucaucaccaucggcuccgucucccucaccaucgccaccaucugcuuccucaugcagaucaccauccucgucaccaccgucacccuccacuucaagcaguacgagugcaacuccccccccaacaaccaggucaugcucugcgagcccaccaucaucgagcgcaacaucaccgagaucgucuaccucaccaacaccaccaucgagaaggagaucugccccaagcucgccgaguaccgcaacugguccaagccccagugcaacaucaccggcuucgcccccuucuccaaggacaacuccauccgccucuccgccggcggcgacaucugggucacccgcgagcccuacgucuccugcgaccccgacaagugcuaccaguucgcccucggccagggcaccacccucaacaacggccacuccaacgacaccguccacgaccgcacccccuaccgcacccuccucaugaacgagcucggcguccccuuccaccucggcacccgccaggucugcaucgccugguccuccuccuccugccacgacggcaaggccuggcuccacgucugcgucaccggcgacgacaagaacgccaccgccuccuucaucuacaacggccgccucgucgacuccaucggcuccugguccaagaagauccuccgcacccaggaguccgagugcgucugcaucaacggcaccugcaccgucgucaugaccgacggcuccgccuccggcaaggccgacaccaagauccucuucaucgaggagggcaagaucauccacaucuccacccucuccggcuccgcccagcacgucgaggagugcuccugcuacccccgcuaccccggcguccgcugcgucugccgcgacaacuggaagggcuccaaccgccccaucgucgacaucaacgucaaggacuacuccaucgucuccuccuacgucugcuccggccucgucggcgacaccccccgcaagaacgacuccuccuccuccucccacugccucgaccccaacaacgaggagggcggccacggcgucaagggcugggccuucgacgacggcaacgacgucuggaugggccgcaccaucuccgagaagcuccgcuccggcuacgagaccuucaaggucaucgagggcugguccaaguccaacuccaagcuccagaucaaccgccaggucaucgucgagcgcggcaaccgcuccggcuacuccggcaucuucuccgucgagggcaaguccugcaucaaccgcugcuucuacgucgagcucauccgcggccgcaaggaggagaccgaggucugguggaccuccaacuccaucgucgucuucugcggcaccuccggcaccuacggcaccggcuccuggcccgacggcgccgacaucaaccucaugcccaucuga

SEQ ID NO: 110253 - RNA, 1410 nt, Artificial Sequence
  derived and/or modified CDS sequence (opt2) from neuraminidase__InfluenzaA__AAY18139
augaaccccaaccagaagaucaucaccaucggcuccgucucccucaccaucgccaccaucugcuuccucaugcagaucgccauccucgucaccaccgucacccuccacuucaagcagcacgagugcaacuccccccccaacaaccaggucaugcucugcgagcccaccaucaucgagcgcaacaucaccgagaucgucuaccucaccaacaccaccaucgagcgcgagaucugccccaagcucgccgaguaccgcaacugguccaagccccagugcaacaucaccggcuucgcccccuucuccaaggacaacuccauccgccucuccgccggcggcgacaucugggucacccgcgagcccuacgucuccugcgaccccgacaagugcuaccaguucgcccucggccagggcaccacccucaacaaccgccacuccaacgacaccguccacgaccgcacccccuaccgcacccuccucaugaacgagcucggcguccccuuccaccucggcacccgccaggucugcaucgccugguccuccuccuccugccacgacggcaaggccuggcuccacgucugcgucaccggcgacgacaagaacgccaccgccuccuucaucuacaacggccgccucgucgacuccaucggcuccugguccaagaagauccuccgcacccaggaguccgagugcgucugcaucaacggcaccugcaccgucgucaugaccgacggcuccgccuccggcaaggccgacaccaagauccucuucaucgaggagggcaagaucguccacaucuccacccucuccggcuccgcccagcacgucgaggagugcuccugcuacccccgcuaccccggcguccgcugcgucugccgcgacaacuggaagggcuccaaccgccccaucgucgacaucaacgucaaggacuacuccaucgucuccuccuacgucugcuccggccucgucggcgacaccccccgcaagaacgacuccuccuccuccucccacugccucgaccccaacaacgaggagggcggccacggcgucaagggcugggccuucgacgacggcaacgacgucuggaugggccgcaccaucuccgagaagcuccgcuccggcuacgagaccuucaaggucaucgagggcugguccaagcccaacuccaagcuccagaucaaccgccaggucaucgucgagcgcggcaaccgcuccggcuacuccggcaucuucuccgucgagggcaaguccugcaucaaccgcugcuucuacgucgagcucauccgcggccgcaaggaggagaccgaggucugguggaccuccaacuccaucgucgucuucugcggcaccuccggcaccuacggcaccggcuccuggcccgacggcgccgacaucaaccucaugcccaucuga

SEQ ID NO: 110254 - RNA, 1410 nt, Artificial Sequence
  derived and/or modified CDS sequence (opt2) from neuraminidase__InfluenzaA__AAY18149
augaaccccaaccagaagaucaucaccaucggcuccgucucccucaccaucgccaccaucugcuuccucaugcagaucgccauccucgucaccaccgucacccuccacuucaagcagcacgagugcaacuccccccccaacaaccaggucaugcucugcgagcccaccaucaucgagcgcaacaucaccgagaucgucuaccucaccaacaccaccaucgagaaggagaucugccccaagcucgccgaguaccgcaacugguccaagccccagugcaacaucaccggcuucgcccccuucuccaaggacaacuccauccgccucuccgccggcggcgacaucugggucacccgcgagcccuacgucuccugcgaccccgacaagugcuaccaguucgcccucggccagggcaccacccucaacaacggccacuccaacgacaccguccacgaccgcacccccuaccgcacccuccucaugaacgagcucggcguccccuuccaccucggcacccgccaggucugcaucgccugguccuccuccuccugccacgacggcaaggccuggcuccacgucugcgucaccggcgacgacaagaacgccaccgccuccuucaucuacaacggccgccucgucgacuccaucggcuccugguccaagaagauccuccgcacccaggaguccgagugcgucugcaucaacggcaccugcaccgucgucaugaccgacggcuccgccuccggcaaggccgacaccaagauccucuucaucgaggagggcaagaucguccacaucuccacccucuccggcuccgcccagcacgucgaggagugcuccugcuacccccgcuaccccggcguccgcugcgucugccgcgacaacuggaagggcuccaaccgccccaccgucgacaucaacgucaaggacuacuccaucgucuccuccuacgucugcuccggccucgucggcgacaccccccgcaagaacgacuccuccuccuccucccacugccucgaccccaacaacgaggagggcggccacggcgucaagggcugggccuucgacgacggcaacgacgucuggaugggccgcaccaucuccgagaagcuccgcuccggcuacgagaccuucaaggucaucgagggcugguccaagcccaacuccaagcuccagaucaaccgccaggucaucgucgagcgcggcaaccgcuccggcuacuccggcaucuucuccgucgagggcaaguccugcaucaaccgcugcuucuacgucgagcucauccgcggccgcaaggaggagaccgaggucugguggaccuccaacuccaucgucgucuucugcggcaccuccggcaccuacggcaccggcuccuggcccgacggcgccgacaucaaccucaugcccaucuga

SEQ ID NO: 110255 - RNA, 1410 nt, Artificial Sequence
  derived and/or modified CDS sequence (opt2) from neuraminidase__InfluenzaA__AAY18159
augaaccccaaccagaagaucaucaccaucggcuccgucucccucaucaucgccaccaucugcuuccucaugcagaucgccauccucgucaccaccgucacccuccacuucaagcaguacgagugcaacuccccccccaacaaccaggucaugcucugcgagcccaccaucaucgagcgcaacaucaccgagaucgucuaccucaccaacaccaccaucgagaaggagaucugccccaagcucgccgaguaccgcaacugguccaagccccagugcaacaucaccggcuucgcccccuucuccaaggacaacuccauccgccucuccgccggcggcgacaucugggucacccgcgagcccuacgucuccugcgaccccgacaagugcuaccaguucgcccucggccagggcaccacccucaacaacggccacuccaacgacaccguccacgaccgcacccccuaccgcacccuccucaugaacgagcucggcguccccuuccaccucggcaccaagcaggucugcaucgccugguccuccuccuccugccacgacggcaaggccuggcuccacgucugcgucaccggcgacgacgagaacgccaccgccuccuucaucuacaacggccgccucgucgacuccaucggcuccugguccaagaagauccuccgcacccaggaguccgagugcgucugcaucaacggcaccugcaccgucgucaugaccgacggcuccgccuccggcaaggccgacaccaagauccucuucaucgaggagggcaagaucguccacaccuccucccucuccggcuccgcccagcacgucgaggagugcuccugcuacccccgcuaccccggcguccgcugcgucugccgcgacaacuggaagggcuccaaccgccccaucgucgacaucaacgucaaggacuacuccaucgucuccuccuacgucugcuccggccucgucggcgacaccccccgcaagaacgacuccuccuccuccucccacugccucgaccccaacaacgaggagggcggccacggcgucaagggcugggccuucgacgacggcaacgacgucuggaugggccgcaccaucuccgagaagcuccgcuccggcuacgagaccuucaaggucaucgagggcugguccaagcccaacuccaagcuccagaucaaccgccaggucaucgucgaccgcggcaaccgcuccggcuacuccggcaucuucuccgucgagggcaagaacugcaucaaccgcugcuucuacgucgagcucauccgcggccgcaagcaggagaccgagguccucuggaccuccaacuccaucgucgucuucugcggcaccuccggcaccuacggcaccggcuccuggcccgacggcgccgacaucaaccucaugcccaucuga

SEQ ID NO: 110256 - RNA, 1410 nt, Artificial Sequence; identical to SEQ ID NO: 110097
  derived and/or modified CDS sequence (opt2) from neuraminidase__InfluenzaA__AAY18179

SEQ ID NO: 110257 - RNA, 1410 nt, Artificial Sequence; identical to SEQ ID NO: 110097
  derived and/or modified CDS sequence (opt2) from neuraminidase__InfluenzaA__AAY18189

SEQ ID NO: 110258 - RNA, 1410 nt, Artificial Sequence
  derived and/or modified CDS sequence (opt2) from neuraminidase__InfluenzaA__AAY18199
augaaccccaaccagaagaucaucaccaucggcuccgucucccucaccaucuccaccaucugcuucuucaugcagaucgccauccucaucaccaccgucacccuccacuucaagcaguacgaguucaacuccccccccaacaaccaggucaugcucugcgagcccaccaucaucgagcgcaacaucaccgagaucgucuaccucaccaacaccaccaucgagaaggagaucugccccaagcucgccgaguaccgcaacugguccaagccccagugcaacaucaccggcuucgcccccuucuccaaggacaacuccauccgccucuccgccggcggcgacaucugggucacccgcgagcccuacgucuccugcgaccccgacaagugcuaccaguucgcccucggccagggcaccacccucaacaacguccacuccaacgacaccguccacgaccgcacccccuaccgcacccuccucaugaacgagcucggcguccccuuccaccucggcaccaagcaggucugcaucgccugguccuccuccuccugccacgacggcaaggccuggcuccacgucugcgucaccggcgacgacgagaacgccaccgccuccuucaucuacaacggccgccucgucgacuccaucgucuccugguccaagaagauccuccgcacccaggaguccgagugcgucugcaucaacggcaccugcaccgucgucaugaccgacggcuccgccuccggcaaggccgacaccaagauccucuucaucgaggagggcaagaucguccacaccuccacccucuccggcuccgcccagcacgucgaggagugcuccugcuacccccgcuaccccggcguccgcugcgucugccgcgacaacuggaagggcuccaaccgccccaucgucgacaucaacaucaaggacuacuccaucgucuccuccuacgucugcuccggccucgucggcgacaccccccgcaagaacgacuccuccuccuccucccacugccucgaccccaacaacgaggagggcggccagggcgucaagggcugggccuucgacgacggcaacgacgucuggaugggccgcaccaucuccgagaagcuccacuccggcuacgagaccuucaaggucaucgagggcugguccaaccccaacuccaagcuccagaucaaccgccaggucaucgucgaccgcggcaaccgcuccggcuacuccggcaucuucuccgucgagggcaaguccugcaucaaccgcugcuucuacgucgagcucauccgcggccgcaagcaggagaccgagguccucuggaccuccaacuccaucgucgucuucugcggcaccuccggcaccuacggcaccggcuccuggcccgacggcgccgacaucaaccucaugcccaucuga

SEQ ID NO: 110259 - RNA, 1410 nt, Artificial Sequence; identical to SEQ ID NO: 110200
  derived and/or modified CDS sequence (opt2) from neuraminidase__InfluenzaA__AAY18588

SEQ ID NO: 110260 - RNA, 1410 nt, Artificial Sequence; identical to SEQ ID NO: 110181
  derived and/or modified CDS sequence (opt2) from neuraminidase__InfluenzaA__AAY18614

SEQ ID NO: 110261 - RNA, 1410 nt, Artificial Sequence
  derived and/or modified CDS sequence (opt2) from neuraminidase__InfluenzaA__AAY27846
augaaccccaaccagaagaucaucaccaucggcuccgucucccucaccaucgccgccaucugcuuccucaugcagaucgccauccucgucaccaccgucacccuccacuucaagcagcacgagugcaacuccccccccaacaaccaggucaugcucugcgagcccaccaucaucgagcgcaacaucaccgagaucgucuaccucaccaacaccaccaucgagaaggagaucugccccaagcucgccgaguaccgcaacugguccaagccccagugcaacaucaccggcuucgcccccuucuccaaggacaacuccauccgccucuccgccggcggcgacaucugggucacccgcgagcccuacgucuccugcgaccccgacaagugcuaccaguucgcccucggccagggcaccacccucaacaacggccacuccaacgacaccguccacgaccgcacccccuaccgcacccuccucaugaacgagcucggcguccccuuccaccucggcacccgccaggucugcaucgccugguccuccuccuccugccacgacggcaaggccuggcuccacgucugcgucaccggcgacgacaagaacgccaccgccuccuucaucuacaacggccgccucgucgacuccaucggcuccugguccaagaagauccuccgcacccaggaguccgagugcgucugcaucaacggcaccugcaccgucgucaugaccgacggcuccgccuccggcaaggccgacaccaagauccucuucaucgaggagggcaagaucguccacaucuccacccucuccggcuccgcccagcacgucgaggagugcuccugcuacccccgcuaccccggcguccgcugcgucugccgcgacaacuggaagggcuccaaccgccccaucgucgacaucaacgucaaggacuacuccaucgucuccuccuacgucugcuccggccucgucggcgacaccccccgcaagaacgacuccuucuccuccucccacugccucgaccccaacaacgaggagggcggccacggcgucaagggcugggccuucgacgacggcaacgacgucuggaugggccgcaccaucuccgagaagcuccgcuccggcuacgagaccuucaaggucaucgagggcugguccaagcccaacuccaagcuccagaucaaccgccaggucaucgucgagcgcggcaaccgcuccggcuacuccggcaucuucuccgucgagggcaaguccugcaucaaccgcugcuucuacgucgagcucauccgcggccgcaaggaggagaccgaggucugguggaccuccaacuccaucgucgucuucugcggcaccuccggcaccuacggcaccggcuccuggcccgacggcgccgacaucaaccucaugcccaucuga

SEQ ID NO: 110262 - RNA, 1410 nt, Artificial Sequence
  derived and/or modified CDS sequence (opt2) from neuraminidase__InfluenzaA__AAY27856
augaaccccaaccagaagaucaucaccaucggcuccgucucccucaccaucgccaccaucugcuuccucaugcagaucgccauccucgucaccaccgucacccuccacuucaagcagcacgagugcaacuccccccccaacaaccaggucaugcucugcgagcccaccaucaucgagcgcaacaucaccgagaucgucuaccucaccaacaccaccaucgagaaggagaucugccccaagcucgccgaguaccgcaacugguccaagccccagugcaacaucaccggcuucgcccccuucuccaaggacaacuccauccgccucuccgccggcggcgacaucugggucacccgcgagcccuacgucuccugcgaccccggcaagugcuaccaguucgcccucggccagggcaccacccucaacaacggccacuccaacgacaccguccacgaccgcacccccuaccgcacccuccucaugaacgagcucggcguccccuuccaccucggcacccgccaggucugcaucgccugguccuccuccuccugccacgacggcaaggccuggcuccacgucugcgucaccggcgacgacaagaacgccaccgccuccuucaucuacaacggccgccucgucgacuccaucggcuccugguccaagaagauccuccgcacccaggaguccgagugcgucugcaucaacggcaccugcaccgucgucaugaccgacggcuccgccuccggcaaggccgacaccaagauccucuucaucgaggagggcaagaucguccacaucuccacccucuccggcuccgcccagcacgucgaggagugcuccugcuacccccgcuaccccggcguccgcugcgucugccgcgacaacuggaagggcuccaaccgccccaucgucgacaucaacgucaaggacuacuccaucgucuccuccuacgucugcuccggccucgucggcgacaccccccgcaagaacgacuccuccuccuccucccacugccucgaccccaacaacgaggagggcggccacggcgucaagggcugggccuucgacgacggcaacgacgucuggaugggccgcaccaucuccgagaagcuccgcuccggcuacgagaccuucaaggucaucgagggcugguccaagcccaacuccaagcuccagaucaaccgccaggucaucgucgagcgcggcaaccgcuccggcuacuccggcaucuucuccgucgagggcaaguccugcaucaaccgcugcuucuacgucgagcucauccgcggccgcaaggaggagaccgaggucugguggaccuccaacuccaucgucgucuucugcggcaccuccggcaccuacggcaccggcuccuggcccgacggcgccgacaucaaccucaugcccaucuga

SEQ ID NO: 110263 - RNA, 1410 nt, Artificial Sequence; identical to SEQ ID NO: 110173
  derived and/or modified CDS sequence (opt2) from neuraminidase__InfluenzaA__AAY27866

SEQ ID NO: 110264 - RNA, 1410 nt, Artificial Sequence
  derived and/or modified CDS sequence (opt2) from neuraminidase__InfluenzaA__AAY27962
augaaccccaaccagaagaucaucaccaucggcuccgucucccucaccaucgccaccaucugcuuccucaugcagaucgccauccucgucaccaccgucacccuccacuucaagcaguacgagugcaacuccccccccaacaaccaggucaugcucugcgagcccaccaucaucgagcgcaacaucaccgagaucgucuaccucaccaacaccaccaucgagaaggagaucugccccaagcucgccgaguaccgcaacugguccaagccccagugcaacaucaccggcuucgcccccuucuccaaggacaacuccauccgccucuccgccggcggcgacaucugggucacccgcgagcccuacgucuccugcgaccccgacaagugcuaccaguucgcccucggccagggcaccacccucaacaacggccacuccaacgacaccguccacgaccgcacccccuaccgcacccuccucaugaacgagcucggcguccccuuccaccucggcacccgccaggucugcaucgccugguccuccuccuccugccacgacggcaaggccuggcuccacgucugcgucaccggcgacgacgagaacgccaccgccuccuucaucuacaacggccgccucgucgacuccaucggcuccugguccaagaagauccuccgcacccaggaguccgagugcgucugcaucaacggcaccugcaccgucgucaugaccgacggcuccgccuccggcaaggccgacaccaagauccucuucaucgaggagggcaagaucguccacaucuccacccucuccggcuccgcccagcacgucgaggagugcuccugcuacccccgcuaccccggcguccgcugcgucugccgcgacaacuggaagggcuccaaccgccccaucgucgacaucaacgucaaggacuacuccaucgucuccuccuacgucugcuccggccucgucggcgacaccccccgcaagaacgacuccuucuccuccucccacugccucgaccccaacaacgaggagggcggccacggcgucaagggcugggccuucgacgacggcaacaacgucuggaugggccgcaccaucuccgagaagcuccgcuccggcuacgagaccuucaaggucaucgagggcugguccaagcccaacuccaagcuccagaccaaccgccaggucaucgucgagcgcggcaaccgcuccggcuacuccggcaucuucuccgucgagggcaaguccugcaucaaccgcugcuucuacgucgagcucauccgcggccgcaaggaggagaccgaggucugguggaccuccaacuccaucgucgucuucugcggcaccuccggcaccuacggcaccggcuccuggcccgacggcgccgacaucaaccucaugcccaucuga

SEQ ID NO: 110265 - RNA, 1410 nt, Artificial Sequence
  derived and/or modified CDS sequence (opt2) from neuraminidase__InfluenzaA__AAY27997
augaaccccaaccagaagaucaucaccaucggcuccgucucccucaccaucgccaccaucugcuuccucaugcagaucgccauccucgucaccaccgucacccuccacuucaagcagcacgagugcaacuccccccccaacaaccaggucaugcucugcgagcccaccaucaucgagcgcaacaucaccgagaucgucuaccucaccaacaccaccaucgagaaggagaucugccccaagcucgccgaguaccgcaacugguccaagccccagugcaacaucaccggcuucgcccccuucuccaaggacaacuccauccgccucuccgccggcggcgacaucugggucacccgcgagcccuacgucuccugcgaccccgacaagugcuaccaguucgcccucggccagggcaccacccucaacaacggccacuccaacaacaccguccacgaccgcacccccuaccgcacccuccucaugaacgagaugggcguccccuuccaccucggcacccgccaggucugcaucgccugguccuccuccuccugccacgacggcaaggccuggcuccacgucugcgucaccggcgacgacaagaacgccaccgccuccuucaucuacaacggccgccucgucgacuccaucggcuccugguccaagaagauccuccgcacccaggaguccgagugcgucugcaucaacggcaccugcaccgucgucaugaccgacggcuccgccuccggcaaggccgacaccaagauccucuucaucgaggagggcaagaucguccacaucuccacccucuccggcuccgcccagcacgucgaggagugcuccugcuacccccgcuaccccggcguccgcugcgucugccgcgacaacuggaagggcuccaaccgccccaucgucgacaucaacgucaaggacuacuccaucgucuccuccuacgucugcuccggccucgucggcgacaccccccgcaagaacgacuccuucuccuccucccacugccucgaccccaacaacgaggagggcggccacggcgucaagggcugggccuucgacgacggcaacgacgucuggaugggccgcaccaucuccgagaagcuccgcuccggcuacgagaccuucaaggucaucgagggcugguccaagcccaacuccaagcuccagaucaaccgccaggucaucgucgagcgcggcaaccgcuccggcuacuccggcaucuucuccgucgagggcaaguccugcaucaaccgcugcuucuacgucgagcucauccgcggccgcaaggaggagaccgaggucugguggaccuccaacuccaucgucgucuucugcggcaccuccggcaccuacggcaccggcuccuggcccgacggcgccgacaucaaccucaugcccaucuga

SEQ ID NO: 110266 - RNA, 1410 nt, Artificial Sequence; identical to SEQ ID NO: 110171
  derived and/or modified CDS sequence (opt2) from neuraminidase__InfluenzaA__AAY28007

SEQ ID NO: 110267 - RNA, 1410 nt, Artificial Sequence; identical to SEQ ID NO: 110216
  derived and/or modified CDS sequence (opt2) from neuraminidase__InfluenzaA__AAY28017

SEQ ID NO: 110268 - RNA, 1410 nt, Artificial Sequence; identical to SEQ ID NO: 110171
  derived and/or modified CDS sequence (opt2) from neuraminidase__InfluenzaA__AAY28268

SEQ ID NO: 110269 - RNA, 1410 nt, Artificial Sequence
  derived and/or modified CDS sequence (opt2) from neuraminidase__InfluenzaA__AAY28278
augaaccccaaccagaagaucaucaccaucggcuccgucucccucaccaucgccaccaucugcuuccucaugcagaucgccauccucgucaccaccgucacccuccacuucaagcaguacgagugcaacuccccccccaacaaccaggucaugcucugcgagcccaccaucaucgagcgcaacaucaccgagaucgucuaccucaccaacaccaccaucgagaaggagaucugccccaagcucgccgaguaccgcaacugguccaagccccagugcaagaucaccggcuucgcccccuucuccaaggacaacuccauccgccucuccgccggcggcgacaucugggucacccgcgagcccuacgucuccugcgaccccgacaagugcuaccaguucgcccucggccagggcaccacccucaacaaccgccacuccaacgacaccguccacgaccgcacccccuaccgcacccuccucaugaacgagcucggcguccccuuccaccucggcaccaagcaggucugcaucgccugguccuccuccuccugccacgacggcaaggccuggcuccacgucugcgucaccggccacgacgagaacgccaccgccuccuucaucuacgacggccgccucgucgacuccaucggcuccugguccaagaagauccuccgcacccaggaguccgagugcgucugcaucaacggcaccugcaccgucgucaugaccgacggcuccgccuccggccgcgccgacaccaagauccucuucaucgaggagggcaagaucguccacaccuccaagcucuccggcuccgcccagcacgucgaggagugcuccugcuacccccgcuaccccggcguccgcugcgucugccgcgacaacuggaagggcuccaaccgccccaucgucgacaucaacgucaaggacuacuccaucgucuccuccuacgucugcuccggccucgucggcgacaccccccgcaagaacgacuccuccuccuccucccacugccucgaccccaacaacgaggagggcggccacggcgucaagggcugggccuucgacgacggcaacgacgucuggaugggccgcaccaucuccgagaagucccgcuccggcuacgagaccuucaaggucaucgagggcugguccaagcccaacuccaagcuccagaucaaccgccaggucaucgucgagcgcggcaaccgcuccggcuacuccggcaucuucuccgucgagggcaaguccugcaucaaccgcugcuucuacgucgagcucauccgcggccgcaagcccgagaccgaggucugguggaccuccaacuccaucgucgucuucugcggcaccuccggcaccuacggcaccggcuccuggcccgacggcgccgacaucaaccucaugcccaucuga

SEQ ID NO: 110270 - RNA, 1410 nt, Artificial Sequence; identical to SEQ ID NO: 110185
  derived and/or modified CDS sequence (opt2) from neuraminidase__InfluenzaA__AAY28288

SEQ ID NO: 110271 - RNA, 1410 nt, Artificial Sequence
  derived and/or modified CDS sequence (opt2) from neuraminidase__InfluenzaA__AAY28298
augaaccccaaccagaagaucaucaccaucggcuccgucucccucaccaucgccaccaucugcuuccucaugcagaucgccauccucgucaccaccgucacccuccacuucaagcagcacgagugcaacuccccccccaacaaccaggucaugcucugcgagcccaccaucaucgagcgcaacaucaccgagaucgucuaccucaccaacaccaccaucgagaaggagaucugccccaagcucgccgaguaccgcaacugguccaagccccagugcaacaucaccggcuucgcccccuucuccaaggacaacuccauccgccucuccgccggcggcgacaucugggucacccgcgagcccuacgucuccugcgaccccgacaagugcuaccaguucgcccucggccagggcaccacccucaacaacggccacuccaacgacaccguccacgaccgcacccccuaccgcacccuccucaugaacgagcucggcguccccuuccaccucggcacccgccaggucugcaucgccugguccuccuccuccugccacgacggcaaggccuggcuccacgucugcgucaccggcgacgacaagaacgccaccgccuccuucaucuacaacggccgccucgucgacuccaucggcuccugguccaagaagauccuccgcacccaggaguccgagugcgucugcaucaacggcaccugcaccgucgucaugaccgacggcuccgccuccggcaaggccgacaccaagauccucuucaucgaggagggcaagaucguccacaucuccacccucuccggcuccgcccagcacgucgaggagugcuccugcuacccccgcuaccccggcguccgcugcgucugccgcgacaacuggaagggcuccaaccgccccaucgucgacaucaacgucaaggacuacuccaucgucuccuccuacgucugcuccggccucgucggcgacaccccccgcaagaacgacuccuccuccuccucccacugccucgaccccaacaacgaggagggcggccacggcgucaagggcugggccuucgacgacggcaacgacgucuggaugggccgcaccaucuccgagaagcuccgcuccggcuacgagaccuucaaggucaucgagggcuggucccgccccaacuccaagcuccagaucaaccgccaggucaucgucgagcgcggcaaccgcuccggcuacuccggcaucuucuccgucgagggcaaguccugcaucaaccgcugcuucuacgucgagcucauccgcggccgcaaggaggagaccgaggucugguggaccuccaacuccaucgucgucuucugcggcaccuccggcaccuacggcaccggcuccuggcccgacggcgccgacaucaaccucaugcccaucuga

SEQ ID NO: 110272 - RNA, 1410 nt, Artificial Sequence; identical to SEQ ID NO: 110202
  derived and/or modified CDS sequence (opt2) from neuraminidase__InfluenzaA__AAY28308

SEQ ID NO: 110273 - RNA, 1410 nt, Artificial Sequence
  derived and/or modified CDS sequence (opt2) from neuraminidase__InfluenzaA__AAY28318
augaaccccaaccagaagaucaucaccaucggcuccgucucccucaccaucgccaccaucugcuuccucaugcagaucgccauccucgucaccaccgucacccuccacuucaagcaguacgagugcaacuccccccccaacaaccaggucaugcucugcgagcccaccaucaucgagcgcaacaucaccgagaucgucuaccucaccaacaccaccaucgagaaggagaucugccccaagcucgccgaguaccgcaacugguccaagccccagugcaacaucaccggcuucgcccccuucuccaaggacaacuccauccgccucuccgccggcggcgacaucugggucacccgcgagcccuacgucuccugcgaccccgacaagugcuaccaguucgcccucggccagggcaccacccucaacaacggccacuccaacgacaccguccacgaccgcacccccuaccgcacccuccucaugaacgagcucggcguccccuuccaccucggcacccgccaggucugcaucgccugguccuccuccuccugccacgacggcaaggccuggcuccacgucugcgucaccggcgacgacgagaacgccaccgccuccuucaucuacaacggccgccucgucgacuccaucggcuccugguccaagaagauccuccgcacccaggaguccgagugcgucugcaucaacggcaccugcgccgucgucaugaccgacggcuccgccuccggcaaggccgacaccaagauccucuucaucgaggagggcaagaucguccacaucuccacccucuccggcuccgcccagcacgucgaggagugcuccugcuacccccgcuaccccggcguccgcugcgucugccgcgacaacuggaagggcuccaaccgccccaucgucgacaucaacgucaaggacuacuccaucgucuccuccuacgucugcuccggccucgucggcgacaccccccgcaagaacgacuccuucuccuccucccacugccucgaccccaacaacgaggagggcggccacggcgucaagggcugggccuucgacgacggcaacgacgucuggaugggccgcaccaucuccgagaagcuccgcuccggcuacgagaccuucaaggucaucgagggcugguccaagcccaacuccaagcuccagaccaaccgccaggucaucgucgagcgcggcaaccgcuccggcuacuccggcaucuucuccgucgagggcaaguccugcaucaaccgcugcuucuacgucgagcucauccgcggccgcaaggaggagaccgaggucugguggaccuccaacuccaucgucgucuucugcggcaccuccggcaccuacggcaccggcuccuggcccgacggcgccgacaucaaccucaugcccaucuga

SEQ ID NO: 110274 - RNA, 1410 nt, Artificial Sequence
  derived and/or modified CDS sequence (opt2) from neuraminidase__InfluenzaA__AAY28338
augaaccccaaccagaagaucaucaccaucggcuccgucucccucaccaucgccaccaucugcuuccucaugcagaucgccauccucgucaccaccgucacccuccacuucaagcaguacgagugcaacuccccccccaacaaccaggucaugcucugcgagcccgccaucaucgagcgcaacaucaccgagaucgucuaccucaccaacaccaccaucgagaaggagauccgccccaagcucgccgaguaccgcaacugguccaagccccagugcaacaucaccggcuucgcccccuucuccaaggacaacuccauccgccucuccgccggcggcgacaucugggucacccgcgagcccuacgucuccugcgaccccgacaagugcuaccaguucgcccucggccagggcaccacccucaacaacggccacuccaacgacaccguccacgaccgcacccccuaccgcacccuccucaugaacgagcucggcguccccuuccaccucggcacccgccaggucugcaucgccugguccuccuccuccugccacgacggcaaggccuggcuccacgucugcgucaccggcgacgacgagaacgccaccgccuccuucaucuacaacggccgccucgucgacuccaucggcuccugguccaagaagauccuccgcacccaggaguccgagugcgucugcaucaacggcaccugcaccgucgucaugaccgacggcuccgccuccggcaaggccgacaccaagauccucuucaucgaggagggcaagaucgucaacaucuccacccucuccggcuccgcccagcacgucgaggagugcuccugcuacccccgcuaccccggcguccgcugcgucugccgcgacaacuggaagggcuccaaccgccccaucgucgacaucaacgucaaggacuacuccaucgucuccuccuacgucugcuccggccucgucggcgacaccccccgcaagaacgacuccuucuccuccucccacugccucgaccccaacaacgaggagggcggccacggcgucaagggcugggccuucgacgacggcaacgacgucuggaugggccgcaccaucuccgagaagcuccgcuccggcuacgagaccuucaaggucaucgagggcugguccaagcccaacuccaagcuccagaucaaccgccaggucaucgucgagcgcggcaaccgcuccggcuacuccggcaucuucuccgucgagggcaaguccugcaucaaccgcugcuucuacgucgagcucauccgcggccgcaaggaggagaccgaggucugguggaccuccaacuccaucgucgucuucugcggcaccuccggcaccuacggcaccggcuccuggcccgacggcgccgacaucaaccucaugcccaucuga

SEQ ID NO: 110275 - RNA, 1410 nt, Artificial Sequence; identical to SEQ ID NO: 110181
  derived and/or modified CDS sequence (opt2) from neuraminidase__InfluenzaA__AAY28348

SEQ ID NO: 110276 - RNA, 1410 nt, Artificial Sequence; identical to SEQ ID NO: 110097
  derived and/or modified CDS sequence (opt2) from neuraminidase__InfluenzaA__AAY28358

SEQ ID NO: 110277 - RNA, 1410 nt, Artificial Sequence; identical to SEQ ID NO: 110181
  derived and/or modified CDS sequence (opt2) from neuraminidase__InfluenzaA__AAY28388

SEQ ID NO: 110278 - RNA, 1410 nt, Artificial Sequence; identical to SEQ ID NO: 110186
  derived and/or modified CDS sequence (opt2) from neuraminidase__InfluenzaA__AAY28398

SEQ ID NO: 110279 - RNA, 1410 nt, Artificial Sequence; identical to SEQ ID NO: 110200
  derived and/or modified CDS sequence (opt2) from neuraminidase__InfluenzaA__AAY28408

SEQ ID NO: 110280 - RNA, 1410 nt, Artificial Sequence; identical to SEQ ID NO: 110173
  derived and/or modified CDS sequence (opt2) from neuraminidase__InfluenzaA__AAY28505

SEQ ID NO: 110281 - RNA, 1410 nt, Artificial Sequence
  derived and/or modified CDS sequence (opt2) from neuraminidase__InfluenzaA__AAY28524
augaaccccaaccagaagaucaucaccaucggcuccgucucccucaccaucgccaccaucugcuuccucaugcagaucgccauccucgucaccaccgucacccuccacuucaagcagcacgagugcaacuccccccccaacaaccaggucaugcucugcgagcccaccaucaucgagcgcaacaucaccgagaucgucuaccucaccaacaccaccaucgagaaggagaucugccccaagcucgccgaguaccgcaacugguccaagccccagugcaacaucaccggcuucgcccccuucuccaaggacaacuccauccgccucuccgccggcggcgacaucugggucacccgcgagcccuacgucuccugcgaccccgacaagugcuaccaguucgcccucggccagggcaccacccucaacaacggccacuccaacuacaccguccacgaccgcacccccuaccgcacccuccucaugaacgagcucggcguccccuuccaccucggcacccgccaggucugcaucgccugguccuccuccuccugccacgacggcaaggccuggcuccacgucugcgucaccggcgacgacaagaacgccaccgccuccuucaucuacaacggccgccucgucgacuccaucggcuccugguccaagaagauccuccgcacccaggaguccgagugcgucugcaucaacggcaccugcaccgucgucaugaccgacggcuccgccuccggcaaggccgacaccaagauccucuucaucgaggagggcaagaucguccacaucuccacccucuccggcuccgcccagcacgucgaggagugcuccugcuacccccgcuaccccggcguccgcugcgucugccgcgacaacuggaagggcuccaaccgccccaucgucgacaucaacgucaaggacuacuccaucgucuccuccuacgucugcuccggccucgucggcgacaccccccgcaagaacgacuccuccuccuccucccacugccucgaccccaacaacgaggagggcggccacggcgucaagggcugggccuucgacgacggcaacgacgucuggaugggccgcaccaucuccgagaagcuccgcuccggcuacgagaccuucaaggucaucgagggcugguccaagcccaacuccaagcuccagaucaaccgccaggucaucgucgagcgcggcaaccgcuccggcuacuccggcaucuucuccgucgagggcaaguccugcaucaaccgcugcuucuacgucgagcucauccgcggccgcaaggaggagaccgaggucugguggaccuccaacuccaucgucgucuucugcggcaccuccggcaccuacggcaccggcuccuggcccgacggcgccgacaucaaccucaugcccaucuga

SEQ ID NO: 110282 - RNA, 1410 nt, Artificial Sequence; identical to SEQ ID NO: 110171
  derived and/or modified CDS sequence (opt2) from neuraminidase__InfluenzaA__AAY28534

SEQ ID NO: 110283 - RNA, 1410 nt, Artificial Sequence
  derived and/or modified CDS sequence (opt2) from neuraminidase__InfluenzaA__AAY28544
augaaccccaaccagaagaucaucaccaucggcuccgucucccucaccaucgccaccaucugcuuccucaugcagaucgccauccucgucaccaccgucacccuccacuucaagcagcacgagugcaacuccccccccaacaaccaggucaugcucugcgagcccaccaucaucgagcgcaacaucaccgagaucgucuaccucaccaacaccaccaucgagaaggagaucugccccaagcucgccgaguaccgcaacugguccaagccccagugcaacaucaccggcuucgcccccuucuccaaggacaacuccauccgccucuccgccggcggcgacaucugggucacccgcgagcccuacgucuccugcgaccccaacaagugcuaccaguucgcccucggccagggcaccacccucaacaacggccacuccaacgacaccguccacgaccgcacccccuaccgcacccuccucaugaacgagcucggcguccccuuccaccucggcacccgccaggucugcaucgccugguccuccuccuccugccacgacggcaaggccuggcuccacgucugcgucaccggcgacgacaagaacgccaccgccuccuucaucuacaacggccgccucgucgacuccaucggcuccugguccaagaagauccuccgcacccaggaguccgagugcgucugcaucaacggcaccugcaccgucgucaugaccgacggcuccgccuccggcaaggccgacaccaagauccucuucaucgaggagggcaagaucguccacaucuccacccucuccggcuccgcccagcacgucgaggagugcuccugcuacccccgcuaccccggcguccgcugcgucugccgcgacaacuggaagggcuccaaccgccccaucgucgacaucaacgucaaggacuacuccaucgucuccuccuacgucugcuccggccucgucggcgacaccccccgcaagaacgacuccuucuccuccucccacugccucgaccccaacaacgaggagggcggccacggcgucaagggcugggccuucgacgacggcaacgacgucuggaugggccgcaccaucuccgagaagcuccgcuccggcuacgagaccuucaaggucaucgagggcugguccaagcccaacuccaagcuccagaucaaccgccaggucaucgucgagcgcggcaaccgcuccggcuacuccggcaucuucuccgucgagggcaaguccugcaucaaccgcugcuucuacgucgagcucauccgcggccgcaaggaggagaccgaggucugguggaccuccaacuccaucgucgucuucugcggcaccuccggcaccuacggcaccggcuccuggcccgacggcgccgacaucaaccucaugcccaucuga

SEQ ID NO: 110284 - RNA, 1410 nt, Artificial Sequence; identical to SEQ ID NO: 110097
  derived and/or modified CDS sequence (opt2) from neuraminidase__InfluenzaA__AAY28554

SEQ ID NO: 110285 - RNA, 1410 nt, Artificial Sequence
  derived and/or modified CDS sequence (opt2) from neuraminidase__InfluenzaA__AAY28564
augaaccccaaccagaagaucaucaccaucggcuccgucucccucaccaucgccaccaucugcuuccucaugcagaucgccauccucgucaccaccgucacccuccacuucaagcagcacgagugcaacuccccccccaacaaccaggucaugcucugcgagcccaccaucaucgagcgcaacaucaccgagaucgucuaccucaccaacaccaccaucgagaaggagaucugccccaagcucgccgaguaccgcaacugguccaagccccagugcaacaucaccggcuucgcccccuucuccaaggacaacuccauccgccucuccgccggcggcgacaucugggucacccgcgagcccuacgucuccugcgaccccgacaagugcuaccaguucgcccucggccagggcaccacccucaacaacggccacuccaacgacaccguccacgaccgcacccccuaccgcacccuccucaugaacgagcucggcguccccuuccaccucggcacccgccaggucugcaucgccugguccuccuccuccugccacgacggcaaggccuggcuccacgucugcgucaccggcgacgacaagaacgccaccgccuccuucaucuacaacggccgccucgucgacuccaucggcuccugguccaagaagauccuccgcacccaggaguccgagugcgucugcaucaacggcaccugcaccgucgucaugaccgacggcuccgccuccggcaaggccgacaccaagauccucuucaucgaggagggcaagaucguccacaucuccacccucuccggcuccgcccagcacgucgaggagugcuccugcuacccccgcuaccccggcguccgcugcgucugccgcgacaacuggaagggcuccaaccgccccaucgucgacaucaacgucaaggacuacuccaucgucuccuccuacgucugcuccggccucgucggcgacaccccccgcaagaacgacuccuccuccuccucccacugccucgaccccaacaacgaggagggcggccacggcgucaagggcugggccuucgacgacggcaacgacgucuggaugggccgcaccaucuccgagaagcuccgcuccggcuacgagaccuucaaggucaucgagggcuggucccgccccaacuccaagcuccagaucaaccgccaggucaucgucgagcgcggcaaccgcuccggcuacuccggcaucuucuccgucgaguccaaguccugcaucaaccgcugcuucuacgucgagcucauccgcggccgcaaggaggagaccgaggucugguggaccuccaacuccaucgucgucuucugcggcaccuccggcaccuacggcaccggcuccuggcccgacggcgccgacaucaaccucaugcccaucuga

SEQ ID NO: 110286 - RNA, 1410 nt, Artificial Sequence; identical to SEQ ID NO: 110171
  derived and/or modified CDS sequence (opt2) from neuraminidase__InfluenzaA__AAY28574

SEQ ID NO: 110287 - RNA, 1410 nt, Artificial Sequence; identical to SEQ ID NO: 110185
  derived and/or modified CDS sequence (opt2) from neuraminidase__InfluenzaA__AAY28584

SEQ ID NO: 110288 - RNA, 1410 nt, Artificial Sequence; identical to SEQ ID NO: 110097
  derived and/or modified CDS sequence (opt2) from neuraminidase__InfluenzaA__AAY28594

SEQ ID NO: 110289 - RNA, 1410 nt, Artificial Sequence
  derived and/or modified CDS sequence (opt2) from neuraminidase__InfluenzaA__AAY28611
augaaccccaaccagaagaucaucaccaucggcuccgucucccucaccaucgccaccaucugcuuccucaugcagaucgccauccucgucaccaccgucacccuccacuucaagcaguacgagugcaacuccccccccaacaaccaggucaugcucugcgagcccaccaucaucgagcgcaacaucaccgagaucgucuaccucaccaacaccaccaucgagaaggagaucugccccaagcucgccgaguaccgcaacugguccaagccccagugcaacaucaccggcuucgcccccuucuccaaggacaacuccauccgccucuccgccggcggcgacaucugggucacccgcgagcccuacgucuccugcgaccccgacaagugcuaccaguucgcccucggccagggcaccacccucaacaacggccacuccaacgacaccguccacgaccgcacccccuaccgcacccuccucaugaacgagcucggcguccccuuccaccucggcaccaagcaggucugcaucgccugguccuccuccuccugccacgacggcaaggccuggcuccacgucugcgucaccggcgacgacgagaacgccaccgccuccuucaucuacaacggccgccucgucgacuccaucggcuccugguccaagaagauccuccgcacccaggaguccgagugcgucugcaucaacggcaccugcaccgucgucaugaccgacggcuccgccuccggcaaggccgacaccaagauccucuucaucgaggagggcaagaucguccacaccuccucccucuccggcuccgcccagcacgucgaggagugcuccugcuacccccgcuaccccggcguccgcugcgucugccgcgacaacuggaagggcuccaaccgccccaucgucgacaucaacgucaaggacuacuccaucgucuccuccuacgucugcuccggccucgucggcgacaccccccgcaagaacgacuccuccuccuccucccacugccucgaccccaacaacgaggagggcggccacggcgucaagggcugggccuucgacgacggcaacgacgucuggaugggccgcaccaucuccgagaagcuccgcuccggcuacgagaccuucaaggucaucgagggcugguccaagcccaacuccaagcuccagaucaaccgccaggucaucgucgaccgcggcaaccgcuccggcuacuccggcaucuucuccgucgagggcaaguccugcaucaaccgcugcuucuacgucgagcucauccgcggccgcaagcaggagaccgagguccucuggaccuccaacuccaucgucgucuucugcggcaccuccggcaccuacggcaccggcuccuggcccgacggcgccgacaucaaccucaugcccaucuga

SEQ ID NO: 110290 - RNA, 1410 nt, Artificial Sequence; identical to SEQ ID NO: 110202
  derived and/or modified CDS sequence (opt2) from neuraminidase__InfluenzaA__AAY28651

SEQ ID NO: 110291 - RNA, 1410 nt, Artificial Sequence
  derived and/or modified CDS sequence (opt2) from neuraminidase__InfluenzaA__AAY44613
augaaccccaaccagaagaucaucaccaucggcuccgucucccucaccaucgccaccaucugcuuccucaugcagaucgccauccucgucaccaccgucacccuccacuucaagcagcacgagugcaacuccccccccaacaaccaggucaugcucugcgagcccaccaucaucgagcgcaacaucaccgagaucgucuaccucaccaacaccaccaucgagaaggagaucugccccaagaucgccgaguaccgcaacugguccaagccccagugcaacaucaccggcuucgcccccuucuccaaggacaacuccauccgccucuccgccggcggcgacaucugggucacccgcgagcccuacgucuccugcgaccccgacaagugcuaccaguucgcccucggccagggcaccacccucaacaacggccacuccaacgacaccguccacgaccgcacccccuaccgcacccuccucaugaacgagcucggcguccccuuccaccucggcacccgccaggucugcaucgccugguccuccuccuccugccacgacggcaaggccuggcuccacgucugcgucaccggcgacgacaagaacgccaccgccuccuucaucuacaacggccgccucgucgacuccaucggcuccugguccaagaagauccuccgcacccaggaguccgagugcgucugcaucaacggcaccugcaccgucgucaugaccgacggcuccgccuccggcaaggccgacaccaagauccucuucaucgaggagggcaagaucguccacaucuccacccucuccggcuccgcccagcacgucgaggagugcuccugcuacccccgcuaccccggcguccgcugcgucugccgcgacaacuggaagggcuccaaccgccccaucgucgacaucaacgucaaggacuacuccaucgucuccuccuacgucugcuccggccucgucggcgacaccccccgcaagaacgacuccuccuccuccucccacugccucgaccccaacaacgaggagggcggccacggcgucaagggcugggccuucgacgacggcaacgacgucuggaugggccgcaccaucuccgagaagcuccgcuccggcuacgagaccuucaaggucaucgagggcugguccaagcccaacuccaagcuccagaucaaccgccaggucaucgucgagcgcggcaaccgcuccggcuacuccggcaucuucuccgucgagggcaaguccugcaucaaccgcugcuucuacgucgagcucauccgcggccgcaaggaggagaccgaggucugguggaccuccaacuccaucgucgucuucugcggcaccuccggcaccuacggcaccggcuccuggcccgacggcgccgacaucaaccucaugcccaucuga

SEQ ID NO: 110292 - RNA, 1410 nt, Artificial Sequence; identical to SEQ ID NO: 110185
  derived and/or modified CDS sequence (opt2) from neuraminidase__InfluenzaA__AAY44624

SEQ ID NO: 110293 - RNA, 1410 nt, Artificial Sequence; identical to SEQ ID NO: 110207
  derived and/or modified CDS sequence (opt2) from neuraminidase__InfluenzaA__AAY44634

SEQ ID NO: 110294 - RNA, 1410 nt, Artificial Sequence; identical to SEQ ID NO: 110200
  derived and/or modified CDS sequence (opt2) from neuraminidase__InfluenzaA__AAY44644

SEQ ID NO: 110295 - RNA, 1410 nt, Artificial Sequence
  derived and/or modified CDS sequence (opt2) from neuraminidase__InfluenzaA__AAY44654
augaaccccaaccagaagaucaucaccaucggcuccgucucccucaccaucgccaccaucugcuuccucaugcagaucgccauccucgucaccaccgucacccuccacuucaagcaguacgagugcaacuccccccccaacaaccaggucaugcucugcgagcccaccaucaucgagcgcaacaucaccgagaucgucuaccucaccaacaccaccaucgagaaggagaucugccccaagcucgccgaguaccgcaacugguccaagccccagugcaacaucaccggcuucgcccccuucuccaaggacaacuccauccgccucuccgccggcggcgacaucugggucacccgcgagcccuacgucuccugcgaccccgacaagugcuaccaguucgcccucggccagggcaccacccucaacaacggccacuccaacgacaccguccacgaccgcacccccuaccgcacccuccucaugaacgagcucggcguccccuuccaccucggcaccaagcaggucugcaucgccugguccuccuccuccugccacgacggcaaggccuggcuccacgucugcgucaccggcgacgacgagaacgccaccgccuccuucaucuacaacggccgccucgucgacuccaucggcuccugguccaagaagauccuccgcacccaggaguccgagugcgucugcaucaacggcaccugcaccgucgucaugaccgacggcuccgccuccggcaaggccgacaccaagauccucuucaucgaggagggcaagaucguccacaccuccucccucuccggcuccgcccagcacgucgaggagugcuccugcuacccccgcuaccccggcguccgcugcgucugccgcgacaacuggaagggcuccaaccgccccaucgucgacaucaacgucaaggacuacuccaucgucuccuccuacgucugcuccggccucgucggcgacaccccccgcaagaacgacuccuccuccuccucccacugccucgaccccaacaacgaggagggcggccacggcgucaagggcugggccuucgacgacggcaacgacgucuggaugggccgcaccaucuccgagaagcuccgcuccggcuacgagaccuucaaggucaucgagggcugguccaagcccaacuccaagcuccagauccaccgccaggucaucgucgaccgcggcaaccgcuccggcuacuccggcaucuucuccgucgagggcaaguccugcaucaaccgcugcuucuacgucgagcucauccgcggccgcaagcaggagaccgagguccucuggaccuccaacuccaucgucgucuucugcggcaccuccggcaccuacggcaccggcuccuggcccgacggcgccgacaucaaccucaugcccaucuga

SEQ ID NO: 110296 - RNA, 1410 nt, Artificial Sequence
  derived and/or modified CDS sequence (opt2) from neuraminidase__InfluenzaA__AAY44758
augaaccccaaccagaagaucaucaccaucggcuccgucucccucaccaucgccaccaucugcuuccucaugcagaucgccauccucgucaccaccgucacccuccacuucaagcaguacgagugcaacucccccuccaacaaccaggucaugcucugcgagcccaccaucaucgagcgcaacaucaccgagaucgucuaccucaccaacaccaccaucgagaaggagaucugccccaagcucgccgaguaccgcaacugguccaagccccagugcaagaucaccggcuucgcccccuucuccaaggacaacuccauccgccucuccgccggcggcgacaucugggucacccgcgagcccuacgucuccugcgaccccgacaagugcuaccaguucgcccucggccagggcaccacccucaacaaccgccacuccaacgacaccguccacgaccgcacccccuaccgcacccuccucaugaacgagcucggcguccccuuccaccucggcaccaagcaggucugcaucgccugguccuccuccuccugccacgacggcaaggccuggcuccacgucugcgucaccggccacgacgagaacgccaccgccuccuucaucuacgacggccgccucgucgacuccaucggcuccugguccaagaagauccuccgcacccaggaguccgagugcgucugcaucaacggcaccugcaccgucgucaugaccgacggcuccgccuccggccgcgccgacaccaagauccucuucaucgaggagggcaagaucguccacaccuccaagcucuccggcuccgcccagcacgucgaggagugcuccugcuacccccgcuaccccggcguccgcugcgucugccgcgacaacuggaagggcuccaaccgccccaucgucgacaucaacgucaaggacuacuccaucgucuccuccuacgucugcuccggccucgucggcgacaccccccgcaagaacgacuccuccuccuccucccacugccucgaccccaacaacgaggagggcggccacggcgucaagggcugggccuucgacgacggcaacgacgucuggaugggccgcaccaucuccgagaagucccgcuccggcuacgagaccuucaaggucaucgagggcugguccaagcccaacuccaagcuccagaucaaccgccaggucaucgucgagcgcggcaaccgcuccggcuacuccggcaucuucuccgucgagggcaaguccugcaucaaccgcugcuucuacgucgagcucauccgcggccgcaagcccgagaccgaggucugguggaccuccaacuccaucgucgucuucugcggcaccuccggcaccuacggcaccggcuccuggcccgacggcgccgacaucaaccucaugcccaucuga

SEQ ID NO: 110297 - RNA, 1410 nt, Artificial Sequence; identical to SEQ ID NO: 110097
  derived and/or modified CDS sequence (opt2) from neuraminidase__InfluenzaA__AAY44778

SEQ ID NO: 110298 - RNA, 1410 nt, Artificial Sequence
  derived and/or modified CDS sequence (opt2) from neuraminidase__InfluenzaA__AAY44788
augaaccccaaccagaagaucaucaccaucggcuccgucucccucaccaucgccaccaucugcuuccucaugcagaucgccauccucgucaccaccgucacccuccacuucaagcaguacgagugcaacuccccccccaacaaccaggucaugcucugcgagcccaccaucaucgagcgcaacaucaccgagaucgucuaccucaccaacaccaccaucgagaaggagaucugccccaagcucgccgaguaccgcaacugguccaagccccagugcaacaucaccggcuucgcccccuucuccaaggacaacuccauccgccucuccgccggcggcgacaucugggucacccgcgagcccuacgucuccugcgaccccgacaagugcuaccaguucgcccucggccagggcaccacccucaacaacggccacuccaacgacaccguccacgaccgcacccccuaccgcacccuccucaugaacgagcucggcguccccuuccaccucggcaccaagcaggucugcaucgccugguccuccuccuccugccacgacggcaaggccuggcuccacgucugcgucaccggcgacgacgagaacgccaccgccuccuucaucuacaacggccgccucgucgacuccaucggcuccugguccaagaagauccuccgcacccaggaguccgagugcgucugcaucaacggcaccugcaccgucgucaugaccgacggcuccgccuccggcaaggccgacaccaagauccucuucaucgaggagggcaagaucguccacaccucccuccucuccggcuccgcccagcacgucgaggagugcuccugcuacccccgcuaccccggcguccgcugcgucugccgcgacaacuggaagggcuccaaccgccccaucgucgacaucaacgucaaggacuacuccaucgucuccuccuacgucugcuccggccucgucggcgacaccccccgcaagaacgacuccuccuccuccucccacugccucgaccccaacaacgaggagggcggccacggcgucaagggcugggccuucgacgacggcaacgacgucuggaugggccgcaccaucuccgagaagcuccgcuccggcuacgagaucuucaaggucaucgagggcugguccaagcccaacuccaagcuccagaucaaccgccaggucaucgucgaccgcggcaaccgcuccggcuacuccggcaucuucuccgucgagggcaaguccugcaucaaccgcugcuucuacgucgagcucauccgcggccgcaagcaggagaccgagguccucuggaccuccaacuccaucgucgucuucugcggcaccuccggcaccuacggcaccggcuccuggcccgacggcgccgacaucaaccucaugcccaucuga

SEQ ID NO: 110299 - RNA, 1410 nt, Artificial Sequence; identical to SEQ ID NO: 110173
  derived and/or modified CDS sequence (opt2) from neuraminidase__InfluenzaA__AAY44909

SEQ ID NO: 110300 - RNA, 1410 nt, Artificial Sequence; identical to SEQ ID NO: 110200
  derived and/or modified CDS sequence (opt2) from neuraminidase__InfluenzaA__AAY45649

SEQ ID NO: 110301 - RNA, 1410 nt, Artificial Sequence
  derived and/or modified CDS sequence (opt2) from neuraminidase__InfluenzaA__AAY46374
augaaccccaaccagaagaucaucaccaucggcuccgucucccucaccaucgccaccaucugcuuccucaugcagaucgccauccucgucaccaccgucacccuccacuucaagcaguacgagugcaacuccccccccaacaaccaggucaugcucugcgagcccaccaucaucgagcgcaacaucaccgagaucgucuaccucaccaacaccaccaucgagaaggagaucugccccaagcucgccgaguaccgcaacugguccaagccccagugcaagaucaccggcuucgcccccuucuccaaggacaacuccauccgccucuccgccggcggcgacaucugggucacccgcgagcccuacgucuccugcgaccccuacaagugcuaccaguucgcccucggccagggcaccacccucaacaaccgccacuccaacgacaccguccacgaccgcacccccuaccgcacccuccucaugaacgagcucggcguccccuuccaccucggcaccaagcaggucugcaucgccugguccuccuccuccugccacgacggcaaggccuggcuccacgucugcgucaccggccacgacgagaacgccaccgccuccuucaucuacgacggccgccucgucgacuccaucggcuccugguccaagaagauccuccgcacccaggaguccgagugcgucugcaucaacggcaccugcaccgucgucaugaccgacggcuccgccuccggccgcgccgacaccaagauccucuucaucgaggagggcaagaucguccacaccuccaagcucuccggcuccgcccagcacgucgaggagugcuccugcuacccccgcuaccccggcguccgcugcgucugccgcgacaacuggaagggcuccaaccgccccaucgucgacaucaacgucaaggacuacuccaucgucuccuccuacgucugcuccggccucgucggcgacaccccccgcaagaacgacuccuccuccuccucccacugccucgaccccaacaacgaggagggcggccacggcgucaagggcugggccuucgacgacggcaacgacgucuggaugggccgcaccaucuccgagaagucccgcuccggcuacgagaccuucaaggucaucgagggcugguccaagcccaacuccaagcuccagaucaaccgccaggucaucgucgagcgcggcaacauguccggcuacuccggcaucuucuccgucgagggcaaguccugcaucaaccgcugcuucuacgucgagcucauccgcggccgcaagcaggagaccgaggucugguggaccuccaacuccaucgucgucuucugcggcaccuccggcaccuacggcaccggcuccuggcccgacggcgccgacaucaaccucaugcccaucuga

SEQ ID NO: 110302 - RNA, 1410 nt, Artificial Sequence
  derived and/or modified CDS sequence (opt2) from neuraminidase__InfluenzaA__AAY46384
augaaccccaaccagaagaucaucaccaucggcuccgucucccucaccaucgccaccaucugcuuccucaugcagaucgccauccucgucaccaccgucacccuccacuucaagcagcacgagugcaacuccccccccaacaaccaggucaugcucugcgagcccaccaucaucgagcgcaacaucaccgagaucgucuaccucaccaacaccaccaucgagaaggagaucugccccaagcucgccgaguaccgcaacugguccaagccccagugcaacaucaccggcuucgcccccuucuccaaggacaacuccauccgccucuccgccggcggcgacaucugggucacccgcgagcccuacgucuccugcgaccccgacaagugcuaccaguucgcccucggccagggcaccacccucaacaacggccacuccaacgacgccguccacgaccgcacccccuaccgcacccuccucaugaacgagcucggcguccccuuccaccucggcacccgccaggucugcaucgccugguccuccuccuccugccacgacggcaaggccuggcuccacgucugcgucaccggcgacgacaagaacgccaccgccuccuucaucuacaacggccgccucgucgacuccaucggcuccugguccaagaagauccuccgcacccaggaguccgagugcgucugcaucaacggcaccugcaccgucgucaugaccgacggcuccgccuccggcaaggccgacaccaagauccucuucaucgaggagggcaagaucguccacaucuccacccucuccggcuccgcccagcacgucgaggagugcuccugcuacccccgcuaccccggcguccgcugcgucugccgcgacaacuggaagggcuccaaccgccccaucgucgacaucaacgucaaggacuacuccaucgucuccuccuacgucugcuccggccucgucggcgacaccccccgcaagaacgacuccuucuccuccucccacugccucgaccccaacaacgaggagggcggccacggcgucaagggcugggccuucgacgacggcaacgacgucuggaugggccgcaccaucuccgagaagcuccgcuccggcuacgagaccuucaaggucaucgagggcugguccaagcccaacuccaagcuccagaucaaccgccaggucaucgucgagcgcggcaaccgcuccggcuacuccggcaucuucuccgucgagggcaaguccugcaucaaccgcugcuucuacgucgagcucauccgcggccgcaaggaggagaccgaggucugguggaccuccaacuccaucgucgucuucugcggcaccuccggcaccuacggcaccggcuccuggcccgacggcgccgacaucaaccucaugcccaucuga

SEQ ID NO: 110303 - RNA, 1410 nt, Artificial Sequence
  derived and/or modified CDS sequence (opt2) from neuraminidase__InfluenzaA__AAY46394
augaaccccaaccagaagaucaucaccaucggcuccgucucccucaccaucgccaccaucugcuuccucaugcagaucgccauccucaucaccaccgucacccuccacuucaagcaguacgagugcaacuccccccccaacaaccaggucaugcucugcgagcccaccaucaucgagcgcaacaucaccgagaucgucuaccucaccaacaccaccaucgagaaggagaucugccccaagcucgccgaguaccgcaacugguccaagccccagugcaacaucaccggcuucgcccccuucuccaaggacaacuccauccgccucuccgccggcggcgacaucugggucacccgcgagcccuacgucuccugcgaccccgacaagugcuaccaguucgcccucggccagggcaccacccucaacaacggccacuccaacgacaccguccacgaccgcacccccuaccgcacccuccucaugaacgagcucggcguccccuuccaccucggcaccaagcaggucugcaucgccugguccuccuccuccugccacgacggcaaggccuggcuccacgucugcgucaccggcgacgacgagaacgccaccgccuccuucaucuacaacggccgccucgucgacuccaucggcuccugguccaagaagauccuccgcacccaggaguccgagugcgucugcaucaacggcaccugcaccgucgucaugaccgacggcuccgccuccggcaaggccgacaccaagauccucuucaucgaggagggcaagaucguccacaccuccucccucuccggcuccgcccagcacgucgaggagugcuccugcuacccccgcuaccccggcguccgcugcgucugccgcgacaacuggaagggcuccaaccgccccaucgucgacaucaacgucaaggacuacuccaucgucuccuccuacgucugcuccggccucgucggcgacaccccccgcaagaacgacuccuccuccuccucccacugccucgaccccaacaacgaggagggcggccacggcgucaagggcugggccuucgacgacggcaacgacgucuggaugggccgcaccaucuccgagaagcuccgcuccggcuacgagaccuucaaggucaucgagggcugguccaagcccaacuccaagcuccagaucaaccgccaggucaucgucgaccgcggcaaccgcuccggcuacuccggcaucuucuccgucgagggcaaguccugcaucaaccgcugcuucuacgucgagcucauccgcggccgcaagcaggagaccgagguccucuggaccuccaacuccaucgucgucuucugcggcaccuccggcaccuacggcaccggcuccuggcccgacggcgccgacaucgaccucaugcccaucuga

SEQ ID NO: 110304 - RNA, 1410 nt, Artificial Sequence
  derived and/or modified CDS sequence (opt2) from neuraminidase__InfluenzaA__AAY46419
augaaccccaaccagaagaucaucaccaucggcuccgucucccucaccaucgccaccaucugcuuccucaugcagaucgccauccucgucaccaccgucacccuccacuucaagcaguacgagugcaacucccuccccaacaaccaggucaugcucugcgagcccaccauccucgagcgcaacaucaccgagaucgucuaccucaccaacaccaccaucgagaaggagaucugccccaagcucgccgaguaccgcaacugguccaagccccagugcaagaucaccggcuucgcccccuucuccaaggacaacuccauccgccucuccgccggcggcgacaucugggucacccgcgagcccuacgucuccugcgaccccgacaagugcuaccaguucgcccucggccagggcaccacccucaacaaccgccacuccaacgacaccguccacgaccgcacccccuaccgcacccuccucaugaacgagcucggcguccccuuccaccucggcaccaagcaggucugcaucgccugguccuccuccuccugccacgacggcaaggccuggcuccacgucugcgucaccggccacaacgagaacgccaccgccuccuucaucuacggcggccgccucgucgacuccaucggcuccugguccaagaagauccuccgcacccaggaguccgagugcgucugcaucaacggcaccugcaccgucgucaugaccgacggcuccgccuccggccgcgccgacaccaagauccucuucaucgaggagggcaagaucauccacaucucccagcucuccggcuccgcccagcacgucgaggagugcuccugcuacccccgcuaccccggcguccgcugcgucugccgcgacaacuggaagggcuccaaccgccccaucgucgacaucaacgucaaggacuacuccaucgucuccuccuacgucugcuccggccucgucggcgacaccccccgcaagaacgacuccuccuccuccucccacugccucaaccccaacaacgaggagggcggccacggcgucaagggcugggccuucgacgacggcaacgacgucuggaugggccgcaccaucuccgagaaguuccgcuccggcuacgagaccuucaaggucaucgagggcugguccaagcccaacuccaagcuccagaucaaccgccaggucaucgucgaccgcgacaaccgcuccggcuacuccggcaucuucuccgucgagggcaaguccugcaucaaccgcugcuucuacgucgagcucauccgcggccgcaagcaggagaccgaggucugguggaccuccaacuccaucgucgucuucugcggcaccuccggcaccuacggcaccggcuccuggcccgacggcgccgacaucaaccucaugcccaucuga

SEQ ID NO: 110305 - RNA, 1410 nt, Artificial Sequence
  derived and/or modified CDS sequence (opt2) from neuraminidase__InfluenzaA__AAY47016
augaaccccaaccagaagaucaucaccaucggcuccgucucccucaccaucgccaccaucugcuuccucaugcagaucgccauccucgucaccaccgucacccuccacuucaagcaguacgagugcaacuccccccccaacaaccaggucaugcucugcgagcccaccaucaucgagcgcaacaucaccgagaucgucuaccucaccaacaccaccaucgagaaggagaucugccccaagcucgccgaguaccgcaacugguccaagccccagugcaacaucaccggcuucgcccccuucuccaaggacaacuccauccgccucuccgccggcggcgacaucugggucacccgcgagcccuacgucuccugcgaccccgacaagugcuaccaguucgcccucggccagggcaccacccucaacaacggccacuccaacgacaccguccacgaccgcacccccuaccgcacccuccucaugaacgagcucggcguccccuuccaccucggcacccgccaggucugcaucgccugguccuccuccuccugccacgacggcaaggccuggcuccacgucugcgucaccggcgacgacgagaacgccaccgccuccuucaucuacaacggccgccucgucgacuccaucggcuccugguccaagaagauccuccgcacccaggaguccgagugcgucugcaucaacggcaccugcaccgucgucaugaccgacggcuccgccuccggcaaggccgacaccaagauccucuucaucgaggagggcaagaucguccacaucuccacccucuccggcaacgcccagcacgucgaggagugcuccugcuacccccgcuaccccggcguccgcugcgucugccgcgacaacuggaagggcuccaaccgccccaucgucgacaucaacgucaaggacuacuccaucgucuccuccuacgucugcuccggccucgucggcgacaccccccgcaagaacgacuccuucuccuccucccacugccucgaccccaacuccgaggagggcggccacggcgucaagggcugggccuucgacgacggcaacgacgucuggaugggccgcaccaucuccgagaagcuccgcuccggcuacgagaccuucaaggucaucgagggcugguccaagcccaacuccaagcuccagaucaaccgccaggucaucgucgagcgcggcaaccgcuccggcuacuccggcaucuucuccgucgagggcaaguccugcaucaaccgcugcuucuacgucgagcucauccgcggccgcaaggaggagaccgaggucugguggaccuccaacuccaucgucgucuucugcggcaccuccggcaccuacggcaccggcuccuggcccgacggcgccgacaucaaccucaugcccaucuga

SEQ ID NO: 110306 - RNA, 1410 nt, Artificial Sequence
  derived and/or modified CDS sequence (opt2) from neuraminidase__InfluenzaA__AAY47055
augaaccccaaccagaagaucaucaccaucggcuccgucucccucaccaucgccaccaucugcuuccucaugcagaucgccauccucgucaccaccgucacccuccacuucaagcaguacgagugcaacuccccccccaacaaccaggucaugcucugcgagcccaccaucaucgagcgcaacaucaccgagaucgucuaccucaccaacaccaccaucgagaaggagaucugccccaagcucgccgaguaccgcaacugguccaagccccagugcaacaucaccggcuucgcccccuucuccaaggacaacuccauccgccucuccgccggcggcgacaucugggucacccgcgagcccuacgucuccugcgaccccgacaagugcuaccaguucgcccucggccagggcaccacccucaacaacggccacuccaacgacaccguccacgaccgcacccccuaccgcacccuccucaugaacgagcucggcguccccuuccaccucggcaccaagcaggucugcaucgccugguccuccuccuccugccacgacggcaaggccuggcuccacgucugcgucaccggcgacgacgagaacgccaccgccuccuucaucuacaacggccgccucgucgacuccaucggcuccugguccaagaagauccuccgcacccaggaguccgagugcgucugcaucaacggcaccugcaccgucgucaugaccgacggcuccgccuccggcaaggccgacaccaagauccucuucaucgaggagggcaagaucguccacaccucccuccucuccggcuccgcccagcacgucgaggagugcuccugcuacccccgcuaccccggcguccgcugcgucugccgcgacaacuggaagggcuccaaccgccccaucgucgacaucaacgucaaggacuacuccaucgucuccuccuacgucugcuccggccucgucggcgacaccccccgcaagaacgacuccuccuccuccucccacugccucgaccccaacaacgaggagggcggccacggcgucaagggcugggccuucgacgacggcaacgacgucuggaugggccgcaccaucuccgagaagcuccgcuccggcuacgagaccuucaaggucaucgagggcugguccaagcccaacuccaagcuccagaucaaccgccaggucaucgucgaccgcggcaaccgcuccggcuacuccggcaucuucuccgucgagggcaaguccugcaucaaccgcugcuucuacgucgagcucauccgcggccgcaagcaggagaccgagguccucuggaccuccaacuccaucgucgucuucugcggcaccuccggcaccuacggcaccggcuccuggcccgacggcgccgacaucaaccucuuccccaucuga

SEQ ID NO: 110307 - RNA, 1410 nt, Artificial Sequence
  derived and/or modified CDS sequence (opt2) from neuraminidase__InfluenzaA__AAY47078
augaaccccaaccagaagaucaucaccaucggcuccgucucccucaccaucgccaccaucugcuuccucaugcagaucgccauccucgucaccaccgucacccuccacuucaagcaguacgagugcaacuccccccccaacaaccaggucaugcucugcgagcccaccaucaucgagcgcaacaucaccgagaucgucuaccucaccaacaccaccaucgagaaggagaucugccccaagcucgccgaguaccgcaacugguccaagccccagugcaacaucaccggcuucgcccccuucuccaaggacaacuccauccgccucuccgccggcggcgacaucugggucacccgcgagcccuacgucuccugcgaccacgacaagugcuaccaguucgcccucggccagggcaccacccucaacaacggccacuccaacgacaccguccacgaccgcacccccuaccgcacccuccucaugaacgagcucggcguccccuuccaccucggcaccaagcaggucugcaucgccugguccuccuccuccugccacgacggcaaggccuggcuccacgucugcgucaccggcgacgacgagaacgccaccgccuccuucaucuacaacggccgccucgucgacuccaucggcuccugguccaagaagauccuccgcacccaggaguccgagugcgucugcaucaacggcaccugcaccgucgucaugaccgacggcuccgccuccggcaaggccgacaccaagauccucuucaucgaggagggcaagaucguccacaucuccacccucuccggcuccgcccagcacgucgaggagugcuccugcuacccccgcuaccccggcguccgcugcgucugccgcgacaacuggaagggcuccaaccgccccaucgucgacaucaacgucaaggacuacuccaucgucuccuccuacgucugcuccggccucgucggcgacaccccccgcaagaacgacuccuucuccuccucccacugccucgaccccaacaacgaggagggcggccacggcgucaagggcugggccuucgacgacggcaacgacgucuggaugggccgcaccaucuccgagaagcuccgcuccggcuacgagaccuucaaggucaucgagggcugguccaagcccaacuccaagcuccagaucaaccgccaggucaucgucgagcgcggcaaccgcuccggcuacuccggcaucuucuccgucgagggcaaguccugcaucaaccgcugcuucuacgucgagcucauccgcggccgcaaggaggagaccgaggucugguggaccuccaacuccaucgucgucuucugcggcaccuccggcaccuacggcaccggcuccuggcccgacggcgccgacaucaaccucaugcccaucuga

SEQ ID NO: 110308 - RNA, 1410 nt, Artificial Sequence
  derived and/or modified CDS sequence (opt2) from neuraminidase__InfluenzaA__AAY47088
augaaccccaaccagaagaucaucaccaucggcuccgucucccucaccaucuccaccaucugcuucuucaugcagaucgccauccucaucaccaccgucacccuccacuucaagcaguacgaguucaacuccccccccaacaaccaggucaugcucugcgagcccaccaucaucgagcgcaacaucaccgagaucgucuaccucaccaacaccaccaucgagaaggagaucugccccaagcucgccgaguaccgcaacugguccaagccccagugcaacaucaccggcuucgcccccuucuccaaggacaacuccauccgccucuccgccggcggcgacaucugggucacccgcgagcccuacgucuccugcgaccccgacaagugcuaccaguucgcccucggccagggcaccacccucaacaacguccacuccaacgacaccguccacgaccgcacccccuaccgcacccuccucaugaacgagcucggcguccccuuccaccucggcaccaagcaggucugcaucgccugguccuccuccuccugccacgacggcaaggccuggcuccacgucugcgucaccggcgacgacgagaacgccaccgccuccuucaucuacaacggccgccucgucgacuccaucgucuccugguccaagaagauccuccgcacccaggaguccgagugcgucugcaucaacggcaccugcaccgucgucaugaccgacggcuccgccuccggcaaggccgacaccaagauccucuucaucgaggagggcaagaucguccacaccuccacccucuccggcuccgcccagcacgucgaggagugcuccugcuacccccgcuaccccggcguccgcugcgucugccgcgacaacuggaagggcuccaaccgccccaucgucgacaucaacaucaaggaccacuccaucgucuccuccuacgucugcuccggccucgucggcgacaccccccgcaagaacgacuccuccuccuccucccacugccucgaccccaacaacgaggagggcggccacggcgucaagggcugggccuucgacgacggcaacgacgucuggaugggccgcaccaucuccgagaagcuccgcuccggcuacgagaccuucaaggucaucgagggcugguccaaccccaacuccaagcuccagaucaaccgccaggucaucgucgaccgcggcaaccgcuccggcuacuccggcaucuucuccgucgagggcaaguccugcaucaaccgcugcuucuacgucgagcucauccgcggccgcaagcaggagaccgagguccucuggaccuccaacuccaucgucgucuucugcggcaccuccggcaccuacggcaccggcuccuggcccgacggcgccgacaucaaccucaugcccaucuga

SEQ ID NO: 110309 - RNA, 1410 nt, Artificial Sequence; identical to SEQ ID NO: 110173
  derived and/or modified CDS sequence (opt2) from neuraminidase__InfluenzaA__AAY58319

SEQ ID NO: 110310 - RNA, 1392 nt, Artificial Sequence
  derived and/or modified CDS sequence (opt2) from neuraminidase__InfluenzaA__AAY59038
augaaccccaaccagaagaucaucaccaucggcuccgucucccucaccaucgccaccaucugcuuccucaugcagaucgccauccucgucaccaccgucacccuccacuucaagcaguacgagugcaacuccccccccaacaaccaggucaugcucugcgagcccaccaucaucgagcgcaacaucaccgagaucgucuaccucaccaacaccaccaucgagaaggagaucugccccaagcucgccgaguaccgcaacugguccaagccccagugcaacaucaccggcuucgcccccuucuccaaggacaacuccauccgccucuccgccggcggcgacaucugggucacccgcgagcccuacgucuccugcgaccccgacaagugcuaccaguucgcccucggccagggcaccaccaacgacaccguccacgaccgcacccccuaccgcacccuccucaugaacgagcucggcguccccuuccaccucggcaccaagcaggucugcaucgccugguccuccuccuccugccacgacggcaaggccuggcuccacgucugcgucaccggcgacgacgagaacgccaccgccuccuucaucuacaacggccgccucgucgacuccaucggcuccugguccaagaagauccuccgcacccaggaguccgagugcgucugcaucaacggcaccugcaccgucgucaugaccgacggcuccgccuccggcaaggccgacaccaagauccucuucaucgaggagggcaagaucguccacaccuccccccucuccggcuccgcccagcacgucgaggagugcuccugcuacccccgcuaccccggcguccgcugcgucugccgcgacaacuggaagggcuccaaccgccccaucgucgacaucaacgucaaggacuacuccaucgucuccuccuacgucugcuccggccucgucggcgacaccccccgcaagaacgacuccuccuccuccucccacugccucgaccccaacaacgaggagggcggccacggcgucaagggcugggccuucgacgacggcaacgacgucuggaugggccgcaccaucuccgagaagcuccgcuccggcuacgagaccuucaaggucaucgagggcugguccaagcccaacuccaagcuccagaucaaccgccaggucaucgucgaccgcggcaaccgcuccggcuacuccggcaucuucuccgucgagggcaaguccugcaucaaccgcugcuucuacgucgagcucauccgcggccgcaagcaggagaccgagguccucuggaccuccaacuccaucgucgucuucugcggcaccuccggcaccuacggcaccggcuccuggcccgacggcgccgacaucaaccucaugcccaucuga

SEQ ID NO: 110311 - RNA, 1410 nt, Artificial Sequence
  derived and/or modified CDS sequence (opt2) from neuraminidase__InfluenzaA__AAY64195
augaaccccaaccagaagaucaucaccaucggcuccgucucccucaccaucgccaccaucugcuuccucaugcagaucgccauccucgucaccaccgucacccuccacuucaagcaguacgagugcaacucccuccccaacaaccaggucaugcucugcgagcccaccaucaucgagcgcaacaucaccgagaucgucuaccucaccaacaccaccaucgagaaggagaucugccccaagcucgccgaguaccgcaacugguccaagccccagugcaagaucaccggcuucgcccccuucuccaaggacaacuccauccgccucuccgccggcggcgacaucugggucacccgcgagcccuacgucuccugcgaccccgacaagugcuaccaguucgcccucggccagggcaccacccucaacaaccgccacuccaacgacaccguccacgaccgcacccccuaccgcacccuccucaugaacgagcucggcguccccuuccaccucggcaccaagcaggucugcaucgccugguccuccuccuccugccacgacggcaaggccuggcuccacgucugcgucaccggccacgacgagaacgccaccgccuccuucaucuacgacggccgccucgucgacuccaucggcuccugguccaagaagauccuccgcacccaggaguccgagugcgucugcaucaacggcaccugcaccgucgucaugaccgacggcuccgccuccggccgcgccgacaccaagauccucuucaucgaggagggcaagaucauccacaucucccagcucuccggcuccgcccagcacgucgaggagugcuccugcuacccccgcuaccccggcguccgcugcgucugccgcgacaacuggaagggcuccaaccgccccaucgucgacaucaacgucaaggacuacuccaucgucuccuccuacgucugcuccggccucgucggcgacaccccccgcaagaacgacuccuccuccuccucccacugccucaaccccaacaacgaggagggcggccacggcgucaagggcugggccuucgacgacggcaacgacgucuggaugggccgcaccaucuccgagaaguuccgcuccggcuacgagaccuucaaggucaucgagggcugguccaagcccaacuccaagcuccagaucaaccgccaggucaucgucgaccgcgacaaccgcuccggcuacuccggcaucuucuccgucgagggcaaguccugcaucaaccgcugcuucuacgucgagcucauccgcggccgcaagcaggaggccgaggucugguggaccuccaacuccaucgucgucuucugcggcaccuccggcaccuacggcaccggcuccuggcccgacggcgccgacaucaaccucaugcccaucuga

SEQ ID NO: 110312 - RNA, 1410 nt, Artificial Sequence; identical to SEQ ID NO: 110171
  derived and/or modified CDS sequence (opt2) from neuraminidase__InfluenzaA__AAY64205

SEQ ID NO: 110313 - RNA, 1410 nt, Artificial Sequence; identical to SEQ ID NO: 110097
  derived and/or modified CDS sequence (opt2) from neuraminidase__InfluenzaA__AAY64215

SEQ ID NO: 110314 - RNA, 1410 nt, Artificial Sequence
  derived and/or modified CDS sequence (opt2) from neuraminidase__InfluenzaA__AAY64225
augaaccccaaccagaagaucaucaccaucggcuccgucucccucaccaucgccaccaucugcuuccucaugcagaucaccauccucgucaccaccgucacccuccacuucaagcaguacgagugcaaccccccccccaacaaccaggucaugcucugcgagcccaccaucaucgagcgcaacaucaccgagaucgucuaccucaccaacaccaccaucgagaaggagaucugccccaagcucgccgaguaccgcaacugguccaagccccagugcaacaucaccggcuucgcccccuucuccaaggacaacuccauccgccucuccgccggcggcgacaucugggucacccgcgagcccuacgucuccugcgaccccgacaagugcuaccaguucgcccucggccagggcaccacccucaacaacggccacuccaacgacaccguccacgaccgcacccccuaccgcacccuccucaugaacgagcucggcguccccuuccaccucggcacccgccaggucugcaucgccugguccuccuccuccugccacgacggcaaggccuggcuccacgucugcgucaccggcgacgacgagaacgccaccgccuccuucaucuacaacggccgccucgucgacuccaucggcuccugguccaagaagauccuccgcacccaggaguccgagugcgucugcaucaacggcaccugcaccgucgucaugaccgacggcuccgccuccggcaaggccgacaccaagauccucuucaucgaggagggcaagaucguccacaucuccacccucuccggcuccgcccagcacgucgaggagugcuccugcuacccccgcuaccccggcguccgcugcgucugccgcgacaacuggaagggcuccaaccgccccaucgucgacaucaacgucaaggacuacuccaucgucuccuccuacgucugcuccggccucgucggcgacaccccccgcaagaacgacuccuucuccuccucccacugccucgaccccaacaacgaggagggcggccacggcgucaagggcugggccuucgacgacggcaacgacgucuggaugggccgcaccaucuccgagaagcuccgcuccggcuacgagaccuucaaggucaucgagggcugguccaagcccaacuccaagcuccagaucaaccgccaggucaucgucgagcgcggcaaccgcuccggcuacuccggcaucuucuccgucgagggcaaguccugcaucaaccgcugcuucuacgucgagcucauccgcggccgcaaggaggagaacgaggucugguggaccuccaacuccaucgucgucuucugcggcaccuccggcaccuacggcaccggcuccuggcccgacggcgccgacaucaaccucaugcccaucuga

SEQ ID NO: 110315 - RNA, 1410 nt, Artificial Sequence
  derived and/or modified CDS sequence (opt2) from neuraminidase__InfluenzaA__AAY64245
augaaccccaaccagaagaucaucaccaucggcuccgucucccucaccaucgccaccaucugcuuccucaugcagaucgccauccucgucaccaccgucacccuccacuucaagcaguacgagugcaacucccuccccaacaaccaggucaugcucugcgagcccaccauccucgagcgcaacaucaccgagaucgucuaccucaccaacaccaccaucgagaaggagaucugccccaagcucgccgaguaccgcaacugguccaagccccagugcaagaucaccggcuucgcccccuucuccaaggacaacuccauccgccucuccgccggcggcgacaucugggucacccgcgagcccuacgucuccugcgaccccgacaagugcuaccaguucgcccucggccagggcaccacccucaacaaccgccacuccaacgacaccguccacgaccgcacccccuaccgcacccuccucaugaacgagcucggcguccccuuccaccucggcaccaagcaggucugcaucgccugguccuccuccuccugccacgacggcaaggccuggcuccacgucugcgucaccggccacgacgagaacgccaccgccuccuucaucuacggcggccgccucgucgacuccaucggcuccugguccaagaagauccuccgcacccaggaguccgagugcgucugcaucaacggcaccugcaccgucgucaugaccgacggcuccgccuccggccgcgccgacaccaagauccucuucaucgaggagggcaagaucauccacaucucccagcucuccggcuccgcccagcacgucgaggagugcuccugcuacccccgcuaccccggcguccgcugcgucugccgcgacaacuggaagggcuccaaccgccccaucgucgacaucaacgucaaggacuacuccaucgucuccuccuacgucugcuccggccucgucggcgacaccccccgcaagaacgacuccuccuccuccucccacugccucaaccccaacaacgaggagggcggccacggcgucaagggcugggccuucgacgacggcaacgacgucuggaugggccgcaccaucuccgagaaguuccgcuccggcuacgagaccuucaaggucaucgagggcugguccaagcccaacuccaagcuccagaucaaccgccaggucaucgucgaccgcgacaaccgcuccggcuacuccggcaucuucuccgucgagggcaaguccugcaucaaccgcugcuucuacgucgagcucauccgcggccgcaagcaggagaccgaggucugguggaccuccaacuccaucgucgucuucugcggcaccuccggcaccuacggcaccggcuccuggcccgacggcgccgacaucaaccucaugcccaucuga

SEQ ID NO: 110316 - RNA, 1410 nt, Artificial Sequence; identical to SEQ ID NO: 110097
  derived and/or modified CDS sequence (opt2) from neuraminidase__InfluenzaA__AAY64255

SEQ ID NO: 110317 - RNA, 1410 nt, Artificial Sequence; identical to SEQ ID NO: 110315
  derived and/or modified CDS sequence (opt2) from neuraminidase__InfluenzaA__AAY64265

SEQ ID NO: 110318 - RNA, 1410 nt, Artificial Sequence; identical to SEQ ID NO: 110315
  derived and/or modified CDS sequence (opt2) from neuraminidase__InfluenzaA__AAY64285

SEQ ID NO: 110319 - RNA, 1410 nt, Artificial Sequence
  derived and/or modified CDS sequence (opt2) from neuraminidase__InfluenzaA__AAY64295
augaaccccaaccagaagaucaucaccaucggcuccgucucccucaccaucgccaccaucugcuuccucaugcagaucgccauccucgucaccaccgucacccuccacuucaagcaguacgagugcaacuccccccccaacaaccaggucaugcucugcgagcccaccaucaucgagcgcaacaucaccgagaucgucuaccucaccaacaccaccaucgagaaggagaucugccccaagcucuccgaguaccgcaacugguccaagccccagugcaacaucaccggcuucgcccccuucuccaaggacaacuccauccgccucuccgccggcggcgacaucugggucacccgcgagcccuacgucuccugcgaccccgacaagugcuaccaguucgcccucggccagggcaccacccucaacaacggccacuccaacgacaccguccacgaccgcacccccuaccgcacccuccucaugaacgagcucggcguccccuuccaccucggcaccaagcaggucugcaucgccugguccuccuccuccugccacgacggcaaggccuggcuccacgucugcgucaccggcgacgacgagaacgccaccgccuccuucaucuacaacggccgccucgucgacuccaucggcuccugguccaagaagauccuccgcacccaggaguccgagugcgucugcaucaacggcaccugcaccgucgucaugaccgacggcuccgccuccggcaaggccgacaccaagauccucuucaucgaggagggcaagaucguccacaucuccacccucuccggcuccgcccagcacgucgaggagugcuccugcuacccccgcuaccccggcguccgcugcgucugccgcgacaacuggaagggcuccaaccgccccaucgucgacaucaacgucaaggaccacuccaucgucuccuccuacgucugcuccggccucgucggcgacaccccccgcaagaacgacuccuucuccuccucccacugccucgaccccaacaacgaggagggcggccacggcgucaagggcugggccuucgacgacggcaacgacgucuggaugggccgcaccaucuccgagaagcuccgcuccggcuacgagaccuucaaggucaucgagggcugguccaagcccaacuccaagcuccagaucaaccgccaggucaucgucgagcgcggcaaccgcuccggcuacuccggcaucuucuccgucgagggcaaguccugcaucaaccgcugcuucuacgucgagcucauccgcggccgcaaggaggagaccgaggucugguggaccuccaacuccaucgucgucuucugcggcaccuccggcaccuacggcaccggcuccuggcccgacggcgccgacaucaaccucaugcccaucuga

SEQ ID NO: 110320 - RNA, 1410 nt, Artificial Sequence
  derived and/or modified CDS sequence (opt2) from neuraminidase__InfluenzaA__AAY64305
augaaccccaaccagaagaucaucaccaucggcuccgucucccucaccaucgccaccaucugcuuccucaugcagaucgccauccucgucaccaccgucacccuccacuucaagcaguacgagugcaacuccccccccaacaaccaggucaugcucugcgagcccaccaucaucgagcgcaacaucaccgagaucgucuaccucaccaacaccaccaucgagaaggagaucugccccaagcucgccgaguaccgcaacugguccaagccccagugcaagaucaccggcuucgcccccuucuccaaggacaacuccauccgccucuccgccggcggcgacaucugggucacccgcgagcccuacgucuccugcgaccccgacaagugcuaccaguucgcccucggccagggcaccacccucaacaaccgccacuccaacgacaccguccacgaccgcacccccuaccgcacccuccucaugaacgagcucggcguccccuuccaccucggcaccaagcaggucugcaucgccugguccuccuccuccugccacgacggcaaggccuggcuccacgucugcgucaccggccacgacgagaacgccaccgccuccuucaucuacgacggccgccucgucgacuccaucggcuccugguccaagaagauccuccgcacccaggaguccgagugcgucugcaucaacggcaccugcaccgucgucaugaccgacggcuccgccuccggccgcgccgacaccaagauccucuucaucgaggagggcaagaucguccacaccuccaagcucuccggcuccgcccagcacgucgaggagugcuccugcuacccccgcuaccccggcguccgcugcgucugccgcgacaacuggaagggcuccaaccgccccaucgucgacaucaacgucaaggacuacuccaucgucuccuccuacgucugcuccggccucgucggcgacaccccccgcaagaacgacuccuccuccuccucccacugccucgaccccaacaacgaggagggcggccacggcgucaagggcugggccuucgacgacggcaacgacgucuggaugggccgcaccaucuccgagaagucccgcuccggcuacgagaccuucaaggucaucgagggcugguccaagcccaacuccaagcuccagaucaaccgccaggucaucgucgagcgcggcaacauguccggcuacuccggcaucuucuccgucgagggcaaguccugcaucaaccgcugcuucuacgucgagcucauccgcggccgcaagcaggagaccgaggucugguggaccuccaacuccaucgucgucuucugcggcaccuccggcaccuacggcaccggcuccuggcccgacggcgccgacaucaaccucaugcccaucuga

SEQ ID NO: 110321 - RNA, 1410 nt, Artificial Sequence; identical to SEQ ID NO: 110171
  derived and/or modified CDS sequence (opt2) from neuraminidase__InfluenzaA__AAY64335

SEQ ID NO: 110322 - RNA, 1410 nt, Artificial Sequence; identical to SEQ ID NO: 110186
  derived and/or modified CDS sequence (opt2) from neuraminidase__InfluenzaA__AAY64365

SEQ ID NO: 110323 - RNA, 1410 nt, Artificial Sequence
  derived and/or modified CDS sequence (opt2) from neuraminidase__InfluenzaA__AAY64385
augaaccccaaccagaagaucaucaccaucggcuccgucucccucaccaucgccaccaucugcuuccucaugcagaucgccauccucgucaccaccgucacccuccacuucaagcaguacgagugcaacucccuccccaacaaccaggucaugcucugcgagcccaccauccucgagcgcaacaucaccgagaucgucuaccucaccaacaccaccaucgagaaggagaucugccccaagcucgccgaguaccgcaacugguccaagccccagugcaagaucaccggcuucgcccccuucuccaaggacaacuccauccgccucuccgccggcggcgacaucugggucacccgcgagcccuacgucuccugcgaccccgacaagugcuaccaguucgcccucggccagggcaccacccucaacaaccgccacuccaacgacaccguccacgaccgcacccccuaccgcacccuccucaugaacgagcucggcguccccuuccaccucggcaccaagcaggucugcaucgccugguccuccuccuccugccacgacggcaaggccuggcuccacgucugcgucaccggccacgacgagaacgccaccgccuccuucaucuacggcggccgccucgucgacuccaucggcuccugguccaagaagauccuccgcacccaggaguccgagugcgucugcaucaacggcaccugcaccgucgucaugaccgacggcuccgccuccggccgcgccgacaccaagauccucuucaucgaggagggcaagaucauccacaucucccagcucuccggcuccgcccagcacgucgaggagugcuccugcuacccccgcuaccccggcguccgcugcgucugccgcgacaacuggaagggcuccaaccgccccaucgucgacaucaacgucaaggacuacuccaucgucuccuccuacgucugcuccggccucgucggcgacaccccccgcaagaacgacuccuccuccuccucccacugccucaaccccaacaacgaggagggcggccacggcgucaagggcugggccuucgacgacggcaacgacgucuggaugggccgcaccaucuccgagaagucccgcuccggcuacgagaccuucaaggucaucgagggcugguccaagcccaacuccaagcuccagaucaaccgccaggucaucgucgaccgcgacaaccgcuccggcuacuccggcaucuucuccgucgagggcaaguccugcaucaaccgcugcuucuacgucgagcucauccgcggccgcaagcaggagaccgaggucugguggaccuccaacuccaucgucgucuucugcggcaccuccggcaccuacggcaccggcuccuggcccgacggcgccgacaucaaccucaugcccaucuga

SEQ ID NO: 110324 - RNA, 1410 nt, Artificial Sequence
  derived and/or modified CDS sequence (opt2) from neuraminidase__InfluenzaA__AAY64395
augaaccccaaccagaagaucaucaccaucggcuccgucucccucaucaucuccaccaucugcuucuucaugcagaucgccauccucaucaccaccgucacccuccacuucaagcaguacgaguucaacuccccccccaacaaccaggucaugcucugcgagcccaccaucaucgagcgcaacaucaccgagaucgucuaccucaccaacaccaccaucgagaaggagaucugccccaagcucgccgaguaccgcaacugguccaagccccagugcgacaucaccggcuucgcccccuucuccaaggacaacuccauccgccucuccgccggcggcgacaucugggucacccgcgagcccuacgucuccugcgaccccgacaagugcuaccaguucgcccucggccagggcaccacccucaacaacguccacuccaacgacaccguccacgaccgcacccccuaccgcacccuccucaugaacgagcucggcguccccuuccaccucggcaccaagcaggucugcaucgccugguccuccuccuccugccacgacggcaaggccuggcuccacgucugcgucaccggcgacgacgagaacgccaccgccuccuucaucuacaacggccgccucgucgacuccaucgucuccugguccaagaagauccuccgcacccaggaguccgagugcgucugcaucaacggcaccugcaccgucgucaugaccgacggcuccgccuccggcaaggccgacaccaagauccucuucaucaaggagggcaagaucguccacaccuccacccucuccggcuccgcccagcacgucgaggagugcuccugcuacccccgcuaccccggcguccgcugcgucugccgcgacaacuggaagggcuccaaccgccccaucgucgacaucaacaucaaggacuacuccaucgucuccuccuacgucugcuccggccucgucggcgacaccccccgcaagaacgacuccuccuccuccucccacugccucgaccccaacaacgaggagggcggccacggcgucaagggcugggccuucgacgacggcaacgacgucuggaugggccgcaccaucuccgagaagcuccgcuccggcuacgagaccuucaaggucaucgagggcugguccaacuccaacuccaagcuccagaucaaccgccaggucaucgucgaccgcggcaaccgcuccggcuacuccggcaucuucuccgucgagggcaaguccugcaucaaccgcugcuucuacgucgagcucauccgcggccgcaaggaggagaccgagguccucuggaccuccaacuccaucgucgucuucugcggcaccuccggcaccuacggcaccggcuccuggcccgacggcgccgacaucaaccucaugcccaucuga

SEQ ID NO: 110325 - RNA, 1410 nt, Artificial Sequence; identical to SEQ ID NO: 110320
  derived and/or modified CDS sequence (opt2) from neuraminidase__InfluenzaA__AAY64405

SEQ ID NO: 110326 - RNA, 1410 nt, Artificial Sequence; identical to SEQ ID NO: 110315
  derived and/or modified CDS sequence (opt2) from neuraminidase__InfluenzaA__AAY98040

SEQ ID NO: 110327 - RNA, 1410 nt, Artificial Sequence; identical to SEQ ID NO: 110315
  derived and/or modified CDS sequence (opt2) from neuraminidase__InfluenzaA__AAY98050

SEQ ID NO: 110328 - RNA, 1410 nt, Artificial Sequence; identical to SEQ ID NO: 110207
  derived and/or modified CDS sequence (opt2) from neuraminidase__InfluenzaA__AAY98060

SEQ ID NO: 110329 - RNA, 1410 nt, Artificial Sequence
  derived and/or modified CDS sequence (opt2) from neuraminidase__InfluenzaA__AAY98070
augaaccccaaccagaagaucaucaccaucggcuccgucucccucaccaucgccaccaucugcuuccucaugcagaucgccauccucgucaccaccgucacccuccacuucaagcaguacgagugcaacuccccccccaacaaccaggucaugcucugcgagcccaccaucaucgagcgcaacaucaccgagaucgucuaccucaccaacaccaccaucgagaaggagaucugccccaagcucgccgaguaccgcaacugguccaagccccagugcaacaucaccggcuucgcccccuucuccaaggacaacuccauccgccucuccgccggcggcgacaucugggucacccgcgagcccuacgucuccugcgaccccgacaagugcuaccaguucgcccucggccagggcaccacccucaacaacggccacuccaacgacaccguccacgaccgcacccccuaccgcacccuccucaugaacgagcucggcguccccuuccaccucggcacccgccaggucugcaucgccugguccuccuccuccugccacgacggcaaggccuggcuccacgucugcgucaccggcgacgacgagaacgccaccgccuccuucaucuacaacggccgccucgucgacuccaucggcuccugguccaagaagauccuccgcacccaggaguccgagugcgucugcaucaacggcaccugcaccgucgucaugaccgacggcuccgccuccggcaaggccgacaccaagauccucuucaucgaggagggcaagaucguccacaucuccacccucuccggcuccgcccagcacgucgaggagugcuccugcuacccccgcuaccccggcguccgcugcgucugccgcgacaacuggaagggcuccaaccgccccaucgucgacaucaacgucaaggaccacuccaucgucuccuccuacgucugcuccggccucgucggcgacaccccccgcaagaacgacuccuucuccuccucccacugccucgaccccaacaacgaggagggcggccacggcgucaagggcugggccuucgacgacggcaacgacgucuggaugggccgcaccaucuccgagaagcuccgcuccggcuacgagaucuucaaggucaucgagggcugguccaagcccaacuccaagcuccagaucaaccgccaggucaucgucgagcgcggcaaccgcuccggcuacuccggcaucuucuccgucgagggcaaguccugcaucaaccgcugcuucuacgucgagcucauccgcggccgcaaggaggagaccgaggucugguggaccuccaacuccaucgucgucuucugcggcaccuccggcaccuacggcaccggcuccuggcccgacggcgccgacaucaaccucaugcccaucuga

SEQ ID NO: 110330 - RNA, 1410 nt, Artificial Sequence; identical to SEQ ID NO: 110215
  derived and/or modified CDS sequence (opt2) from neuraminidase__InfluenzaA__AAY98080

SEQ ID NO: 110331 - RNA, 1410 nt, Artificial Sequence
  derived and/or modified CDS sequence (opt2) from neuraminidase__InfluenzaA__AAY98090
augaaccccaaccagaagaucaucaccaucggcuccgucucccucaccaucgccaccaucugcuuccucaugcagaucgccauccucgucaccaccgucacccuccacuucaagcaguacgagugcaacucccuccccaacaaccaggucaugcucugcgagcccaccaucaucgagcgcaacaucaccgagaucgucuaccucaccaacaccaccaucgagaaggagaucugccccaagcucgccgaguaccgcaacugguccaagccccagugcaagaucaccggcuucgcccccuucuccaaggacaacuccauccgccucuccgccggcggcgacaucugggucacccgcgagcccuacgucuccugcgaccccgacaagugcuaccaguucgcccucggccagggcaccacccucaacaaccgccacuccaacgacaccguccacgaccgcacccccuaccgcacccuccucaugaacgagcucggcguccccuuccaccucggcaccaagcaggucugcaucgccugguccuccuccuccugccacgacggcaaggccuggcuccacgucugcgucaccggccacgacgagaacgccaccgccuccuucaucuacgacggccgccucgucgacuccaucggcuccugguccaagaagauccuccgcacccaggaguccgagugcgucugcaucaacggcaccugcaccgucgucaugaccgacggcuccgccuccggcaaggccgacaccaagauccucuucaucgaggagggcaagaucauccacaucucccagcucuccggcuccgcccagcacgucgaggagugcuccugcuacccccgcuaccccggcguccgcugcgucugccgcgacaacuggaagggcuccaaccgccccaucgucgacaucaacgucaaggacuacuccaucgucuccuccuacgucugcuccggccucgucggcgacaccccccgcaagaacgacuccuccuccuccucccacugccucaaccccaacaacgaggagggcggccacggcgucaagggcugggccuucgacgacggcaacgacgucuggaugggccgcaccaucuccgagaaguuccgcuccggcuacgagaccuucaaggucaucgagggcugguccaagcccaacuccaagcuccagaucaaccgccaggucaucgucgaccgcgacaaccgcuccggcuacuccggcaucuucuccgucgagggcaaguccugcaucaaccgcugcuucuacgucgagcucauccgcggccgcaagcaggagaccgaggucugguggaccuccaacuccaucgucgucuucugcggcaccuccggcaccuacggcaccggcuccuggcccgacggcgccgacaucaaccucaugcccaucuga

SEQ ID NO: 110332 - RNA, 1410 nt, Artificial Sequence; identical to SEQ ID NO: 110315
  derived and/or modified CDS sequence (opt2) from neuraminidase__InfluenzaA__AAY98100

SEQ ID NO: 110333 - RNA, 1410 nt, Artificial Sequence; identical to SEQ ID NO: 110315
  derived and/or modified CDS sequence (opt2) from neuraminidase__InfluenzaA__AAY98110

SEQ ID NO: 110334 - RNA, 1410 nt, Artificial Sequence; identical to SEQ ID NO: 110315
  derived and/or modified CDS sequence (opt2) from neuraminidase__InfluenzaA__AAY98120

SEQ ID NO: 110335 - RNA, 1410 nt, Artificial Sequence; identical to SEQ ID NO: 110315
  derived and/or modified CDS sequence (opt2) from neuraminidase__InfluenzaA__AAY98130

SEQ ID NO: 110336 - RNA, 1410 nt, Artificial Sequence; identical to SEQ ID NO: 110315
  derived and/or modified CDS sequence (opt2) from neuraminidase__InfluenzaA__AAY98150

SEQ ID NO: 110337 - RNA, 1410 nt, Artificial Sequence
  derived and/or modified CDS sequence (opt2) from neuraminidase__InfluenzaA__AAY98160
augaaccccaaccagaagaucaucaccaucggcuccgucucccucaccaucgccaccaucugcuuccucaugcagaucgccauccucgucaccaccgucacccuccacuucaagcaguacgagugcaacucccuccccaacaaccaggucaugcucugcgagcccaccauccucgagcgcaacaucaccgagaucgucuaccucaccaacaccaccaucgagaaggagaucugccccaagcucgccgaguaccgcaacugguccaagccccagugcaagaucaccggcuucgcccccuucuccaaggacaacuccauccgccucuccgccggcggcgacaucugggucacccgcgagcccuacgucuccugcgaccccgacaagugcuaccaguucgcccucggccagggcaccacccucaacaaccgccacuccaacgacaccguccacgaccgcacccccuaccgcacccuccucaugaacgagcucggcguccccuuccaccucggcaccaagcaggucugcaucgccugguccuccuccuccugccacgacggcaaggccuggcuccacgucugcgucaccggccacgacgagaacgccaccgccuccuucaucuacggcggccgccucgucgacuccaucggcuccugguccaagaagauccuccgcacccaggaguccgagugcgucugcaucaacggcaccugcaccgucgucaugaccgacggcuccgccuccggccgcgccgacaccaagauccucuucaucgaggagggcaagaucauccacaucucccagcucuccggcaacgcccagcacgucgaggagugcuccugcuacccccgcuaccccggcguccgcugcgucugccgcgacaacuggaagggcuccaaccgccccaucgucgacaucaacgucaaggacuacuccaucgucuccuccuacgucugcuccggccucgucggcgacaccccccgcaagaacgacuccuccuccuccuccaacugccucaaccccaacaacgaggagggcggccacggcgucaagggcugggccuucgacgacggcaacgacgucuggaugggccgcaccaucuccgagaaguuccgcuccggcuacgagaccuucaaggucaucgagggcugguccaagcccaacuccaagcuccagaucaaccgccaggucaucgucgaccgcgacaaccgcuccggcuacuccggcaucuucuccgucgagggcaaguccugcaucaaccgcugcuucuacgucgagcucauccgcggccgcaagcaggagaccgaggucugguggaccuccaacuccaucgucgucuucugcggcaccuccggcaccuacggcaccggcuccuggcccgacggcgccgacaucaaccucaugcccaucuga

SEQ ID NO: 110338 - RNA, 1410 nt, Artificial Sequence; identical to SEQ ID NO: 110315
  derived and/or modified CDS sequence (opt2) from neuraminidase__InfluenzaA__AAY98170

SEQ ID NO: 110339 - RNA, 1410 nt, Artificial Sequence; identical to SEQ ID NO: 110315
  derived and/or modified CDS sequence (opt2) from neuraminidase__InfluenzaA__AAY98180

SEQ ID NO: 110340 - RNA, 1410 nt, Artificial Sequence; identical to SEQ ID NO: 110315
  derived and/or modified CDS sequence (opt2) from neuraminidase__InfluenzaA__AAY98200

SEQ ID NO: 110341 - RNA, 1410 nt, Artificial Sequence; identical to SEQ ID NO: 110315
  derived and/or modified CDS sequence (opt2) from neuraminidase__InfluenzaA__AAY98210

SEQ ID NO: 110342 - RNA, 1410 nt, Artificial Sequence; identical to SEQ ID NO: 110320
  derived and/or modified CDS sequence (opt2) from neuraminidase__InfluenzaA__AAY98220

SEQ ID NO: 110343 - RNA, 1410 nt, Artificial Sequence; identical to SEQ ID NO: 110315
  derived and/or modified CDS sequence (opt2) from neuraminidase__InfluenzaA__AAY98230

SEQ ID NO: 110344 - RNA, 1410 nt, Artificial Sequence
  derived and/or modified CDS sequence (opt2) from neuraminidase__InfluenzaA__AAY98250
augaaccccaaccagaagaucaucaccaucggcuccgucucccucaccaucgccaccaucugcuuccucaugcagaucgccauccucgucaccaccgucacccuccacuucaagcaguacgagugcaacucccuccccaacaaccaggucaugcucugcgagcccaccauccucgagcgcaacaucaccgagaucgucuaccucaccaacaccaccaucgagaaggagaucugccccaagcucgccgaguaccgcaacugguccaagccccagugcaagaucaccggcuucgcccccuucuccaaggacaacuccauccgccucuccgccggcggcgacaucugggucacccgcgagcccuacgucuccugcgaccccgacaagugcuaccaguucgcccucggccagggcaccacccucaacaaccgccacuccaacgacaccguccacgaccgcacccccuaccgcacccuccucaugaacgagcucggcguccccuuccaccucggcaccaagcaggucugcaucgccugguccuccuccuccugccacgacggcaaggccuggcuccacgucugcgucaccggccacgacgagaacgccaccgccuccuucaucuacggcggccgccucgucgacuccaucggcuccugguccaagaagauccuccgcacccaggaguccgagugcgucugcaucaacggcaccugcaccgucgucaugaccgacggcuccgccuccggccgcgccgacaccaagauccucuucaucgaggagggcaagaucauccacaucucccagcucuccggcuccgcccagcacgucgaggagugcuccugcuacccccgcuaccccggcguccgcugcgucugccgcgacaacuggaagggcuccaaccgccccaucgucgacaucaacgucaaggacuacuccaucgucuccuccuacgucugcuccggccucgucggcgacaccccccgcaagaacgacuccuccuccuccucccacugccucaaccccaacaacgaggagggcggccacggcgucaagggcugggccuucgacgacggcaacgacgucuggaugggccgcaccaucuccgagaaguuccgcuccggcuacgagaccuucaaggucaucgagggcugguccaagcccaacuccaagcuccagaucaaccgccaggucaucgucgaccgcgacaaccgcuccggcuacuccggcaucuucuccgucgaggacaaguccugcaucaaccgcugcuucuacgucgagcucauccgcggccgcaagcaggagaccgaggucugguggaccuccaacuccaucgucgucuucugcggcaccuccggcaccuacggcaccggcuccuggcccgacggcgccgacaucaaccucaugcccaucuga

SEQ ID NO: 110345 - RNA, 1410 nt, Artificial Sequence; identical to SEQ ID NO: 110315
  derived and/or modified CDS sequence (opt2) from neuraminidase__InfluenzaA__AAY98322

SEQ ID NO: 110346 - RNA, 1410 nt, Artificial Sequence; identical to SEQ ID NO: 110320
  derived and/or modified CDS sequence (opt2) from neuraminidase__InfluenzaA__AAY98332

SEQ ID NO: 110347 - RNA, 1410 nt, Artificial Sequence; identical to SEQ ID NO: 110315
  derived and/or modified CDS sequence (opt2) from neuraminidase__InfluenzaA__AAY98342

SEQ ID NO: 110348 - RNA, 1410 nt, Artificial Sequence; identical to SEQ ID NO: 110315
  derived and/or modified CDS sequence (opt2) from neuraminidase__InfluenzaA__AAY98359

SEQ ID NO: 110349 - RNA, 1410 nt, Artificial Sequence; identical to SEQ ID NO: 110320
  derived and/or modified CDS sequence (opt2) from neuraminidase__InfluenzaA__AAY98369

SEQ ID NO: 110350 - RNA, 1410 nt, Artificial Sequence
  derived and/or modified CDS sequence (opt2) from neuraminidase__InfluenzaA__AAY98379
augaaccccaaccagaagaucaucaccaucggcuccgucucccucaccaucgccaccaucugcuuccucaugcagaucgccauccucgucaccaccgucacccuccacuucaagcaguacgagugcaacucccuccccaacaaccaggucaugcucugcgagcccaccaucaucgagcgcaacaucaccgagaucgucuaccucaccaacaccaccaucgagaaggagaucugccccaagcucgccgaguaccgcaacugguccaagccccagugcaagaucaccggcuucgcccccuucuccaaggacaacuccauccgccucuccgccggcggcgacaucugggucacccgcgagcccuacgucuccugcgaccccgacaagugcuaccaguucgcccucggccagggcaccacccucaacaaccgccacuccaacgacaccguccacgaccgcacccccuaccgcacccuccucaugaacgagcucggcguccccuuccaccucggcaccaagcaggucugcaucgccugguccuccuccuccugccacgacggcaaggccuggcuccacgucugcgucaccggccacgacgagaacgccaccgccuccuucaucuacggcggccgccucgucgacuccaucggcuccugguccaagaagauccuccgcacccaggaguccgagugcgucugcaucaacggcaccugcaccgucgucaugaccgacggcuccgccuccggccgcgccgacaccaagauccucuucaucgaggagggcaagaucauccacaucucccagcucuccggcuccgcccagcacgucgaggagugcuccugcuacccccgcuaccccggcguccgcugcgucugccgcgacaacuggaagggcuccaaccgccccaucgucgacaucaacgucaaggacuacuccaucgucuccuccuacgucugcuccggccucgucggcgacaccccccgcaagaacgacuccuccuccuccucccacugccucaaccccaacaacgaggagggcggccacggcgucaagggcugggccuucgacgacggcaacgacgucuggaugggccgcaccaucuccgagaaguuccgcuccggcuacgagaccuucaaggucaucgagggcugguccaagcccaacuccaagcuccagaucaaccgccaggucaucgucgaccgcaacaaccgcuccggcuacuccggcaucuucuccgucgagggcaaguccugcaucaaccgcugcuucuacgucgagcucauccgcggccgcaagcaggagaccgaggucugguggaccuccaacuccaucgucgucuucugcggcaccuccggcaccuacggcaccggcuccuggcccgacggcgccgacaucaaccucaugcccaucuga

SEQ ID NO: 110351 - RNA, 1410 nt, Artificial Sequence
  derived and/or modified CDS sequence (opt2) from neuraminidase__InfluenzaA__AAY98389
augaaccccaaccagaagaucaucaccaucggcuccgucucccucaccaucgccaccaucugcuuccucaugcagaucgccauccucgucaccaccgucacccuccacuucaagcaguacgagugcaacucccuccccaacaaccaggucaugcucugcgagcccaccaucaucgagcgcaacaucaccgagaucgucuaccucaccaacaccaccaucgagaaggagaucugccccaagcucgccgaguaccgcaacugguccaagccccagugcaagaucaccggcuucgcccccuucuccaaggacaacuccauccgccucuccgccggcggcgacaucugggucacccgcgagcccuacgucuccugcgaccccgacaagugcuaccaguucgcccucggccagggcaccacccucaacaaccgccacuccaacgacaccguccacgaccgcacccccuaccgcacccuccucaugaacgagcucggcguccccuuccaccucggcaccaagcaggucugcaucgccugguccuccuccuccugccacgacggcaaggccuggcuccacgucugcgucaccggccacgacgagaacgccaccgccuccuucaucuacggcggccgccucgucgacuccaucggcuccugguccaagaagauccuccgcacccaggaguccgagugcgucugcaucaacggcaccugcaccgucgucaugaccgacggcuccgccuccggccgcgccgacaccaagauccucuucaucgaggagggcaagaucauccacaucucccagcucuccggcuccgcccagcacgucgaggagugcuccugcuacccccgcuaccccggcguccgcugcgucugccgcgacaacuggaagggcuccaaccgccccaucgucgacaucaacgucaaggacuacuccaucgucuccuccuacgucugcuccggccucgucggcgacaccccccgcaagaacgacuccuccuccuccucccacugccucaaccccaacaacgaggagggcggccacggcgucaagggcugggccuucgacgacggcaacgacgucuggaugggccgcaccaucuccgagaaguuccgcuccggcuacgagaccuucaaggucaucgagggcugguccaagcccaacuccaagcuccagaucaaccgccaggucaucgucgaccgcgacaaccgcuccggcuacuccggcaucuucuccgucgagggcaaguccugcaucaaccgcugcuucuacgucgagcucauccgcggccgcaagcaggagaccgaggucugguggaccuccaacuccaucgucgucuucugcggcaccuccggcaccuacggcaccggcuccuggcccgacggcgccgacaucaaccucaugcccaucuga

SEQ ID NO: 110352 - RNA, 1410 nt, Artificial Sequence; identical to SEQ ID NO: 110315
  derived and/or modified CDS sequence (opt2) from neuraminidase__InfluenzaA__AAY98399

SEQ ID NO: 110353 - RNA, 1410 nt, Artificial Sequence; identical to SEQ ID NO: 110315
  derived and/or modified CDS sequence (opt2) from neuraminidase__InfluenzaA__AAY98409

SEQ ID NO: 110354 - RNA, 1410 nt, Artificial Sequence; identical to SEQ ID NO: 110315
  derived and/or modified CDS sequence (opt2) from neuraminidase__InfluenzaA__AAY98773

SEQ ID NO: 110355 - RNA, 1410 nt, Artificial Sequence
  derived and/or modified CDS sequence (opt2) from neuraminidase__InfluenzaA__AAZ32955
augaaccccaaccagaagaucaucaccaucggcuccgucucccucaccaucuccaccaucugcuucuucaugcagaucgccauccucaucaccaccgucacccuccacuucaagcaguacgaguucaacuccccccccaacaaccaggucaugcucugcgagcccaccaucaucgagcgcaacaucaccgagaucgucuaccucaccaacaccaccaucgagaaggagaucugccccaagcucgccgaguaccgcaacugguccaagccccagugcaacaucaccggcuucgcccccuucuccaaggacaacuccauccgccucuccgccggcggcgacaucugggucacccgcgagcccuacgucuccugcgaccccgacaagugcuaccaguucgcccucggccagggcaccacccucaacaacguccacuccaacgacaucguccacgagcgcacccccuaccgcacccuccucaugaacgagcucggcguccccuuccaccucggcaccaagcaggucugcaucgccugguccuccuccuccugccacgacggcaaggccuggcuccacgucugcgucaccggcgacgacgagaacgccaccgccuccuucaucuacaacggccgccucgucgacuccaucgucuccugguccaagaagauccuccgcacccaggaguccgagugcgucugcaucaacggcaccugcaccgucgucaugaccgacggcuccgccuccggcaaggccgacaccaagauccucuucaucgaggagggcaagaucguccacaccuccacccucuccggcuccgcccagcacgucgaggagugcuccugcuacccccgcuaccccggcguccgcugcgucugccgcgacaacuggaagggcuccaaccgccccaucgucgacaucaacaucaaggacuacuccaucgucuccuccuacgucugcuccggccucgucggcgacaccccccgcaagaacgacuccuccuccuccucccacugccucgaccccaacaacgaggagggcggccacggcgucaagggcugggccuucgacgacggcaacgacgucuggaugggccgcaccaucuccgagaagcuccgcuccggcuacgagaccuucaaggucaucgagggcugguccaaccccaacuccaagcuccagaucaaccgccaggucaucgucgaccgcggcaaccgcuccggcuacuccggcaucuucuccgucgagggcaaguccugcaucaaccgcugcuucuacgucgagcucauccgcggccgcaagcaggagaccgagguccucuggaccuccaacuccaucgucgucuucugcggcaccuccggcaccuacggcaccggcuccuggcccgacggcgccgacaucaaccucaugcccaucuga

SEQ ID NO: 110356 - RNA, 1344 nt, Artificial Sequence
  derived and/or modified CDS sequence (opt2) from neuraminidase__InfluenzaA__AAZ32957
augaaccccaaccagaagaucaucaccaucggcuccgucucccucaccaucuccaccaucugcuucuucaugcagaucgccauccucaucaccaccgucacccucaucgagcgcaacaucaccgagaucgucuaccucaccaacaccaccaucgagaaggagaucugccccaagcucgccgaguaccgcaacugguccaagccccagugcaacaucaccggcuucgcccccuucuccaaggacaacuccauccgccucuccgccggcggcgacaucugggucacccgcgagcccuacgucuccugcgaccccgacaagugcuaccaguucgcccucggccagggcaccacccucaacaacguccacuccaacgacaccguccacgaccgcacccccuaccgcacccuccucaugaacgagcucggcguccccuuccaccucggcaccaagcaggucugcaucgccugguccuccuccuccugccacgacggcaaggccuggcuccacgucugcgucaccggcgacgacgagaacgccaccgccuccuucaucuacaacggccgccucgucgacuccaucgucuccugguccaagaagauccuccgcacccaggaguccgagugcgucugcaucaacggcaccugcaccgucgucaugaccgacggcaacgccuccggcaaggccgacaccaagauccucuucaucgaggagggcaagaucguccacaccuccacccucuccggcuccgcccagcacgucgaggagugcuccugcuacccccgcuaccccggcguccgcugcgucugccgcgacaacuggaagggcuccaaccgccccaucgucgacaucaacaucaaggacuacuccaucgucuccuccuacgucugcuccggccucgucggcgacaccccccgcaagaacgacuccuccuccuccucccacugccucgaccccaacaacgaggagggcggccacggcgucaagggcugggccuucgacgacggcaacgacgucuggaugggccgcaccaucuccgagaagcuccgcuccggcuacgagaccuucaaggucaucgagggcugguccaaccccaacuccaagcuccagaucaaccgccaggucaucgucgaccgcggcaaccgcuccggcuacuccggcaucuucuccgucgagggcaaguccugcaucaaccgcugcuucuacgucgagcucauccgcggccgcaagcaggagaccgagguccucuggaccuccaacuccaucgucgucuucugcggcaccuccggcaccuacggcaccggcuccuggcccgacggcgccgacaucaaccucaugcccaucuga

SEQ ID NO: 110357 - RNA, 1344 nt, Artificial Sequence; identical to SEQ ID NO: 110356
  derived and/or modified CDS sequence (opt2) from neuraminidase__InfluenzaA__AAZ32958

SEQ ID NO: 110358 - RNA, 1344 nt, Artificial Sequence; identical to SEQ ID NO: 110356
  derived and/or modified CDS sequence (opt2) from neuraminidase__InfluenzaA__AAZ32959

SEQ ID NO: 110359 - RNA, 1410 nt, Artificial Sequence; identical to SEQ ID NO: 110320
  derived and/or modified CDS sequence (opt2) from neuraminidase__InfluenzaA__AAZ38465

SEQ ID NO: 110360 - RNA, 1410 nt, Artificial Sequence; identical to SEQ ID NO: 110320
  derived and/or modified CDS sequence (opt2) from neuraminidase__InfluenzaA__AAZ38476

SEQ ID NO: 110361 - RNA, 1410 nt, Artificial Sequence
  derived and/or modified CDS sequence (opt2) from neuraminidase__InfluenzaA__AAZ38487
augaaccccaaccagaagaucaucaccaucggcuccgucucccucaccaucgccaccaucugcuuccucaugcagaucgccauccucgucaccaccgucacccuccacuucaagcaguacgagugcaacucccuccccaacaaccaggucaugcucugcgagcccaccauccucgagcgcaacaucaccgagaucgucuaccucaccaacaccaccaucgagaaggagaucugccccaagcucgccgaguaccgcaacugguccaagccccagugcaagaucaccggcuucgcccccuucuccaaggacaacuccauccgccucuccgccggcggcgacaucugggucacccgcgagcccuacgucuccugcgaccccgacaagugcuaccaguucgcccucggccagggcaccacccucaacaaccgccacuccaacgacaccguccacgaccgcacccccuaccgcacccuccucaugaacgagcucggcguccccuuccaccucggcaccaagcaggucugcaucgccugguccuccuccuccugccacgacggcaaggccuggcuccacgucugcgucaccggccacgacgagaacgccaccgccuccuucaucuacggcggccgccucgucgacuccaucggcuccugguccaagaagauccuccgcacccaggaguccgagugcgucugcaucaacggcaccugcaccgucgucaugaccgacggcuccgccuccggccgcgccgacaccaagauccucuucaucgaggagggcaagaucauccacaucucccagcucuccggcuccgcccagcacgucgaggagugcuccugcuacccccgcuaccccggcguccgcugcgucugccgcgacaacuggaagggcuccaaccgccccaucgucgacaucaacgucaaggacuacuccaucgucuccuccuacgucugcuccggccucgucggcgacaccccccgcaagaacgacuccuccuccuccuccaacugccucaaccccaacaacgaggagggcggccacggcgucaagggcugggccuucgacgacggcaacgacgucuggaugggccgcaccaucuccgagaaguuccgcuccggcuacgagaccuucaaggucaucgagggcugguccaagcccaacuccaagcuccagaucaaccgccaggucaucgucgaccgcgacaaccgcuccggcuacuccggcaucuucuccgucgagggcaaguccugcaucaaccgcugcuucuacgucgagcucauccgcggccgcaagcaggagaccgaggucugguggaccuccaacuccaucgucgucuucugcggcaccuccggcaccuacggcaccggcuccuggcccgacggcgccgacaucaaccucaugcccaucuga

SEQ ID NO: 110362 - RNA, 1410 nt, Artificial Sequence
  derived and/or modified CDS sequence (opt2) from neuraminidase__InfluenzaA__AAZ38509
augaaccccaaccagaagaucaucaccaucggcuccgucucccucaccaucuccaccaucugcuucuucaugcagaucgccauccucaucaccaccgucacccuccacuucaagcaguacgaguucaacuccccccccaacaaccaggucaugcucugcgagcccaccaucaucgagcgcaacaucaccgagaucgucuaccucaccaacaccaccaucgagaaggagaucugccccaagcucgccgaguaccgcaacugguccaagccccagugcgacaucaccggcuucgcccccuucuccaaggacaacuccauccgccucuccgccggcggcgacaucugggucacccgcgagcccuacgucuccugcgaccccgacaagugcuaccaguucgcccucggccagggcaccacccucaacaacguccacuccaacgacaccguccacgaccgcacccccuaccgcacccuccucaugaacgagcucggcguccccuuccaccucggcaccaagcaggucugcaucgccugguccuccuccuccugccacgacggcaaggccuggcuccacgucugcgucaccggcgacgacaagaacgccaccgccuccuucaucuacaacggccgccucgucgacuccaucgucuccugguccaaggagauccuccgcacccaggaguccgagugcgucugcaucaacggcaccugcaccgucgucaugaccgacggcuccgccuccggcaaggccgacaccaagauccucuucaucgaggagggcaagaucguccacaccuccacccucuccggcuccgcccagcacgucgaggagugcuccugcuacccccgcuaccccggcguccgcugcgucugccgcgacaacuggaagggcuccaaccgccccaucgucgacaucaacaucaaggacuacuccaucgucuccuccuacgucugcuccggccucgucggcgacaccccccgcaagaacgacuccuccuccuccucccacugccucgaccccaacaacgaggagggcggccacggcgucaagggcugggccuucgacgacggcaacgacgucuggaugggccgcaccaucuccgagaagcuccgcuccggcuacgagaccuucaaggucaucgagggcugguccaacuccaacuccaagcuccagaucaaccgccaggucaucgucgaccgcggcaaccgcuccggcuacuccggcaucuucuccgucgagggcaaguccugcaucaaccgcugcuucuacgucgagcucauccgcggccgcaaggaggagaccgagguccucuggaccuccaacuccaucgucgucuucugcggcaccuccggcaccuacggcaccggcuccuggcccgacggcgccgacaucaaccucaugcccaucuga

SEQ ID NO: 110363 - RNA, 1410 nt, Artificial Sequence
  derived and/or modified CDS sequence (opt2) from neuraminidase__InfluenzaA__AAZ38586
augaaccccaaccagaagaucaucaccaucggcuccgucucccucaccaucuccaccaucugcuucuucaugcagaucgccauccucaucaccaccgucacccuccacuucaagcaguacgaguucaacuccccccccaacaaccaggucaugcucugcgagcccaccaucaucgagcgcaacaucaccgagaucgucuaccucaccaacaccaccaucgagaaggagaucugccccaagcucgccgaguaccgcaacugguccaagccccagugcgacaucaccggcuucgcccccuucuccaaggacaacuccauccgccucuccgccggcggcgacaucugggucacccgcgagcccuacgucuccugcgaccccgacaagugcuaccaguucgcccucggccagggcaccacccucaacaacguccacuccaacgacaccguccacgaccgcacccccuaccgcacccuccucaugaacgagcucggcguccccuuccaccucggcaccaagcaggucugcaucgccugguccuccuccuccugccacgacggcaaggccuggcuccacgucugcgucaccggcgacgacaagaacgccaccgccuccuucaucuacaacggccgccucgucgacuccaucgucuccugguccaaggagauccuccgcacccaggaguccgagugcgucugcaucaacggcaccugcaccgucgucaugaccgacggcuccgccuccggcaaggccgacaccaagauccucuucaucgaggagggcaagaucguccacaccuccacccucuccggcuccgcccagcacgucgaggagugcuccugcuacccccgcuaccccggcguccgcugcgucugccgcgacaacuggaagggcuccaaccgccccaucgucgacaucaacaucaaggacuacuccaucgucuccuccuacgucugcuccggccucgucggcgacaccccccgcaagaacgacuccuccuccuccucccacugccucgaccccaacaacgaggagggcggccacggcgucaagggcugggccuucgacgacggcaacgacgucuggaugggccgcaccaucuccgagaagcuccgcuccggcuacgagaccuucaaggucaucgagggcugguccaaccccaacuccaagcuccagaucaaccgccaggucaucgucgaccgcggcaaccgcuccggcuacuccggcaucuucuccgucgagggcaaguccugcaucaaccgcugcuucuacgucgagcucauccgcggccgcaaggaggagaccgagguccucuggaccuccaacuccaucgucgucuucugcggcaccuccggcaccuacggcaccggcuccuggcccgacggcgccgacaucaaccucaugcccaucuga

SEQ ID NO: 110364 - RNA, 1410 nt, Artificial Sequence; identical to SEQ ID NO: 110363
  derived and/or modified CDS sequence (opt2) from neuraminidase__InfluenzaA__AAZ38597

SEQ ID NO: 110365 - RNA, 1410 nt, Artificial Sequence
  derived and/or modified CDS sequence (opt2) from neuraminidase__InfluenzaA__AAZ38608
augaaccccaaccagaagaucaucaccaucggcuccgucucccucaccaucuccaccaucugcuucuucaugcagaucgccauccucaucaccaccgucacccuccacuucaagcaguacgaguucaacuccccccccaacaaccaggucaugcucugcgagcccaccaucaucgagcgcaacaucaccgagaucgucuaccucaccaacaccaccaucgagaaggagaugugccccaagcucgccgaguaccgcaacugguccaagccccagugcgacaucaccggcuucgcccccuucuccaaggacaacuccauccgccucuccgccggcggcgacaucugggucacccgcgagcccuacgucuccugcgaccccgacaagugcuaccaguucgcccucggccagggcaccacccucaacaacguccacuccaacgacaccguccacgaccgcacccccuaccgcacccuccucaugaacgagcucggcguccccuuccaccucggcaccaagcaggucugcaucgccugguccuccuccuccugccacgacggcaaggccuggcuccacgucugcgucaccggcgacgacaagaacgccaccgccuccuucaucuacaacggccgccucgucgacuccaucgucuccugguccaagaagauccuccgcacccaggaguccgagugcgucugcaucaacggcaccugcaccgucgucaugaccgacggcuccgccuccggcaaggccgacaccaagauccucuucaucgaggagggcaagaucauccacaccuccacccucuccggcuccgcccagcacgucgaggagugcuccugcuacccccgcuaccccggcguccgcugcgucugccgcgacaacuggaagggcuccaaccgccccaucgucgacaucaacaucaaggacuacuccaucgucuccuccuacgucugcuccggccucgucggcgacaccccccgcaagaacgacuccuccuccuccucccacugccucgaccccaacaacgaggagggcggccacggcgucaagggcugggccuucgacgacggcaacgacgucuggaugggccgcaccaucuccgagaagcuccgcuccggcuacgagaccuucaaggucaucgagggcugguccaagcccaacuccaagcuccagaucaaccgccaggucaucgucgaccgcggcaaccgcuccggcuacuccggcaucuucuccgucgagggcaaguccugcaucaaccgcugcuucuacgucgagcucauccgcggccgcaaggaggagaccgagguccucuggaccuccaacuccaucgucgucuucugcggcaccuccggcaccuacggcaccggcuccuggcccgacggcgccgacaccaaccucaugcccaucuga

SEQ ID NO: 110366 - RNA, 1410 nt, Artificial Sequence
  derived and/or modified CDS sequence (opt2) from neuraminidase__InfluenzaA__AAZ38619
augaaccccaaccagaagaucaucaccaucggcuccgucucccucaccaucuccaccaucugcuucuucaugcagaucgccauccucaucaccaccgucacccuccacuucaagcaguacgaguucaacuccccccccaacaaccaggucaugcucugcgagcccaccaucaucgagcgcaacaucaccgagaucgucuaccucaccaacaccaccaucgagaaggagaugugccccaagcucgccgaguaccgcaacugguccaagccccagugcgacaucaccggcuucgcccccuucuccaaggacaacuccauccgccucuccgccggcggcgacaucugggucacccgcgagcccuacgucuccugcgaccccgacaagugcuaccaguucgcccucggccagggcaccacccucaacaacguccacuccaacgacaccguccacgaccgcacccccuaccgcacccuccucaugaacgagcucggcguccccuuccaccucggcaccaagcaggucugcaucgccugguccuccuccuccugccacgacggcaaggccuggcuccacgucugcgucaccggcgacgacaagaacgccaccgccuccuucaucuacaacggccgccucgucgacuccaucgucuccugguccaagaagauccuccgcacccaggaguccgagugcgucugcaucaacggcaccugcaccgucgucaugaccgacggcuccgccuccggcaaggccgacaccaagauccucuucaucgaggagggcaagaucauccacaccuccacccucuccggcuccgcccagcacgucgaggagugcuccugcuacccccgcuaccccggcguccgcugcgucugccgcgacaacuggaagggcuccaaccgccccaucgucgacaucaacaucaaggacuacuccaucgucuccuccuacgucugcuccggccucgucggcgacaccccccgcaagaacgacuccuccuccuccucccacugccucgaccccaacaacgaggagggcggccacggcgucaagggcugggccuucgacgacggcaacgacgucuggaugggccgcaccaucuccgagaagcuccgcuccggcuacgagaccuucaaggucaucgagggcugguccaagcccaacuccaagcuccagaucaaccgccaggucaucgucgaccgcggcaaccgcuccggcuacuccggcaucuucuccgucgagggcaaguccugcaucaaccgcugcuucuacgucgagcucauccgcggccgcaaggaggagaccgagguccucuggaccuccaacuccaucgucgucuucugcggcaccuccggcaccuacggcaccggcuccuggcccgacggcgccgacaucaaccucaugcccaucuga

SEQ ID NO: 110367 - RNA, 1410 nt, Artificial Sequence; identical to SEQ ID NO: 110363
  derived and/or modified CDS sequence (opt2) from neuraminidase__InfluenzaA__AAZ38641

SEQ ID NO: 110368 - RNA, 1410 nt, Artificial Sequence; identical to SEQ ID NO: 110363
  derived and/or modified CDS sequence (opt2) from neuraminidase__InfluenzaA__AAZ38653

SEQ ID NO: 110369 - RNA, 1410 nt, Artificial Sequence; identical to SEQ ID NO: 110154
  derived and/or modified CDS sequence (opt2) from neuraminidase__InfluenzaA__AAZ43386

SEQ ID NO: 110370 - RNA, 1410 nt, Artificial Sequence
  derived and/or modified CDS sequence (opt2) from neuraminidase__InfluenzaA__AAZ43397
augaaccccaaccagaagaucaucaccaucggcuccgucucccucaccaucgccaccaucugcuuccucaugcagaucgccauccucgucaccaccgucacccuccacuucaagcagcacgagugcaacuccccccccaacaaccaggucaugcucugcgagcccaccaucaucgagcgcaacaucaccgagaucgucuaccucaccaacaccaccaucgagcgcgagaucugccccaagcucgccgaguaccgcaacugguccaagccccagugcaacaucaccggcuucgcccccuucuccaaggacaacuccauccgccucuccgccggcggcgacaucugggucacccgcgagcccuacgucuccugcgaccccgacaagugcuaccaguucgcccucggccagggcaccacccucaacaacggccacuccaacgacaccguccacgaccgcacccccuaccgcacccuccucaugaacgagcucggcguccccuuccaccucggcacccgccaggucugcaucgccugguccuccuccuccugccacgacggcaaggccuggcuccacgucugcgucaccggcgacgacaagaacgccaccgccuccuucaucuacaacggccgccucgucgacuccaucggcuccugguccaagaagauccuccgcacccaggaguccgagugcgucugcaucaacggcaccugcaccgucgucaugaccgacggcuccgccuccggcaaggccgacaccaagauccucuucaucgaggagggcaagaucguccacaucuccacccucuccggcuccgcccagcacgucgaggagugcuccugcuacccccgcuaccccggcguccgcugcgucugccgcgacaacuggaagggcuccaaccgccccaucgucgacaucaacgucaaggacuacuccaucgucuccuccuacgucugcuccggccucgucggcgacaccccccgcaagaacgacuccuccuccuccucccacugccucgaccccaacaacgaggagggcggccacggcgucaagggcugggccuucgacgacggcaacgacgucuggaugggccgcaccaucuccgagaagcuccgcuccggcuacgagaccuucaaggucaucgagggcugguccaagcccaacuccaagcuccagaccaaccgccaggucaucgucgagcgcggcaaccgcuccggcuacuccggcaucuucuccgucgagggcaaguccugcaucaaccgcugcuucuacgucgagcucauccgcggccgcaaggaggagaccgaggucugguggaccuccaacuccaucgucgucuucugcggcaccuccggcaccuacggcaccggcuccuggcccgacggcgccgacaucaaccucaugcccaucuga

SEQ ID NO: 110371 - RNA, 1410 nt, Artificial Sequence
  derived and/or modified CDS sequence (opt2) from neuraminidase__InfluenzaA__AAZ43408
augaaccccaaccagaagaucaucaccaucggcuccgucucccucaccaucgccaccaucugcuuccucaugcagaucgccauccucgucaccaccgucacccuccacuucaagcaguacgagugcaacuccccccccaacaaccaggucaugcucugcgagcccaccaugaucgagcgcaacaucaccgagaucgucuaccucaccaacaccaccaucgagaaggagaucugccccaagcucgccgaguaccgcaacugguccaagccccagugcaacaucaccggcuucgcccccuucuccaaggacaacuccauccgccucuccgccggcggcgacaucugggucacccgcgagcccuacgucuccugcgaccccgacaagugcuaccaguucgcccucggccagggcaccacccucaacaacggccacuccaacgacaccguccacgaccgcacccccuaccgcacccuccucaugaacgagcucggcguccccuuccaccucggcaccaagcaggucugcaucgccugguccuccuccuccugccacgacggcaaggccuggcuccacgucugcgucaccggcgacgacgagaacgccaccgccuccuucaucuacaacggccgccucgucgacuccaucggcuccugguccaagaagauccuccgcacccaggaguccgagugcgucugcaucaacggcaccugcaccgucgucaugaccgacggcuccgccuccggcaaggccgacaccaagauccucuucaucgaggagggcaagaucguccacaccuccucccucuccggcuccgcccagcacgucgaggagugcuccugcuacccccgcuaccccggcguccgcugcgucugccgcgacaacuggaagggcuccaaccgccccaucgucgacaucaacgucaaggacuacuccaucgucuccuccuacgucugcuccggccucgucggcgacaccccccgcaagaacgacuccuccuccuccucccacugccucgaccccaacaacgaggagggcggccacggcgucaagggcugggccuucgacgacggcaacgacgucuggaugggccgcaccaucuccgagaagcuccgcuccggcuacgagaccuucaaggucaucgagggcugguccaagcccaacuccaagcuccagaucaaccgccaggucaucgucgaccgcggcaaccgcuccggcuacuccggcaucuucuccgucgaguccaaguccugcaucaaccgcugcuucuacgucgagcucauccgcggccgcaagcaggagaccgagguccucuggaccuccaacuccaucgucgucuucugcggcaccuccggcaccuacggcaccggcuccuggcccgacggcgccgacaucaaccucaugcccaucuga

SEQ ID NO: 110372 - RNA, 1410 nt, Artificial Sequence
  derived and/or modified CDS sequence (opt2) from neuraminidase__InfluenzaA__AAZ74355
augaaccccaaccagaagaucaucaccaucggcuccgucucccucaccaucgccaccaucugcuuccucaugcagaucgccauccucgucaccaccgucacccuccacuucaagcagcacgagugcaacuccccccccaacaaccaggccaugcccugcgagcccgccaucaucgagcgcaacaccaccgagaccgucuaccucaccaacaccaccaucgagaaggagaucugccccaagcucgccgaguaccgcaacugguccaagccccagugcaacaucaccggcuucgcccccuucuccaaggacaacuccauccgccucuccgccggcggcgacaucugggucacccgcgagcccuacgucuccugcgaccccgacaagugcuaccaguucgcccucggccagggcaccacccucaacaacggccacuccaacgacaccguccacgaccgcacccccuaccgcacccuccucaugaacgagcucggcguccccuuccaccucggcacccgccaggucugcaucgccugguccuccuccuccugccacgacggcaaggccuggcuccacgucugcgucaccggcgacgacgagaacgccaccgccuccuucaucuacaacggccgccucgucgacuccaucggcuccugguccaagaagauccuccgcacccaggaguccgagugcgucugcaucaacggcaccugcaccgucgucaugaccgacggcuccgccuccggcaaggccgacaccaagauccucuucaucgaggagggcaagaucguccacaucuccacccucuccggcuccgcccagcacgucgaggagugcuccugcuacccccgcuaccccggcguccgcugcgucugccgcgacaacuggaagggcuccaaccgccccaucgucgacaucaacgucaaggacuacuccaucgucuccuccuacgucugcuccggccucgucggcgacaccccccgcaagaacgacuccuucuccuccucccacugccucgaccccaacaacgaggagggcggccacggcgucaagggcugggccuucgacgacggcaacgacgucuggaugggccgcaccaucuccgagaagcuccgcuccggcuacgagaccuucaaggucaucgagggcugguccaagcccaacuccaagcuccagaucaaccgccaggucaucgucgagcgcggcaaccgcuccggcuacuccggcaucuucuccgucgagggcaaguccugcaucaaccgcugcuucuacgucgagcucauccgcggccgcaaggaggagaccgaggucugguggaccuccaacuccaucgucgucuucugcggcaccuccggcaccuacggcaccggcuccuggcccgacggcgccgacaucaaccucaugcccaucuga

SEQ ID NO: 110373 - RNA, 1410 nt, Artificial Sequence
  derived and/or modified CDS sequence (opt2) from neuraminidase__InfluenzaA__AAZ74366
augaaccccaaccagaagaucaucaccaucggcuccgucucccucaccaucgccaccaucugcuuccucaugcagaucgccauccucgucaccaccgucacccuccacuucaagcaguacgagugcaacucccuccccaacaaccaggucaugcucugcgagcccaccaucaucgagcgcaacaucaccgagaucgucuaccucaccaacaccaccaucgagaaggagaucugccccaagcucgccgaguaccgcaacugguccaagccccagugcaagaucaccggcuucgcccccuucuccaaggacaacuccauccgccucuccgccggcggcgacaucugggucacccgcgagcccuacgucuccugcgaccccgacaagugcuaccaguucgcccucggccagggcaccacccucaacaaccgccacuccaacgacaccguccacgaccgcacccccuaccgcacccuccucaugaacgagcucggcguccccuuccaccucggcaccaagcaggucugcaucgccugguccuccuccuccugccacgacggcaaggccuggcuccacgucugcgucaccggccacgacgagaacgccaccgccuccuucaucuacgacggccgccucgucgacuccaucggcuccugguccaagaagauccuccgcacccaggaguccgagugcgucugcaucaacggcaccugcaccgucgucaugaccgacggcuccgccuccggcaaggccgacaccaagauccucuucaucgaggagggcaagaucauccacaucucccagcucuccggcuccgcccagcacgucgaggagugcuccugcuacccccgcuaccccggcguccgcugcgucugccgcgacaacuggaagggcuccaaccgccccaucgucgacaucaacgucaaggacuacuccaucgucuccuccuacgucugcuccggccucgucggcgacaccccccgcaagaacgacuccuccuccuccucccacugccucaaccccaacaacgaggagggcggccacggcgucaagggcugggccuucgacgacggcaacgacgucuggaugggccgcaccaucuccgagaaguuccgcuccggcuacgagaccuucaaggucaucgagggcugguccaagcccaacuccaagcuccagaucaaccgccaggucaucgucgacaaggacaaccgcuccggcuacuccggcaucuucuccgucgagggcaaguccugcaucaaccgcugcuucuacgucgagcucauccgcggccgcaagcaggagaccgaggucugguggaccuccaacuccaucgucgucuucugcggcaccuccggcaccuacggcaccggcuccuggcccgacggcgccgacaucaaccucaugcccaucuga

SEQ ID NO: 110374 - RNA, 1410 nt, Artificial Sequence
  derived and/or modified CDS sequence (opt2) from neuraminidase__InfluenzaA__AAZ74377
augaaccccaaccagaagaucaucaccaucggcuccgucucccucaccaucgccaccaucugcuuccucacccagaucgccauccucgucaccaccgucacccuccacuucaagcaguacgagugcaacuccccccccaacaaccaggucaugcucugcgagcccaccaucaucgagcgcaacaucaccgagaucgucuaccucaccaacaccaccaucgagaaggagaucugccccaagcucgccgaguaccgcaacugguccaagccccagugcaacaucaccggcuucgcccccuucuccaaggacaacuccauccgccucuccgccggcggcgacaucugggucacccgcgagcccuacgucuccugcgaccccgacaagugcuaccaguucgcccucggccagggcaccacccucaacaacggccacuccaacgacaccguccacgaccgcacccccuaccgcacccuccucaugaacgagcucggcguccccuuccaccucggcaccaagcaggucugcaucgccugguccuccuccuccugccacgacggcaaggccuggcuccacgucugcgucaccggcgacgacaagaacgccaccgccuccuucaucuacaacggccgccucgucgacuccaucggcuccugguccaagaagauccuccgcacccaggaguccgagugcgucugcaucaacggcaccugcaccgucgucaugaccgacggcuccgccuccggcaaggccgacaccaagauccucuucaucgaggagggcaagaucguccacaccucccuccucuccggcuccgcccagcacgucgaggagugcuccugcuacccccgcuaccccggcguccgcugcgucugccgcgacaacuggaagggcuccaaccgccccaucgucgacaucaacgucaaggacuacuccaucgucuccuccuacgucugcuccggccucgucggcgacaccccccgcaagaacgacuccuccuccuccucccacugccucgaccccaacaacgaggagggcggccacggcgucaagggcugggccuucgacgacggcaacgacgucuggaugggccgcaccauccgcgagaagcuccgcuccggcuacgagaccuucaaggucaucgagggcugguccaagcccaacuccaagcuccagaucaaccgccaggucaucgucgaccgcgacaaccgcuccggcuacuccggcaucuucuccgucgagggcaaguccugcaucaaccgcugcuucuacgucgagcucauccgcggccgcaaccaggagaccgagguccucuggaccuccaacuccaucgucgucuucugcggcaccuccggcaccuacggcaccggcuccuggcccgacggcgccgacaucaaccucaugcccaucuga

SEQ ID NO: 110375 - RNA, 1410 nt, Artificial Sequence
  derived and/or modified CDS sequence (opt2) from neuraminidase__InfluenzaA__AAZ74400
augaaccccaaccagaagaucaucaccaucggcuccgucucccucaccaucgccaccaucugcuuccucaugcagaucgccauccucgucaccaccgucacccuccacuucaagcaguacgagugcaacuccccccccaacaaccaggucaugcucugcgagcccaccaucaucgagcgcaacaucaccgagaucgucuaccucaccaacaccaccaucgagaaggagaucugccccaagcucgccgaguaccgcaacugguccaagccccagugcaagaucaccggcuucgcccccuucuccaaggacaacuccauccgccucuccgccggcggcgacaucugggucacccgcgagcccuacgucuccugcgaccccgacaagugcuaccaguucgcccucggccagggcaccacccucaacaaccgccacuccaacgacaccguccacgaccgcacccccuaccgcacccuccucaugaacgagcucggcguccccuuccaccucggcaccaagcaggucugcaucgccugguccuccuccuccugccacgacggcaaggccuggcuccacgucugcgucaccggccacgacgagaacgccaccgccucccucaucuacgacggccgccucgucgacuccaucggcuccugguccaagaagauccuccgcacccaggaguccgagugcgucugcaucaacggcaccugcaccgucgucaugaccgacggcuccgccuccggccgcgccgacaccaagauccucuucaucgaggagggcaagaucguccacaccuccaagcucuccggcuccgcccagcacgucgaggagugcuccugcuacccccgcuaccccggcguccgcugcgucugccgcgacaacuggaagggcuccaaccgccccaucgucgacaucaacgucaaggacuacuccaucgucuccuccuacgucugcuccggccucgucggcgacaccccccgcaagaacgacuccuccuccuccucccacugccucgaccccaacaacgaggagggcggccacggcgucaagggcugggccuucgacgacggcaacgacgucuggaugggccgcaccaucuccgagaagucccgcuccggcuacgagaccuucaaggucaucgagggcugguccaagcccaacuccaagcuccagaucaaccgccaggucaucgucgagcgcggcaacauguccggcuacuccggcaucuucuccgucgagggcaaguccugcaucaaccgcugcuucuacgucgagcucauccgcggccgcaagcaggagaccgaggucugguggaccuccaacuccaucgucgucuucugcggcaccuccggcaccuacggcaccggcuccuggcccgacggcgccgacaucaaccucaugcccaucuga

SEQ ID NO: 110376 - RNA, 1410 nt, Artificial Sequence; identical to SEQ ID NO: 110315
  derived and/or modified CDS sequence (opt2) from neuraminidase__InfluenzaA__AAZ74411

SEQ ID NO: 110377 - RNA, 1410 nt, Artificial Sequence
  derived and/or modified CDS sequence (opt2) from neuraminidase__InfluenzaA__AAZ74422
augaaccccaaccagaagaucaucaccaucggcuccgucucccucaccaucuccaccaucugcuucuucaugcagaucgccauccucaucaccaccgucacccuccacuucaagcaguacgaguucaacuccccccccaacaaccaggucaugcucugcgagcccaccaucaucgagcgcaacaucaccgagaucgucuaccucaccaacaccaccaucgagaaggagaucugccccaagcccgccgaguaccgcaacugguccaagccccagugcgacaucaccggcuucgcccccuucuccaaggacaacuccauccgccucuccgccggcggcgacaucugggucacccgcgagcccuacgucuccugcgaccccgacaagugcuaccaguucgcccucggccagggcaccacccucaacaacguccacuccaacgacaccguccacgaccgcacccccuaccgcacccuccucaugaacgagcucggcguccccuuccaccucggcaccaagcaggucugcaucgccugguccuccuccuccugccacgacggcaaggccuggcuccacgucugcgucaccggcgacgacaagaacgccaccgccuccuucaucuacaacggccgccucgucgacuccaucgucuccugguccaaggagauccuccgcacccaggaguccgagugcgucugcaucaacggcaccugcgccgucgucaugaccgacggcuccgccuccggcaaggccgacaccaagauccucuucaucgaggagggcaagaucguccacaccuccaagcucuccggcuccgcccagcacgucgaggagugcuccugcuacccccgcuaccccggcauccgcugcgucugccgcgacaacuggaagggcuccaaccgccccaucgucgacaucaacaucaaggacuacuccaucgucuccuccuacgucugcuccggccucgucggcgacaccccccgcaagaacgacuccuccuccuccucccacugccucgaccccaacaacgaggagggcggccacggcgucaagggcugggccuucgacgacggcaacgacgucuggaugggccgcaccaucuccgagaagcuccgcuccggcuacgagaccuucaaggucaucgagggcugguccaaccccaacuccaagcuccagaucaaccgccaggucaucgucgaccgcggcaaccgcuccggcuacuccggcaucuucuccgucgagggcaaguccugcaucaaccgcugcuucuacgucgagcucauccgcggccgcaaggaggagaccgagguccucuggaccuccaacuccaucgucgucuucugcggcaccuccggcaccuacggcaccggcuccuggcccgacggcgccgacaucaaccucaugcccaucuga

SEQ ID NO: 110378 - RNA, 1410 nt, Artificial Sequence; identical to SEQ ID NO: 110363
  derived and/or modified CDS sequence (opt2) from neuraminidase__InfluenzaA__AAZ74444

SEQ ID NO: 110379 - RNA, 1410 nt, Artificial Sequence
  derived and/or modified CDS sequence (opt2) from neuraminidase__InfluenzaA__AAZ74455
augaaccccaaccagaagaucaucaccaucggcuccgucucccucaccaucuccaccaucugcuucuucaugcagaucgccauccucaucaccaccgucacccuccacuucaagcaguacgaguucaacuccccccccaacaaccaggucaugcucugcgagcccaccaucaucgagcgcaacaucaccgagaucgucuaccucaccaacaccaccaucgagaaggagaucugccccaagcucgccgaguaccgcaacugguccaagccccagugcgacaucaccggcuucgcccccuucuccaaggacaacuccauccgccucuccgccggcggcgacaucugggucacccgcgagcccuacgucuccugcgaccccgacaagugcuaccaguucgcccucggccagggcaccacccucaacaacguccacuccaacgacaccguccacgaccgcacccccuaccgcacccuccucaugaacgagcucggcguccccuuccaccucggcaccaagcaggucugcaucgccugguccuccuccuccugccacgacggcaaggccuggcuccacgucugcgucaccggcgacgacaagaacgccaccgccuccuucaucuacaacggccgccucgucgacuccaucgucuccugguccaaggacauccuccgcacccaggaguccgagugcgucugcaucaacggcaccugcaccgucgucaugaccgacggcuccgccuccggcaaggccgacaccaagauccucuucaucgaggagggcaagaucguccacaccuccacccucuccggcuccgcccagcacgucgaggagugcuccugcuacccccgcuaccccggcguccgcugcgucugccgcgacaacuggaagggcuccaaccgccccaucgucgacaucaacaucaaggacuacuccaucgucuccuccuacgucugcuccggccucgucggcgacaccccccgcaagaacgacuccuccuccuccucccacugccucgaccccaacaacgaggagggcggccacggcgucaagggcugggccuucgacgacggcaacgacgucuggaugggccgcaccaucuccgagaagcuccgccucggcuacgagaccuucaaggucaucgagggcugguccaaccccaacuccaagcuccagaucaaccgccaggucaucgucgagcgcggcaaccgcuccggcuacuccggcaucuucuccgucgagggcaaguccugcaucaaccgcugcuucuacgucgagcucauccgcggccgcaaggaggagaccgagguccucuggaccuccaacuccaucgucgucuucugcggcaccuccggcaccuacggcaccggcuccuggcccgacggcgccgacaucaaccucaugcccaucuga

SEQ ID NO: 110380 - RNA, 1410 nt, Artificial Sequence; identical to SEQ ID NO: 110363
  derived and/or modified CDS sequence (opt2) from neuraminidase__InfluenzaA__AAZ74477

SEQ ID NO: 110381 - RNA, 1410 nt, Artificial Sequence; identical to SEQ ID NO: 110379
  derived and/or modified CDS sequence (opt2) from neuraminidase__InfluenzaA__AAZ74488

SEQ ID NO: 110382 - RNA, 1410 nt, Artificial Sequence
  derived and/or modified CDS sequence (opt2) from neuraminidase__InfluenzaA__AAZ74499
augaaccccaaccagaagaucaucaccaucggcuccgucucccucaccaucuccaccaucugcuucuucaugcagaucgccauccucaucaccaccgucacccuccacuucaagcaguacgaguucaacuccccccccaacaaccaggucaugcucugcgagcccaccaucaucgagcgcaacaucaccgagaucgucuaccucaccaacaccaccaucgagaaggagaucugccccaagcucgccgaguaccgcaacugguccaagccccagugcgacaucaccggcuucgcccccuucuccaaggacaacuccauccgccucuccgccggcggcgacaucugggucacccgcgagcccuacgucuccugcgaccccgacaagugcuaccaguucgcccucggccagggcaccacccucaacaacguccacuccaacgacaccguccacgaccgcacccccuaccgcacccuccucaugaacgagcucggcguccccuuccaccucggcaccaagcaggucugcaucgccugguccuccuccuccugccacgacggcaaggccuggcuccacgucugcgucaccggcgacgacaagaacgccaccgccuccuucaucuacaacggccgccucgucgacuccaucgucuccugguccaaggagauccuccgcacccaggaguccgagugcgucugcaucaacggcaccugcgccgucgucaugaccgacggcuccgccuccggcaaggccgacaccaagauccucuucaucgaggagggcaagaucguccacaccuccaagcucuccggcuccgcccagcacgucgaggagugcuccugcuacccccgcuaccccggcauccgcugcgucugccgcgacaacuggaagggcuccaaccgccccaucgucgacaucaacaucaaggacuacuccaucgucuccuccuacgucugcuccggccucgucggcgacaccccccgcaagaacgacuccuccuccuccucccacugccucgaccccaacaacgaggagggcggccacggcgucaagggcugggccuucgacgacggcaacgacgucuggaugggccgcaccaucuccgagaagcuccgcuccggcuacgagaccuucaaggucaucgagggcugguccaaccccaacuccaagcuccagaucaaccgccaggucaucgucgaccgcggcaaccgcuccggcuacuccggcaucuucuccgucgagggcaaguccugcaucaaccgcugcuucuacgucgagcucauccgcggccgcaaggaggagaccgagguccucuggaccuccaacuccaucgucgucuucugcggcaccuccggcaccuacggcaccggcuccuggcccgacggcgccgacaucaaccucaugcccaucuga

SEQ ID NO: 110383 - RNA, 1410 nt, Artificial Sequence; identical to SEQ ID NO: 110379
  derived and/or modified CDS sequence (opt2) from neuraminidase__InfluenzaA__AAZ74510

SEQ ID NO: 110384 - RNA, 1410 nt, Artificial Sequence; identical to SEQ ID NO: 110382
  derived and/or modified CDS sequence (opt2) from neuraminidase__InfluenzaA__AAZ74521

SEQ ID NO: 110385 - RNA, 1410 nt, Artificial Sequence
  derived and/or modified CDS sequence (opt2) from neuraminidase__InfluenzaA__AAZ74532
augaaccccaaccagaagaucaucaccaucggcuccgucucccucaccaucuccaccaucugcuucuucaugcagaucgccauccucaucaccaccgucacccuccacuucaagcaguacgaguucaacuccccccccaacaaccaggucaugcucugcgagcccaccaucaucgagcgcaacaucaccgagaucgucuaccucaccaacaccaccaucgagaaggagaucugccccaagcucgccgaguaccgcaacugguccaagccccagugcgacaucaccggcuucgcccccuucuccaaggacaacuccauccgccucuccgccggcggcgacaucugggucacccgcgagcccuacgucuccugcgaccccgacaagugcuaccaguucgcccucggccagggcaccacccucaacaacguccacuccaacgacaccguccacgaccgcacccccuaccgcacccuccucaugaacgagcucggcguccccuuccaccucggcaccaagcaggucugcaucgccugguccuccuccuccugccacgacggcaaggccuggcuccacgucugcgucaccggcgacgacaagaacgccaccgccuccuucaucuacaacggccgccucgucgacuccaucgucuccugguccaaggacauccuccgcacccaggaguccgagugcgucugcaucaacggcaccugcaccgucgucaugaccgacggcuccgccuccggcaaggccgacaccaagauccucuucaucgaggagggcaagaucguccacaccuccacccucuccggcaacgcccagcacgucgaggagugcuccugcuacccccgcuaccccggcguccgcugcgucugccgcgacaacuggaagggcuccaaccgccccaucgucgacaucaacaucaaggacuacuccaucgucuccuccuacgucugcuccggccucgucggcgacaccccccgcaagaacgacuccuccuccuccucccacugccucgaccccaacaacgaggagggcggccacggcgucaagggcugggccuucgacgacggcaacgacgucuggaugggccgcaccaucuccgagaagcuccgccucggcuacgagaccuucaaggucaucgagggcugguccaaccccaacuccaagcuccagaucaaccgccaggucaucgucgagcgcggcaaccgcuccggcuacuccggcaucuucuccgucgagggcaaguccugcaucaaccgcugcuucuacgucgagcucauccgcggccgcaaggaggagaccgagguccucuggaccuccaacuccaucgucgucuucugcggcaccuccggcaccuacggcaccggcuccuggcccgacggcgccaacaucaaccucaugcccaucuga

SEQ ID NO: 110386 - RNA, 1410 nt, Artificial Sequence; identical to SEQ ID NO: 110363
  derived and/or modified CDS sequence (opt2) from neuraminidase__InfluenzaA__AAZ74543

SEQ ID NO: 110387 - RNA, 1410 nt, Artificial Sequence; identical to SEQ ID NO: 110315
  derived and/or modified CDS sequence (opt2) from neuraminidase__InfluenzaA__AAZ74565

SEQ ID NO: 110388 - RNA, 1410 nt, Artificial Sequence; identical to SEQ ID NO: 110363
  derived and/or modified CDS sequence (opt2) from neuraminidase__InfluenzaA__AAZ74598

SEQ ID NO: 110389 - RNA, 1410 nt, Artificial Sequence
  derived and/or modified CDS sequence (opt2) from neuraminidase__InfluenzaA__AAZ74609
augaaccccaaccagaagaucaucaccaucggcuccgucucccucaccaucgccaccaucugcuuccucaugcagaucgccauccucgucaccaccgucacccuccacuucaagcaguacgagugcaacuccccccccaacaaccaggucaugcucugcgagcccaucaucaucgagcgcaacaucaccgagaucgucuaccucaccaacaccaccaucgagaaggagaucugccccaagcucgccgaguaccgcaacugguccaagccccagugcaagaucaccggcuucgcccccuucuccaaggacaacuccauccgccucuccgccggcggcgacaucugggucacccgcgagcccuacgucuccugcgaccccgacaagugcuaccaguucgcccucggccagggcaccacccucaacaaccgccacuccaacgacaccguccacgaccgcacccccuaccgcacccuccucaugaacgagcucggcguccccuuccaccucggcaccaagcaggucugcaucgccugguccuccuccuccugccacgacggcaaggccuggcuccacgucugcgucaccggccacgacgagaacgccaccgccuccuucaucuacgacggccgccucgucgacuccaucuccuccugguccaagaacauccuccgcacccaggaguccgagugcgucugcaucaacggcaccugcaccgucgucaugaccgacggcuccgccuccgagcgcgccgacaccaagauccucuucaucgaggagggcaagaucguccacaucuccccccucuccggcuccgcccagcacgucgaggagugcuccugcuacccccgcuaccccggcguccgcugcgucugccgcgacaacuggaagggcuccaaccgccccaucgucgacaucaacgucaaggacuacuccaucgucuccuccuacgucugcuccggccucgucggcgacaccccccgcaagaacgacuccuccuccuccuccuacugccucaaccccaacaacgaggagggcggccacggcgucaagggcugggccuucgacgacggcaacgacgucuggaugggccgcaccaucuccgagaagcuccgcuccggcuacgagaccuucaaggucaucggcggcugguccaagcccaacuccaagcuccagaucaaccgccaggucaucgucgaccgcggcaaccgcuccggcuacuccggcaucuucuccgucgagggcaaguccugcgucaaccgcugcuucuacgucgagcucauccgcggccgcaagcaggagaccgaggucugguggaccuccaacuccaucgucgucuucugcggcaccuccggcaccuacggcaccggcuccuggcccgacggcgccgacaucaaccucaugcccaucuga

SEQ ID NO: 110390 - RNA, 1410 nt, Artificial Sequence; identical to SEQ ID NO: 110097
  derived and/or modified CDS sequence (opt2) from neuraminidase__InfluenzaA__AAZ74620

SEQ ID NO: 110391 - RNA, 1410 nt, Artificial Sequence; identical to SEQ ID NO: 110209
  derived and/or modified CDS sequence (opt2) from neuraminidase__InfluenzaA__AAZ79508

SEQ ID NO: 110392 - RNA, 1410 nt, Artificial Sequence
  derived and/or modified CDS sequence (opt2) from neuraminidase__InfluenzaA__AAZ79519
augaaccccaaccagaagaucaucaccaucggcuccgucucccucaccaucgccaccaucugcuuccucaugcagaucgccauccucgucaccaccgucacccuccacuucaagcaguacgagugcaacuccccccccaacaaccaggucaugcucugcgagcccaccauccucgagcgcaacaucaccgagaucgucuaccucaccaacaccaccaucgagaaggagaucugccccaagcucgccgaguaccgcaacugguccaagccccagugcaagaucaccggcuucgcccccuucuccaaggacaacuccauccgccucuccgccggcggcgacaucugggucacccgcgagcccuacgucuccugcgaccccgacaagugcuaccaguucgcccucggccagggcaccacccucaacaaccgccacuccaacgacaccguccacgaccgcacccccuaccgcacccuccucaugaacgagcucggcguccccuuccaccucggcaccaagcaggucugcaucgccugguccuccuccuccugccacgacggcaaggccuggcuccacgucugcgucaccggccacgacaagaacgccaccgccuccuucaucuacggcggccgccucgucgacuccaucggcuccugguccaagaagauccuccgcacccaggaguccgagugcgucugcaucaacggcaccugcaccgucgucaugaccgacggcuccgccuccggccgcgccgacaccaagauccucuucaucgaggagggcaagaucauccacaucucccagcucuccggcuccgcccagcacgucgaggagugcuccugcuacccccgcuaccccggcguccgcugcgucugccgcgacaacuggaagggcuccaaccgccccaucgucgacaucaacgucaaggacuacuccaucgucuccuccuacgucugcuccggccucgucggcgacaccccccgcaagaacgacuccuccuccuccucccacugccucaaccccaacaacgaggagggcggccacggcgucaagggcugggccuucgacgacggcaacgacgucuggaugggccgcaccaucuccgagaaguuccgcuccggcuacgagaccuucaaggucaucgagggcuggucccgccccaacuccaagcuccagaucaaccgccaggucaucgucgaccgcgacaaccgcuccggcuacuccggcaucuucuccgucgagggcaaguccugcaucaaccgcugcuucuacgucgagcucauccgcggccgcaagcaggagaccgaggucugguggaccuccaacuccaucgucgucuucugcggcaccuccggcaccuacggcaccggcuccuggcccgacggcgccgacaucaaccucaugcccaucuga

SEQ ID NO: 110393 - RNA, 1410 nt, Artificial Sequence; identical to SEQ ID NO: 110173
  derived and/or modified CDS sequence (opt2) from neuraminidase__InfluenzaA__AAZ79530

SEQ ID NO: 110394 - RNA, 1410 nt, Artificial Sequence
  derived and/or modified CDS sequence (opt2) from neuraminidase__InfluenzaA__AAZ79552
augaaccccaaccagaagaucaucaccaucggcuccgucucccucaccaucgccaccaucugcuuccucaugcagaucgccauccucgucaccaccgucacccuccacuucaagcaguacgagugcaacuccccccccaacaaccaggucaugcucugcgagcccaccaucaucgagcgcaacaucaccgagaucgucuaccucaccaacaccaccaucgagaaggagaucugccccaagcucgccgaguaccgcaacugguccaagccccagugcaacaucaccggcuucgcccccuucuccaaggacaacuccauccgccucuccgccggcggcgacaucugggucacccgcgagcccuacgucuccugcgaccccgacaagugcuaccaguucgcccucggccagggcaccacccucaacaacggccacuccaacgacaccguccacgaccgcaccccccaccgcacccuccucaugaacgagcucggcguccccuuccaccucggcaccaagcaggucugcaucgccugguccuccuccuccugccacgacggcaaggccuggcuccacgucugcgucaccggcgacgacaagaacgccaccgccuccuucaucuacaacggccgccucgucgacuccaucggcuccugguccaagaagauccuccgcacccaggaguccgagugcgucugcaucaacggcaccugcaccgucgucaugaccgacggcuccgccuccggcaaggccgacaccaagauccucuucaucgaggagggcaagaucguccacaccucccuccucuccggcuccgcccagcacgucgaggagugcuccugcuacccccgcuaccccggcguccgcugcgucugccgcgacaacuggaagggcuccaaccgccccaucgucgacaucaacgucaaggacuacuccaucgucuccuccuacgucugcuccggccucgucggcgacaccccccgcaagaacgacuccuccuccuccucccacugccucgaccccaacaacgaggagggcggccacggcgucaagggcugggccuucgacgacggcaacgacgucuggaugggccgcaccaucuccgagaagcuccgcuccggcuacgagaccuucaaggucaucgagggcugguccaagcccaacuccaagcuccagaucaaccgccaggucaucgucgaccgcgacaaccgcuccggcuacuccggcaucuucuccgucgagggcaaguccugcaucaaccgcugcuucuacgucgagcucauccgcggccgcaaccaggagaccgagguccucuggaccuccaacuccaucgucgucuucugcggcaccuccggcaccuacggcaccggcuccuggcccgacggcgccgacaucaaccucaugcccaucuga

SEQ ID NO: 110395 - RNA, 1410 nt, Artificial Sequence; identical to SEQ ID NO: 110315
  derived and/or modified CDS sequence (opt2) from neuraminidase__InfluenzaA__AAZ79563

SEQ ID NO: 110396 - RNA, 1410 nt, Artificial Sequence; identical to SEQ ID NO: 110315
  derived and/or modified CDS sequence (opt2) from neuraminidase__InfluenzaA__AAZ79574

SEQ ID NO: 110397 - RNA, 1410 nt, Artificial Sequence; identical to SEQ ID NO: 110315
  derived and/or modified CDS sequence (opt2) from neuraminidase__InfluenzaA__AAZ79585

SEQ ID NO: 110398 - RNA, 1410 nt, Artificial Sequence; identical to SEQ ID NO: 110382
  derived and/or modified CDS sequence (opt2) from neuraminidase__InfluenzaA__AAZ79618

SEQ ID NO: 110399 - RNA, 1410 nt, Artificial Sequence; identical to SEQ ID NO: 110363
  derived and/or modified CDS sequence (opt2) from neuraminidase__InfluenzaA__AAZ79633

SEQ ID NO: 110400 - RNA, 1410 nt, Artificial Sequence; identical to SEQ ID NO: 110382
  derived and/or modified CDS sequence (opt2) from neuraminidase__InfluenzaA__AAZ79945

SEQ ID NO: 110401 - RNA, 1410 nt, Artificial Sequence; identical to SEQ ID NO: 110379
  derived and/or modified CDS sequence (opt2) from neuraminidase__InfluenzaA__AAZ79966

SEQ ID NO: 110402 - RNA, 1410 nt, Artificial Sequence; identical to SEQ ID NO: 110363
  derived and/or modified CDS sequence (opt2) from neuraminidase__InfluenzaA__AAZ79977

SEQ ID NO: 110403 - RNA, 1410 nt, Artificial Sequence; identical to SEQ ID NO: 110363
  derived and/or modified CDS sequence (opt2) from neuraminidase__InfluenzaA__AAZ79988

SEQ ID NO: 110404 - RNA, 1410 nt, Artificial Sequence
  derived and/or modified CDS sequence (opt2) from neuraminidase__InfluenzaA__AAZ79999
augaaccccaaccagaagaucaucaccaucggcuccgucucccucaccaucuccaccaucugcuucuucaugcagaucgccauccucaucaccaccgucacccuccacuucaagcaguacgaguucaacuccccccccaacaaccagaugaugcucugcgagcccaccaucaucgagcgcaacaucaccgagaucgucuaccucaccaacaccaccaucgagaaggagaucugccccaagcucgccgaguaccgcaacugguccaagccccagugcgacaucaccggcuucgcccccuucuccaaggacaacuccauccgccucuccgccggcggcgacaucugggucacccgcgagcccuacgucuccugcgaccccgacaagugcuaccaguucgcccucggccagggcaccacccucaacaacguccacuccaacgacaccguccacgaccgcacccccuaccgcacccuccucaugaacgagcucggcguccccuuccaccucggcaccaagcaggucugcaucgccugguccuccuccuccugccacgacggcaaggccuggcuccacgucugcgucaccggcgacgacaagaacgccaccgccuccuucaucuacaacggccgccucgucgacuccaucgucuccugguccaaggacauccuccgcacccaggaguccgagugcgucugcaucaacggcaccugcaccgucgucaugaccgacggcuccgccuccggcaaggccgacaccaagauccucuucaucgaggagggcaagaucguccacaccuccacccucuccggcuccgcccagcacgucgaggagugcuccugcuacccccgcuaccccggcguccgcugcgucugccgcgacaacuggaagggcuccaaccgccccaucgucgacaucaacaucaaggacuacuccaucgucuccuccuacgucugcuccggccucgucggcgacaccccccgcaagaacgacuccuccuccuccucccacugccucgaccccaacaacgaggagggcggccacggcgucaagggcugggccuucgacgacggcaacgacgucuggaugggccgcaccaucuccgagaagcuccgccucggcuacgagaccuucaaggucaucgagggcugguccaaccccaacuccaagcuccagaucaaccgccaggucaucgucgagcgcggcaaccgcuccggcuacuccggcaucuucuccgucgagggcaaguccugcaucaaccgcugcuucuacgucgagcucauccgcggccgcaaggaggagaccgagguccucuggaccuccaacuccaucgucgucuucugcggcaccuccggcaccuacggcaccggcuccuggcccgacggcgccgacaucaaccucaugcccaucuga

SEQ ID NO: 110405 - RNA, 1410 nt, Artificial Sequence; identical to SEQ ID NO: 110151
  derived and/or modified CDS sequence (opt2) from neuraminidase__InfluenzaA__AAZ80010

SEQ ID NO: 110406 - RNA, 1410 nt, Artificial Sequence
  derived and/or modified CDS sequence (opt2) from neuraminidase__InfluenzaA__AAZ80021
augaaccccaaccagaagaucaucaccaucggcuccgucucccucaccaucuccaccaucugcuucuucaugcagaucgccauccucaucaccaccgucacccuccacuucaagcaguacgaguucaacuccccccccaacaaccaggucaugcucugcgagcccaccaucaucgagcgcaacaucaccgagaucgucuaccucaccaacaccaccaucgagaaggagaucugccccaagcucgccgaguaccgcaacugguccaagccccagugcgacaucaccggcuucgcccccuucuccaaggacaacuccauccgccucuccgccggcggcgacaucugggucacccgcgagcccuacgucuccugcgaccccgacaagugcuaccaguucgcccucggccagggcaccacccucaacaacguccacuccaacgacaccguccgcgaccgcacccccuaccgcacccuccucaugaacgagcucggcguccccuuccaccucggcaccaagcaggucugcaucgccugguccuccuccuccugccacgacggcaaggccuggcuccacgucugcgucaccggcgacgacaagaacgccaccgccuccuucaucuacaacggccgccucgucgacuccaucgucuccugguccaaggagauccuccgcacccaggaguccgagugcgucugcaucaacggcaccugcgccgucgucaugaccgacggcuccgccuccggcaaggccgacaccaagauccucuucaucgaggagggcaagaucguccacaccuccaagcucuccggcuccgcccagcacgucgaggagugcuccugcuacccccgcuaccccggcauccgcugcgucugccgcgacaacuggaagggcuccaaccgccccaucgucgacaucaacaucaaggacuacuccaucgucuccuccuacgucugcuccggccucgucggcgacaccccccgcaagaacgacuccuccuccuccucccacugccucgaccccaacaacgaggagggcggccacggcgucaagggcugggccuucgacgacggcaacgacgucuggaugggccgcaccaucuccgagaagcuccgcuccggcuacgagaccuucaaggucaucgagggcugguccaaccccaacuccaagcuccagaucaaccgccaggucaucgucgaccgcggcaaccgcuccggcuacuccggcaucuucuccgucgagggcaaguccugcaucaaccgcugcuucuacgucgagcucauccgcggccgcaaggaggagaccgagguccucuggaccuccaacuccaucgucgucuucugcggcaccuccggcaccuacggcaccggcuccuggcccgacggcgccgacaucaaccucaugcccaucuga

SEQ ID NO: 110407 - RNA, 1410 nt, Artificial Sequence
  derived and/or modified CDS sequence (opt2) from neuraminidase__InfluenzaA__AAZ83245
augaaccccaaccagaagaucaucaccaucggcuccgucucccucaccaucuccaccaucugcuucuucaugcagaucgccauccucaucaccaccgucacccuccacuucaagcaguacgaguucaaccccccccccaacaaccaggucaugcucugcgagcccaccaucaucgagcgcaacaucaccgagaucgucuaccucaccaacaccaccaucgagaaggagaucugccccaagcucgccgaguaccgcaacugguccaagccccagugcaacaucaccggcuucgcccccuucuccaaggacaacuccauccgccucuccgccggcggcgacaucugggucacccgcgagcccuacgucuccugcgaccccgacaagugcuaccaguucgcccucggccagggcaccacccucaacaacguccacuccaacgacaccguccacgaccgcacccccuaccgcacccuccucaugaacgagcucggcguccccuuccaccucggcaccaagcaggucugcaucgccugguccuccuccuccugccacgacggcaaggccuggcuccacgucugcgucaccggcgacgacgagaacgccaccgccuccuucaucuacaacggccgccucgucgacuccaucgucuccugguccaagaagauccuccgcacccaggaguccgagugcgucugcaucaacggcaccugcaccgucgucaugaccgacggcuccgccuccggcaaggccgacaccaagauccucuucaucgaggagggcaagaucguccacaccuccacccucuccggcuccgcccagcacgucgaggagugcuccugcuacccccgcuaccccggcguccgcugcgucugccgcgacaacuggaagggcuccaaccgccccaucgucgacaucaacaucaaggacuacuccaucgucuccuccuacgucugcuccggccucgucggcgacaccccccgcaagaacgacuccuccuccuccucccacugccucgaccccaacaacgaggagggcggccacggcgucaagggcugggccuucgacgacggcaacgacgucuggaugggccgcaccaucuccgagaagcuccgcuccggcuacgagaccuucaaggucaucgagggcugguccaaccccaacuccaagcuccagaucaaccgccaggucaucgucgaccgcgacaaccgcuccggcuacuccggcaucuucuccgucgagggcaaguccugcaucaaccgcugcuucuacgucgagcucauccgcggccgcaaccaggagaccgagguccucuggaccuccaacuccaucgucgucuucugcggcaccuccggcaccuacggcaccggcuccuggcccgacggcgccgacaucaaccucaugcccaucuga

SEQ ID NO: 110408 - RNA, 1413 nt, Artificial Sequence
  derived and/or modified CDS sequence (opt2) from neuraminidase__InfluenzaA__AAZ83256
augaaccccaaccagaagaucaucaccaucggcuccaucuccaucgccaucggcaucaucucccucaugcuccagaucggcaacaucaucuccaucugggccucccacuccauccagaccggcucccagaaccacaccggcaucugcaaccagcgcaucaucaccuacgagaacuccaccugggucaaccacaccuacgucaacaucaacaacaccaacgucgucgccggcaaggacaagaccuccgucacccucgccggcaacuccucccucugcuccaucuccggcugggccaucuacaccaaggacaacuccauccgcaucggcuccaagggcgacgucuucgucauccgcgagcccuucaucuccugcucccaccucgagugccgcaccuucuuccucacccagggcgcccuccucaacgacaagcacuccaacggcaccgucaaggaccgcucccccuaccgcgcccucauguccugcccccucggcgaggcccccucccccuacaacuccaaguucgaguccgucgccugguccgccuccgccugccacgacggcaugggcuggcucaccaucggcaucuccggccccgacaacggcgccgucgccguccucaaguacaacggcaucaucaccgagaccaucaaguccuggaagaagcgcauccuccgcacccaggaguccgagugcgucugcgucaacggcuccugcuucaccaucaugaccgacggccccuccaacggcgccgccuccuacaagaucuucaagaucgagaagggcaaggucaccaaguccaucgagcucaacgcccccaacuuccacuacgaggagugcuccugcuaccccgacaccggcaccgucaugugcgucugccgcgacaacuggcacggcuccaaccgccccugggucuccuucaaccagaaccucgacuaccagaucggcuacaucugcuccggcgucuucggcgacaacccccgccccaaggacggcaagggcuccugcaaccccgucaccgucgacggcgccgacggcgucaagggcuucuccuacaaguacggcaacggcgucuggaucggccgcaccaaguccaaccgccuccgcaagggcuucgagaugaucugggaccccaacggcuggaccgacaccgacuccgacuucuccgucaagcaggacgucgucgccaucaccgacugguccggcuacuccggcuccuucguccagcaccccgagcucaccggccucgacugcauccgccccugcuucugggucgagcucguccgcggccucccccgcgagaacaccaccaucuggaccuccggcuccuccaucuccuucugcggcaucgacuccgacaccgccaacugguccuggcccgacggcgccgagcuccccuucaccaucgacaaguga

SEQ ID NO: 110409 - RNA, 1410 nt, Artificial Sequence; identical to SEQ ID NO: 110315
  derived and/or modified CDS sequence (opt2) from neuraminidase__InfluenzaA__AAZ83269

SEQ ID NO: 110410 - RNA, 1410 nt, Artificial Sequence; identical to SEQ ID NO: 110315
  derived and/or modified CDS sequence (opt2) from neuraminidase__InfluenzaA__AAZ83280

SEQ ID NO: 110411 - RNA, 1410 nt, Artificial Sequence; identical to SEQ ID NO: 110289
  derived and/or modified CDS sequence (opt2) from neuraminidase__InfluenzaA__AAZ83291

SEQ ID NO: 110412 - RNA, 1413 nt, Artificial Sequence
  derived and/or modified CDS sequence (opt2) from neuraminidase__InfluenzaA__AAZ83302
augaaccccaaccagaagaucaucaccaucggcuccaucuccaucgccaucggcaucaucucccucaugcuccagaucggcaacaucaucuccaucugggccucccacuccauccagaccggcucccagaaccacaccggcgucugcaaccagcgcaucaucaccuacgagaacuccaccugggucaaccacaccuacgucaacaucaacaacaccaacgucaucgccggcaaggacaaggccuccgucacccucgccggcaacuccucccucugcuccaucuccggcugggccaucuacaccaaggacaacuccauccgcaucggcuccaagggcgacgucuucgucauccgcgagcccuucaucuccugcucccacuccgagugccgcaccuucuuccucacccagggcgcccuccucaacgacaagcacuccaacggcaccgucaaggaccgcucccccuaccgcgcccucauguccugcccccucggcgaggcccccucccccuacaacuccaaguucgaguccgucgccugguccgccuccgccugccacgacggcaugggcuggcucaccaucggcaucuccggccccgacaacggcgccgucgccguccucaaguacaacggcaucaucaccgagaccaucaaguccuggaagaagcagauccuccgcacccaggaguccgagugcgucugcgucaacggcuccugcuucaccaucaugaccgacggccccuccaacggcgccgccuccuacaagaucuucaagaucgagaagggcaaggucaccaaguccaucgagcucaacgcccccaacuuccacuacgaggagugcuccugcuaccccgacaccggcaccgucaugugcgucugccgcgacaacuggcacggcuccaaccgccccugggucuccuucaaccagaaccucgacuaccagaucggcuacaucugcuccggcgucuucggcgacaacccccgccccaaggacggcgagggcuccugcaaccccgucaccgucgacggcgccaacggcgucaagggcuucuccuacaaguacggcaacggcgucuggaucggccgcaccaaguccaaccgccuccgcaagggcuucgagaugaucugggaccccaacggcuggaccgacaccgacuccgacuucuccgucaagcaggacgucgucgccaucaccgacugguccggcuacuccggcuccuucguccagcaccccgagcucaccggccucgacugcauccgccccugcuucugggucgagcucguccgcggccuccccaaggagaacaccaccaucuggaccuccggcuccuccaucuccuucugcggcgucaacuccgacaccgccaacugguccuggcccgacggcgccgagcuccccuucaccaucgacaaguga

SEQ ID NO: 110413 - RNA, 1410 nt, Artificial Sequence
  derived and/or modified CDS sequence (opt2) from neuraminidase__InfluenzaA__AAZ83315
augaaccccaaccagaagaucaucaccaucggcuccgucucccucaccaucgccaccaucugcuuccucaugcagaucgccauccucgucaccaccgucacccuccacuucaagcaguacgagugcaacucccuccccaacaaccaggucaugcucugcgagcccaccaucaucgagcgcaacaucaccgagaucgucuaccucaccaacaccaccaucgagaaggagaucugccccaagcucgccgaguaccgcaacugguccaagccccagugcaagaucaccggcuucgcccccuucuccaaggacaacuccauccgccucuccgccggcggcgacaucugggucacccgcgagcccuacgucuccugcgaccccgacaagugcuaccaguucgcccucggccagggcaccacccucaacaaccgccacuccaacgacaccguccacgaccgcacccccuaccgcacccuccucaugaacgagcucggcguccccuuccaccucggcaccaagcaggucugcaucgccugguccuccuccuccugccacgacggcaaggccuggcuccacgucugcgucaccggccacgacgagaacgccaccgccuccuucaucuacgacggccgccucgucgacuccaucggcuccugguccaagaagauccuccgcacccaggaguccgagugcgucugcaucaacggcaccugcaccgucgucaugaccgacggcuccgccuccggccgcgccaacaccaagauccucuucaucgaggagggcaagaucauccacaucucccagcucuccggcuccgcccagcacgucgaggagugcuccugcuacccccgcuaccccggcguccgcugcgucugccgcgacaacuggaagggcuccaaccgccccaucgucgacaucaacgucaaggacuacuccaucgccuccuccuacgucugcuccggccucgucggcgacaccccccgcaagaacgacuccuccuccuccucccacugccucaaccccaacaacgaggagggcggccacggcgucaagggcugggccuucgacgacggcaacgacgucuggaugggccgcaccaucuccgagaaguuccgcuccggcuacgagaccuucaaggucaucgagggcugguccaagcccaacuccaagcuccagaucaaccgccaggucaucgucgaccgcgacaaccgcuccggcuacuccggcaucuucuccgucgagggcaaguccugcaucaaccgcugcuucuacgucgagcucauccgcggccgcaagcaggagaccgaggucugguggaccuccaacuccaucgucgucuucugcggcaccuccggcaccuacggcaccggcuccuggcccgacggcgccgacaucaaccucaugcccaucuga

SEQ ID NO: 110414 - RNA, 1410 nt, Artificial Sequence
  derived and/or modified CDS sequence (opt2) from neuraminidase__InfluenzaA__AAZ83326
augaaccccaaccagaagaucaucaccaucggcuccgucucccucaccaucgccaccaucugcuuccucaugcagaucgccauccucgucaccaccgucacccuccacuucaagcaguacgagugcgacucccuccccaacaaccaggucaugcucugcgagcccaccaucaucgagcgcaacaucaccgagaucgucuaccucaccaacaccaccaucgagaaggagaucugccccaagcucgccgaguaccgcaacugguccaagccccagugcaagaucaccggcuucgcccccuucuccaaggacaacuccauccgccucuccgccggcggcgacaucugggucacccgcgagcccuacgucuccugcgaccccgacaagugcuaccaguucgcccucggccagggcaccacccucaacaaccgccacuccaacgacaccguccacgaccgcacccccuaccgcacccuccucaugaacgagcucggcguccccuuccaccucggcaccaagcaggucugcaucgccugguccuccuccuccugccacgacggcaaggccuggcuccacgucugcgucaccggccacgacgagaacgccaccgccuccuucaucuacgacggccgccucgucgacuccaucggcuccugguccaagaagauccuccgcacccaggaguccgagugcgucugcaucaacggcaccugcaccgucgucaugaccgacggcuccgccuccggccgcgccgacaccaagauccucuucaucgaggagggcaagaucauccacaucucccagcucuccggcuccgcccagcacgucgaggagugcuccugcuacccccgcuaccccggcguccgcugcgucugccgcgacaacuggaagggcuccaaccgccccaucgucgacaucaacgucaaggacuacuccaucgucuccuccuacgucugcuccggccucgucggcgacaccccccgcaagaacgacuccuccuccuccucccacugccucaaccccaacaacgaggagggcggccacggcgucaagggcugggccuucgacgacggcaacgacgucuggaugggccgcaccaucuccgagaaguuccgcuccggcuacgagaccuucaaggucaucgagggcugguccaagcccaacuccaagcuccagaucaaccgccaggucaucgucgaccgcgacaaccgcuccggcuacuccggcaucuucuccgucgagggcaaguccugcaucaaccgcugcuucuacgucgagcucauccgcggccgcaagcaggagaccgaggucugguggaccuccaacuccaucgucgucuucugcggcaccuccggcaccuacggcaccggcuccuggcccgacggcgccgacaucaaccucaugcccaucuga

SEQ ID NO: 110415 - RNA, 1410 nt, Artificial Sequence
  derived and/or modified CDS sequence (opt2) from neuraminidase__InfluenzaA__AAZ83374
augaaccccaaccagaagaucaucaccaucggcuccgucucccucaccaucuccaccaucugcuucuucaugcagaucgccauccucaucaccaccgucacccuccacuucaagcaguacgaguucaacuccccccccaacaaccaggucaugcucugcgagcccaccaucaucgagcgcaacaucaccgagaucgucuaccucaccaacaccaccaucgagaaggagaucugccccaagcucgccgaguaccgcaacugguccaagccccagugcgacaucaccggcuucgcccccuucuccaaggacaacuccauccgccucuccgccggcggcgacaucugggucacccgcgagcccuacgucuccugcgaccccgacaagugcuaccaguucgcccucggccagggcaccacccucaacaacguccacuccaacgacaccguccacgaccgcacccccuaccgcacccuccucaugaacgagcucggcguccccuuccaccucggcaccaagcaggucugcaucgccugguccuccuccuccugccacgacggcaaggccuggcuccacgucugcgucaccggcgacgacaagaacgccaccgccuccuucaucuacaacggccgccucgucgacuccaucgucuccugguccaaggagauccuccgcacccaggaguccgagugcgucugcaucaacggcaccugcaccgucgucaugaccgacggcuccgccuccggcaaggccgacaccaagauccucuucaucgaggagggcaagaucguccacaccuccacccucuccggcuccgcccagcacgucgaggagugcuccugcuacccccgcuaccccggcguccgcugcgucugccgcgacaacuggaagggcuccaaccgccccaucgucgacaucaacaucaaggacuacuccaucgucuccuccuacgucugcuccggccucgucggcgacaccccccgcaagaacgacuccuccuccuccucccacugccucgaccccaacaacgaggagggcggccacggcgucaagggcugggccuucgacgacggcaacgacgucuggaugggccgcaccaucuccgagaagcuccgcaccggcuacgagaccuucaaggucaucgagggcugguccaaccccaacuccaagcuccagaucaaccgccaggucaucgucgaccgcggcaaccgcuccggcuacuccggcaucuucuccgucgagggcaaguccugcaucaaccgcugcuucuacgucgagcucauccgcggccgcaaggaggagaccgagguccucuggaccuccaacuccaucgucgucuucugcggcaccuccggcaccuacggcaccggcuccuggcccgacggcgccgacaucaaccucaugcccaucuga

SEQ ID NO: 110416 - RNA, 1410 nt, Artificial Sequence; identical to SEQ ID NO: 110382
  derived and/or modified CDS sequence (opt2) from neuraminidase__InfluenzaA__AAZ83385

SEQ ID NO: 110417 - RNA, 1413 nt, Artificial Sequence
  derived and/or modified CDS sequence (opt2) from neuraminidase__InfluenzaA__AAZ85129
augaacaccaaccagaagaucaucaccaucggcuccaucuccaucgccaucggcaucaucucccucaugcuccagaucggcaacaucaucuccaucugggccucccacuccauccagaccggcucccagaaccacaccggcgucugcaaccagcgcaucaucaccuacgagaacuccaccugggucaaccacaccuacgucaacaucaacaacaccaacgucaucgccggcaaggacaagaccuccgucacccucgccggcaacuccucccucugcuccaucuccggcugggccaucuacaccaaggacaacuccauccgcaucggcuccaagggcgacgucuucgucauccgcgagcccuucaucuccugcucccaccucgagugccgcaccuucuuccucacccagggcgcccuccucaacgacaagcacuccaacggcaccgucaaggaccgcucccccuaccgcgcccucauguccugcccccucggcgaggcccccucccccuacaacuccaaguucgaguccgucgccugguccgccuccgccugccacgacggcaugggcuggcucaccaucggcaucuccggccccgacaacggcgccgucgccguccucaaguacaacggcaucaucaccgagaccaucaaguccuggaagaagcagauccuccgcacccaggaguccgagugcgucugcgucaacggcuccugcuucaccaucaugaccgacggccccuccaacggcgccgccuccuacaagaucuucaagaucgagaagggcaaggucaccaaguccaucgagcucaacgcccccaacuuccacuacgaggagugcuccugcuaccccgacaccggcaccgucaugugcgucugccgcgacaacuggcacggcuccaaccgccccugggucuccuucaaccagaaccucgacuaccagaucggcuacaucugcuccggcgucuucggcgacaacccccgccccaaggacggcgagggcuccugcaaccccgucaccgucgacggcgccaacggcgucaagggcuucuccuacaaguacggcaacggcgucuggaucggccgcaccaaguccaaccgccuccgcaagggcuucgagaugaucugggaccccaacggcuggaccgacaccgacuccgacuucuccgucaagcaggacgucgucgccaucaccgacugguccggcuacuccggcuccuucguccagcaccccgagcucaccggccucgacugcauccgccccugcuucugggucgagcucguccgcggccuccccaaggagaacaccaccaucuggaccuccggcuccuccaucuccuucugcggcgucaacuccgacaccgccaacugguccuggcccgacggcgccgagcuccccuucaccaucgacaaguga

SEQ ID NO: 110418 - RNA, 1410 nt, Artificial Sequence
  derived and/or modified CDS sequence (opt2) from neuraminidase__InfluenzaA__ABA06513
augaaccccaaccagaagaucaucaccaucggcuccgucucccucaccaucgccaccaucugcuuccucacccagaucgccauccucgucaccaccgucacccuccacuucaagcaguacgagugcaacuccccccccaacaaccaggucaugcucugcgagcccaccaucaucgagcgcaacaucaccgagaucgucuaccucaccaacaccaccaucgagaaggagaucugccccaagcucgccgaguaccgcaacugguccaagccccagugcaacaucaccggcuucgcccccuucuccaaggacaacuccauccgccucuccgccggcggcgacaucugggucacccgcgagcccuacgucuccugcgaccccgacaagugcuaccaguucgcccucggccagggcaccacccucaacaacggccacuccaacgacaccguccacgaccgcacccccuaccgcacccuccucaugaacgagcucggcguccccuuccaccucggcaccaagcaggucugcaucgccugguccuccuccuccugccacgacggcaaggccuggcuccacgucugcgucaccggcgacgacaagaacgccaccgccuccuucaucuacaacggccgccucgucgacuccaucggcuccugguccaagaagauccuccgcacccaggaguccgagugcgucugcaucaacggcaccugcaccgucgucaugaccgacggcuccgccuccggcaaggccgacaccaagauccucuucaucgaggagggcaagaucguccacaccucccuccucuccggcuccgcccagcacgucgaggagugcuccugcuacccccgcuaccccggcguccgcugcgucugccgcgacaacuggaagggcuccaaccgccccaucgucgacaucaacgucaaggacuacuccaucgucuccuccuacgucugcuccggccucgucggcgacaccccccgcaagaacgacuccuccuccuccucccacugccucgaccccaacaacgaggagggcggccacggcgucaagggcugggccuucgacgacggcaacgacgucuggaugggccgcaccaucuccgagaagcuccgcuccggcuacgagaccuucaaggucaucgagggcugguccaagcccaacuccaagcuccagaucaaccgccaggucaucgucgaccgcgacaaccgcuccggcuacuccggcaucuucuccgucgagggcaaguccugcaucaaccgcugcuucuacgucgagcucauccgcggccgcaaccaggagaccgagguccucuggaccuccaacuccaucgucgucuucugcggcaccuccggcaccuacggcaccggcuccuggcccgacggcgccgacaucaaccucaugcccaucuga

SEQ ID NO: 110419 - RNA, 1410 nt, Artificial Sequence; identical to SEQ ID NO: 110418
  derived and/or modified CDS sequence (opt2) from neuraminidase__InfluenzaA__ABA06545

SEQ ID NO: 110420 - RNA, 1413 nt, Artificial Sequence
  derived and/or modified CDS sequence (opt2) from neuraminidase__InfluenzaA__ABA08478
augaacaccaaccagaagaucaucaccaucggcuccaucuccaucgccaucggcaucaucucccucaugcuccagaucggcaacaucaucuccaucugggccucccacuccauccagaccggcucccagaaccacaccggcaucugcaaccagcgcaucaucaccuacgagaacuccaccugggucaaccacaccuacgucaacaucaacaacaccaacgucgucgccggcaaggacaagaccuccgucacccucgccggcaacuccucccucugcuccaucuccggcugggccaucuacaccaaggacaacuccauccgcaucggcuccaagggcgacgucuucgucauccgcgagcccuucaucuccugcucccaccucgagugccgcaccuucuuccucacccagggcgcccuccucaacgacaagcacuccaacggcaccgucaaggaccgcucccccuaccgcgcccucauguccugcccccucggcgaggcccccucccccuacaacuccaaguucgaguccgucgccugguccgccuccgccugccacgacggcaugggcuggcucaccaucggcaucuccggccccgacaacggcgccgucgccguccucaaguacaacggcaucaucaccgagaccaucaaguccuggaagaagcgcauccuccgcacccaggaguccgagugcgucugcgucaacggcuccugcuucaccaucaugaccgacggccccuccaacggcgccgccuccuacaagaucuucaagaucgagaagggcaaggucaccaaguccaucgagcucaacgcccccaacuuccacuacgaggagugcuccugcuaccccgacaccggcaccgucaugugcgucugccgcgacaacuggcacggcuccaaccgccccugggucuccuucaaccagaaccucgacuaccagaucggcuacaucugcuccggcgucuucggcgacaacccccgccccaaggacggcaagggcuccugcaaccccgucaccgucgacggcgccgacggcgucaagggcuucuccuacaaguacggcaacggcgucuggaucggccgcaccaaguccaaccgccuccgcaagggcuucgagaugaucugggaccccaacggcuggaccgacaccgacuccgacuucuccgucaagcaggacgucgucgccaucaccgacugguccggcuacuccggcuccuucguccagcaccccgagcucaccggccucgacugcauccgccccugcuucugggucgagcucguccgcggccucccccgcgagaacaccaccaucuggaccuccggcuccuccaucuccuucugcggcgucgacuccgacaccgccaacugguccuggcccgacggcgccgagcuccccuucaccaucgacaaguga

SEQ ID NO: 110421 - RNA, 1410 nt, Artificial Sequence; identical to SEQ ID NO: 110418
  derived and/or modified CDS sequence (opt2) from neuraminidase__InfluenzaA__ABA08511

SEQ ID NO: 110422 - RNA, 1413 nt, Artificial Sequence
  derived and/or modified CDS sequence (opt2) from neuraminidase__InfluenzaA__ABA12699
augaaccccaaccagaagaucaucaccaucggcuccaucuccaucgccaucggcaucaucucccucaugcuccagaucggcaacaucaucuccaucugggccucccacuccauccagaccggcucccagaaccacaccggcaucugcaaccagcgcaucaucaccuacgagaacuccaccugggucaaccacaccuacgucaacaucaacaacaccaacgucgucgccggcaaggacaagaccuccgucacccucgccggcaacuccucccucugcuccaucuccggcugggccaucuacaccaaggacaacuccauccgcaucggcuccaagggcgacgucuucgucauccgcgagcccuucaucuccugcucccaccucgagugccgcaccuucuuccucacccagggcgcccuccucaacgacaagcacuccaacggcaccgucaaggaccgcucccccuaccgcgcccucauguccugcccccucggcgaggcccccucccccuacaacuccaaguucgaguccgucgccugguccgccuccgccugccacgacggcaugggcuggcucaccaucggcaucuccggccccgacaacggcgccgucgccguccucaaguacaacggcaucaucaccgagaccaucaaguccuggaagaagcgcauccuccgcacccaggaguccgagugcgucugcgucaacggcuccugcuucaccaucaugaccgacggccccuccaacggcgccgccuccuacaagaucuucaagaucgagaagggcaaggucaccaaguccaucgagcucaacgcccccaacuuccacuacgaggagugcuccugcuaccccgacaccggcaccgucaugugcgucugccgcgacaacuggcacggcuccaaccgccccugggucuccuucaaccagaaccucgacuaccagaucggcuacaucugcuccggcgucuucggcgacaacccccgccccaaggacggcaagggcuccugcaaccccgucaccgucgacggcgccgacggcgucaagggcuucuccuacaaguacggcaacggcgucuggaucggccgcaccaaguccaaccgccuccgcaagggcuucgagaugaucugggaccccaacggcuggaccgacaccgacuccgacuucuccgucaagcaggacgucgucgccaucaccgacugguccggcuacuccggcuccuucguccagcaccccgagcucaccggccucgacugcauccgccccugcuucugggucgagcucguccgcggccucccccgcgagaacaccaccaucuggaccuccggcuccuccaucuccuucugcggcgucgacuccgacaccgccaacugguccuggcccgacggcgccgagcuccccuucaccaucgacaaguga

SEQ ID NO: 110423 - RNA, 1413 nt, Artificial Sequence; identical to SEQ ID NO: 110422
  derived and/or modified CDS sequence (opt2) from neuraminidase__InfluenzaA__ABA12710

SEQ ID NO: 110424 - RNA, 1413 nt, Artificial Sequence
  derived and/or modified CDS sequence (opt2) from neuraminidase__InfluenzaA__ABA12721
augaaccccaaccagaagaucaucaccaucggcuccaucuccaucgccaucggcaucaucucccucaugcuccagaucggcaacaucaucuccaucugggccucccacuccauccagaccggcucccagaaccacaccggcgucugcaaccagcgcaucaucaccuacgagaacuccaccugggucaaccacaccuacgucaacaucaacaacaccaacgucaucgccggcaaggacaagaccuccgucacccucgccggcaacuccucccucugcuccaucuccggcugggccaucuacaccaaggacaacuccauccgcaucggcuccaagggcgacgucuucgucauccgcgagcccuucaucuccugcucccaccucgagugccgcaccuucuuccucacccagggcgcccuccucaacgacaagcacuccaacggcaccgucaaggaccgcucccccuaccgcgcccucauguccugcccccucggcgaggcccccucccccuacaacuccaaguucgaguccgucgccugguccgccuccgccugccacgacggcaugggcuggcucaccaucggcaucuccggccccgacaacggcgccgucgccguccucaaguacaacggcaucaucaccgagaccaucaaguccuggaagaagcagauccuccgcacccaggaguccgagugcgucugcgucaacggcuccugcuucaccaucaugaccgacggccccuccaacggcgccgccuccuacaagaucuucaagaucggcaagggcaaggucaccaaguccaucgagcucaacgcccccaacuuccacuacgaggagugcuccugcuaccccgacaccggcaccgucaugugcgucugccgcgacaacuggcacggcuccaaccgccccugggucuccuucaaccagaaccucgacuaccagaucggcuacaucugcuccggcgucuucggcgacaacccccgcccccgcgacggcgagggcuccugcaaccccgucaccgucgacggcgccaacggcgucaagggcuucuccuacaaguacggcaacggcgucuggaucggccgcaccaaguccaaccgccuccgcaagggcuucgagaugaucugggaccccaacggcuggaccgacaccgacuccgacuucuccgucaagcaggacgucgucgccaucaccgacugguccggcuacuccggcuccuucguccagcaccccgagcucaccggccucgacugcauccgccccugcuucugggucgagcucguccgcggccucccccgcgagaacaccaccaucuggaccuccggcuccuccaucuccuucugcggcgucaacuccgacaccgccaacugguccuggcccgacggcgccgagcuccccuucaccaucgacaaguga

SEQ ID NO: 110425 - RNA, 1413 nt, Artificial Sequence; identical to SEQ ID NO: 110422
  derived and/or modified CDS sequence (opt2) from neuraminidase__InfluenzaA__ABA12732

SEQ ID NO: 110426 - RNA, 1410 nt, Artificial Sequence; identical to SEQ ID NO: 110363
  derived and/or modified CDS sequence (opt2) from neuraminidase__InfluenzaA__ABA12743

SEQ ID NO: 110427 - RNA, 1410 nt, Artificial Sequence; identical to SEQ ID NO: 110379
  derived and/or modified CDS sequence (opt2) from neuraminidase__InfluenzaA__ABA12754

SEQ ID NO: 110428 - RNA, 1410 nt, Artificial Sequence; identical to SEQ ID NO: 110382
  derived and/or modified CDS sequence (opt2) from neuraminidase__InfluenzaA__ABA12765

SEQ ID NO: 110429 - RNA, 1410 nt, Artificial Sequence; identical to SEQ ID NO: 110154
  derived and/or modified CDS sequence (opt2) from neuraminidase__InfluenzaA__ABA12776

SEQ ID NO: 110430 - RNA, 1410 nt, Artificial Sequence; identical to SEQ ID NO: 110363
  derived and/or modified CDS sequence (opt2) from neuraminidase__InfluenzaA__ABA12786

SEQ ID NO: 110431 - RNA, 1410 nt, Artificial Sequence; identical to SEQ ID NO: 110382
  derived and/or modified CDS sequence (opt2) from neuraminidase__InfluenzaA__ABA18029

SEQ ID NO: 110432 - RNA, 1413 nt, Artificial Sequence
  derived and/or modified CDS sequence (opt2) from neuraminidase__InfluenzaA__ABA18040
augaaccccaaccagaagaucaucaccaucggcuccaucuccaucgccaucggcaucaucucccucaugcuccagaucggcaacaucaucuccaucugggccucccacuccauccagaccggcucccagaaccacaccggcgucugcaaccagcgcaucaucaccuacgagaacuccaccugggucaaccacaccuacgucaacaucaacaacaccaacgucaucgccggcaaggacaagaccuccgucacccucgccggcaacuccucccucugcuccaucuccggcugggccaucuacaccaaggacaacuccauccgcaucggcuccaagggcgacgucuucgucauccgcgagcccuucaucuccugcucccaccucgagugccgcaccuucuuccucacccagggcgcccuccucaacgacaagcacuccaacggcaccgucaaggaccgcucccccuaccgcgcccucauguccugcccccucggcgaggcccccucccccuacaacuccaaguucgaguccgucgccugguccgccuccgccugccacgacggcaugggcuggcucaccaucggcaucuccggccccgacaacggcgccgucgccguccucaaguacaacggcaucaucaccgagaccaucaaguccuggaagaagcagauccuccgcacccaggaguccgagugcgucugcgucaacggcuccugcuucaccaucaugaccgacggccccuccaacggcgccgccuccuacaagaucuucaagaucgagaagggcaaggucaccaaguccaucgagcucaacgcccccaacuuccacuacgaggagugcuccugcuaccccgacaccggcaccgucaugugcgucugccgcgacaacuggcacggcuccaaccgccccugggucuccuucaaccagaaccucgacuaccagaucggcuacaucugcuccggcgucuucggcgacaacccccgccccaaggacggcgagggcuccugcaaccccgucaccgucgacggcgccaacggcgucaagggcuucuccuacaaguacggcaacggcgucuggaucggccgcaccaaguccaaccgccuccgcaagggcuucgagaugaucugggaccccaacggcuggaccgacaccgacuccgacuucuccgucaagcaggacgucgucgccaucaccgacugguccggcuacuccggcuccuucguccagcaccccgagcucaccggccucgacugcauccgccccugcuucugggucgagcucguccgcggccuccccaaggagaacaccaccaucuggaccuccggcuccuccaucuccuucugcggcgucaacuccgacaccgccaacugguccuggcccgacggcgccgagcuccccuucaccaucgacaaguga

SEQ ID NO: 110433 - RNA, 1410 nt, Artificial Sequence
  derived and/or modified CDS sequence (opt2) from neuraminidase__InfluenzaA__ABA18126
augaaccccaaccagaagaucaucaccaucggcuccgucucccucaccaucgccaccaucugcuuccucaugcagaucgccauccucgucaccaccgucacccuccacuucaagcaguacgagugcaacuccccccccaacaaccaggucaugcucugcgagcccaccaucaucgagcgcaacaucaccgagaucgucuaccucaccaacaccaccaucgagaaggagaucugccccaagcucgccgaguaccgcaacugguccaagccccagugcaacaucaccggcuucgcccccuucuccaaggacaacuccauccgccucuccgccggcggcgacaucugggucacccgcgagcccuacgucuccugcgaccccgacaagugcuaccaguucgcccucggccagggcaccacccucaacaacggccacuccaacgacaccguccacgaccgcacccccuaccgcacccuccucaugaacgagcucggcguccccuuccaccucggcaccaagcaggucugcaucgccugguccuccuccuccugccacgacggcaaggccuggcuccacgucugcgucaccggcgacgacgagaacgccaccgccuccuucaucuacaacggccgccucgucgacuccaucggcuccugguccaagaagauccuccgcacccaggaguccgagugcgucugcaucaacggcaccugcaccgucgucaugaccgacggcuccgccuccggcaaggccgacaccaagauccucuucaucgaggagggcaagaucguccacaucuccacccucuccggcuccgcccagcacgucgaggagugcuccugcuacccccgcuaccccggcguccgcugcgucugccgcgacaacuggaagggcuccaaccgccccaucgucgacaucaacgucaaggacuacuccaucgucuccuccuacgucugcuccggccucgucggcgacaccccccgcaagaacgacuccuucuccuccucccacugccucgaccccaacaacgaggagggcggccacggcgucaagggcugggccuucgacgacggcaacgacauguggaugggccgcaccaucuccgagaagcuccgcuccggcuacgagaccuucaaggucaucgagggcugguccaagcccaacuccaagcuccagaucaaccgccaggucaucgucgagcgcggcaaccgcuccggcuacuccggcaucuucuccgucgagggcaaguccugcaucaaccgcugcuucuacgucgagcucauccgcggccgcaaggaggagaccgaggucugguggaccuccaacuccaucgucgucuucugcggcaccuccggcaccuacggcaccggcuccuggcccgacggcgccgacaucaaccucaugcccaucuga

SEQ ID NO: 110434 - RNA, 1413 nt, Artificial Sequence; identical to SEQ ID NO: 110422
  derived and/or modified CDS sequence (opt2) from neuraminidase__InfluenzaA__ABA18148

SEQ ID NO: 110435 - RNA, 1410 nt, Artificial Sequence
  derived and/or modified CDS sequence (opt2) from neuraminidase__InfluenzaA__ABA18159
augaaccccaaccagaagaucaucaccaucggcuccgucucccucaccaucuccaccaucugcuucuucaugcagaucgccauccucaucaccaccgucacccuccacuucaagcaguacgaguucaacuccccccccaacaaccaggucaugcucugcgagcccaccaucaucgagcgcaacaucaccgagaucgucuaccucaccaacaccaccaucgagaaggagaucugccccaagcucgccgaguaccgcaacugguccaagccccagugcgacaucaccggcuucgcccccuucuccaaggacaacuccauccgccucuccgccggcggcgacaucugggucacccgcgagcccuacgucuccugcgaccccgacaagugcuaccaguucgcccucggccagggcaccacccucaacaacguccacuccaacgacaccguccacgaccgcacccccuaccgcacccuccucaugaacgagcucggcguccccuuccaccucggcaccaagcaggucugcaucgccugguccuccuccuccugccacgacggcaaggccuggcuccacgucugcgucaccggcgacgacaagaacgccaccgccuccuucaucuacaacggccgccucgucgacuccaucgucuccugguccaaggagauccuccgcacccaggaguccgagugcgucugcaucaacggcaccugcgccgucgucaugaccgacggcuccgccuccggcaaggccgacaccaagauccucuucaucgaggagggcaagaucguccacaccuccaagcucuccggcuccgcccagcacgucgaggagugcuccugcuacccccgcuaccccggcauccgcugcgucugccgcgacaacuggaagggcuccaaccgccccaucgucgacgucaacaucaaggacuacuccaucgucuccuccuacgucugcuccggccucgucggcgacaccccccgcaagaacgacuccuccuccuccucccacugccucgaccccaacaacgaggagggcggccacggcgucaagggcugggccuucgacgacggcaacgacgucuggaugggccgcaccaucuccgagaagcuccgcuccggcuacgagaccuucaaggucaucgagggcugguccaaccccaacuccaagcuccagaucaaccgccaggucaucgucgaccgcggcaaccgcuccggcuacuccggcaucuucuccgucgagggcaaguccugcaucaaccgcugcuucuacgucgagcucauccgcggccgcaaggaggagaccgagguccucuggaccuccaacuccaucgucgucuucugcggcaccuccggcaccuacggcaccggcuccuggcccgacggcgccgacaucaaccucaugcccaucuga

SEQ ID NO: 110436 - RNA, 1410 nt, Artificial Sequence; identical to SEQ ID NO: 110363
  derived and/or modified CDS sequence (opt2) from neuraminidase__InfluenzaA__ABA26703

SEQ ID NO: 110437 - RNA, 1410 nt, Artificial Sequence; identical to SEQ ID NO: 110363
  derived and/or modified CDS sequence (opt2) from neuraminidase__InfluenzaA__ABA26714

SEQ ID NO: 110438 - RNA, 1410 nt, Artificial Sequence; identical to SEQ ID NO: 110363
  derived and/or modified CDS sequence (opt2) from neuraminidase__InfluenzaA__ABA26736

SEQ ID NO: 110439 - RNA, 1410 nt, Artificial Sequence; identical to SEQ ID NO: 110363
  derived and/or modified CDS sequence (opt2) from neuraminidase__InfluenzaA__ABA26747

SEQ ID NO: 110440 - RNA, 1410 nt, Artificial Sequence; identical to SEQ ID NO: 110363
  derived and/or modified CDS sequence (opt2) from neuraminidase__InfluenzaA__ABA26758

SEQ ID NO: 110441 - RNA, 1410 nt, Artificial Sequence; identical to SEQ ID NO: 110363
  derived and/or modified CDS sequence (opt2) from neuraminidase__InfluenzaA__ABA26769

SEQ ID NO: 110442 - RNA, 1410 nt, Artificial Sequence; identical to SEQ ID NO: 110363
  derived and/or modified CDS sequence (opt2) from neuraminidase__InfluenzaA__ABA26780

SEQ ID NO: 110443 - RNA, 1410 nt, Artificial Sequence; identical to SEQ ID NO: 110363
  derived and/or modified CDS sequence (opt2) from neuraminidase__InfluenzaA__ABA26791

SEQ ID NO: 110444 - RNA, 1410 nt, Artificial Sequence; identical to SEQ ID NO: 110363
  derived and/or modified CDS sequence (opt2) from neuraminidase__InfluenzaA__ABA26802

SEQ ID NO: 110445 - RNA, 1413 nt, Artificial Sequence
  derived and/or modified CDS sequence (opt2) from neuraminidase__InfluenzaA__ABA42250
augaaccccaaccagaagaucaucaccaucggcuccaucuccaucgccaucggcaucaucucccucaugcuccagaucggcaacaucaucuccaucugggccucccacuccauccagaccggcucccagaaccacaccggcaucugcaaccagcgcaucaucaccuacgagaacuccaccugggucaaccacaccuacgucaacaucaacaacaccaacgucgucgccggcaaggacaagaccuccgucacccucgccggcaacuccucccucugcuccaucuccggcugggccaucuacaccaaggacaacuccauccgcaucggcuccaagggcgacgucuucgucauccgcgagcccuucaucuccugcucccaccucgagugccgcaccuucuuccucacccagggcgcccuccucaacgacaagcacuccaacggcaccgucaaggaccgcucccccuaccgcgcccucauguccugcccccucggcgaggcccccucccccuacaacuccaaguucgaguccgucgccugguccgccuccgccugccacgacggcaugggcuggcucaccaucggcaucuccggccccgacaacggcgccgucgccguccucaaguacaacggcaucaucaccgagaccaucaaguccuggaagaagcgcauccuccgcacccaggaguccgagugcgucugcgucaacggcuccugcuucaccaucaugaccgacggccccuccaacggcgccgccuccuacaagaucuucaagaucgagaagggcaaggucaccaaguccaucgagcucaacgcccccaacuuccacuacgaggagugcuccugcuaccccgacaccggcaccgucaugugcgucugccgcgacaacuggcacggcuccaaccgccccugggucuccuucaaccagaaccucgacuaccagaucggcuacaucugcuccggcgucuucggcgacaacccccgccccaaggacggcaagggcuccugcaaccccgucaccgucgacggcgccgacggcgucaagggcuucuccuacaaguacggcgacggcgucuggaucggccgcaccaaguccaaccgccuccgcaagggcuucgagaugaucugggaccccaacggcuggaccgacaccgacuccgacuucuccgucaagcaggacgucgucgccaucaccgacugguccggcuacuccggcuccuucguccagcaccccgagcucaccggccucgacugcauccgccccugcuucugggucgagcucguccgcggccucccccgcgagaacaccaccaucuggaccuccggcuccuccaucuccuucugcggcgucgacuccgacaccgccaacugguccuggcccgacggcgccgagcuccccuucaccaucgacaaguga

SEQ ID NO: 110446 - RNA, 1413 nt, Artificial Sequence; identical to SEQ ID NO: 110432
  derived and/or modified CDS sequence (opt2) from neuraminidase__InfluenzaA__ABA42261

SEQ ID NO: 110447 - RNA, 1410 nt, Artificial Sequence
  derived and/or modified CDS sequence (opt2) from neuraminidase__InfluenzaA__ABA42272
augaaccccaaccagaagaucaucaccaucggcuccgucucccucaccaucuccaccaucugcuucuucaugcagaucgccauccucaucaccaccgucacccuccacuucaagcaguacgaguucaacuccccccccaacaaccaggucaugcucugcgagcccaccaucaucgagcgcaacaucaccgagaucgucuaccucaccaacaccaccaucgagaaggagaucugccccaagcucgccgaguaccgcaacugguccaagccccagugcgacaucaccggcuucgcccccuucuccaaggacaacuccauccgccucuccgccggcggcgacaucugggucacccgcgagcccuacgucuccugcgaccccgacaagugcuaccaguucgcccucggccagggcaccacccucaacaacguccacuccaacgacaccguccacgaccgcacccccuaccgcacccuccucaugaacgagcucggcguccccuuccaccucggcaccaagcaggucugcaucgccugguccuccuccuccugccacgacggcaaggccuggcuccacgucugcgucaccggcgacgacaagaacgccaccgccuccuucaucuacaacggccgccucgucgacuccaucgucuccugguccaaggacauccuccgcacccaggaguccgagugcgucugcaucaacggcaccugcaccgucgucaugaccgacggcuccgccuccggcaaggccgacaccaagauccucuucaucgaggagggcaagaucguccacaccuccacccucuccggcuccgcccagcacgucgaggagugcuccugcuacccccgcuaccccggcguccgcugcgucugccgcgacaacuggaagggcuccaaccgccccaucgucgacaucaacaucaaggacuacuccaucgucuccuccuacgucugcuccggccucgucggcgacaccccccgcaagaacgacuccuccuccuccucccacugccucgaccccaacaacgaggagggcggccacggcgucaagggcugggccuucgacgacggcaacgacgucuggaugggccgcaccaucaacgagaagcuccgccucggcuacgagaccuucaaggucaucgagggcugguccaaccccaacuccaagcuccagaucaaccgccaggucaucgucgagcgcggcaaccgcuccggcuacuccggcaucuucuccgucgagggcaaguccugcaucaaccgcugcuucuacgucgagcucauccgcggccgcaaggaggagaccgagguccucuggaccuccaacuccaucgucgucuucugcggcaccuccggcaccuacggcaccggcuccuggcccgacggcgccgacaucaaccucaugcccaucuga

SEQ ID NO: 110448 - RNA, 1410 nt, Artificial Sequence; identical to SEQ ID NO: 110363
  derived and/or modified CDS sequence (opt2) from neuraminidase__InfluenzaA__ABA42294

SEQ ID NO: 110449 - RNA, 1410 nt, Artificial Sequence; identical to SEQ ID NO: 110190
  derived and/or modified CDS sequence (opt2) from neuraminidase__InfluenzaA__ABA42305

SEQ ID NO: 110450 - RNA, 1410 nt, Artificial Sequence; identical to SEQ ID NO: 110200
  derived and/or modified CDS sequence (opt2) from neuraminidase__InfluenzaA__ABA42316

SEQ ID NO: 110451 - RNA, 1413 nt, Artificial Sequence
  derived and/or modified CDS sequence (opt2) from neuraminidase__InfluenzaA__ABA42327
augaaccccaaccagaagaucaucaccaucggcuccaucuccaucgccaucggcaucaucucccucaugcuccagaucggcaacaucaucuccaucugggccucccacuccauccagaccggcucccagaaccacaccggcaucugcaaccagcgcaucaucaccuacgagaacuccaccugggucaaccacaccuacgucaacaucaacaacaccaacgucgucgccggcaaggacaagaccuccgucacccucgccggcaacuccucccucugcuccaucuccggcugggccaucuacaccaaggacaacuccauccgcaucggcuccaagggcgacgucuucgucauccgcgagcccuucaucuccugcucccaccucgagugccgcaccuucuuccucacccagggcgcccuccucaacgacaagcacuccaacggcaccgucaaggaccgcucccccuaccgcgcccucauguccugcccccucggcgaggcccccucccccuacaacuccaaguucgaguccgucgccugguccgccuccgccugccacgacggcaugggcuggcucaccaucggcaucuccggccccgacaacggcgccgucgccguccucaaguacaacggcaucaucaccgagaccaucaaguccuggaagaagcgcauccuccgcacccaggaguccgagugcgucugcgucaacggcuccugcuucaccaucaugaccgacggccccuccaacggcgccgccuccuacaagaucuucaagaucgagaagggcaaggucaccaaguccaucgagcucaacgcccccaacuuccacuacgaggagugcuccugcuaccccgacaccggcaccgucaugugcgucugccgcgacaacuggcacggcuccaaccgccccugggucuccuucaaccagaaccucgacuaccagaucggcuacaucugcuccggcgucuucggcgacaacccccgccccaaggacggcgagggcuccugcaaccccgucaccgucgacggcgccgacggcgucaagggcuucuccuacaaguacggcaacggcgucuggaucggccgcaccaaguccaaccgccuccgcaagggcuucgagaugaucugggaccccaacggcuggaccgacaccgacuccgacuucuccgucaagcaggacgucgucgccaucaccgacugguccggcuacuccggcuccuucguccagcaccccgagcucaccggccucgacugcauccgccccugcuucugggucgagcucguccgcggccucccccgcgagaacaccaccaucuggaccuccggcuccuccaucuccuucugcggcgucaacuccgacaccgccaacugguccuggcccgacggcgccgagcuccccuucaccaucgacaaguga

SEQ ID NO: 110452 - RNA, 1410 nt, Artificial Sequence; identical to SEQ ID NO: 110185
  derived and/or modified CDS sequence (opt2) from neuraminidase__InfluenzaA__ABA42338

SEQ ID NO: 110453 - RNA, 1410 nt, Artificial Sequence
  derived and/or modified CDS sequence (opt2) from neuraminidase__InfluenzaA__ABA42349
augaaccccaaccagaagaucaucaccaucggcuccgucucccucaccaucgccaccaucugcuuccucaugcagaucgccauccucgucaccaccgucacccuccacuucaagcaguacgagugcgacuccccccccaacaaccaggucaugcucugcgagcccaccaucaucgagcgcaacaucaccgagaucgucuaccucaccaacaccaccaucgagaaggagaucugccccaagcucgccgaguaccgcaacugguccaagccccagugcaacaucaccggcuucgcccccuucuccaaggacaacuccauccgccucuccgccggcggcgacaucugggucacccgcgagcccuacgucuccugcgaccccgacaagugcuaccaguucgcccucggccagggcaccacccucaacaacggccacuccaacgacaccguccacgaccgcacccccuaccgcacccuccucaugaacgagcucggcguccccuuccaccucggcacccgccaggucugcaucgccugguccuccuccuccugccacgacggcaaggccuggcuccacgucugcgucaccggcgacgacgagaacgccaccgccuccuucaucuacaacggcaagcucgucgacuccaucggcuccugguccaagaagauccuccgcacccaggaguccgagugcgucugcaucaacggcaccugcaccgucgucaugaccgacggcuccgccuccggcaaggccgacaccaagauccucuucaucgaggagggcaagaucguccacaucuccacccucuccggcuccgcccagcacgucgaggagugcuccugcuacccccgcuaccccggcguccgcugcgucugccgcgacaacuggaagggcuccaaccgccccaucgucgacaucaacgucaaggacuacuccaucgucuccuccuacgucugcuccggccucgucggcgacaccccccgcaagaacgacuccuucuccuccucccacugccucgaccccaacaacgaggagggcggccacggcgucaagggcugggccuucgacgacggcaacgacgucuggaugggccgcaccaucuccgagaagcuccgcuccggcuacgagaccuucaaggucaucgagggcugguccaagcccaacuccaagcuccagaucaaccgccaggucaucgucgagcgcggcaaccgcuccggcuacuccggcaucuucuccgucgagggcaaguccugcaucaaccgcugcuucuacgucgagcucauccgcggccgcaaggaggagaccgaggucugguggaccuccaacuccaucgucgucuucugcggcaccuccggcaccuacggcaccggcuccuggcccgacggcgccgacaucaaccucaugcccaucuga

SEQ ID NO: 110454 - RNA, 1410 nt, Artificial Sequence; identical to SEQ ID NO: 110190
  derived and/or modified CDS sequence (opt2) from neuraminidase__InfluenzaA__ABA42360

SEQ ID NO: 110455 - RNA, 1410 nt, Artificial Sequence; identical to SEQ ID NO: 110185
  derived and/or modified CDS sequence (opt2) from neuraminidase__InfluenzaA__ABA42371

SEQ ID NO: 110456 - RNA, 1410 nt, Artificial Sequence; identical to SEQ ID NO: 110200
  derived and/or modified CDS sequence (opt2) from neuraminidase__InfluenzaA__ABA42382

SEQ ID NO: 110457 - RNA, 1410 nt, Artificial Sequence; identical to SEQ ID NO: 110185
  derived and/or modified CDS sequence (opt2) from neuraminidase__InfluenzaA__ABA42393

SEQ ID NO: 110458 - RNA, 1410 nt, Artificial Sequence
  derived and/or modified CDS sequence (opt2) from neuraminidase__InfluenzaA__ABA42404
augaaccccaaccagaagaucaucaccaucggcuccgucucccucaccaucgccaccaucugcuuccucaugcagaucgccauccucgucaccaccgucacccuccacuucaagcaguacgagugcaacuccccccccaacaaccaggucaugcucugcgagcccgccaucaucgagcgcaacaucaccgagaucgucuaccucaccaacaccaccaucgagaaggagaucugccccaagcucgccgaguaccgcaacugguccaagccccagugcaacaucaccggcuucgcccccuucuccaaggacaacuccauccgccucuccgccggcggcgacaucugggucacccgcgagcccuacgucuccugcgaccccgacaagugcuaccaguucgcccucggccagggcaccacccucaacaacggccacuccaacgacaccguccacgaccgcacccccuaccgcacccuccucaugaacgagcucggcguccccuuccaccucggcacccgccaggucugcaucgccugguccuccuccuccugccacgacggcaaggccuggcuccacgucugcgucaccggcgacgacgagaacgccaccgccuccuucaucuacaacggccgccucgucgacuccaucggcuccugguccaagaagauccuccgcacccaggaguccgagugcgucugcaucaacggcaccugcaccgucgucaugaccgacggcuccgccuccggcaaggccgacaccaagauccucuucaucgaggagggcaagaucgucaacaucuccacccuccccggcuccgcccagcacgucgaggagugcuccugcuacccccgcuaccccggcguccgcugcgucugccgcgacaacuggaagggcuccaaccgccccaucgucgacaucaacgucaaggacuacuccaucgucuccuccuacgucugcuccggccucgucggcgacaccccccgcaagaacgacuccuucuccuccucccacugccucgaccccaacaacgaggagggcggccacggcgucaagggcugggccuucgacgacggcaacgacgucuggaugggccgcaccaucuccgagaagcuccgcuccggcuacgagaccuucaaggucaucgagggcugguccaagcccaacuccaagcuccagaucaaccgccaggucaucgucgagcgcggcaaccgcuccggcuacuccggcaucuucuccgucgagggcaaguccugcaucaaccgcugcuucuacgucgagcucauccgcggccgcaaggaggagaccgaggucugguggaccuccaacuccaucgucgucuucugcggcaccuccggcaccuacggcaccggcuccuggcccgacggcgccgacaucaaccucaugcccaucuga

SEQ ID NO: 110459 - RNA, 1410 nt, Artificial Sequence; identical to SEQ ID NO: 110200
  derived and/or modified CDS sequence (opt2) from neuraminidase__InfluenzaA__ABA42415

SEQ ID NO: 110460 - RNA, 1410 nt, Artificial Sequence; identical to SEQ ID NO: 110207
  derived and/or modified CDS sequence (opt2) from neuraminidase__InfluenzaA__ABA42446

SEQ ID NO: 110461 - RNA, 1410 nt, Artificial Sequence
  derived and/or modified CDS sequence (opt2) from neuraminidase__InfluenzaA__ABA42457
augaaccccaaccagaagaucaucaccaucggcuccgucucccucaccaucgccaccaucugcuuccucaugcagaucgccauccucgucaccaccgucacccuccacuucaagcaguacgagugcaacuccccccccaacaaccaggucaugcucugcgagcccaccaucaucgagcgcaacaucaccgagaucgucuaccucaccaacaccaccaucgagaaggagaucugccccaagcucgccgaguaccgcaacugguccaagccccagugcaacaucaccggcuucgcccccuucuccaaggacaacuccauccgccucuccgccggcggcgacaucugggucacccgcgagcccuacgucuccugcgaccccgacaagugcuaccaguucgcccucggccagggcaccacccucaacaacggccacuccaacgacaccguccacgaccgcacccccuaccgcacccuccucaugaacgagcucggcguccccuuccaccucggcacccgccaggucugcaucgccugguccuccuccuccugccacgacggcaaggccuggcuccacgucugcgucaccggcgacgacgagaacgccaccgccuccuucaucuacaacggccgccucgucgacuccaucggcuccugguccaagaagauccuccgcacccaggaguccgagugcgucugcaucaacggcaccugcaccgucgucaugaccgacggcuccgccuccggcaaggccgacaccaagauccucuucaucgaggagggcaagaucguccacaucuccacccucuccggcuccgcccagcacgucgaggagugcuccugcuacccccgcuaccccggcguccgcugcgucugccgcgacaacuggaagggcuccaaccgccccaucgucgacaucaacgucaaggacuacuccaucgucuccuccuacgucugcuccggccucgucggcgacaccccccgcaagaacgacuccuucuccuccucccacugccucgaccccaacaacgaggagggcggccacggcgucaagggcugggccuucgacgacggcaacgacgucuggaugggccgcaccaucuccgagaagcuccgcuccggcuacgagaccuucaaggucaucgagggcugguccaagcccaacuccaagcuccagaucaaccgccaggucaucgucgagcgcggcaaccgcuccggcuacuccggcaucuucuccgucgaguccaaguccugcaucaaccgcugcuucuacgucgagcucauccgcggccgcaaggaggagaccgaggucugguggaccuccaacuccaucgucgucuucugcggcaccuccggcaccuacggcaccggcuccuggcccgacggcgccgacaucaaccucaugcccaucuga

SEQ ID NO: 110462 - RNA, 1410 nt, Artificial Sequence; identical to SEQ ID NO: 110207
  derived and/or modified CDS sequence (opt2) from neuraminidase__InfluenzaA__ABA42468

SEQ ID NO: 110463 - RNA, 1410 nt, Artificial Sequence
  derived and/or modified CDS sequence (opt2) from neuraminidase__InfluenzaA__ABA42479
augaaccccaaccagaagaucaucaccaucggcuccgucucccucaccaucgccaccaucugcuuccucaugcagaucgccauccucgucaccaccgucacccuccacuucaagcaguacgagugcgacuccccccccaacaaccaggucaugcucugcgagcccaccaucaucgagcgcaacaucaccgagaucgucuaccucaccaacaccaccaucgagaaggagaucugccccaagcucgccgaguaccgcaacugguccaagccccagugcaacaucaccggcuucgcccccuucuccaaggacaacuccauccgccucuccgccggcggcgacaucugggucacccgcgagcccuacgucuccugcgaccccgacaagugcuaccaguucgcccucggccagggcaccacccucaacaacggccacuccaacgacaccguccacgaccgcacccccuaccgcacccuccucaugaacgagcucggcguccccuuccaccucggcacccgccaggucugcaucgccugguccuccuccuccugccacgacggcaaggccuggcuccacgucugcgucaccggcgacgacgagaacgccaccgccuccuucaucuacaacggccgccucgucgacuccaucggcuccugguccaagaagauccuccgcacccaggaguccgagugcgucugcaucaacggcaccugcaccgucgucaugaccgacggcuccgccuccggcaaggccgacaccaagauccucuucaucgaggagggcaagaucguccacaucuccacccucuccggcuccgcccagcacgucgaggagugcuccugcuacccccgcuaccccggcguccgcugcgucugccgcgacaacuggaagggcuccaaccgccccaucgucgacaucaacgucaaggacuacuccaucgucuccuccuacgucugcuccggccucgucggcgacaccccccgcaagaacgacuccuucuccuccucccacugccucgaccccaacaacgaggacggcggccacggcgucaagggcugggccuucgacgacggcaacgacgucuggaugggccgcaccaucuccgagaagcuccgcuccggcuacgagaccuucaaggucaucgagggcugguccaagcccaacuccaagcuccagaucaaccgccaggucaucgucgagcgcggcaaccgcuccggcuacuccggcaucuucuccgucgagggcaaguccugcaucaaccgcugcuucuacgucgagcucauccgcggccgcaaggaggagaccgaggucugguggaccuccaacuccaucgucgucuucugcggcaccuccggcaccuacggcaccggcuccuggcccgacggcgccgacaucaaccucaugcccaucuga

SEQ ID NO: 110464 - RNA, 1410 nt, Artificial Sequence
  derived and/or modified CDS sequence (opt2) from neuraminidase__InfluenzaA__ABA42490
augaaccccaaccagaagaucaucaccaucggcuccgucucccucaccaucgccaccaucugcuuccucaugcagaucgccauccucgucaccaccgucacccuccacuucaagcaguacgagugcaacuccccccccaacaaccaggucaugcucugcgagcccaccaucaucgagcgcaacaucaccgagaucgucuaccucaccaacaccaccaucgagaaggagaucugccccaagcucgccgaguaccgcaacugguccaagccccagugcaacaucaccggcuucgcccccuucuccaaggacaacuccauccgccucuccgccggcggcgacaucugggucacccgcgagcccuacgucuccugcgaccccgacaagugcuaccaguucgcccucggccagggcaccacccucaacaacggccacuccaacgacaccguccacgaccgcacccccuaccgcacccuccucaugaacgagcucggcguccccuuccaccucggcacccgccaggucugcaucgccugguccuccuccuccugccacgacggcaaggccuggcuccacgucugcgucaccggcgacgacgagaacgccaccgccuccuucaucuacaacggccgccucgucgacuccaucggcuccugguccaagaagauccuccgcacccaggaguccgagugcgucugcaucaacggcaccugcaccgucgucaugaccgacggcuccgccuccggcaaggccgacaccaagauccucuucaucgaggagggcaagaucguccacaucuccaagcucuccggcuccgcccagcacgucgaggagugcuccugcuacccccgcuaccccggcguccgcugcgucugccgcgacaacuggaagggcuccaaccgccccaucgucgacaucaacgucaaggacuacuccaucgucuccuccuacgucugcuccggccucgucggcgacaccccccgcaagaacgacuccuucuccuccucccacugccucgaccccaacaacgaggagggcggccacggcgucaagggcugggccuucgacgacggcaacgacgucuggaugggccgcaccaucuccgagaagcuccgcuccggcuacgagaccuucaaggucaucaagggcugguccaagcccaacuccaagcuccagaucaaccgccaggucaucgucgagcgcggcaaccgcuccggcuacuccggcaucuucuccgucgagggcaaguccugcaucaaccgcugcuucuacgucgagcucauccgcggccgcaaggaggagaccgaggucugguggaccuccaacuccaucgucgucuucugcggcaccuccggcaccuacggcaccggcuccuggcccgacggcgccgacaucaaccucaugcccaucuga

SEQ ID NO: 110465 - RNA, 1410 nt, Artificial Sequence; identical to SEQ ID NO: 110207
  derived and/or modified CDS sequence (opt2) from neuraminidase__InfluenzaA__ABA42501

SEQ ID NO: 110466 - RNA, 1410 nt, Artificial Sequence
  derived and/or modified CDS sequence (opt2) from neuraminidase__InfluenzaA__ABA42512
augaaccccaaccagaagaucaucaccaucggcuccgucucccucaccaucgccaccaucugcuuccucaugcagaucgccauccucgucaccaccgucacccuccacuucaagcaguacgagugcaacuccccccccaacaaccaggucaugcucugcgagcccaccaucaucgagcgcaacaucaccgagaucgucuaccccaccaacaccaccaucgagaaggagaucugccccaagcucgccgaguaccgcaacugguccaagccccagugcaacaucaccggcuucgcccccuucuccaaggacaacuccauccgccucuccgccggcggcgacaucugggucacccgcgagcccuacgucuccugcgaccccgacaagugcuaccaguucgcccucggccagggcaccacccucaacaacggccacuccaacgacaccguccacgaccgcacccccuaccgcacccuccucaugaacgagcucggcguccccuuccaccucggcaccaagcaggucugcaucgccugguccuccuccuccugccacgacggcaaggccuggcuccacgucugcgucaccggcgacgacgagaacgccaccgccuccuucaucuacaacggccgccucgucgacuccaucggcuccugguccaagaagauccuccgcacccaggaguccgagugcgucugcaucaacggcaccugcaccgucgucaugaccgacggcuccgccuccggcaaggccgacaccaagauccucuucaucgaggagggcaagaucguccacaccuccucccucuccggcuccgcccagcacgucgaggagugcuccugcuacccccgcuaccccggcguccgcugcgucugccgcgacaacuggaagggcuccaaccgccccaucgucgacaucaacgucaaggacuacuccaucgucuccuccuacgucugcuccggccucgucggcgacaccccccgcaagaacgacuccuccuccuccucccacugccucgaccccaacaacgaggagggcggccacggcgucaagggcugggccuucgacgacggcaacgacgucuggaugggccgcaccaucuccgagaagcuccgcuccggcuacgagaccuucaaggucaucgagggcugguccaagcccaacuccaagcuccagaucaaccgccaggucaucgucgaccgcggcaaccgcuccggcuacuccggcaucuucuccgucgagggcaaguccugcaucaaccgcugcuucuacgucgagcucauccgcggccgcaagcaggagaccgagguccucuggaccuccaacuccaucgucgucuucugcggcaccuccggcaccuacggcaccggcuccuggcccgacggcgccgacaucaaccucaugcccaucuga

SEQ ID NO: 110467 - RNA, 1410 nt, Artificial Sequence; identical to SEQ ID NO: 110097
  derived and/or modified CDS sequence (opt2) from neuraminidase__InfluenzaA__ABA42523

SEQ ID NO: 110468 - RNA, 1410 nt, Artificial Sequence; identical to SEQ ID NO: 110097
  derived and/or modified CDS sequence (opt2) from neuraminidase__InfluenzaA__ABA42534

SEQ ID NO: 110469 - RNA, 1410 nt, Artificial Sequence; identical to SEQ ID NO: 110289
  derived and/or modified CDS sequence (opt2) from neuraminidase__InfluenzaA__ABA42545

SEQ ID NO: 110470 - RNA, 1410 nt, Artificial Sequence
  derived and/or modified CDS sequence (opt2) from neuraminidase__InfluenzaA__ABA42556
augaaccccaaccagaagaucaucaccaucggcuccgucucccucaccaucgccaccaucugcuuccucaugcagaucgccauccucgucaccaccgucacccuccacuucaagcaguacgagugcaacuccccccccaacaaccaggucaugcucugcgagcccaccaucaucgagcgcaacaucaccgagaucgucuaccucaccaacaccaccaucgagaaggagaucugccccaagcucgccgaguaccgcaacugguccaagccccagugcaacaucaccggcuucgcccccuucuccaaggacaacuccauccgccucuccgccggcggcgacaucugggucacccgcgagcccuacgucuccugcgaccccgacaagugcuaccaguucgcccucggccagggcaccacccucaacaacggccacuccaacgacaccguccacgaccgcacccccuaccgcacccuccucaugaacgagcucggcguccccuuccaccucggcaccaagcaggucugcaucgccugguccuccuccuccugccacgacggcaaggccuggcuccacgucugcgucaccggcgacgacgagaacgccaccgccuccuucaucuacaacggccgccucgucgacuccaucggcuccugguccaagaagauccuccgcacccaggaguccgagugcgucugcaucaacggcaccugcaccgucgucaugaccgacggcuccgccuccggcaaggccgacaccaagauccucuucaucgaggagggcaagaucguccacaccucccuccucuccggcuccgcccagcacgucgaggagugcuccugcuacccccgcuaccccggcguccgcugcgucugccgcgacaacuggaagggcuccaaccgccccaucgucgacaucaacgucaaggacuacuccaucgucuccuccuacgucugcuccggccucgucggcgacaccccccgcaagaacgacuccuccuccuccucccacugccucgaccccaacaacgaggagggcggccacggcgucaagggcugggccuucgacgacggcaacgacgucuggaugggccgcaccaucuccgagaagcuccgcuccggcuacgagaccuucaaggucaucgagggcugguccaagcccaacuccaagcuccagaucaaccgccaggucaucgucgaccgcggcaaccgcuccggcuacuccggcaucuucuccgucgagggcaaguccugcaucaaccgcugcuucuacgucgagcucauccgcggccgcaagcaggaggccgagguccucuggaccuccaacuccaucgucgucuucugcggcaccuccggcaccuacggcaccggcuccuggcccgacggcgccgacaucaaccucaugcccaucuga

SEQ ID NO: 110471 - RNA, 1410 nt, Artificial Sequence; identical to SEQ ID NO: 110097
  derived and/or modified CDS sequence (opt2) from neuraminidase__InfluenzaA__ABA42567

SEQ ID NO: 110472 - RNA, 1410 nt, Artificial Sequence
  derived and/or modified CDS sequence (opt2) from neuraminidase__InfluenzaA__ABA42931
augaaccccaaccagaagaucaucaccaucggcuccgucucccucaccaucgccaccaucugcucccucaugcagaucgccauccucgucaccaccgucacccuccacuucaagcaguacgagugcaacuccccccccaacaaccaggucaugcucugcgagcccaccaucaucgagcgcaacaucaccgagaucgucuaccucaccaacaccaccaucgagaaggagaucugccccaagcucgccgaguaccgcaacugguccaagccccagugcaacaucaccggcuucgcccccuucuccaaggacaacuccauccgccucuccgccggcggcgacaucugggucacccgcgagcccuacgucuccugcgaccccgacaagugcuaccaguucgcccucggccagggcaccacccucaacaacggccacuccaacgacaccguccacgaccgcacccccuaccgcacccuccucaugaacgagcucggcguccccuuccaccucggcaccaagcaggucugcaucgccugguccuccuccuccugccacgacggcaaggccuggcuccacgucugcgucaccggcgacgacgagaacgccaccgccuccuucaucuacaacggccgccucgucgacuccaucggcuccugguccaagaagauccuccgcacccaggaguccgagugcgucugcaucaacggcaccugcaccgucgucaugaccgacggcuccgccuccggcaaggccgacaccaagauccucuucaucgaggagggcaagaucguccacaccucccuccucuccggcuccgcccagcacgucgaggagugcuccugcuacccccgcuaccccggcguccgcugcgucugccgcgacaacuggaagggcuccaaccgccccaucgucgacaucaacgucaaggacuacuccaucgucuccuccuacgucugcuccggccucgucggcgacaccccccgcaagaacgacuccuccuccuccucccacugccucgaccccaacaacgaggagggcggccacggcgucaagggcugggccuucgacgacggcaacgacgucuggaugggccgcaccaucuccgagaagcuccgcuccggcuacgagaccuucaaggucaucgagggcugguccaagcccaacuccaagcuccagaucaaccgccaggucaucgucgaccgcggcaaccgcuccggcuacuccggcaucuucuccgucgagggcaaguccugcaucaaccgcugcuucuacgucgagcucauccgcggccgcaagcaggagaccgagguccucuggaccuccaacuccaucgucgucuucugcggcaccuccggcaccuacggcaccggcuccuggcccgacggcgccgacaucaaccucaugcccaucuga

SEQ ID NO: 110473 - RNA, 1410 nt, Artificial Sequence; identical to SEQ ID NO: 110097
  derived and/or modified CDS sequence (opt2) from neuraminidase__InfluenzaA__ABA42942

SEQ ID NO: 110474 - RNA, 1410 nt, Artificial Sequence; identical to SEQ ID NO: 110097
  derived and/or modified CDS sequence (opt2) from neuraminidase__InfluenzaA__ABA42981

SEQ ID NO: 110475 - RNA, 1410 nt, Artificial Sequence; identical to SEQ ID NO: 110185
  derived and/or modified CDS sequence (opt2) from neuraminidase__InfluenzaA__ABA42992

SEQ ID NO: 110476 - RNA, 1413 nt, Artificial Sequence
  derived and/or modified CDS sequence (opt2) from neuraminidase__InfluenzaA__ABA43192
augaaccccaaccagaagaucaucaccaucggcuccaucuccaucgccaucggcaucaucucccucaugcuccagaucggcaacaucaucuccaucugggccucccacuccauccagaccggcucccagaaccacaccggcgucugcaaccagcgcaucaucaccuacgagaacuccaccugggucaaccacaccuacgucaacaucaacaacaccaacgucaucgccggcaaggacaagaccuccgucauccucgccggcaacuccucccucugcuccaucuccggcugggccaucuacaccaaggacaacuccauccgcaucggcuccaagggcgacgucuucgucauccgcgagcccuucaucuccugcucccaccucgagugccgcaccuucuuccucacccagggcgcccuccucaacgacaagcacuccaacggcaccgucaaggaccgcucccccuaccgcgcccucauguccugcccccucggcgaggcccccucccccuacaacuccaaguucgaguccgucgccugguccgccuccgccugccacgacggcaugggcuggcucaccaucggcaucuccggccccgacaacggcgccgucgccguccucaaguacaacggcaucaucaccgagaccaucaaguccuggaagaagcagauccuccgcacccaggaguccgagugcgucugcgucaacggcuccugcuucaccaucaugaccgacggccccuccaacggcgccgccuccuacaagaucuucaagaucgagaagggcaaggucaccaaguccaucgagcucaacgcccccaacuuccacuacgaggagugcuccugcuaccccgacaccggcaccgucaugugcgucugccgcgacaacuggcacggcuccaaccgccccugggucuccuucaaccagaaccucgacuaccagaucggcuacaucugcuccggcgucuucggcgacaacccccgccccaaggacggcgagggcuccugcaaccccgucaccgucgacggcgccaacggcgucaagggcuucuccuacaaguacggcaacggcgucuggaucggccgcaccaaguccaaccgccuccgcaagggcuucgagaugaucugggaccccaacggcuggaccgacaccgacuccgacuucuccgucaagcaggacgucgucuccaucaccgacugguccggcuacuccggcuccuucguccagcaccccgagcucaccggccucgacugcauccgccccugcuucugggucgagcucguccgcggccuccccaaggagaacaccaccaucuggaccuccggcuccuccaucuccuucugcggcgucaacuccgacaccgccaacugguccuggcccgacggcgccgagcuccccuucaccaucgacaaguga

SEQ ID NO: 110477 - RNA, 1410 nt, Artificial Sequence; identical to SEQ ID NO: 110382
  derived and/or modified CDS sequence (opt2) from neuraminidase__InfluenzaA__ABA43203

SEQ ID NO: 110478 - RNA, 1410 nt, Artificial Sequence
  derived and/or modified CDS sequence (opt2) from neuraminidase__InfluenzaA__ABA43339
augaaccccaaccagaagaucaucaccaucggcuccgucucccucuccaucgccaccaucugcuuccucaugcagaucgccauccucgucaccaccgucacccuccacuucaagcaguacgagugcuccuccccccccaacaaccaggucaugcccugcgagcccaccaucaucgagcgcaacaucaccgagaucgucuaccucaccaacaccaccaucgagaaggagaucugccccaagcucgucgaguaccgcaacugguccaagccccagugcaagaucaccggcuucgcccccuucuccaaggacaacuccauccgccucuccgccggcggcgacaucugggucacccgcgagcccuacgucuccugcgaccccggcaagugcuaccaguucgcccucggccagggcaccacccucaacaaccgccacuccaacgacaccguccacgaccgcacccccuaccgcacccuccucaugaacgagcucggcguccccuuccaccucggcaccaagcaggucugcauggccugguccuccuccuccugccacgacggcaaggccuggcuccacgucugcgucaccggccacgacgagaacgccaccgccuccuucaucuacgacggccgccucgucgacuccaucggcuccugguccaagaacauccuccgcacccaggaguccgagugcgucugcaucaacggcaccugcaccgucgucaugaccgacggcuccgccuccgagcgcgccgacaccaagauccucuucaucgaggagggcaagaucguccacaucuccccccucuccggcuccgcccagcacgucgaggagugcuccugcuacccccgcuaccccggcguccgcugcgucugccgcgacaacuggaagggcuccaaccgccccaucgucgacaucaacgucaaggacuacuccaucgucuccuccuacgucugcuccggccucgucggcgacaccccccgcaagaacgaccgcuccuccuccuccuacugccgcaaccccaacaacgagaagggcucccacggcgucaagggcugggccuucgacgacggcaacgacgucuggaugggccgcaccaucggcgaggagcuccgcuccggcuacgagaccuucaaggucaucggcggcugguccacccccaacuccaagcuccagaucaaccgccaggucaucgucgacuccggcaaccgcuccggcuacuccggcaucuucuccgucgagggcaaguccugcaucaaccgcugcuucuacgucgagcucauccgcggccgcaagcaggagacccgcgucugguggaccuccaacuccaucgucgucuucugcggcaccuccggcaccuacggcaccggcuccuggcccgacggcgccgacaucaaccucaugcccaucuga

SEQ ID NO: 110479 - RNA, 1410 nt, Artificial Sequence
  derived and/or modified CDS sequence (opt2) from neuraminidase__InfluenzaA__ABA54916
augaaccccaaccagaagaucaucaccaccggcuccaucugcauggucaucggcauggucucccucaugcuccagaucggcaacaucaucuccaucugggucucccacuccauccagaccggcacccagcaccgcgccgagcccugcaaccgcuccaucaucaacuacgagaacaacaccugggucaaccagaccuacgucaagaucuccaacaccaacuuccucaccgagaaggccgucgccuccguccgccucgucggcaacuccucccucugccccaucuccggcugggccgucuacuccaaggacaacuccauccgcaucggcuccaagggcgacgucuucgucauccgcgagcccuucaucuccugcucccaccucgagugccgcaccuucuuccucacccagggcgcccuccucaacgacaagcacuccaacggcaccgucaaggaccgcucccccuaccgcacccucauguccugccccgucggcgaggcccccucccccuacaacucccgcuucgaguccgucgccugguccgccuccgccugccacgacggcaccuccuggcucaccaucggcaucuccggccccgacaacggcgccgucgccguccucaaguacaacggcaucaucaccgacaccaucaaguccuggcgcaacaacauccuccgcgcccaggaguccgagugcgccugcgucaacggcuccugcuucaccgucaugaccgacggccccuccaacggccaggccuccuacaagaucuucaagaucgagaagggcaaggucgucaaguccgucgagcucaacgcccccaacuaccacuacgaggagugcuccugcuaccccgacgccggcgagaucaccugcgucugccgcgacaacuggcacggcuccaaccgccccugggucuccuucaaccagaaccucgaguaccagaucggcuacaucugcuccggcgucuucggcgacaacccccgccccaacgacggcaccggcuccugcggccccgucucccccaacggcgccuacggcgucaagggcuucuccuucaaguacggcaacggcgucuggaucggccgcaccaaguccaccaacucccgcuccggcuucgagaugaucugggaccccaacggcuggaccggcaccgacuccaacuucuccgucaagcaggacaucgucgccaucaccgacugguccggcuacuccggcuccuucguccagcaccccgagcucaccggccucgacugcauccgccccugcuucugggucgagcucauccgcggccgccccaaggaguccaccaucuggaccuccggcuccuccaucuccuucugcggcgucaacuccgacaccgucggcugguccuggcccgacggcgccgagcuccccuucaccaucgacaaguga

SEQ ID NO: 110480 - RNA, 1413 nt, Artificial Sequence
  derived and/or modified CDS sequence (opt2) from neuraminidase__InfluenzaA__ABA87048
augaaccccaaccagaagaucaucaccaucggcuccaucuccaucgccaucggcaucaucucccucaugcuccagaucggcaacaucaucuccaucugggccucccacuccauccagaccggcucccagaaccacaccggcgucugcaaccagcgcaucaucaccuacgagaacuccaccugggucaaccacaccuacgucaacaucaacaacaccaacgucaucgccggcaaggacaagaccuccgucacccucgccggcaacuccucccucugcuccaucuccggcugggccaucuacaccaaggacaacuccauccgcaucggcuccaagggcgacgucuucgucauccgcgagcccuucaucuccugcucccaccucgagugccgcaccuucuuccucacccagggcgcccuccucaacgacaagcacuccaacggcaccgucaaggaccgcucccccuaccgcgcccucauguccugcccccucggcgaggcccccucccccuacaacuccaaguucgaguccgucgccugguccgccuccgccugccacgacggcaugggcuggcucaccaucggcaucuccggccccgacaacggcgccgucgccguccucaaguacaacggcaucaucaccgagaccaucaaguccuggaagaagcagauccuccgcacccaggaguccgagugcgucugcgucaacggcuccugcuucaccaucaugaccgacggccccuccaaccgcgccgccuccuacaagaucuucaagaucgagaagggcaaggucaccaaguccgucgagcucaacgcccccaacuuccacuacgaggagugcuccugcuaccccgacaccggcaccgucaugugcgucugccgcgacaacuggcacggcuccaaccgccccugggucuccuucaaccagaaccucgacuaccagaucggcuacaucugcuccggcgucuucggcgacaacccccgccccaaggacggcgagggcuccugcaaccccgucaccgucgacggcgccaacggcgucaagggcuucuccuacaaguacggcaacggcgucuggaucggccgcaccaaguccaaccgccuccgcaagggcuucgagaugaucugggaccccaacggcuggaccgacaccgacuccgacuucuccgucaagcaggacgucgucgccaucaccgacugguccggcuacuccggcuccuucguccagcaccccgagcucaccggccucgacugcauccgccccugcuucugggucgagcucguccgcggccuccccaaggagaacaccaccaucuggaccuccggcuccuccaucuccuucugcggcgucaacuccgacaccgccaacugguccuggcccgacggcgccgagcuccccuucaccaucgacaaguga

SEQ ID NO: 110481 - RNA, 1413 nt, Artificial Sequence
  derived and/or modified CDS sequence (opt2) from neuraminidase__InfluenzaA__ABA87060
augaaccccaaccagaagaucaucaccaucggcuccaucuccaucgccaucggcaucaucucccucaugcuccagaucggcaacaucaucuccaucugggccucccacuccauccagaccggcucccagaaccacaccggcaucugcaaccagcgcaucaucaccuacgagaacuccaccugggucaaccacaccuacgucaacaucaacaacaccaacgucgucgccggcaaggacaagaccuccgucacccucgccggcaacuccucccucugcuccaucuccggcugggccaucuacaccaaggacaacuccauccgcaucggcuccaagggcgacgucuucgucauccgcgagcccuucaucuccugcucccaccucgagugccgcaccuucuuccucacccagggcgcccuccucaacgacaagcacuccaacggcaccgucaaggaccgcucccccuaccgcgcccucauguccugcccccucggcgaggcccccucccccuacaacuccaaguucgaguccgucgccugguccgccuccgccugccacgacggcaugggcuggcucaccaucggcaucuccggccccgacaacggcgccgucgccguccucaaguacaacggcaucaucaccgagaccaucaaguccuggaagaagcgcauccuccgcacccaggaguccgagugcgucugcgucaacggcuccugcuucaccaucaugaccgacggccccuccaacggcaccgccuccuacaagaucuucaagaucgagaagggcaaggucaccaaguccaucgagcucaacgcccccaacuuccacuacgaggagugcuccugcuaccccgacaccggcaccgucaugugcgucugccgcgacaacuggcacggcuccaaccgccccugggucuccuucaaccagaaccucgacuaccagaucggcuacaucugcuccggcgucuucggcgacaacccccgccccaaggacggcaagggcuccugcucccccgucaccgucgacggcgccgacggcgucaagggcuucuccuacaaguacggcaacggcgucuggaucggccgcaccaaguccaaccgccuccgcaagggcuucgagaugaucugggaccccaacggcuggaccgacaccgacuccgacuucuccgucaagcaggacgucgucgccaucaccgacugguccggcuacuccggcuccuucguccagcaccccgagcucaccggccucgacugcauccgccccugcuucugggucgagcucguccgcggccucccccgcgagaacaccaccaucuggaccuccggcuccuccaucuccuucugcggcgucgacuccgacaccgccaacugguccuggcccgacggcgccgagcuccccuucaccaucgacaaguga

SEQ ID NO: 110482 - RNA, 1413 nt, Artificial Sequence
  derived and/or modified CDS sequence (opt2) from neuraminidase__InfluenzaA__ABA87083
augaaccccaaccagaagaucaucaccaucggcuccaucuccaucgccaucggcaucaucucccucaugcuccagaucggcaacaucaucuccaucugggccucccacuccauccagaccggcucccagaaccacaccggcaucugcaaccagaagaucaucaccuacaagaacuccaccugggucaaccacaccuacgucaacaucaacaacaccaacgucgucgccggcaaggacaagaccuccgucacccucgccggcaacuccucccucugcuccaucuccggcugggccaucuacaccaaggacaacuccauccgcaucggcuccaagggcgacgucuucgucauccgcgagcccuucaucuccugcucccaccucgagugccgcaccuucuuccucacccagggcgcccuccucaacgacaagcacuccaacggcaccgucaaggaccgcucccccuaccgcgcccucauguccugcccccucggcgaggcccccucccccuacaacuccaaguucgaguccgucgccugguccgccuccgccugccacgacggcaugggcuggcucaccaucggcaucuccggccccgacaacggcgccgucgccguccucaaguacaacggcaucaucaccgagaccaucaaguccuggaagaagcgcauccuccgcacccaggaguccgagugcgucugcgucaacggcuccugcuucaccaucaugaccgacggccccuccaacggcgccgccuccuacaagaucuucaagaucgagaagggcaaggucaccaaguccaucgagcucaacgcccccaacuuccacuacgaggagugcuccugcuaccccgacaccggcaccgucaugugcgucugccgcgacaacuggcacggcuccaaccgccccugggucuccuucaaccagaaccucgacuaccagaucggcuacaucugcuccggcgucuucggcgacaacccccgccccaaggacggcgagggcuccugcaaccccgucaccgucgacggcgccgacggcgucaagggcuucuccuacaaguacggcaacggcgucuggaucggccgcaccaaguccaaccgccuccgcaagggcuucgagaugaucugggaccccaacggcuggaccgacaccgacuccgucuucuccgucaagcaggacgucgucgccaucaccgacugguccggcuacuccggcuccuucguccagcaccccgagcucaccggccucgacugcauccgccccugcuucugggucgagcucguccgcggccucccccgcgagaacaccaccaucuggaccuccggcuccuccaucuccuucugcggcgucaacuccgacaccgccaacugguccuggcccgacggcgccgagcuccccuucaccaucgacaaguga

SEQ ID NO: 110483 - RNA, 1413 nt, Artificial Sequence
  derived and/or modified CDS sequence (opt2) from neuraminidase__InfluenzaA__ABA87234
augaacuccaaccagaagaucaucaccaucggcuccaucuccaucgccaucggcaucaucucccucaugcuccagaucggcaacaucaucuccaucugggccucccacuccauccagaccggcucccagaaccacaccggcgucugcaaccagcgcaucaucaccuacgagaacuccaccugggucaaccacaccuacgucaacaucaacaacaccaacgucaucgccggcaaggacaagaccuccgucacccucgccggcaacuccucccucugcuccaucuccggcugggccaucuacaccaaggacaacuccauccgcaucggcuccaagggcgacgucuucgucauccgcgagcccuucaucuccugcucccaccucgagugccgcaccuucuuccucacccagggcgcccuccucaacgacaagcacuccaacggcaccgucaaggaccgcucccccuaccgcgcccucauguccugcccccucggcgaggcccccucccccuacaacuccaaguucgaguccgucgccugguccgccuccgccugccacgacggcaugggcuggcucaccaucggcaucuccggccccgacaacggcgccgucgccguccucaaguacaacggcaucaucaccgagaccaucaaguccuggaagaagcagauccuccgcacccaggaguccgagugcgucugcgucaacggcuccugcuucaccaucaugaccgacggccccuccaacggcgccgccuccuacaagaucuucaagaucgagaagggcaaggucaucaaguccaucgagcucaacgcccccaacuuccacuacgaggagugcuccugcuaccccgacaccggcaccgucaugugcgucugccgcgacaacuggcacggcuccaaccgccccugggucuccuucaaccagaaccucgacuaccagaucggcuacaucugcuccggcgucuucggcgacaacccccgccccaaggacggcgagggcuccugcaaccccgucaccgucgacggcgccaacggcgucaagggcuucuccuacaaguacggcaacggcgucuggaucggccgcaccaaguccaaccgccuccgcaagggcuucgagaugaucugggaccccaacggcuggaccgacaccgacuccgacuucuccgucaagcaggacgucgucgccaucaccgacugguccggcuacuccggcuccuucguccagcaccccgagcucaccggccucgacugcauccgccccugcuucugggucgagcucguccgcggccuccccaaggagaacaccaccaucuggaccuccggcuccuccaucuccuucugcggcgucaacuccgacaccgccaacugguccuggcccgacggcgccgagcuccccuucaccaucgacaaguga

SEQ ID NO: 110484 - RNA, 1410 nt, Artificial Sequence; identical to SEQ ID NO: 110418
  derived and/or modified CDS sequence (opt2) from neuraminidase__InfluenzaA__ABB02784

SEQ ID NO: 110485 - RNA, 1413 nt, Artificial Sequence; identical to SEQ ID NO: 110422
  derived and/or modified CDS sequence (opt2) from neuraminidase__InfluenzaA__ABB02795

SEQ ID NO: 110486 - RNA, 1413 nt, Artificial Sequence; identical to SEQ ID NO: 110422
  derived and/or modified CDS sequence (opt2) from neuraminidase__InfluenzaA__ABB02806

SEQ ID NO: 110487 - RNA, 1413 nt, Artificial Sequence
  derived and/or modified CDS sequence (opt2) from neuraminidase__InfluenzaA__ABB02817
augaaccccaaccagaagaucaucaccaucggcuccaucuccaucgccaucggcaucaucucccucaugcuccagaucggcaacaucaucuccaucugggccucccacuccauccagaccggcucccagaaccacaccggcgucugcaaccagcgcaucaucaccuacgagaacuccaccugggucaaccacaccuacgucaacaucaacaacaccaacgucaucgccggcaaggacaagaccuccgucacccucgccggcaacuccucccucugcuccaucuccggcugggccaucuacaccaaggacaacuccauccgcaucggcuccaagggcgacgucuucgucauccgcgagcccuucaucuccugcucccaccucgagugccgcaccuucuuccucacccagggcgcccuccucaacgacaagcacuccaacggcaccgucaaggaccgcucccccuaccgcgcccucauguccugcccccucggcgaggcccccucccccuacaacuccaaguucgaguccgucgccugguccgccuccgccugccacgacggcaugggcuggcucaccaucggcaucuccggccccgacaacggcgccgucgccguccucaaguacaacggcaucaucaccgagaccaucaaguccuggaagaagcagauccuccgcacccaggaguccgagugcgucugcgucaacggcuccugcuucaccaucaugaccgacggccccuccaacggcgccgccuccuacaagaucuucaagaucgagaagggcaaggucaccaaguccgucgagcucaacgcccccaacuuccacuacgaggagugcuccugcuaccccgacaccggcaccgucaugugcgucugccgcgacaacuggcacggcuccaaccgccccugggucuccuucaaccagaaccucgacuaccagaucggcuacaucugcuccggcgucuucggcgacaacccccgccccaaggacggcgagggcuccugcaaccccgucaccgucgacggcgccaacggcgucaagggcuucuccuacaaguacggcaacggcgucuggaucggccgcaccaaguccaaccgccuccgcaagggcuucgagaugaucugggaccccaacggcuggaccgacaccgacuccgacuucuccgucaagcaggacgucgucgccaucaccgacugguccggcuacuccggcuccuucguccagcaccccgagcucaccggccucgacugcauccgccccugcuucugggucgagcucguccgcggccuccccaaggagaacaccaccaucuggaccuccggcuccuccaucuccuucugcggcgucaacuccgacaccgccaacugguccuggcccgacggcgccgagcuccccuucaccaucgacaaguga

SEQ ID NO: 110488 - RNA, 1413 nt, Artificial Sequence; identical to SEQ ID NO: 110487
  derived and/or modified CDS sequence (opt2) from neuraminidase__InfluenzaA__ABB02828

SEQ ID NO: 110489 - RNA, 1410 nt, Artificial Sequence
  derived and/or modified CDS sequence (opt2) from neuraminidase__InfluenzaA__ABB02839
augaaccccaaccagaagaucaucaccaucggcuccgucucccucaccaucuccaccaucugcuucuucaugcagaucgccauccucaucaccaccgucacccuccacuucaagcaguacgaguucaacuccccccccaacaaccaggucguccucugcgagcccaccaucaucgagcgcaacaucaccgagaucgucuaccucaccaacaccaccaucgagaaggagaucugccccaagcucgccgaguaccgcaacugguccaagccccagugcgacaucaccggcuucgcccccuucuccaaggacaacuccauccgccucuccgccggcggcgacaucugggucacccgcgagcccuacgucuccugcgaccccgacaagugcuaccaguucgcccucggccagggcaccacccucaacaacguccacuccaacgacaccguccacgaccgcacccccuaccgcacccuccucaugaacgagcucggcguccccuuccaccucggcaccaagcaggucugcaucgccugguccuccuccuccugccacgacggcaaggccuggcuccacgucugcgucaccggcgacgacaagaacgccaccgccuccuucaucuacaacggccgccucgucgacuccaucgucuccugguccaaggagauccuccgcacccaggaguccgagugcgucugcaucaacggcaccugcaccgucgucaugaccgacggcuccgccuccggcaaggccgacaccaagauccucuucaucgaggagggcaagaucguccacaccuccacccucuccggcuccgcccagcacgucgaggagugcuccugcuacccccgcuaccccggcguccgcugcgucugccgcgacaacuggaagggcuccaaccgccccaucgucgacaucaacaucaaggacuacuccaucgucuccuccuacgucugcuccggccucgucggcgacaccccccgcaagaacgacuccuccuccuccucccacugccucgaccccaacaacgaggagggcggccacggcgucaagggcugggccuucgacgacggcaacgacgucuggaugggccgcaccaucuccgagaagcuccgcuccggcuacgagaccuucaaggucaucgagggcugguccaaccccaacuccaagcuccagaucaaccgccaggucaucgucgaccgcggcaaccgcuccggcuacuccggcaucuucuccgucgagggcaaguccugcaucaaccgcugcuucuacgucgagcucauccgcggccgcaaggaggagaccgagguccucuggaccuccaacuccaucgucgucuucugcggcaccuccggcaccuacggcaccggcuccuggcccgacggcgccgacaucaaccucaugcccaucuga

SEQ ID NO: 110490 - RNA, 1410 nt, Artificial Sequence
  derived and/or modified CDS sequence (opt2) from neuraminidase__InfluenzaA__ABB02850
augaaccccaaccagaagaucaucaccaucggcuccgucucccucaccaucuccaccaucugcuucuucaugcagaucgccauccucaucaccaccgucacccuccacuucaagcaguacgaguucaacuccccccccaacaaccaggucaugcucugcgagcccaccaucaucgagcgcaacaucaccgagaucgucuaccucaccaacaccaccaucgagaaggagaucugccccaagcccgccgaguaccgcaacugguccaagccccagugcgacaucaccggcuucgcccccuucuccaaggacaacuccauccgccucuccgccggcggcgacaucugggucacccgcgagcccuacgucuccugcgaccccgacaagugcuaccaguucgcccucggccagggcaccacccucaacaacguccacuccaacgacaccguccacgaccgcacccccuaccgcacccuccucaugaacgagcucggcguccccuuccaccucggcaccaagcaggucugcaucgccugguccuccuccuccugccacgacggcaaggccuggcuccacgucugcgucaccggcgacgacaagaacgccaccgccuccuucaucuacaacggccgccucgucgacuccaucgucuccugguccaaggagauccuccgcacccaggaguccgagugcgucugcaucaacggcaccugcgccgucgucaucaccgacggcuccgccuccggcaaggccgacaccaagauccucuucaucgaggagggcaagaucguccacaccuccaagcucuccggcuccgcccagcacgucgaggagugcuccugcuacccccgcuaccccggcauccgcugcgucugccgcgacaacuggaagggcuccaaccgccccaucgucgacaucaacaucaaggacuacuccaucgucuccuccuacgucugcuccggccucgucggcgacaccccccgcaagaacgacuccuccuccuccucccucugccucgaccccaacaacgaggagggcggccacggcgucaagggcugggccuucgacgacggcaacgacgucuggaugggccgcaccaucuccgagaagcuccgcuccggcuacgagaccuucaaggucaucgagggcugguccaaccccaacuccaagcuccagaucaaccgccaggucaucgucgaccgcggcaaccgcuccggcuacuccggcaucuucuccgucgagggcaaguccugcaucaaccgcugcuucuacgucgagcucauccgcggccgcaaggaggagaccgagguccucuggaccuccaacuccaucgucgucuucugcggcaccuccggcaccuacggcaccggcuccuggcccgacggcgccgacaucaaccucaugcccaucuga

SEQ ID NO: 110491 - RNA, 1410 nt, Artificial Sequence
  derived and/or modified CDS sequence (opt2) from neuraminidase__InfluenzaA__ABB02861
augaaccccaaccagaagaucaucaccaucggcuccgucucccucaccaucgccaccaucugcuuccucaugcagaucgccauccucgucaccaccgucacccuccacuucaagcaguacgagugcaacuccccccccaacaaccaggucaugcucugcgagcccgccaucaucgagcgcaacaucaccgagaucgucuaccucaccaacaccaccaucgagaaggagaucugccccaagcucgccgaguaccgcaacugguccaagccccagugcaacaucaccggcuucgcccccuucuccaaggacaacuccauccgccucuccgccggcggcgacaucugggucacccgcgagcccuacgucuccugcgaccccgacaagugcuaccaguucgcccucggccagggcaccacccucaacaacggccacuccaacgacaccguccacgaccgcacccccuaccgcacccuccucaugaacgagcucggcguccccuuccaccucggcacccgccaggucugcaucgccugguccuccuccuccugccacgacggcaaggccuggcuccacgucugcgucaccggcgacgacgagaacgccaccgccuccuucaucuacgacggccgccucgucgacuccaucggcuccugguccaagaagauccuccgcacccaggaguccgagugcgucugcaucaacggcaccugcaccgucgucaugaccgacggcuccgccuccggcaaggccgacaccaagauccucuucaucgaggagggcaagaucgucaacaucuccacccucuccggcuccgcccagcacgucgaggagugcuccugcuacccccgcuaccccggcguccgcugcgucugccgcgacaacuggaagggcuccaaccgccccaucgucgacaucaacgucaaggacuacuccaucgucuccuccuacgucugcuccggccucgucggcgacaccccccgcaagaacgacuccuucuccuccucccacugccucgaccccaacaacgaggagggcggccacggcgucaagggcugggccuucgacgacggcaacgacgucuggaugggccgcaccaucuccgagaagcuccgcuccggcuacgagaccuucaaggucaucgagggcugguccaagcccaacuccaagcuccagaucaaccgccaggucaucgucgagcgcggcaaccgcuccggcuacuccggcaucuucuccgucgagggcaaguccugcaucaaccgcugcuucuacgucgagcucauccgcggccgcaaggaggagaccgaggucugguggaccuccaacuccaucgucgucuucugcggcaccuccggcaccuacggcaccggcuccuggcccgacggcgccgacaucgaccucaugcccaucuga

SEQ ID NO: 110492 - RNA, 1410 nt, Artificial Sequence; identical to SEQ ID NO: 110289
  derived and/or modified CDS sequence (opt2) from neuraminidase__InfluenzaA__ABB02872

SEQ ID NO: 110493 - RNA, 1410 nt, Artificial Sequence; identical to SEQ ID NO: 110289
  derived and/or modified CDS sequence (opt2) from neuraminidase__InfluenzaA__ABB02883

SEQ ID NO: 110494 - RNA, 1410 nt, Artificial Sequence
  derived and/or modified CDS sequence (opt2) from neuraminidase__InfluenzaA__ABB02894
augaaccccaaccagaagaucaucaccaucggcuccgucucccucaccaucgccaccaucugcuuccucaugcagaucgccauccucgucaccaccgucacccuccacuucaagcaguacgagugcaacuccccccccaacaaccaggucaugcucugcgagcccaccaucaucgagcgcaacaucaccgagauggucuaccucaccaacaccaccaucgagaaggagaucugccccaagcucgccgaguaccgcaacugguccaagccccagugcaacaucaccggcuucgcccccuucuccaaggacaacuccauccgccucuccgccggcggcgacaucugggucacccgcgagcccuacgucuccugcgaccccgacaagugcuaccaguucgcccucggccagggcaccacccucaacaacggccacuccaacgacaccguccacgaccgcacccccuaccgcacccuccucaugaacgagcucggcguccccuuccaccucggcaccaagcaggucugcaucgccugguccuccuccuccugccacgacggcaaggccuggcuccacgucugcgucaccggcgacgacgagaacgccaccgccuccuucaucuacaacggccgccucgucgacuccaucggcuccugguccaagaagauccuccgcacccaggaguccgagugcgucugcaucaacggcaccugcaccgucgucaugaccgacggcuccgccuccggcaaggccgacaccaagauccucuucaucgaggagggcaagaucguccacaccucccuccucuccggcuccgcccagcacgucgaggagugcuccugcuacccccgcuaccccggcguccgcugcgucugccgcgacaacuggaagggcuccaaccgccccaucgucgacaucaacgucaaggacuacuccaucgucuccuccuacgucugcuccggccucgucggcgacaccccccgcaagaacgacuccuccuccuccucccacugccucgaccccaacaacgaggagggcggccacggcgucaagggcugggccuucgacgacggcaacgacgucuggaugggccgcaccaucuccgagaagcuccgcuccggcuacgagaccuucaaggucaucgagggcugguccaagcccaacuccaagcuccagaucaaccgccaggucaucgucgaccgcggcaaccgcuccggcuacuccggcaucuucuccgucgagggcaaguccugcaucaaccgcugcuucuacgucgagcucauccgcggccgcaagcaggagaccgagguccucuggaccuccaacuccaucgucgucuucugcggcaccuccggcaccuacggcaccggcuccuggcccgacggcgccgacaucaaccucaugcccaucuga

SEQ ID NO: 110495 - RNA, 1410 nt, Artificial Sequence; identical to SEQ ID NO: 110097
  derived and/or modified CDS sequence (opt2) from neuraminidase__InfluenzaA__ABB02905

SEQ ID NO: 110496 - RNA, 1413 nt, Artificial Sequence
  derived and/or modified CDS sequence (opt2) from neuraminidase__InfluenzaA__ABB02916
augaaccccaaccagaagaucaucaccaucggcuccaucuccaucgccaucggcaucaucucccucaugcuccagaucggcaacaucaucuccaucugggccucccacuccauccagaccggcucccagaaccacaccggcgucugcaaccagcgcaucaucaccuacgagaacuccaccugggucaaccacaccuacgucaacaucaacaacaccaacgucaucgccgagaaggacaagaccuccgucacccucgccggcaacuccucccucugcuccaucuccggcugggccaucuacaccaaggacaacuccauccgcaucggcuccaagggcgacgucuucgucauccgcgagcccuucaucuccugcucccaccucgagugccgcaccuucuuccucacccagggcgcccuccucaacgacaagcacuccaacggcaccgucaaggaccgcucccccuaccgcgcccucauguccugcccccucggcgaggcccccucccccuacaacuccaaguucgaguccgucgccugguccgccuccgccugccacgacggcaugggcuggcucaccaucggcaucuccggccccgacaacggcgccgucgccguccucaaguacaacggcaucaucaccgagaccaucaaguccuggaagaagcagauccuccgcacccaggaguccgagugcgucugcgucaacggcuccugcuucaccaucaugaccgacggccccuccaacggcgccgccuccuacaagaucuucaagaucgagaagggcaaggucaccaaguccaucgagcucaacgcccccaacuuccacuacgaggagugcuccugcuaccccgacaccggcaccgucaugugcgucugccgcgacaacuggcacggcuccaaccgccccugggucuccuucaaccagaaccucgacuaccagaucggcuacaucugcuccggcgucuucggcgacaacccccgcccccgcgacggcgagggcuccugcaaccccgucaccgucgacggcgccaacggcgucaagggcuucuccuacaaguacggcaacggcgucuggaucggccgcaccaaguccaaccgccuccgcaagggcuucgagaugaucugggaccccaacggcuggaccgacaccgacuccgacuucuccgucaagcaggacgucgucgccaucaccgacugguccggcuacuccggcuccuucguccagcaccccgagcucaccggccucgacugcauccgccccugcuucugggucgagcucguccgcggccucccccgcgagaacaccaccaucuggaccuccggcuccuccaucuccuucugcggcgucaacuccgacaccgccaacugguccuggcccgacggcgccgagcuccccuucaccaucgacaaguga

SEQ ID NO: 110497 - RNA, 1413 nt, Artificial Sequence
  derived and/or modified CDS sequence (opt2) from neuraminidase__InfluenzaA__ABB02927
augaaccccaaccagaagaucaucaccaucggcuccaucuccaucgccaucggcaucaucucccucaugcuccagaucggcaacaucaucuccaucugggccucccacuccauccagaccggcucccagaaccacaccggcaucugcaaccagcgcaucaucaccuacgagaacuccaccugggucaaccacaccuacgucaacaucaacaacaccaacgucgucgccggcaaggacaagaccuccgucacccucgccggcaacuccucccucugcuccaucuccggcugggccaucuacaccaaggacaacuccauccgcaucggcuccaagggcgacgucuucgucauccgcgagcccuucaucuccugcucccaccucgagugccgcaccuucuuccucacccagggcgcccuccucaacgacaagcacuccaacggcaccgucaaggaccgcucccccuaccgcgcccucauguccugcccccucggcgaggcccccucccccuacaacuccaaguucgaguccgucgccugguccgccuccgccugccacgacggcaugggcuggcucaccaucggcaucuccggccccgacaacggcgccgucgccguccucaaguacaacggcaucaucaccgagaccaucaaguccuggaagaagcgcauccuccgcacccaggaguccgagugcgucugcgucaacggcuccugcuucaccaucaugaccgacggccccuccaacggcgccgccuccuacaagaucuucaagaucgagaagggcaaggucaccaaguccaucgagcucaacgcccccaacuuccacuacgaggagugcuccugcuaccccgacaccggcaccgucaugugcgucugccgcgacaacuggcacggcuccaaccgccccugggucuccuucaaccagaaccucgacuaccagaucggcuacaucugcuccggcgucuucggcgacaacccccgccccaaggacggcgagggcuccugcaaccccgucaccgucgacggcgccgacggcgucaagggcuucuccuacaaguacggcaacggcgucuggaucggccgcaccaaguccaacaagcuccgcaagggcuucgagaugaucugggaccccaacggcuggaccgacaccgacuccgacuucuccgucaagcaggacgucgucgccaucaccgacugguccggcuacuccggcuccuucguccagcaccccgagcucaccggccucgacugcauccgccccugcuucugggucgagcucguccgcggccucccccgcgagaacaccaccaucuggaccuccggcuccuccaucuccuucugcggcgucaacuccgacaccgccaacugguccuggcccgacggcgccgagcuccccuucaccaucgacaaguga

SEQ ID NO: 110498 - RNA, 1413 nt, Artificial Sequence
  derived and/or modified CDS sequence (opt2) from neuraminidase__InfluenzaA__ABB02939
augaaccccaaccagaagaucaucaccaucggcuccaucuccaucgccaucggcaucaucucccucaugcuccagaucggcaacaucaucuccaucugggccucccacuccauccagaccggcucccagaaccacaccggcgucugcaaccagcgcaucaucaccuacgagaacuccaccuggaugaaccacaccuacgucaacaucaacaacaccaacgucaucgccggcaaggacaagaccuccgucacccucgccggcaacuccucccucugcuccaucuccggcugggccaucuacaccaaggacaacuccauccgcaucggcuccaagggcgacgucuucgucauccgcgagcccuucaucuccugcucccaccucgagugccgcaccuucuuccucacccagggcgcccuccucaacgacaagcacuccaacggcaccgucaaggaccgcucccccuaccgcgcccucauguccugcccccucggcgaggcccccucccccuacaacuccaaguucgaguccgucgccugguccgccuccgccugccacgacggcaugggcuggcucaccaucggcaucuccggccccgacaacggcgccgucgccguccucaaguacaacggcaucaucaccgagaccaucaaguccuggaagaagcagauccuccgcacccaggaguccgagugcgucugcgucaacggcuccugcuucaccaucaugaccgacggccccuccaacggcgccgccuccuacaagaucuucaagaucgagaagggcaaggucaccaaguccauggagcucaacgcccccaacuuccacuacgaggagugcuccugcuaccccgacaccggcaccgucaugugcgucugccgcgacaacuggcacggcuccaaccgccccugggucuccuucaaccagaaccucgacuaccagaucggcuacaucugcuccggcgucuucggcgacaacccccgccccaaggacggcgagggcuccugcaaccccgucaccgucgacggcgccaacggcgucaagggcuucuccuacaaguacggcaacggcgucuggaucggccgcaccaaguccaaccgccuccgcaagggcuucgagaugaucugggaccccaacggcuggaccgacaccgacuccgacuucuccgucaagcaggacgucgucgccaucaccgacugguccggcuacuccggcuccuucguccagcaccccgagcucaccggccucgacugcauccgccccugcuucugggucgagcucguccgcggccuccccaaggagaacaccaccaucuggaccuccggcuccuccaucuccuucugcggcgucaacuccgacaccgccaacugguccuggcccgacggcgccgagcuccccuucaccaucgacaaguga

SEQ ID NO: 110499 - RNA, 1410 nt, Artificial Sequence; identical to SEQ ID NO: 110414
  derived and/or modified CDS sequence (opt2) from neuraminidase__InfluenzaA__ABB02950

SEQ ID NO: 110500 - RNA, 1410 nt, Artificial Sequence; identical to SEQ ID NO: 110315
  derived and/or modified CDS sequence (opt2) from neuraminidase__InfluenzaA__ABB02961

SEQ ID NO: 110501 - RNA, 1410 nt, Artificial Sequence; identical to SEQ ID NO: 110315
  derived and/or modified CDS sequence (opt2) from neuraminidase__InfluenzaA__ABB02972

SEQ ID NO: 110502 - RNA, 1410 nt, Artificial Sequence; identical to SEQ ID NO: 110315
  derived and/or modified CDS sequence (opt2) from neuraminidase__InfluenzaA__ABB02983

SEQ ID NO: 110503 - RNA, 1410 nt, Artificial Sequence; identical to SEQ ID NO: 110315
  derived and/or modified CDS sequence (opt2) from neuraminidase__InfluenzaA__ABB02994

SEQ ID NO: 110504 - RNA, 1410 nt, Artificial Sequence; identical to SEQ ID NO: 110315
  derived and/or modified CDS sequence (opt2) from neuraminidase__InfluenzaA__ABB03005

SEQ ID NO: 110505 - RNA, 1410 nt, Artificial Sequence; identical to SEQ ID NO: 110320
  derived and/or modified CDS sequence (opt2) from neuraminidase__InfluenzaA__ABB03016

SEQ ID NO: 110506 - RNA, 1410 nt, Artificial Sequence; identical to SEQ ID NO: 110315
  derived and/or modified CDS sequence (opt2) from neuraminidase__InfluenzaA__ABB03027

SEQ ID NO: 110507 - RNA, 1410 nt, Artificial Sequence; identical to SEQ ID NO: 110320
  derived and/or modified CDS sequence (opt2) from neuraminidase__InfluenzaA__ABB03038

SEQ ID NO: 110508 - RNA, 1410 nt, Artificial Sequence; identical to SEQ ID NO: 110315
  derived and/or modified CDS sequence (opt2) from neuraminidase__InfluenzaA__ABB03049

SEQ ID NO: 110509 - RNA, 1410 nt, Artificial Sequence
  derived and/or modified CDS sequence (opt2) from neuraminidase__InfluenzaA__ABB03060
augaaccccaaccagaagaucaucaccaucggcuccgucucccucaccaucuccaccaucugcuucuucaugcagaucgccauccucaucaccaccgucacccuccacuucaagcaguacgaguucaacuccccccccaacaaccaggucaugcucugcgagcccaccaucaucgagcgcaacaucaccgagaucgucuaccucaccaacaccaccaucgagaaggagaucugccccaagcucgccgaguaccgcaacugguccaagccccagugcgacaucaccggcuucgcccccuucuccaaggacaacuccauccgccucuccgccggcggcgacaucugggucacccgcgagcccuacgucuccugcgaccccgacaagugcuaccaguucgcccucggccagggcaccacccucaacaacguccacuccaacgacaccguccacgaccgcacccccuaccgcacccuccucaugaacgagcucggcguccccuuccaccucggcaccaagcaggucugcaucgccugguccuccuccuccugccacgacggcaaggccuggcuccacgucugcgucaccggcgacgacaagaacgccaccgccuccuucaucuacaacggccgccucgucgacuccaucgucuccugguccaaggagauccuccgcacccaggaguccgagugcgucugcaucaacggcaccugcaccgucgucaugaccgacggcuccgccuccggcaaggccgacaccaagauccucuucaucgaggagggcaagaucguccacaccuccacccucuccggcuccgcccagcacgucgaggagugcuccugcuacccccgcuaccccggcauccgcugcgucugccgcgacaacuggaagggcuccaaccgccccaucgucgacaucaacaucaaggacuacuccaucgucuccuccuacgucugcuccggccucgucggcgacaccccccgcaagaacgacuccuccuccuccucccacugccucgaccccaacaacgaggagggcggccacggcgucaagggcugggccuucgacgacggcaacgacgucuggaugggccgcaccaucuccgagaagcuccgcuccggcuacgagaccuucaaggucaucgagggcugguccaaccccaacuccaagcuccagaucaaccgccaggucaucgucgaccgcggcaaccgcuccggcuacuccggcaucuucuccgucgagggcaaguccugcaucaaccgcugcuucuacgucgagcucauccgcggccgcaaggaggagaccgagguccucuggaccuccaacuccaucgucgucuucugcggcaccuccggcaccuacggcaccggcuccuggcccgacggcgccgacaucaaccucaugcccaucuga

SEQ ID NO: 110510 - RNA, 1410 nt, Artificial Sequence
  derived and/or modified CDS sequence (opt2) from neuraminidase__InfluenzaA__ABB03071
augaaccccaaccagaagaucaucaccaucggcuccgucucccucaccaucuccaccaucugcuucuucaugcagaucgccauccucaucaccaccgucacccuccacuucaagcaguacgaguucaacuccccccccaacaaccaggucaugcucugcgagcccaccaucaucgagcgcaacaucaccgagaucgucuaccucaccaacaccaccaucgagaaggagaucugccccaagcucgccgaguaccgcaacugguccaagccccagugcggcaucaccggcuucgcccccuucuccaaggacaacuccauccgccucuccgccggcggcgacaucugggucacccgcgagcccuacgucuccugcgaccccgacaagugcuaccaguucgcccucggccagggcaccacccucaacaacguccacuccaacgacaccguccacgaccgcacccccuaccgcacccuccucaugaacgagcucggcguccccuuccaccucggcaccaagcaggucugcaucgccugguccuccuccuccugccacgacggcaaggccuggcuccacgucugcgucaccggcgacgacaagaacgccaccgccuccuucaucuacaacggccgccucgucgacuccaucgucuccugguccaaggagauccuccgcacccaggaguccgagugcgucugcaucaacggcaccugcaccgucgucaugaccgacggcuccgccuccggcaaggccgacaccaagauccucuucaucgaggagggcaagaucguccacaccuccacccucuccggcuccgcccagcacgucgaggagugcuccugcuacccccgcuaccccggcguccgcugcgucugccgcgacaacuggaagggcuccaaccgccccaucgucgacaucaacaucaaggacuacuccaucgucuccuccuacgucugcuccggccucgucggcgacaccccccgcaagaacgacuccuccuccuccucccacugccucgaccccaacaacgaggagggcggccacggcgucaagggcugggccuucgacgacggcaacgacgucuggaugggccgcaccaucuccgagaagcuccgcuccggcuacgagaccuucaaggucaucgagggcugguccaaccccaacuccaagcuccagaucaaccgccaggucaucgucgacaagggcaaccgcuccggcuacuccggcaucuucuccgucgagggcaaguccugcaucaaccgcugcuucuacgucgagcucauccgcggccgcaaggaggagaccgagguccucuggaccuccaacuccaucgucgucuucugcggcaccuccggcaccuacggcaccggcuccuggcccgacggcgccgacaucaaccucaugcccaucuga

SEQ ID NO: 110511 - RNA, 1410 nt, Artificial Sequence
  derived and/or modified CDS sequence (opt2) from neuraminidase__InfluenzaA__ABB03093
augaaccccaaccagaagaucaucaccaucggcuccgucucccucaccaucuccaccaucugcuucuucaugcagaucgccauccucaucaccaccgucacccuccacuucaagcaguacgaguucaacuccccccccaacaaccaggucaugcucugcgagcccaccaucaucgagcgcaacaucaccgagaucgucuaccucaccaacaccaccaucgagaaggagaucugccccaagcucgccgaguaccgcaacugguccaagccccagugcgacaucaccggcuucgcccccuucuccaaggacaacuccauccgccucuccgccggcggcgacaucugggucacccgcgagcccuacgucuccugcgaccccgacaagugcuaccaguucgcccucggccagggcaccacccucaacaacguccacuccaacgacaccguccacgaccgcacccccuaccgcacccuccucaugaacgagcucggcguccccuuccaccucggcaccaagcaggucugcaucgccugguccuccuccuccugccacgacggcaaggccuggcuccacgucugcgucaccggcgacgacaagaacgccaccgccuccuucaucuacaacggccgccucgucgacuccaucgucuccugguccaaggagauccuccgcacccaggaguccgagugcgucugcaucaacggcaccugcaccgucgucaugaccgacggcuccgccuccggcaaggccgacaccaagauccucuucaucgaggagggcaagaucguccacaccuccacccucuccggcuccgcccagcacaucgaggagugcuccugcuacccccgcuaccccggcguccgcugcgucugccgcgacaacuggaagggcuccaaccgccccaucgucgacaucaacaucaaggacuacuccaucgucuccuccuacgucugcuccggccucgucggcgacaccccccgcaagaacgacuccuccuccuccucccacugccucgaccccaacaacgaggagggcggccacggcgucaagggcugggccuucgacgacggcaacgacgucuggaugggccgcaccaucuccgagaagcuccgcuccggcuacgagaccuucaaggucaucgagggcugguccaaccccaacuccaagcuccagaucaaccgccaggucaucgucgaccgcggcaaccgcuccggcuacuccggcaucuucuccgucgagggcaaguccugcaucaaccgcugcuucuacgucgagcucauccgcggccgcaaggaggagaccgagguccucuggaccuccaacuccaucgucgucuucugcggcaccuccggcaccuacggcaccggcuccuggcccgacggcgccgacaucaaccucaugcccaucuga

SEQ ID NO: 110512 - RNA, 1410 nt, Artificial Sequence; identical to SEQ ID NO: 110418
  derived and/or modified CDS sequence (opt2) from neuraminidase__InfluenzaA__ABB03104

SEQ ID NO: 110513 - RNA, 1410 nt, Artificial Sequence
  derived and/or modified CDS sequence (opt2) from neuraminidase__InfluenzaA__ABB03115
augaaccccaaccagaagaucaucaccaucggcuccgucucccucaccaucuccaccaucugcuucuucaugcagaucgccauccucaucaccaccgucacccuccacuucaagcaguacgaguucaacuccccccccaacaaccaggucaugcucugcgagcccaccaucaucgagcgcaacaucaccgagaucgucuaccucaccaacaccaccaucgagaaggagaucugccccaagcucgccgaguaccgcaacugguccaagccccagugcaacaucaccggcuucgcccccuucuccaaggacaacuccauccgccucuccgccggcggcgacaucugggucacccgcgagcccuacgucuccugcgaccccgacaagugcuaccaguucgcccucggccagggcaccacccucaacaacguccacuccaacgacaccguccacgaccgcacccccuaccgcacccuccucaugaacgagcucggcguccccuuccaccucggcaccaagcaggucugcaucgccugguccuccuccuccugccacgacggcaaggccuggcuccacgucugcgucaccggcgacgacgagaacgccaccgccuccuucaucuacaacggccgccucgucgacuccaucgucuccugguccaagaagauccuccgcacccaggaguccgagugcgucugcaucaacggcaccugcaccgucgucaugaccgacggcuccgccuccggcaaggccgacaccaagauccucuucaucgaggagggcaagaucguccacaccuccacccucuccggcuccgcccagcacgucgaggagugcuccugcuacccccgcuaccccggcguccgcugcgucugccgcgacaacuggaagggcuccaaccgccccaucgucgacaucaacaucaaggacuacuccaucgucuccuccuacgucugcuccggccucgucggcgacaccccccgcaagaacgacuccuccuccuccucccacugccucgaccccaacaacgaggagggcggccacggcgucaagggcugggccuucgacgacggcaacgacgucuggaugggccgcaccaucuccgagaagcuccgcuccggcuacgagaccuucaaggucaucgagggcugguccaaccccaacuccaagcuccagaucaaccgccaggucaucgucgaccgcggcaaccgcuccggcuacuccggcaucuucuccgucgagggcaaguccugcaucaaccgcugcuucuacgucgagcucauccgcggccgcaagcaggagaacgagguccucuggaccuccaacuccaucgucgucuucugcggcaccuccggcaccuacggcaccggcuccuggcccgacggcgccgacaucaaccucaugcccaucuga

SEQ ID NO: 110514 - RNA, 1413 nt, Artificial Sequence; identical to SEQ ID NO: 110422
  derived and/or modified CDS sequence (opt2) from neuraminidase__InfluenzaA__ABB03126

SEQ ID NO: 110515 - RNA, 1413 nt, Artificial Sequence
  derived and/or modified CDS sequence (opt2) from neuraminidase__InfluenzaA__ABB03148
augaaccccaaccagaagaucaucaccaucggcuccaucuccaucgccaucggcaccaucucccucaugcuccagaucggcaacaucaucuccaucugggccucccacuccauccagaccggcucccagaaccacaccggcaucugcaaccagcgcaucaucaccuacgagaacuccaccugggucaaccacaccuacgucaacaucaacaacaccaacgucgucgccggcaaggacaagaccuccgucacccucgccggcaacuccucccucugcuccaucuccggcugggccaucuacaccaaggacaacuccauccgcaucggcuccaagggcgacgucuucgucauccgcgagcccuucaucuccugcucccaccucgagugccgcaccuucuuccucacccagggcgcccuccucaacgacaagcacuccaacggcaccgucaaggaccgcucccccuaccgcgcccucauguccugcccccucggcgaggcccccucccccuacaacuccaaguucgaguccgucgccugguccgccuccgccugccacgacggcaugggcuggcucaccaucggcaucuccggccccgacaacggcgccgucgccguccucaaguacaacggcaucaucaccgagaccaucaaguccuggaagaagcgcauccuccgcacccaggaguccgagugcgucugcgucaacggcuccugcuucaccaucaugaccgacggccccuccaacggcgccgccuccuacaagaucuucaagaucgagaagggcaaggucaccaaguccaucgagcucaacgcccccaacuuccacuacgaggagugcuccugcuaccccgacaccggcaccgucaugugcgucugccgcgacaacuggcacggcuccaaccgccccugggucuccuucaaccagaaccucgacuaccagaucggcuacaucugcuccggcgucuucggcgacaacccccgccccaaggacggcaagggcuccugcaaccccgucaccgucgacggcgccgacggcgucaagggcuucuccuacaaguacggcaacggcgucuggaucggccgcaccaaguccaaccgccuccgcaagggcuucgagaugaucugggaccccaacggcuggaccgacaccgacuccgacuucuccgucaagcaggacgucgucgccaucaccgacugguccggcuacuccggcuccuucguccagcaccccgagcucaccggccucgacugcauccgccccugcuucugggucgagcucguccgcggccucccccgcgagaacaccaccaucuggaccuccggcuccuccaucuccuucugcggcgucgacuccgacaccgccaacugguccuggcccgacggcgccgagcuccccuucaccaucgacaaguga

SEQ ID NO: 110516 - RNA, 1410 nt, Artificial Sequence
  derived and/or modified CDS sequence (opt2) from neuraminidase__InfluenzaA__ABB04286
augaaccccaaccagaagaucaucaccaucggcuccgucucccucaccaucgccaccaucugcuuccucaugcagaucgccauccucgucaccaccgucacccuccacuucaagcaguacgagugcuccuccccccccaacaaccaggucaugcccugcgagcccaucaucaucgagcgcaacaucaccgagaucgucuaccucaccaacaccaccaucgagaaggagaucugccccaagcucgucgaguaccgcaacugguccaagccccagugcaagaucaccggcuucgcccccuucuccaaggacaacuccauccgccucuccgccggcggcgacaucugggucacccgcgagcccuacgucuccugcgaccccggcaagugcuaccaguucgcccucggccagggcaccacccucgacaacaagcacuccaacgacaccauccacgaccgcaccccccaccgcacccuccucaugaacgagcucggcguccccuuccaccucggcacccgccaggucugcaucgccugguccuccuccuccugccacgacggcaaggccuggcuccacgucugcgucaccggcuacgacaagaacgccaccgccuccuucaucuacgacggccgccucgucgacuccaucggcuccugguccaagaacauccuccgcacccaggaguccgagugcgucugcaucaacggcaccugcaccgucgucaugaccgacggcuccgccuccgagcgcgccgacaccaagauccucuucaucgaggagggcaagaucguccacaucuccccccucuccggcuccgcccagcacgucgaggagugcuccugcuacccccgcuaccccggcguccgcugcgucugccgcgacaacuggaagggcuccaaccgccccgucgucgacaucaacgucaaggacuacuccaucgucuccuccuacgucugcuccggccucgucggcgacaccccccgcaagaacgaccgcuccuccuccuccuacugccgcaaccccaacaacgagaagggcaaccacggcgucaagggcugggccuucgacgacggcaacgacgucuggaugggccgcaccaucuccgaggagucccgcuccggcuacgagaccuucaaggucaucggcggcugguccacccccaacuccaagucccagaucaaccgccaggucaucgucgacuccggcaaccgcuccggcuacuccggcaucuucuccgucgagggcaaguccugcaucaaccgcugcuucuacgucgagcucauccgcggccgcgagcaggagacccgcgucugguggaccuccaacuccaucgucgucuucugcggcaccuccggcaccuacggcaccggcuccuggcccgacggcgccgacaucaaccucaugcccaucuga

SEQ ID NO: 110517 - RNA, 1410 nt, Artificial Sequence
  derived and/or modified CDS sequence (opt2) from neuraminidase__InfluenzaA__ABB04297
augaaccccaaccagaagaucaucaccaucggcuccgucucccucaccaucgccaccaucugcuuccucaugcagaucgccauccucgucaccaccgucacccuccacuucaagcaguacgagugcgacucccccgccaacaaccaggucauccccugcgagcccaucaccaucgagcgcaacaucaccgagaucgucuaccucaccaacaccaccaucgagaaggagaucugccccaagcucgucgaguaccgcaacugguccaagccccagugcaagaucaccggcuucgcccccuucuccaaggacaacuccauccgccucuccgccggcggcgacaucugggucacccgcgagcccuacgucuccugcgaccccggcaagugcuaccaguucgcccucggccagggcaccacccucgacaacaagcacuccaacgacaccauccacgaccgcaccccccaccgcacccuccucaugaacgagcucggcguccccuuccaccucggcacccgccaggucugcaucgccugguccuccuccuccugccacgacggcaaggccuggcuccacgucugcgucaccggcuacgacaagaacgccaccgccuccuucaucuacgacggccgccucgucgacuccaucggcuccuggucccagaacauccuccgcacccaggaguccgagugcgucugcaucaacggcaccugcaccgucgucaugaccgacggcuccgccuccggccgcgccgacaccaagauccucuucaucgaggagggcaagaucguccacaucuccccccucuccggcuccgcccagcacgucgaggagugcuccugcuacccccgcuaccccggcguccgcugcaucugccgcgacaacuggaagggcuccaaccgccccgucgucgacaucaacgucaaggacuacuccaucgacuccuccuacgucugcuccggccucgucggcgacaccccccgcaacaacgaccgcuccuccaacuccuacugccgcaaccccaacaacgagaagggcaaccacggcgucaagggcugggccuucgacgacggcaacgacgucuggaugggccgcaccaucuccgaggacucccgcuccggcuacgagaccuucaaggucaucggcggcugguccacccccaacuccaagcuccagaucaaccgccaggucaucgucgacuccgacaaccgcuccggcuacuccggcaucuucuccgucgagggcaaguccugcaucaaccgcugcuucuacgucgagcucauccgcggccgcgagcaggagacccgcgucugguggaccuccaacuccaucgucgucuucugcggcaccuccggcaccuacggcaccggcuccuggcccgacggcgccgacaucaaccucaugcccaucuga

SEQ ID NO: 110518 - RNA, 1410 nt, Artificial Sequence
  derived and/or modified CDS sequence (opt2) from neuraminidase__InfluenzaA__ABB04319
augaaccccaaccagaagaucaucaccaucggcuccgucucccucaccaucgccaccaucugcuuccucaugcagaucgccauccucgucaccaccgucacccuccacuucaagcaguacgagugcuccuccccccccaacaaccaggucaugcccugcgagcccaccaucaucgagcgcaacaucaccgagaucgucuaccucaccaacaccaccaucgagaaggagaucugccccaagcucgucgaguaccgcaacugguccaagccccagugcaagaucaccggcuucgcccccuucuccaaggacaacuccauccgccucuccgccggcggcgacaucugggucacccgcgagcccuacgucuccugcgaccccggcaagugcuaccaguucgcccucggccagggcaccacccucaacaaccgccacuccaacgacaccguccacgaccgcacccccuaccgcacccuccucaugaacgagcucggcguccccuuccaccucggcaccaagcaggucugcaucgccugguccuccuccuccugccacgacggcaaggccuggcuccacgucugcgucaccggccacgacaagaacgccaccgccuccuucaucuacaacggccgccucgucgacuccaucggcuccugguccaagaacauccuccgcacccaggaguccgagugcgucugcaucaacggcaccugcaccgucgucaugaccgacggcuccgccuccgagcgcgccgacaccaagauccucuucaucgaggagggcaagaucguccacaucuccccccucuccggcuccgcccagcacgucgaggagugcuccugcuacccccgcuaccccggcguccgcugcgucugccgcgacaacuggaagggcuccaaccgccccaucgucgacaucaacgucaaggacuacuccaucgucuccuccuacgucugcuccggccucgucggcgacaccccccgcaagaacgaccgcuccuccuccuccuacugccagaaccccaacaacgagaagggcucccacggcgucaagggcugggccuucgacgacggcaacgacgucuggaugggccgcaccaucggcgaggagcuccgcuccggcuacgagaccuucaaggucaucggcggcugguccacccccaacuccaagcuccagaucaaccgccaggucaucgucgacuccggcaaccgcuccggcuacuccggcaucuucuccgucgagggcaaguccugcaucaaccgcugcuucuacgucgagcucauccgcggccgcaagcaggagacccgcgucugguggaccuccaacuccaucgucgucuucugcggcaccuccggcaccuacggcaccggcuccuggcccgacggcgccgacaucaaccucaugcccaucuga

SEQ ID NO: 110519 - RNA, 1410 nt, Artificial Sequence
  derived and/or modified CDS sequence (opt2) from neuraminidase__InfluenzaA__ABB04341
augaaccccaaccagaagaucaucaccaucggcuccgucucccucaccaucgccaccaucugcuuccucaugcagaucgccauccucgucaccaccgucacccuccacuucaagcaguacgagugcgacucccccgccaacaaccaggucaugcccugcgagcccaucaucaucgagcgcaacaucaccgagaucgucuaccucaccaacaccaccaucgagaaggagaucugccccaagcucgucgaguaccgcaacugguccaagccccagugcaagaucaccggcuucgcccccuucuccaaggacaacuccguccgccucuccgccggcggcgacaucugggucacccgcgagcccuacgucuccugcgaccccggcaagugcuaccaguucgcccucggccagggcaccacccucgacaacaagcacuccaacgacaccauccacgaccgcaccccccaccgcacccuccucaugaacgagcucggcguccccuuccaccucggcacccgccaggucugcaucgccugguccuccuccuccugccacgacggcaaggccuggcuccacgucugcgucaccggcuacgacaagaacgccaccgccuccuucaucuacgacggccgccucgucgacuccaucggcuccuggucccagaacauccuccgcacccaggaguccgagugcgucugcaucaacggcaccugcaccgucgucaugaccgacggcuccgccuccggccgcgccgacaccaagauccucuucaucgaggagggcaagaucguccacaucuccccccucuccggcuccgcccagcacgucgaggagugcuccugcuacccccgcuaccccggcguccgcugcaucugccgcgacaacuggaagggcuccaaccgccccgucgucgacaucaacgucaaggacuacuccaucgacuccuccuacgucugcuccggccucgucggcgacaccccccgcaagaacgaccgcuccuccaacuccuacugccgcaaccccaacaacgagaagggcaaccacggcgucaagggcugggccuucgacgacggcaacgacgucuggaugggccgcaccaucuccgaggacucccgcuccggcuacgagaccuucaaggucaucggcggcugguccacccccaacuccaagcuccagaucaaccgccaggucaucgucgacuccgacaaccgcuccggcuacuccggcaucuucuccgucgagggcaaguccugcaucaaccgcugcuucuacgucgagcucauccgcggccgcgagcaggagacccgcgucugguggaccuccaacuccaucgucgucuucugcggcaccuccggcaccuacggcaccggcuccuggcccgacggcgccgacaucaaccucaugcccaucuga

SEQ ID NO: 110520 - RNA, 1410 nt, Artificial Sequence
  derived and/or modified CDS sequence (opt2) from neuraminidase__InfluenzaA__ABB04352
augaaccccaaccagaagaucaucaccaucggcuccgucucccucaccaucgccaccaucugcuuccucaugcagaucgccauccucgucaccaccgucacccuccacuucaagcaguacgagugcuccuccccccccaacaaccaggucaugcccugcgagcccaucaucaucgagcgcaacaucaccgagaucgucuaccucaccaacaccaccaucgagaaggagaucugccccaagcucgucgaguaccgcaacugguccaagccccagugcaagaucaccggcuucgcccccuucuccaaggacaacuccauccgccucuccgccggcggcgacaucugggucacccgcgagcccuacgucuccugcgaccccggcaagugcuaccaguucgcccucggccagggcaccacccucaacaacaagcacuccaacgacaccguccacgaccgcacccccuaccgcacccuccucaugaacgagcucggcguccccuuccaccucggcaccaagcaggucugcaucgccugguccuccuccuccugccacgacggcaaggccuggcuccacgucugcgucaccggccacgacaagaacgccaccgccuccuucaucuacgacggccgccucgucgacuccaucggcuccugguccaagaacauccuccgcacccaggaguccgagugcgucugcaucaacggcaccugcaccgucgucaugaccgacggcuccgccuccgagcgcgccgacaccaagauccucuucaucgaggagggcaagaucguccacaucuccccccucuccggcuccgcccagcacgucgaggagugcuccugcuacccccgcuaccccggcguccgcugcgucugccgcgacaacuggaagggcuccaaccgccccaucgucgacaucaacgucaaggacuacuccaucgucuccuccuacgucugcuccggccucgucggcgacaccccccgcaagaacgaccgcuccuccuccuccuacugccgcaaccccaacaacgagaagggcucccacggcgucaagggcugggccuucgacgacggcaacgacgucuggaugggccgcaccaucggcgaggagcuccgcuccggcuacgagaccuucaaggucaucggcggcugguccacccccaacuccaagcuccagaucaaccgccaggucaucgucgacuccggcaaccgcuccggcuacuccggcaucuucuccgucgagggcaaguccugcaucaaccgcugcuucuacgucgagcucauccgcggccgcgagcaggagacccgcgucugguggaccuccaacuccaucgucgucuucugcggcaccuccggcaccuacggcaccggcuccuggcccgacggcgccgacaucaaccucaugcccaucuga

SEQ ID NO: 110521 - RNA, 1410 nt, Artificial Sequence
  derived and/or modified CDS sequence (opt2) from neuraminidase__InfluenzaA__ABB04374
augaaccccaaccagaagaucaucaccaucggcuccgucucccucaccaucgccaccgucugcuuccucaugcagaucgccauccucgucaccaccgucacccuccacuucaagcaguacgagugcgacucccccgccaacaaccaggucaugcccugcgagcccaucaucaucgagcgcaacaucaccgagaucgucuaccucaccaacaccaccaucgagaaggagaucugccccaagcucgucgaguaccgcaacugguccaagccccagugcaagaucaccggcuucgcccccuucuccaaggacaacuccauccgccucuccgccggcggcgacaucugggucacccgcgagcccuacgucuccugcgaccccggcaagugcuaccaguucgcccucggccagggcaccacccucgacaacaagcacuccaacgacaccauccacgaccgcaucccccaccgcacccuccucaugaacgagcucggcguccccuuccaccucggcacccgccaggucugcaucgccugguccuccuccuccugccacgacggcaaggccuggcuccacgucugcgucaccggcgacgacgagaacgccaccgccuccuucaucuacgacggccgccucgucgacuccaucggcuccuggucccagaacauccuccgcacccaggaguccgagugcgucugcaucaacggcaccugcaccgucgucaugaccgacggcuccgccuccggccgcgccgacacccgcauccucuucaucgaggagggcaagaucguccacaucuccccccucuccggcuccgcccagcacgucgaggagugcuccugcuacccccgcuaccccggcguccgcugcaucugccgcgacaacuggaagggcuccaaccgccccgucgucgacaucaacgucaaggacuacuccaucgacucccgcuacgucugcuccggccucgucggcgacaccccccgcaacaacgacaaguccuccaacuccaacugccgcaaccccaacaacgacaagggcaaccacggcgucaagggcugggccuucgacgacggcaacgacgucuggaugggccgcaccaucuccaaggacucccgcuccggcuacgagaccuucaaggucaucggcggcugguccacccccaacuccaagucccagaucaaccgccaggucaucgucgacuccgacaaccgcuccggcuacuccggcaucuucuccgucgagggcaaguccugcaucaaccgcugcuucuacgucgagcucauccgcggccgcgagcaggagaccaaggucugguggaccuccaacuccaucgucgucuucugcggcaccuccggcaccuacggcaccggcuccuggcccgacggcgccgacaucaaccucaugcccaucuga

SEQ ID NO: 110522 - RNA, 1410 nt, Artificial Sequence
  derived and/or modified CDS sequence (opt2) from neuraminidase__InfluenzaA__ABB04931
augaaccccaaccagaagaucaucaccaucggcuccgucucccucaccaucgccaccaucugcuuccucaugcagaucgccauccucgucaccaccgucacccuccacuucaagcaguacgagugcgacucccccgccaacaaccaggucaugcccugcgagcccaucaucaucgagcgcaacaucaccgagaucgucuaccucaccaacaccaccaucgagaaggagaucugccccaagcucgucgaguaccgcaacugguccaagccccagugcaagaucaccggcuucgcccccuucuccaaggacaacuccauccgccucuccgccggcggcgacaucugggucacccgcgagcccuacgucuccugcgaccccggcaagugcuaccaguucgcccucggccagggcaccacccucgacaacaagcacuccaacgacaccauccacgaccgcaccccccaccgcacccuccucaugaacgagcucggcguccccuuccaccucggcacccgccaggucugcaucgccugguccuccuccuccugccacgacggcaaggccuggcuccacgucugcgucaccggcuacgacaagaacgccaccgccuccuucaucuacgacggccgccucgucgacuccaucggcuccuggucccagaacauccuccgcacccaggaguccgagugcgucugcaucaacggcaccugcaccgucgucaugaccgacggcuccgccuccggccgcgccgacaccaagauccucuucaucgaggagggcaagaucguccacaucuccccccucuccggcuccgcccagcacgucgaggagugcuccugcuacccccgcuaccccggcguccgcugcaucugccgcgacaacuggaagggcuccaaccgccccgucgucgacaucaacgucaaggacuacuccaucgacuccuccuacgucugcuccggccucgucggcgacaccccccgcaacaacgaccgcuccuccuccuccuacugccgcaaccccaacaacgagaagggcaagcacggcgucaagggcugggccuucgacgacggcaacgacgucuggaugggccgcaccaucuccgaggacucccgcuccggcuacgagaccuucaaggucaucggcggcugguccacccccaacuccaagcuccagaucaaccgccaggucaucgucgacuccgacaaccgcuccggcuacuccggcaucuucuccgucgagggcaaguccugcaucaaccgcugcuucuacgucgagcucauccgcggccgcgagcaggagacccgcgucugguggaccuccaacuccaucgucgucuucugcggcaccuccggcaccuacggcaccggcuccuggcccgacggcgccgacaucaaccucaugcccaucuga

SEQ ID NO: 110523 - RNA, 1410 nt, Artificial Sequence
  derived and/or modified CDS sequence (opt2) from neuraminidase__InfluenzaA__ABB04942
augaaccccaaccagaagaucaucaccaucggcuccgucucccucaccaucgccaccaucugcuuccucaugcagaucgccauccucgucaccaccgucacccuccacuucaagcaguacgagugcuccuccccccccaacaaccaggucaugcccugcgagcccaucaucaucgagcgcaacaucaccgagaucgucuaccucaccaacaccaccaucgagaaggagaucugccccaagcucgucgaguaccgcaacugguccaagccccagugcaagaucaccggcuucgcccccuucuccaaggacaacuccauccgccucuccgccggcggcgacaucugggucacccgcgagcccuacgucuccugcgaccccggcaagugcuaccaguucgcccucggccagggcaccacccucaacaacaagcacuccaacgacaccauccacgaccgcacccccuaccgcacccuccucaugaacgagcucggcguccccuuccaccucggcaccaagcaggucugcaucgccugguccuccuccuccugccacgacggcaaggccuggcuccacgucugcgucaccggccacgacaagaacgccaccgccuccuucaucuacgacggccgccucgucgacuccaucggcuccugguccaagaacauccuccgcacccaggaguccgagugcgucugcaucaacggcaccugcaccgucgucaugaccgacggcuccgccuccgagcgcgccgacaccaagauccucuucaucgaggagggcaagaucguccacaucuccccccucuccggcuccgcccagcacgucgaggagugcuccugcuacccccgcuaccccggcguccgcugcgucugccgcgacaacuggaagggcuccaaccgccccaucgucgacaucaacgucaaggacuacuccaucgucuccuccuacgucugcuccggccucgucggcgacaccccccgcaagaacgaccgcuccuccuccuccuacugccgcaaccccaacaacgagaagggcaaccacggcgucaagggcugggccuucgacgacggcaacgacgucuggaugggccgcaccaucggcgaggagcuccgcuccggcuacgagaccuucaaggucaucggcggcugguccacccccaacuccaagcuccagaucaaccgccaggucaucgucgacuccgacaaccgcuccggcuacuccggcaucuucuccgucgagggcaaguccugcaucaaccgcugcuucuacgucgagcucauccgcggccgcgagcaggagacccgcgucugguggaccuccaacuccaucgucgucuucugcggcaccuccggcaccuacggcaccggcuccuggcccgacggcgccgacaucaaccucaugcccaucuga

SEQ ID NO: 110524 - RNA, 1410 nt, Artificial Sequence; identical to SEQ ID NO: 110520
  derived and/or modified CDS sequence (opt2) from neuraminidase__InfluenzaA__ABB04953

SEQ ID NO: 110525 - RNA, 1410 nt, Artificial Sequence; identical to SEQ ID NO: 110418
  derived and/or modified CDS sequence (opt2) from neuraminidase__InfluenzaA__ABB04975

SEQ ID NO: 110526 - RNA, 1410 nt, Artificial Sequence; identical to SEQ ID NO: 110216
  derived and/or modified CDS sequence (opt2) from neuraminidase__InfluenzaA__ABB04986

SEQ ID NO: 110527 - RNA, 1410 nt, Artificial Sequence
  derived and/or modified CDS sequence (opt2) from neuraminidase__InfluenzaA__ABB04997
augaaccccaaccagaagaucaucaccaucggcuccgucucccucaccaucgccaccaucugcuuccucaugcagaucgccauccucgucaccaccgucacccuccacuucaagcaguacgagugcaacuccccccccaacaaccaggucaugcucugcgagcccaccaucaucgagcgcaacaucaccgagaucguccaccucaccaacaccaccaucgagaaggagaucugccccaagcucgccgaguaccgcaacugguccaagccccagugcaacaucaccggcuucgcccccuucuccaaggacaacuccauccgccucuccgccggcggcgacaucugggucacccgcgagcccuacgucuccugcgaccccgacaagugcuaccaguucgcccucggccagggcaccacccucaacaacggccacuccaacgacaccguccacgaccgcacccccuaccgcacccuccucaugaacgagcucggcguccccuuccaccucggcaccaagcaggucugcaucgccugguccuccuccuccugccacgacggcaaggccuggcuccacgucugcgucaccggcgacgacgagaacgccaccgccuccuucaucuacaacggccgccucgucgacuccaucggcuccugguccaagaagauccuccgcacccaggaguccgagugcgucugcaucaacggcaccugcaccgucgucaugaccgacggcuccgccuccggcaaggccgacaccaagauccucuucaucgaggagggcaagaucguccacaccucccuccucuccggcuccgcccagcacgucgaggagugcuccugcuacccccgcuaccccggcguccgcugcgucugccgcgacaacuggaagggcuccaaccgccccaucgucgacaucaacgucaaggacuacuccaucgucuccuccuacgucugcuccggccucgucggcgacaccccccgcaagaacgacuccuccuccuccucccacugccucgaccccaacaacgaggagggcggccacggcgucaagggcugggccuucgacgacggcaacgacgucuggaugggccgcaccaucuccgagaagcuccgcuccggcuacgagaccuucaaggucaucgagggcugguccaagcccaacuccaagcuccagaucaaccgccaggucaucgucgaccgcggcaaccgcuccggcuacuccggcaucuucuccgucgagggcaaguccugcaucaaccgcugcuucuacgucgagcucauccgcggccgcaagcaggagaccgagguccucuggaccuccaacuccaucgucgucuucugcggcaccuccggcaccuacggcaccggcuccuggcccgacggcgccgacaucaaccucaagcccaucuga

SEQ ID NO: 110528 - RNA, 1410 nt, Artificial Sequence; identical to SEQ ID NO: 110289
  derived and/or modified CDS sequence (opt2) from neuraminidase__InfluenzaA__ABB05008

SEQ ID NO: 110529 - RNA, 1410 nt, Artificial Sequence; identical to SEQ ID NO: 110097
  derived and/or modified CDS sequence (opt2) from neuraminidase__InfluenzaA__ABB05186

SEQ ID NO: 110530 - RNA, 1410 nt, Artificial Sequence; identical to SEQ ID NO: 110289
  derived and/or modified CDS sequence (opt2) from neuraminidase__InfluenzaA__ABB05219

SEQ ID NO: 110531 - RNA, 1410 nt, Artificial Sequence
  derived and/or modified CDS sequence (opt2) from neuraminidase__InfluenzaA__ABB46395
augaaccccaaccagaagaucaucaccaucggcuccgucucccucaccaucgccaccaucugcuuccucaugcagaucgccauccucgucaccaccgucacccuccacuucaagcaguacgagugcgacucccccgccaacaagcaggucaugcccugcgagcccaucaucaucgagcgcaacaucaccgagaucgucuaccucaccaacaccaccaucgagaaggagaucugccccaagcucgucgaguaccgcaacugguccaagccccagugcaagaucaccggcuucgcccccuucuccaaggacaacuccauccgccucuccgccggcggcgacaucugggucacccgcgagcccuacgucuccugcgaccccggcaagugcuaccaguucgcccucggccagggcaccacccucgacaacaagcacuccaacgacaccauccacgaccgcaccccccaccgcacccuccucaugaacgagcucggcguccccuuccaccucggcacccgccaggucugcaucgccugguccuccuccuccugccacgacggcaaggccuggcuccacgucugcgucaccggcuacgacaagaacgccaccgccuccuucaucuacgacggccgccucgucgacuccaucggcuccuggucccagaacauccuccgcacccaggaguccgagugcgucugcaucaacggcaccugcaccgucgucaugaccgacggcuccgccuccggccgcgccgacaccaagauccucuucaucgaggagggcaagaucguccacaucuccccccucuccggcuccgcccagcacgucgaggagugcuccugcuacccccgcuaccccggcguccgcugcaucugccgcgacaacuggaagggcuccaaccgccccgucgucgacaucaacgucaaggacuacuccaucgacuccuccuacgucugcuccggccucgucggcgacaccccccgcaacaacgaccgcuccuccuccuccuacugccgcaaccccaacaacgagaagggcacccacggcgucaagggcugggccuucgacgacggcaacgacgucuggaugggccgcaccaucuccgaggacucccgcuccggcuacgagaccuucaaggucaucggcggcugguccacccccaacuccaagcuccagaucaaccgccaggucaucgucgacuccgacaaccgcuccggcuacuccggcaucuucuccgucgagggcaaguccugcaucaaccgcugcuucuacgucgagcucauccgcggccgcgagcaggagacccgcgucugguggaccuccaacuccaucgucgucuucugcggcaccuccggcaccuacggcaccggcuccuggcccgacggcgccgacaucaaccucaugcccaucuga

SEQ ID NO: 110532 - RNA, 1410 nt, Artificial Sequence; identical to SEQ ID NO: 110076
  derived and/or modified CDS sequence (opt2) from neuraminidase__InfluenzaA__ABB46417

SEQ ID NO: 110533 - RNA, 1410 nt, Artificial Sequence
  derived and/or modified CDS sequence (opt2) from neuraminidase__InfluenzaA__ABB46428
augaaccccaaccagaagaucaucaccaucggcuccgucucccucaccaucgccaccaucugcuuccucaugcagaucgccauccucgucaccaccgucacccuccacuucaagcaguacgagugcaacuccccccccaacaaccaggucaugcucugcgagcccaccaucaucgagcgcaacaucaccgagaucgucuaccucaccaacaccaccaucgagaaggagaucugccccaagcucgccgaguaccgcaacugguccaagccccagugcaacaucaccggcuucgcccccuucuccaaggacaacuccauccgccucuccgccggcggcgacaucugggucacccgcgagcccuacgucuccugcgaccccgacaagugcuaccaguucgcccucggccagggcaccacccucaacaacggccacuccaacgacaccguccacgaccgcacccccuaccgcacccuccucaugaacgagcucggcguccccuuccaccucggcaccaagcaggucugcaucgccugguccuccuccuccugccacgacggcaaggccuggcuccacgucugcgucaccggcgacgacgagaacgccaccgccuccuucaucuacaacggccgccucgucgacuccaucggcuccugguccaagaagauccuccgcacccaggaguccgagugcgucugcaucaacggcaccugcaccgucgucaugaccgacggcuccgccuccggcaaggccgacaccaagauccucuucaucgaggagggcaagaucguccacaucuccccccucuccggcuccgcccagcacgucgaggagugcuccugcuacccccgcuaccccggcguccgcugcgucugccgcgacaacuggaagggcuccaaccgccccaucgucgacaucaacgucaaggacuacuccaucgucuccuccuacgucugcuccggccucgucggcgacaccccccgcaagaacgacuccuucuccuccucccacugccucgaccccaacaacgaggagggcggccacggcgucaagggcugggccuucgacgacggcaacgacgucuggaugggccgcaccaucuccgagaagcuccgcuccggcuacgagaccuucaaggucaucgagggcugguccaagcccaacuccaagcuccagaucaaccgccaggucaucgucgaccgcggcaaccgcuccggcuacuccggcaucuucuccgucgagggcaaguccugcaucaaccgcugcuucuacgucgagcucauccgcggccgcaaggaggagaccgaggucugguggaccuccaacuccaucgucgucuucugcggcaccuccggcaccuacggcaccggcuccuggcccgacggcgccgacaucaaccucaugcccaucuga

SEQ ID NO: 110534 - RNA, 1410 nt, Artificial Sequence
  derived and/or modified CDS sequence (opt2) from neuraminidase__InfluenzaA__ABB46439
augaaccccaaccagaagaucaucaccaucggcuccgucucccucaccaucuccaccaucugcuucuucaugcagaucgccauccucaucaccaccgucacccuccacuucaagcaguacgaguucaacuccccccccaacaaccaggucaugcucugcgagcccaccaucaucgagcgcaacaucaccgagaucgucuaccucaccaacaccaccaucgagaaggagaucugccccaagcucgccgaguaccgcaacugguccaagccccagugcgacaucaccggcuucgcccccuucuccaaggacaacuccauccgccucuccgccggcggcgacaucugggucacccgcgagcccuacgucuccugcgaccccgacaagugcuaccaguucgcccucggccagggcaccacccucaacaacguccacuccaacgacaccguccacgaccgcacccccuaccgcacccuccucaugaacgagcucggcguccccuuccaccucggcaccaagcaggucugcaucgccugguccuccuccuccugccacgacggcaaggccuggcuccacgucugcgucaccggcgacgacaagaacgccaccgccuccuucaucuacaacggccgccucgucgacuccaucgucuccugguccaaggagauccuccgcacccaggaguccgagugcgucugcaucaacggcgccugcaccgucgucaugaccgacggcuccgccuccggcaaggccgacaccaagauccucuucaucgaggagcgccgcaucguccacaccuccacccucuccggcuccgcccagcacgucgaggagugcuccugcuacccccgcuaccccggcguccgcugcgucugccgcgacaacuggaagggcuccaaccgccccaucgucgacaucaacaucaaggacuacuccaucgucuccuccuacgucugcuccggccucgucggcgacaccccccgcaagaacgacuccuccuccuccuccaacugccucgaccccaacaacgaggagggcggccacggcgucaagggcugggccuucgacgacggcaacgacgucuggaugggccgcaccaucuccgagaagcuccgcuccggcuacgagaccuucaaggucaucgagggcugguccaaccccaacuccaagcuccagaucaaccgccaggucaucgucgaccgcggcaaccgcuccggcuacuccggcaucuucuccgucgagggcaaguccugcaucaaccgcugcuucuacgucgagcucauccgcggccgcaaggaggagaccgagguccucuggaccuccaacuccaucgucgucuucugcggcaccuccggcgccuacggcaccggcuccuggcccgacggcgccgacaucaaccucaugcccaucuga

SEQ ID NO: 110535 - RNA, 1410 nt, Artificial Sequence; identical to SEQ ID NO: 110382
  derived and/or modified CDS sequence (opt2) from neuraminidase__InfluenzaA__ABB46450

SEQ ID NO: 110536 - RNA, 1410 nt, Artificial Sequence; identical to SEQ ID NO: 110363
  derived and/or modified CDS sequence (opt2) from neuraminidase__InfluenzaA__ABB46461

SEQ ID NO: 110537 - RNA, 1410 nt, Artificial Sequence
  derived and/or modified CDS sequence (opt2) from neuraminidase__InfluenzaA__ABB46550
augaaccccaaccagaagaucaucaccaucggcuccgucucccucaccaucgccaccaucugcuuccucaugcagaucgccauccucgucaccaccgucacccuccacuucaagcaguacgagugcuccuccccccccaacaaccaggucaugcccugcgagcccaucaucaucgagcgcaacaucaccgagaucgucuaccucaccaacaccaccaucgagaaggagaucugccccaagcucgucgaguaccgcaacugguccaagccccagugcaagaucaccggcuucgcccccuucuccaaggacaacuccauccgccucuccgccggcggcgacaucugggucacccgcgagcccuacgucuccugcgaccccggcaagugcuaccaguucgcccucggccagggcaccacccucgacaacaagcacuccaacgacaccauccacgaccgcaccccccaccgcacccuccucaugaacgagcucggcguccccuuccaccucggcacccgccaggucugcaucgccugguccuccuccuccugccacgacggcaaggccuggcuccacgucugcgucaccggcuacgacaagaacgccaccgccuccuucaucuacgacggccgccucgucgacuccaucggcuccugguccaagaacauccuccgcacccaggaguccgagugcgucugcgucaacggcaccugcaccgucgucaugaccgacggcuccgccuccgagcgcgccgacaccaagauccucuucaucgaggagggcaagaucguccacaucuccccccucuccggcuccgcccagcacgucgaggagugcuccugcuacccccgcuaccccggcguccgcugcgucugccgcgacaacuggaagggcuccaaccgccccgucgucgacaucaacgucaaggacuacuccaucgucuccuccuacgucugcuccggccucgucggcgacaccccccgcaagaacgaccgcuccuccuccuccuacugccgcaaccccaacaacgagaagggcaaccacggcgucaagggcugggccuucgacgacggcaacgacgucuggaugggccgcaccaucuccgaggagucccgcuccggcuacgagaccuucaaggucaucggcggcugguccacccccaacuccaagucccagaucaaccgccaggucaucgucgacuccggcaaccgcuccggcuacuccggcaucuucuccgucgagggcaaguccugcaucaaccgcugcuucuacgucgagcucauccgcggccgcgagcaggagacccgcgucugguggaccuccaacuccaucgucgucuucugcggcaccuccggcaccuacggcaccggcuccuggcccgacggcgccgacaucaaccucaugcccaucuga

SEQ ID NO: 110538 - RNA, 1410 nt, Artificial Sequence
  derived and/or modified CDS sequence (opt2) from neuraminidase__InfluenzaA__ABB51955
augaaccccaaccagaagaucaucaccaucggcuccgucucccucaccaucuccaccaucugcuucuucaugcagaucgccauccucgucaccaccgucacccuccacuucaagcaguacgagugcaacuccccccccaacaaccaggucaugcucugcgagcccaccaucaucgagcgcaacaucaccgagaucgucuaccucaccaacaccaccaucgagaaggagaucugccccaagcucgccgaguaccgcaacugguccaagccccagugcaacaucaccggcuucgcccccuucuccaaggacaacuccauccgccucuccgccggcggcgacaucugggucacccgcgagcccuacgucuccugcgaccccgacaagugcuaccaguucgcccucggccagggcaccacccucaacaacggccacuccaacgacaucguccacgaccgcacccccuaccgcacccuccucaugaacgagcucggcguccccuuccaccucggcaccaagcaggucugcaucgccugguccuccuccuccugccacgacggcaaggccuggcuccacgucugcgucaccggcgacgacgagaacgccaccgccuccuucaucuacaacggccgccucgucgacuccaucggcuccugguccaagaaguucuuccgcacccaggaguccgagugcgucugcauccacggcaccugcaccgucgucaugaccgacggcuccgccucccgcaaggccgacaccaagauccucuucaucgaggagggcaagaucguccacaccuccacccucuccggcuccgcccagcacgucgaggagugcuccugcuacccccgcuaccccggcguccgcugcgucugccgcgacaacuggaagggcuccaaccgccccaucgucgacaucaacaucaaggacuacuccaucgucuccuccuacgucugcuccggccucgucggcgacaccccccgcaagaacgacuccuccuccuccucccacugccucgaccccaacaacgaggagggcggccacggcgucaagggcugggccuucgacgacggcaacgacgucuggaugggccgcaccaucuccgagaagcuccgcuccggcuacgagaccuucaaggucaucgagggcugguccaagcccaacuccaagcuccagaucaaccgccaggucaucgucgaccgcggcaaccgcuccggcuacuccggcaucuucuccgucgagggcaaguccugcaucaaccgcugcuucuacgucgagcucauccgcggccgcaagcaggagaccgagguccucuggaccuccaacuccaucgucgucuucugcggcaccuccggcaccuacggcaccggcuccuggcccgacggcgccgacaucaaccucaugcccaucuga

SEQ ID NO: 110539 - RNA, 1413 nt, Artificial Sequence
  derived and/or modified CDS sequence (opt2) from neuraminidase__InfluenzaA__ABB51956
augaaccccaaccagaagaucaucaccaucggcuccaucuccaucgccaucggcaucaucucccucaugcuccagaucggcaacaucaucuccaucugggccucccacuccauccagaccggcucccagaaccacaccggcgucugcaaccagcgcaucaucaccuacgagaacuccaccugggucaaccacaccuacgucaacaucaacaacaccaacgucaucgccggcaaggacaagaccuccgucaccgucgccggcaacuccucccucugcuccaucuccggcugggccaucuacaccaaggacaacuccauccgcaucggcuccaagggcgacgucuucgucauccgcgagcccuucaucuccugcucccaccucgagugccgcaccuucuuccucacccagggcgcccuccucaacgacaagcacuccaacggcaccgucaaggaccgcucccccuaccgcgcccucauguccugcccccucggcgaggcccccucccccuacaacuccaaguucgaguccgucgccugguccgccuccgccugccacgacggcaugggcuggcucaccaucggcaucuccggccccgacaacggcgccgucgccguccucaaguacaacggcaucaucaccgagaccaucaaguccuggaagaagcccauccucggcacccaggaguccgagugggucugcgucaacggcuccugcuucaccaucaugaccgacgaccccuccuacgaggccgccuccuacaagaucuucaagaucgagcgcgagcgcgucaccaaguccaucgagcucaacgcccccaacuuccacuacgaggagugcuccugcuaccccgacaccggcaccgucaugugcgucugccgcgacaacuggcacggcuccaaccgccccugggucuccuucaaccagaaccucgacuaccagaucggcuacaucugcuccggcgucuucggcgacaacccccgccccaaggacggcgagggcuccugcaaccccgucaccgucgacggcgccaacggcgucaagggcuucuccuacaaguacggcaacggcgucuggaucggccgcaccaaguccaaccgccuccgcaagggcuucgagaugaucugggaccccaacggcuggaccgacaccgacuccgacuucuccgucaagcaggacgucgucgccaucaccgacugguccggcuacuccggcuccuucguccagcaccccgagcucaccggccucgacugcauccgccccugcuucugggucgagcucguccgcggccuccccaaggagaacaccaccaucuggaccuccggcuccuccaucuccuucugcggcgucaacuccgacaccgccaacugguccuggcccgacggcgccgagcuccccuucaccaucgacaaguga

SEQ ID NO: 110540 - RNA, 1410 nt, Artificial Sequence
  derived and/or modified CDS sequence (opt2) from neuraminidase__InfluenzaA__ABB51957
augaaccccaaccagaagaucaucaccaucggcuccgucucccucaccaucgccaccaucugcuuccucaugcagaucgccauccucgucaccaccgucacccuccacuucaagcagcacgagugcaacuccccccccaacaaccaggucaugcucugcgagcccaccaucaucgagcgcaacaucaccgagaucgucuaccucaccaacaccaccaucgagaaggagaucugccccaagcucgccgaguaccgcaacugguccaagccccagugcaacaucaccggcuucgcccccuucuccaaggacaacuccauccgccucuccgccggcggcgacaucugggucacccgcgagcccuacgucuccugcgaccccgacaagugcuaccaguucgcccucggccagggcaccacccucaacaacggccacuccaacgacaccguccgcgaccgcacccccuaccgcacccuccucaugaacgagcucggcguccccuuccaccucggcacccgccaggucugcaucgccugguccuccuccuccugccacgacggcaaggccuggcuccacgucugcgucaccggcgacgacaagaacgccaccgccuccuucaucuacaacggccgccucgucgacuccaucggcuccugguccaagaagaucuuccgcacccagaaguucgagugcgucugcauccacuggaccugcaccgucgucaugaccgacggcuccgccuccggcaaggccgacaccaagauccucuucaucgaggagggcaagaucguccacaucuccacccucuccggcuccgcccagcacgucgaggagugcuccugcuacccccgcuaccccggcguccgcugcgucugccgcgacaacuggaagggcuccaaccgccccaucgucgacaucaacgucaaggacuacuccaucgucuccuccuacgucugcuccggccucgucggcgacaccccccgcaagaacgacuccuucuccuccucccacugccucgaccccaacaacgaggagggcggccacggcgucaagggcugggccuucgacgacggcaacgacgucuggaugggccgcaccaucuccgagaagcuccgcuccggcuacgagaccuucaaggucaucgagggcugguccaagcccaacuccaagcuccagaucaaccgccaggucaucgucgagcgcggcaaccgcuccggcuacuccggcaucuucuccgucgagggcaaguccugcaucaaccgcugcuucuacgucgagcucauccgcggccgcaaggaggagaccgaggucugguggaccuccaacuccaucgucgucuucugcggcaccuccggcaccuacggcaccggcuccuggcccgacggcgccgacaucaaccucaugcccaucuga

SEQ ID NO: 110541 - RNA, 1413 nt, Artificial Sequence
  derived and/or modified CDS sequence (opt2) from neuraminidase__InfluenzaA__ABB51958
augaaccccaaccagaagaucaucaccaucggcuccaucuccaucgccaucggcaucaucucccucaugcuccagaucggcaacaucaucuccaucugggccucccacuccauccagaccggcucccagaaccacaccggcgucugcaaccagcgcaucaucaccuacgagaacuccaccugggucaaccacaccuacgucuccaucaacaacaccaacgucaucgccggcaaggacaagaccuccgucacccucgccggcaacuccucccucugccccauccgcggcugggccaucuacaccaagggcaacuccauccgcaucggcuccaagggcgacgucuucgucauccgcgagcccuucaucuccugcucccaccucgagugccgcaccuucuuccucacccagggcgcccuccucaacgacaagcacuccaacggcaccgucaaggaccgcucccccuaccgcgcccucauguccugcccccucggcgaggcccccucccccuacaacuccaaguucgaguccgucgccugguccgccuccgccugccacgacggcaugggcuggcucaccaucggcaucuccggccccgacaacggcgccgucgccguccucaaguacaacggcaucaucaccgagaccaucaaguccuggaagaagcagauccuccgcacccaggaguccgagugcgucugcgucaacggcuccugcuucaccaucaugaccgacggccccuccaacggcgccgccuccuacaagaucuucaagaucgagaagggcaaggucaccaaguccaucgagcucaacgcccccaacuuccacuacgaggagugcucccgcuaccccgacaccggcaccgucaugugcgucugccgcgacaacuggcacggcuccaaccgccccugggucuccuucaaccagaaccucgacuaccagaucggcuacaucugcuccggcgucuucggcgacaacccccgccccaaggacggcgagggcuccugcaaccccgucaccgucgacggcgccaacggcgucaagggcuucuccuacaaguacggcaacggcgucggcaucggccgcaccaucuccaaccgccuccgcaagggcuucgagaugaucugggaccccaacggcuggaccgacaccgacuccgacuucuccgucaagcaggacgucgucgccaucaccgacugguccggcuacuccggcuccuucguccagcaccccgagcucaccggccucgacugcauccgccccugcuucugggucgagcucguccgcggccuccccaaggagaacaccaccaucuggaccuccggcuccuccaucuccuucugcggcgucaacuccgacaccgccaacugguccuggcccgacggcgccgagcuccccuucaccaucgacaaguga

SEQ ID NO: 110542 - RNA, 1410 nt, Artificial Sequence
  derived and/or modified CDS sequence (opt2) from neuraminidase__InfluenzaA__ABB51959
augaaccccaaccagaagaucaucaccaucggcuccgucucccucaccaucuccaccaucugcuucuucaugcagaucgccauccucaucaccaccgucacccuccacuucaagcaguacgaguucaacuccccccccaacaaccaggucaugcucugcgagcccaccaucaucgagcgcaacaucaccgagaucgucuaccucaccaacaccaccaucgagaaggagaucugccccaagcucgccgaguaccgcaacugguccaagccccagugcgacaucaccggcuucgcccccuucuccaaggacaacuccauccgccucuccgccggcggcgacaucugggucacccgcgagcccuacgucuccugcgaccccgacaagugcuaccaguucgcccucggccagggcaccacccucaacaacguccacuccaacgacaccguccacggccgcacccccuaccgcacccuccucaugaacgagcucggcguccccuuccaccucggcaccaagcaggucugcaucgccugguccuccuccuccugccacgacggcaaggccuggcuccacgucugcgucaccggcgacgacaagaacgccaccgccuccuucaucuacaacggccgccucgucgacuccaucgucuccugguccaaggagauccuccgcacccaggaguccgagugcgucugcaucaacggcaccugcaccgucgucaugaccgacggcuccgccuccggcaaggccgacaccaagauccucuucaacgaggagggcaagaucguccacaccuccaccugcuccggcuccgcccagcacgucgaggagugcuccugcuacucccgcuaccccggcguccgcugcgucugccgcgacaacuggaagggcuccaaccgccccaucgucgacaucaacaucaaggacuacuccaucgucuccuccuacgucugcuccggccucgucggcgacaccccccgcaagaacgacuccuccuccuccucccacugccucgaccccaacaacgaggagggcggccacggcgucaagggccgcgccuucgacgacggcaacgacgucuggaugggccgcaccaucuccgagaagcuccgcuccggcuacgagaccuucaaggucaucgagggcugguccaaccccaacuccaagcuccagaucaaccgccaggucaucgucgaccgcggcaaccgcuccggcuacuccggcaucuucuccgucgagggcaaguccugcaucaaccgcugcuucuacgucgagcucauccgcggccgcaaggaggagaccgagguccucuggaccuccaacuccaucgucgucuucugcggcaccuccggcaccuacggcaccggcuccuggcccgacggcgccgacaucaaccucaugcccaucuga

SEQ ID NO: 110543 - RNA, 1413 nt, Artificial Sequence
  derived and/or modified CDS sequence (opt2) from neuraminidase__InfluenzaA__ABB51960
augaaccccaaccagaagaucaucaccaucggcuccaucuccaucgccaucggcaucaucucccucaugcuccagaucggcaacaucauccccaucugggccucccacuccauccagaccggcucccagaaccacaccggcgucugcaaccagcgcaucaucaccuacgagaacuccaccugggucaaccacaccuacgucaacaucaacaacaccaacgucaucgccggcaaggacaagaccuccgucacccucgccggcaacuccucccucugcuccaucuccggcugggccaucuacaccaaggacaacuccauccgcaucggcuccaagggcgacgucuucgucauccgcgagcccuucaucuccugcucccaccucgagugccgcaccuucuuccucacccagggcgcccuccucaacgacaagcacuccaacggcaccgucaaggaccgcucccccuaccgcgcccucauguccugcccccucggcgaggcccccucccccuacaacuccgaguucgaguccgucgccugguccgccuccgccugccacgacggcaugggcuggcucaccaucggcaucuccggccccgacaacggcgccgucgccguccucaaguacaacggcaucaucaccgagaccaucaaguccuggaagaagcagauccuccgcacccaggaguccgagugcgucugcgucaacggcuccugcuucaccaucaugaccgacggccccuccaacggcgccgccuccuacaagaucuucaagaucgagaagggcaagaucaccaaguccaucgagcucaacgcccccaacucccacuacgaggagugcuccugcuaccccgacaccggcaccgucaugugcgucugccgcgacuccuggcacggcuccaaccgccccugggucuccuucaaccagaaccucgacuaccagaucggcuacaucugcuccggcgucuucggcgacaacccccgccccaaggacggcgagggcuccugcaaccccgucaccgucgacggcgccaacggcgucaagggcuucuccuacgaguacggcaacggcgacuggaucggccgcaccaaguccaaccgccuccgcaagggcuucgagaugaucugggaccccgacggcuggaccgacaccaacuccgacuucuccgucaagcaggacgucgucgccaucaccgacugguccggcuacuccggcuccuucguccagcaccccgagcucaccggccucgucugcauccgccccugcuucugggucgagcucguccgcggccuccccaaggagaacaccaccaucuggaccuccggcuccuccaucuccuucugcggcgucaacuccgacaccgccaacugguccuggcccgacggcgccgagcuccccuucaccaucgacaaguga

SEQ ID NO: 110544 - RNA, 1410 nt, Artificial Sequence; identical to SEQ ID NO: 110379
  derived and/or modified CDS sequence (opt2) from neuraminidase__InfluenzaA__ABB53617

SEQ ID NO: 110545 - RNA, 1410 nt, Artificial Sequence
  derived and/or modified CDS sequence (opt2) from neuraminidase__InfluenzaA__ABB53721
augaaccccaaccagaagaucaucaccaucggcuccgucucccucaccaucuccaccaucugcuucuucaugcagaucgccauccucaucaccaccgucacccuccacuucaagcaguacgaguucaacuccccccccaacaaccaggucaugcucugcgagcccaccaucaucgagcgcaacaucaccgagaucgucuaccucaccaacaccaccaucgagaaggagaucugccccaagcucgccgaguaccgcaacugguccaagccccagugcgacaucaccggcuucgcccccuucuccaaggacaacuccauccgccucuccuccggcggcgacaucugggucacccgcgagcccuacgucuccugcgaccccgacaagugcuaccaguucgcccucggccagggcaccacccucaacaacguccacuccaacgacaccguccacgaccgcacccccuaccgcacccuccucaugaacgagcucggcguccccuuccaccucggcaccaagcaggucugcaucgccugguccuccuccuccugccacgacggcaaggccuggcuccacgucugcgucaccggcgacgacaagaacgccaccgccuccuucaucuacaacggccgccucgucgacuccaucgucuccugguccaaggagauccuccgcacccaggaguccgagugcgucugcaucaacggcaccugcaccgucgucaugaccgacggcuccgccuccggcaaggccgacaccaagauccucuucaucgaggagggcaagaucguccacaccuccacccucuccggcuccgcccagcacgucgaggagugcuccugcuacccccgcuaccccggcguccgcugcgucugccgcgacaacuggaagggcuccaaccgccccaucgucgacaucaacaucaaggacuacuccaucgucuccuccuacgucugcuccggccucgucggcgacaccccccgcaagaacgacuccuccuccuccucccacugccucgaccccaacaacgaggagggcggccacggcgucaagggcugggccuucgacgacggcaacgacgucuggaugggccgcaccaucuccgagaagcuccgcuccggcuacgagaccuucaaggucaucgagggcugguccaaccccaacuccaagcuccagaucaaccgccaggucaucgucgaccgcggcaaccgcuccggcuacuccggcaucuucuccgucgagggcaaguccugcaucaaccgcugcuucuacgucgagcucauccgcggccgcaaggaggagaccgagguccucuggaccuccaacuccaucgucgucuucugcggcaccuccggcaccuacggcaccggcuccuggcccgacggcgccgacaucaaccucaugcccaucuga

SEQ ID NO: 110546 - RNA, 1410 nt, Artificial Sequence
  derived and/or modified CDS sequence (opt2) from neuraminidase__InfluenzaA__ABB53754
augaaccccaaccagaagaucaucaccaucggcuccgucucccucaccaucgccaccaucugcuuccucaugcagaucgccauccucgucaccaccgucacccuccacuucaagcaguacgagugcuccuccccccccaacaaccaggucaugcccugcgagcccaucaucaucgagcgcaacaucaccgagaucgucuaccucaccaacaccaccaucgagaaggagaucugccccaagcucgucgaguaccgcaacugguccaagccccagugcaagaucaccggcuucgcccccuucuccaaggacaacuccauccgccucuccgccggcggcgacaucugggucacccgcgagcccuacgucuccugcgaccccggcaagugcuaccaguucgcccucggccagggcaccacccucgacaacaagcacuccaacgacaccauccacgaccgcaccccccaccgcacccuccucaugaacgagcucggcguccccuuccaccucggcacccgccaggucugcaucgccugguccuccuccuccugccacgacggcaaggccuggcuccacgucugcgucaccggcuacgacaagaacgccaccgccuccuucaucuacgacggccgccucgucgacuccaucggcuccugguccaagaacauccuccgcacccaggaguccgagugcgucugcaucaacggcaccugcaccgucgucaugaccgacggcuccgccuccgagcgcgccgacaccaagauccucuucaucgaggagggcaagaucguccacaucuccccccucuccggcuccgcccagcacgucgaggagugcuccugcuacccccgcuaccccggcguccgcugcgucugccgcgacaacuggaagggcuccaaccgccccgucgucgacaucaacgucaaggacuacuccaucgucuccuccuacgucugcuccggccucgucggcgacaccccccgcaagaacgaccgcuccuccuccuccuacugccgcaaccccaacaacgagaagggcaaccacggcgucaagggcugggccuucgacgacggcaacgacgucuggaugggccgcaccaucuccgaggagucccgcuccggcuacgagaccuucaaggucaucggcggcugguccacccccaacuccaagcuccagaucaaccgccaggucaucgucgacuccgacaaccgcuccggcuacuccggcaucuucuccgucgagggcaaguccugcaucaaccgcugcuucuacgucgagcucauccgcggccgcgagcaggagacccgcgucugguggaccuccaacuccaucgucgucuucugcggcaccuccggcaccuacggcaccggcuccuggcccgacggcgccgacaucaaccucaugcccaucuga

SEQ ID NO: 110547 - RNA, 1410 nt, Artificial Sequence; identical to SEQ ID NO: 110139
  derived and/or modified CDS sequence (opt2) from neuraminidase__InfluenzaA__ABB54517

SEQ ID NO: 110548 - RNA, 1410 nt, Artificial Sequence
  derived and/or modified CDS sequence (opt2) from neuraminidase__InfluenzaA__ABB59999
augaaccccaaccagaagaucaucaccaucggcuccgucucccucaccaucgccaccaucugcuuccucaugcagaucgccauccucgucaccaccgucacccuccacuucaagcaguacgagugcuccuccccccccaacaaccaggucaugcucugcgagcccaccaucaucgagcgcaacaucaccgagaucgucuaccucaccaacaccaccaucgagaaggagaucugccccaagcucgccgaguaccgcaacugguccaagccccagugcaagaucaccggcuucgcccccuucuccaaggacaacuccauccgccucuccgccggcggcgacaucugggucacccgcgagcccuacgucuccugcgaccccgacaagugcuaccaguucgcccucggccagggcaccacccucaacaaccgccacuccaacgacaccguccacgaccgcacccccuaccgcacccuccucaugaacgagcucggcguccccuuccaccucggcaccaagcaggucugcaucgccugguccuccuccuccugccacgacggcaaggccuggcuccacgucugcgucaccggccacgacgagaacgccaccgccuccuucaucuacgacggccgccucgucgacuccaucggcuccugguccaagaagauccuccgcacccaggaguccgagugcgucugcaucaacggcaccugcaccgucgucaugaccgacggcuccgccuccggccgcgccgacaccaagauccucuucaucgaggagggcaagaucguccacaucuccccccucuccggcuccgcccagcacgucgaggagugcuccugcuacccccgcuaccccggcguccgcugcgucugccgcgacaacuggaagggcuccaaccgccccaucgucgacaucaacaucaaggacuacuccaucgucuccuccuacgucugcuccggccucgucggcgacaccccccgcaagaacgacuccuccuccuccucccacugccucaaccccaacaacgaggagggcggccacggcgucaagggcugggccuucgacgacggcaacgacgucuggaugggccgcaccaucuccgagaaguuccgcuccggcuacgagaccuucaaggucaucgagggcugguccaagcccaacuccaagcuccagaucaaccgccaggucaucgucgaccgcggcaaccgcuccggcuacuccggcaucuucuccgucgagggcaaguccugcaucaaccgcugcuucuacgucgagcucauccgcggccgcaagcaggagaccgaggucugguggaccuccaacuccaucgucaccuucugcggcaccuccggcaccuacggcaccggcuccuggcccgacggcgccgacaucaaccucaugcccaucuga

SEQ ID NO: 110549 - RNA, 1410 nt, Artificial Sequence
  derived and/or modified CDS sequence (opt2) from neuraminidase__InfluenzaA__ABB60010
augaaccccaaccagaagaucaucaccaucggcuccgucucccucaccaucgccaccaucugcuuccucaugcagaucgccauccucgucaccaccgucacccuccacuucaagcaguacgaguacuccuccccccccaacaaccaggucaugcucugcgagcccaccaucaucgagcgcaacaucaccgagaucgucuaccucaccaacaccaccaucgagaaggagaucugccccaagcucgccgaguaccgcaacugguccaagccccagugcaagaucaccggcuucgcccccuucuccaaggacaacuccauccgccucuccgccggcggcgacaucugggucacccgcgagcccuacgucuccugcgaccccgacaagugcuaccaguucgcccucggccagggcaccacccucaacaaccgccacuccaacgacaccguccacgaccgcacccccuaccgcacccuccucaugaacgagcucggcguccccuuccaccucggcaccaagcaggucugcaucgccugguccuccuccuccugccacgacggcaaggccuggcuccacgucugcgucaccggccacgacgagaacgccaccgccuccuucaucuacgacggccgccucgucgacuccaucggcuccugguccaagaagauccuccgcacccaggaguccgagugcgucugcaucaacggcaccugcaccgucgucaugaccgacggcuccgccuccggccgcgccgacaccaagauccucuucaucgaggagggcaagaucguccacaucuccccccucuccggcuccgcccagcacgucgaggagugcuccugcuacccccgcuaccccggcguccgcugcgucugccgcgacaacuggaagggcuccaaccgccccaucgucgacaucaacgucaaggacuacuccaucgucucccgcuacgucugcuccggccucgucggcgacaccccccgcaagaacgacuccuccuccuccucccacugccucaaccccaacaacgaggagggcggccacggcgucaagggcugggccuucgacgacggcaacgacgucuggaugggccgcaccaucuccgagaaguuccgcuccggcuacgagaccuucaaggucaucgagggcugguccaagcccaacuccaagcuccagaucaaccgccaggucaucgucgaccgcggcaaccgcuccggcuacuccggcaucuucuccgucgagggcaaguccugcaucaaccgcugcuucuacgucgagcucauccgcggccgcaagcaggagaccgaggucugguggaccuccaacuccaucgucgucuucugcggcaccuccggcaccuacggcaccggcuccuggcccgacggcgccgacaucaaccucaugcccaucuga

SEQ ID NO: 110550 - RNA, 1410 nt, Artificial Sequence
  derived and/or modified CDS sequence (opt2) from neuraminidase__InfluenzaA__ABB77867
augaaccccaaccagaagaucaucaccaucggcuccgucucccucaccaucgccaccaucugcuuccucaugcagaucgccauccucgucaccaccgucacccuccacuucaagcaguacgagugcaacuccccccccaacaaccaggucaugcucugcgagcccaccaucaucgagcgcaacaucaccgagaucgucuaccucaccaacaccaccaucgagaaggagaucugccccaagcucgccgaguaccgcaacugguccaagccccagugcaagaucaccggcuucgcccccuucuccaaggacaacuccauccgccucuccgccggcggcgacaucugggucacccgcgagcccuacgucuccugcgaccccgacaagugcuaccaguucgcccucggccagggcaccacccucaacaacggccacuccaacgacaccguccacgaccgcacccccuaccgcacccuccucaugaacgagcucggcguccccuuccaccucggcaccaagcaggucugcaucgccugguccuccuccuccugccacgacggcaaggccuggcuccacgucugcgucaccggccacgacgagaacgccaccgccuccuucaucuacgacggccgccucgucgacuccaucggcuccugguccaagaagauccuccgcacccaggaguccgagugcgucugcaucaacggcaccugcaccgucgucaugaccgacggcuccgccuccggccgcgccgacaccaagauccucuucaucgaggagggcaagaucguccacaucucccagcucuccggcuccgcccagcacgucgaggagugcuccugcuacccccgcuaccccggcguccgcugcgucugccgcgacaacuggaagggcuccaaccgccccaucgucgacaucaacgucaaggaccacuccaucgucuccuccuacgucugcuccggccucgucggcgacaccccccgcaagaacgacuccuccuccuccucccacugccucaaccccaacaacgaggagggcggccacggcgucaagggcugggccuucgacgacggcaacgacgucuggaugggccgcaccaucuccgagaagcuccgcuccggcuacgagaccuucaaggucaucgagggcugguccaagcccaacuccaagcuccagaucaaccgccaggucaucgucgaccgcggcaaccgcuccggcuacuccggcaucuucuccgucgagggcaaguccugcaucaaccgcugcuucuacgucgagcucauccgcggccgcaagcaggagaccgaggucugguggaccuccaacuccaucgucgucuucugcggcaccuccggcaccuacggcaccggcuccuggcccgacggcgccgacaucaaccucaugcccaucuga

SEQ ID NO: 110551 - RNA, 1410 nt, Artificial Sequence; identical to SEQ ID NO: 110550
  derived and/or modified CDS sequence (opt2) from neuraminidase__InfluenzaA__ABB79719

SEQ ID NO: 110552 - RNA, 1410 nt, Artificial Sequence
  derived and/or modified CDS sequence (opt2) from neuraminidase__InfluenzaA__ABB79734
augaaccccaaccagaagaucaucaccaucggcuccgucucccucacccucuccaccaucugcuucuucaugcagaucgccauccucaucaccaccgucacccuccacuucaagcaguacgaguucaacuccccccccaacaaccaggucaugcucugcgagcccaccaucaucgagcgcaacaucaccgagaucgucuaccucaccaacaccaccaucgagaaggagaucugccccaagcucgccgaguaccgcaacugguccaagccccagugcgacaucaccggcuucgcccccuucuccaaggacaacuccauccgccucuccgccggcggcgacaucugggucacccgcgagcccuacgucuccugcgaccccgacaagugcuaccaguucgcccucggccagggcaccacccucaacaacguccacuccaacgacaccguccacgaccgcacccccuaccgcacccuccucaugaacgagcucggcguccccuuccaccucggcaccaagcaggucugcaucgccugguccuccuccuccugccacgacggcaaggccuggcuccacgucugcgucaccggcgacgacaagaacgccaccgccuccuucaucuacaacggccgccucgucgacuccaucgucuccugguccaagaagauccuccgcacccaggaguccgagugcgucugcaucaacggcaccugcaccgucgucaugaccgacggcuccgccuccggcaaggccgacaccaagauccucuucaucgaggagggcaagaucguccacaccuccacccucuccggcuccgcccagcacgucgaggagugcuccugcuacccccgcuaccccggcguccgcugcgucugccgcgacaacuggaagggcuccaaccgccccaucgucgacaucaacaucaaggacuacuccaucgucuccuccuacgucugcuccggccucgucggcgacaccccccgcaagaacgacuccuccuccuccucccacugccucgaccccaacaacgaggagggcggccacggcgucaagggcugggccuucgacgacggcaacgacgucuggaugggccgcaccaucuccgagaagcuccgcuccggcuacgagaccuucaaggucaucgagggcugguccaaccccaacuccaagcuccagaucaaccgccaggucaucgucgaccgcggcaaccgcuccggcuacuccggcaucuucuccgucgagggcaaguccugcaucaaccgcugcuucuacgucgagcucauccgcggccgcaaggaggagaccgagguccucuggaccuccaacuccaucgucgucuucugcggcaccuccggcaccuacggcaccggcuccuggcccgacggcgccgacaucaaccucaugcccaucuga

SEQ ID NO: 110553 - RNA, 1410 nt, Artificial Sequence; identical to SEQ ID NO: 110523
  derived and/or modified CDS sequence (opt2) from neuraminidase__InfluenzaA__ABB79791

SEQ ID NO: 110554 - RNA, 1410 nt, Artificial Sequence
  derived and/or modified CDS sequence (opt2) from neuraminidase__InfluenzaA__ABB79802
augaaccccaaccagaagaucaucaccaucggcuccgucucccucaccaucgccaccaucugcuuccucaugcagaucgccauccucgucaccaccgucacccuccacuucaagcaguacgagugcuccuccccccccaacaaccaggucaugcccugcgagcccaucaucaucgagcgcaacaucaccgagaucgucuaccucaccaacaccaccaucgagaaggagaucugccccaagcucgucgaguaccgcaacugguccaagccccagugcaagaucaccggcuucgcccccuucuccaaggacaacuccauccgccucuccgccggcggcgacaucugggucacccgcgagcccuacgucuccugcgaccccggcaagugcuaccaguucgcccucggccagggcaccacccucaacaacaagcacuccaacgacaccauccacgaccgcacccccuaccgcacccuccucaugaacgagcucggcguccccuuccaccucggcaccaagcaggucugcaucgccugguccuccuccuccugccacgacggcaaggccuggcuccacgucugcgucaccggccacgacgagaacgccaccgccuccuucaucuacgacggccgccucgucgacuccaucggcuccugguccaagaacauccuccgcacccaggaguccgagugcgucugcaucaacggcaccugcaccgucgucaugaccgacggcuccgccuccgagcgcgccgacaccaagauccucuucaucgaggagggcaagaucguccacaucuccccccucuccggcuccgcccagcacgucgaggagugcuccugcuacccccgcuaccccggcguccgcugcgucugccgcgacaacuggaagggcuccaaccgccccaucgucgacaucaacgucaaggacuacuccaucgucuccuccuacgucugcuccggccucgucggcgacaccccccgcaagaacgaccgcuccuccuccuccuacugccgcaaccccaacaacgagaagggcucccacggcgucaagggcugggccuucgacgacggcaacgacgucuggaugggccgcaccaucggcgaggagcuccgcuccggcuacgagaccuucaaggucaucggcggcugguccacccccaacuccaagcuccagaucaaccgccaggucaucgucgacuccggcaaccgcuccggcuacuccggcaucuucuccgucgagggcaaguccugcaucaaccgcugcuucuacgucgagcucauccgcggccgcgagcaggagacccgcgucugguggaccuccaacuccaucgucgucuucugcggcaccuccggcaccuacggcaccggcuccuggcccgacggcgccgacaucaaccucaugcccaucuga

SEQ ID NO: 110555 - RNA, 1410 nt, Artificial Sequence
  derived and/or modified CDS sequence (opt2) from neuraminidase__InfluenzaA__ABB79813
augaaccccaaccagaagaucaucaccaucggcuccgucucccucaccaucgccaccaucugcuuccucaugcagaucgccauccucgucaccaccgucacccuccacuucaagcaguacgagugcaacuccccccccaacaaccaggucaugcucugcgagcccaccaucaucgagcgcaacaucaccgagaucgucuaccucaccaacaccaccaucgagaaggaggucugccccaagcucgccgaguaccgcaacugguccaagccccagugcaagaucaccggcuucgcccccuucuccaaggacaacuccauccgccucuccgccggcggcgacaucugggucacccgcgagcccuacgucuccugcgaccccggcaagugcuaccaguucgcccucggccagggcaccacccucaacaaccgccacuccaacgacaccguccacgaccgcacccccuaccgcacccuccucaugaacgagcucggcguccccuuccaccucggcaccaagcaggucugcaucgccugguccuccuccuccugccacgacggcaaggccuggcuccacgucugcgucaccggccacgacgagaacgccaccgccuccuucaucuacgacggccgccucgucgacuccaucggcuccugguccaagaacauccuccgcacccaggaguccgagugcgucugcaucaacggcaccugcaccgucgucaugaccgacggcuccgccuccgagcgcgccgacaccaagauccucuucaucgaggagggcaagaucguccacaucuccccccucuccggcuccgcccagcacgucgaggagugcuccugcuacccccgcuaccccggcguccgcugcgucugccgcgacaacuggaagggcuccaaccgccccaucgucgacaucaacgucaaggacuacuccaucgucuccuccuacgucugcuccggccucgucggcgacaccccccgcaagaacgacuccuccuccuccuccuacugccgcaaccccaacaacgagaagggcucccacggcgucaagggcugggccuucgacgacggcaacgacgucuggaugggccgcaccaucuccgaggagcuccgcuccggcuacgagaccuucaaggucaucggcggcugguccaagcccaacuccaagcuccagaucaaccgccaggucaucgucgaccgcggcaaccgcuccggcuacuccggcaucuucuccgucgagggcaaguccugcaucaaccgcugcuucuacgucgagcucauccgcggccgcaagcaggagaccgaggucugguggaccuccaacuccaucgucgucuucugcggcaccuccggcaccuacggcaccggcuccuggcccgacggcgccgacaucaaccucaugcccaucuga

SEQ ID NO: 110556 - RNA, 1410 nt, Artificial Sequence; identical to SEQ ID NO: 110555
  derived and/or modified CDS sequence (opt2) from neuraminidase__InfluenzaA__ABB79960

SEQ ID NO: 110557 - RNA, 1410 nt, Artificial Sequence; identical to SEQ ID NO: 110555
  derived and/or modified CDS sequence (opt2) from neuraminidase__InfluenzaA__ABB79971

SEQ ID NO: 110558 - RNA, 1413 nt, Artificial Sequence
  derived and/or modified CDS sequence (opt2) from neuraminidase__InfluenzaA__ABB79982
augaacgccaaccagaagaucaucaccaucggcuccaucuccaucgccaucggcaucaucucccucaugcuccagaucggcaacaucaucuccaucugggccucccacuccauccagaccggcucccagaaccacaccggcgucugcaaccagcgcaucaucaccuacgagaacuccaccugggucaaccacaccuacgucaacaucaacaacaccaacgucaucgccggcaaggacaagaccuccgucacccucgccggcaacuccucccucugcuccaucuccggcugggccaucuacaccaaggacaacuccauccgcaucggcuccaagggcgacgucuucgucauccgcgagcccuucaucuccugcucccaccucgagugccgcaccuucuuccucacccagggcgcccuccucaacgacaagcacuccaacggcaccgucaaggaccgcucccccuaccgcgcccucauguccugcccccucggcgaggcccccucccccuacaacuccaaguucgaguccgucgccugguccgccuccgccugccacgacggcaugggcuggcucaccaucggcaucuccggccccgacaacggcgccgucgccguccucaaguacaacggcaucaucaccgagaccaucaaguccuggaagaagcagauccuccgcacccaggaguccgagugcgucugcgucaacggcuccugcuucaccaucaugaccgacggccccuccaacggcgccgccuccuacaagaucuucaagaucgagaagggcaaggucaccaaguccaucgagcucaacgcccccaacuuccacuacgaggagugcuccugcuaccccgacaccggcaccgucaugugcgucugccgcgacaacuggcacggcuccaaccgccccugggucuccuucaaccagaaccucgacuaccagaucggcuacaucugcuccggcgucuucggcgacaacccccgccccaaggacggcgagggcuccugcaaccccgucaccgucgacggcgccaacggcgucaagggcuucuccuacaaguacggcaacggcgucuggaucggccgcaccaaguccaaccgccuccgcaagggcuucgagaugaucugggaccccaacggcuggaccgacaccgacuccgacuucuccgucaagcaggacgucgucgccaucaccgacugguccggcuacuccggcuccuucguccagcaccccgagcucaccggccucgacugcauccgccccugcuucugggucgagcucguccgcggccuccccaaggagaacaccaccaucuggaccuccggcuccuccaucuccuucugcggcgucaacuccgacaccgccaacugguccuggcccgacggcgccgagcuccccuucaccaucgacaaguga

SEQ ID NO: 110559 - RNA, 1413 nt, Artificial Sequence; identical to SEQ ID NO: 110487
  derived and/or modified CDS sequence (opt2) from neuraminidase__InfluenzaA__ABB79993

SEQ ID NO: 110560 - RNA, 1410 nt, Artificial Sequence
  derived and/or modified CDS sequence (opt2) from neuraminidase__InfluenzaA__ABB80004
augaaccccaaccagaagaucaucaccaucggcuccgucucccucaccaucuccaccaucugcuucuucaugcagaucgccauccucaucaccaccgucacccuccacuucaagcaguacgaguucaacuccccccccaacaaccaggucaugcucugcgagcccaccaucaucgagcgcaacaucaccgagaucgucuaccucaccaacaccaccaucgagaaggagaucugccccaagcucgccgaguaccgcaacugguccaagccccagugcgacaucaccggcuucgcccccuucuccaaggacaacuccauccgccucuccgccggcggcgacaucugggucacccgcgagcccuacgucuccugcgaccccgacaagugcuaccaguucgcccucggccagggcaccacccucaacaacguccacuccaacgacaccguccacgaccgcacccccuaccgcacccuccucaugaacgagcucggcguccccuuccaccucggcaccaagcaggucugcaucgccugguccuccuccuccugccacgacggcaaggccuggcuccacgucugcgucaccggcgacgacaagaacgccaccgccuccuucaucuacaacggccgccucgucgacuccaucgucuccugguccaaggagauccuccgcacccaggaguccgagugcgucugcaucaacggcaccugcaccgucgucaugaccgacggcuccgccuccggcaaggccgacaccaagauccucuucaucgaggagggcaagaucguccacaccuccacccucuccggcuccgcccagcacgucgaggagugcuccugcuacccccgcuaccccggcguccgcugcgucugccgcgacaacuggaagggcuccaaccgccccaucgucgacaucaacaucaaggacuacuccaccgucuccuccuacgucugcuccggccucgucggcgacaccccccgcaagaacgacuccuccuccuccucccacugccucgaccccaacaacgaggagggcggccacggcgucaagggcugggccuucgacgacggcaacgacgucuggaugggccgcaccaucuccgagaagcuccgcuccggcuacgagaccuucaaggucaucgagggcugguccaaccccaacuccaagcuccagaucaaccgccaggucaucgucgaccgcggcaaccgcuccggcuacuccggcaucuucuccgucgagggcaaguccugcaucaaccgcugcuucuacgucgagcucauccgcggccgcaaggaggagaccgagguccucuggaccuccaacuccaucgucgucuucugcggcaccuccggcaccuacggcaccggcuccuggcccgacggcgccgacaucaaccucaugcccaucuga

SEQ ID NO: 110561 - RNA, 1410 nt, Artificial Sequence; identical to SEQ ID NO: 110545
  derived and/or modified CDS sequence (opt2) from neuraminidase__InfluenzaA__ABB80015

SEQ ID NO: 110562 - RNA, 1410 nt, Artificial Sequence
  derived and/or modified CDS sequence (opt2) from neuraminidase__InfluenzaA__ABB80037
augaaccccaaccagaagaucaucaccaucggcuccgucucccucaccaucgccaccgucugcuuccucaugcagaucgccauccucgucaccaccgucacccuccacuucaagcaguacgagugcgacucccccgccaacaaccaggucaugcccugcgagcccaucaucaucgagcgcaacaucaccgagaucgucuaccucaacaacaccaccaucgagaaggagaucugccccaagcucgucgaguaccgcaacugguccaagccccagugcaagaucaccggcuucgcccccuucuccaaggacaacuccauccgccucuccgccggcggcgacaucugggucacccgcgagcccuacgucuccugcgaccccggcaagugcuaccaguucgcccucggccagggcaccacccucgacaacaagcacuccaacgacaccauccacgaccgcaucccccaccgcacccuccucaugaacgagcucggcguccccuuccaccucggcacccgccaggucugcaucgccugguccuccuccuccugccacgacggcaaggccuggcuccacgucugcgucaccggcgacgacaagaacgccaccgccuccuucaucuacgacggccgccucgucgacuccaucggcuccuggucccagaacauccuccgcacccaggaguccgagugcgucugcaucaacggcaccugcaccgucgucaugaccgacggcuccgccuccggccgcgccgacacccgcauccucuucaucgaggagggcaagaucguccacaucuccccccucuccggcuccgcccagcacgucgaggagugcuccugcuacccccgcuaccccggcguccgcugcaucugccgcgacaacuggaagggcuccaaccgccccgucgucgacaucaacgucgaggacuacuccaucgacuccuccuacgucugcuccggccucgucggcgacaccccccgcaacaacgaccgcuccuccaacuccaacugccgcaaccccaacaacgagcgcggcaaccacggcgucaagggcugggccuucgacgacggcaacgacgucuggaugggccgcaccaucuccaaggaccuccgcuccggcuacgagaccuucaaggucaucggcggcugguccacccccaacuccaagucccagaucaaccgccaggucaucgucgacuccgacaaccgcuccggcuacuccggcaucuucuccgucgagggcaaguccugcaucaaccgcugcuucuacgucgagcucauccgcggccgcgagcaggagacccgcgucugguggaccuccaacuccaucgucgucuucugcggcaccuccggcaccuacggcaccggcuccuggcccgacggcgccgacaucaaccucaugcccaucuga

SEQ ID NO: 110563 - RNA, 1413 nt, Artificial Sequence
  derived and/or modified CDS sequence (opt2) from neuraminidase__InfluenzaA__ABB80048
augaaccccaaccagaagaucaucaccaucggcuccaucuccaucgccaucggcaucaucucccucaugcuccagaucggcaacaucaucuccaucugggccucccacuccauccagaccggcucccagaaccacaccggcgucugcaaccagcgcaucaucaccuacgagaacuccaccugggucaaccacaccuacgucaacaucaacaacaccaacgucaucgccggcaaggacaagaccuccgucacccucgccggcaacuccucccucugcuccaucuccggcugggccaucuacaccaaggacaacuccauccgcaucggcuccaagggcgacgucuucgucauccgcgagcccuucaucuccugcucccaccucgagugccgcaccuucuuccucacccagggcgcccuccucaacgacaagcacuccaacggcaccgucaaggaccgcucccccuaccgcgcccucauguccugcccccucggcgaggcccccucccccuacaacuccaaguucgaguccgucgccugguccgccuccgccugccacgacggcaugggcuggcucaccaucggcaucuccggccccgacaacggcgccgucgccguccucaaguacaacggcaucaucaccgagaccaucaaguccuggaagaagcagauccuccgcacccaggaguccgagugcgucugcgucaacggcuccugcuucaccaucaugaccgacggccccuccaacggcgccgccuccuacaagaucuucaagaucgagaagggcaaggucaccaaguccgucgagcucaacgcccccaacuuccacuacgaggagugcuccugcuaccccgacaccggcaccgucaugugcgucugccgcgacaacuggcacggcuccaaccgccccugggucuccuucaaccagaaccucgacuaccagaucggcuacaucugcuccggcgucuucggcgacaacccccgccccaaggacggcgagggcuccugcaaccccgucaccgucgacggcgccaacggcgucaagggcuucuccuacaaguacggcaacggcgucuggaucggccgcaccaaguccaaccgccuccgcaagggcuucgagaugaucugggaccccaacggcuggaccgacaccgacuccgacuucuccgucaagcaggacgucgucgccaucaccgacugguccggcuacuccggcuccuucguccagcaccccgagcucaccggccucgacugcauccgccccugcuucugggucgagcucguccgcggccuccccaaggagaacaccaccaucuggaccuccggcuccuccaucuccuucugcggcgucaacggcgacaccgccaacugguccuggcccgacggcgccgagcuccccuucaccaucgacaaguga

SEQ ID NO: 110564 - RNA, 1410 nt, Artificial Sequence
  derived and/or modified CDS sequence (opt2) from neuraminidase__InfluenzaA__ABB80084
augaaccccaaccagaagaucaucaccaucggcuccgucucccucaccaucgccaccaucugcuuccucaugcagaucgccauccucgucaccaccgucacccuccacuucaagcaguacgagugcaacucccccuccaacaaccaggucaugcucugcgagcccaccaucaucgagcgcaacaucaccgagaucgucuaccucaccaacaccaccaucgagaaggagaucugccccaagcucgccgaguaccgcaacugguccaagccccagugcaagaucaccggcuucgcccccuucuccaaggacaacuccauccgccucuccgccggcggcgacaucugggucacccgcgagcccuacgucuccugcgaccccgacaagugcuaccaguucgcccucggccagggcaccacccucaacaacggccacuccaacgacaccguccacgaccgcacccccuaccgcacccuccucaugaacgagcucggcguccccuuccaccucggcaccaagcaggucugcaucgccugguccuccuccuccugccacgacggcaaggccuggcuccacgucugcgucaccggccacgacgagaacgccaccgccuccuucaucuacgacggccgccucgucgacuccaucggcuccugguccaagaagauccuccgcacccaggaguccgagugcgucugcaucaacggcaccugcaccgucgucaugaccgacggcuccgccuccggccgcgccgacaccaagauccucuucaucgaggagggcaagaucguccacaucucccagcucuccggcuccgcccagcacgucgaggagugcuccugcuacccccgcuaccccggcguccgcugcgucugccgcgacaacuggaagggcuccaaccgccccaucgucgacaucaacgucaaggaccacuccaucgucuccuccuacgucugcuccggccucgucggcgacaccccccgcaagaacgacuccuccuccuccucccacugccucaaccccaacaacgaggagggcggccacggcgucaagggcugggccuucgacgacggcaacgacgucuggaugggccgcaccaucuccgagaagcuccgcuccggcuacgagaccuucaaggucaucgagggcugguccaagcccaacuccaagcuccagaucaaccgccaggucaucgucgaccgcggcaaccgcuccggcuacuccggcaucuucuccgucgagggcaaguccugcaucaaccgcugcuucuacgucgagcucauccgcggccgcaagcaggagaccgaggucugguggaccuccaacuccaucgucgucuucugcggcaccuccggcaccuacggcaccggcuccuggcccgacggcgccgacaucaaccucaugcccaucuga

SEQ ID NO: 110565 - RNA, 1410 nt, Artificial Sequence; identical to SEQ ID NO: 110550
  derived and/or modified CDS sequence (opt2) from neuraminidase__InfluenzaA__ABB80095

SEQ ID NO: 110566 - RNA, 1410 nt, Artificial Sequence; identical to SEQ ID NO: 110550
  derived and/or modified CDS sequence (opt2) from neuraminidase__InfluenzaA__ABB80162

SEQ ID NO: 110567 - RNA, 1410 nt, Artificial Sequence; identical to SEQ ID NO: 110550
  derived and/or modified CDS sequence (opt2) from neuraminidase__InfluenzaA__ABB80199

SEQ ID NO: 110568 - RNA, 1410 nt, Artificial Sequence
  derived and/or modified CDS sequence (opt2) from neuraminidase__InfluenzaA__ABB80210
augaaccccaaccagaagaucaucaccaucggcuccgucucccucaccaucgccaccaucugcuuccucaugcagaucgccauccucgucaccaccgucacccuccacuucaagcaguacgagugcuccuccccccccaacaaccaggucaugcucugcgagcccaccaucaucgagcgcaacaucaccgagaucgucuaccucaccaacaccaccaucgagaaggagaucugccccaagcucgccgaguaccgcaacugguccaagccccagugcaagaucaccggcuucgcccccuucuccaaggacaacuccauccgccucuccgccggcggcgacaucugggucacccgcgagcccuacgucuccugcgaccccgacaagugcuaccaguucgcccucggccagggcaccacccucaacaaccgccacuccaacgacaccguccacgaccgcacccccuaccgcacccuccucaugaacgagcucggcguccccuuccaccucggcaccaagcaggucugcaucgccugguccuccuccuccugccacgacggcaaggccuggcuccacgucugcgucaccggccacgacgagaacgccaccgccuccuucaucuacgacggccgccucgucgacuccaucggcuccugguccaagaagauccuccgcacccaggaguccgagugcgucugcaucaacggcaccugcaccgucgucaugaccgacggcuccgccuccggccgcgccgacaccaagauccucuucaucgaggagggcaagaucguccacaucuccccccucuccggcuccgcccagcacgucgaggagugcuccugcuacccccgcuaccccggcguccgcugcgucugccgcgacaacuggaagggcuccaaccgccccaucgucgacaucaacgucaaggacuacuccaucgucuccuccuacgucugcuccggccucgucggcgacaccccccgcaagaacgacuccuccuccuccucccacugccucaaccccaacaacgaggagggcggccacggcgucaagggcugggccuucgacgacggcaacgacgucuggaugggccgcaccaucuccgagaaguuccgcuccggcuacgagaccuucaaggucaucgagggcugguccaagcccaacuccaagcuccagaucaaccgccaggucaucgucgaccgcggcaaccgcuccggcuacuccggcaucuucuccgucgagggcaaguccugcaucaaccgcugcuucuacgucgagcucauccgcggccgcaagcaggagaccgaggucugguggaccuccaacuccaucgucgucuucugcggcaccuccggcaccuacggcaccggcuccuggcccgacggcgccgacaucggccucaugcccaucuga

SEQ ID NO: 110569 - RNA, 1410 nt, Artificial Sequence
  derived and/or modified CDS sequence (opt2) from neuraminidase__InfluenzaA__ABB80232
augaaccccaaccagaagaucaucaccaucggcuccgucucccucaccaucgccaccaucugcuuccucaugcagaucgccauccucgucaccaccgucacccuccacuucaagcaguacgagugcaacuccccccccaacaaccaggucaugcucugcgagcccaccaucaucgagcgcaacaucaccgagaucgucuaccucaccaacaccaccaucgagaaggagaucugccccaagcucgccgaguaccgcaacugguccaagccccagugcaagaucaccggcuucgcccccuucuccaaggacaacuccauccgccucgccgccggcggcgacaucugggucacccgcgagcccuacgucuccugcgaccccgacaagugcuaccaguucgcccucggccagggcaccacccucaacaaccgccacuccaacgacaccguccacgaccgcacccccuaccgcacccuccucaugaacgagcucggcguccccuuccaccucggcaccaagcaggucugcaucgccugguccuccuccuccugccacgacggcaaggccuggcuccacgucugcgucaccggccacgacgagaacgccaccgccuccuucaucuacgacggccgccucgucgacuccaucggcuccugguccaagaagauccuccgcacccaggaguccgagugcgucugcaucaacggcaccugcaccgucgucaugaccgacggcuccgccuccggccgcgccgacaccaagauccucuucaucgaggagggcaagaucguccacaucucccagcucuccggcuccgcccagcacgucgaggagugcuccugcuacccccgcuaccccggcguccgcugcgucugccgcgacaacuggaagggcuccaaccgccccaucgucgacaucaacgucaaggacuacuccaucgucuccuccuacgucugcuccggccucgucggcgacaccccccgcaagaacgacuccuccuccuccucccacugccucaaccccaacaacgaggagggcggccacggcgucaagggcugggccuucgacgacggcgacgacgucuggaugggccgcaccaucuccgagaagcuccgcuccggcuacgagaccuucaaggucaucgagggcugguccaagcccaacuccaagcuccagaucaaccgccaggucaucgucgaccgcggcaaccgcuccggcuacuccggcaucuucuccgucgagggcaaguccugcaucaaccgcugcuucuacgucgagcucauccgcggccgcaagcaggagaccgaggucugguggaccuccaacuccaucgucgucuucugcggcaccuccggcaccuacggcaccggcuccuggcccgacggcgccgacaucaaccucaugcccaucuga

SEQ ID NO: 110570 - RNA, 1410 nt, Artificial Sequence
  derived and/or modified CDS sequence (opt2) from neuraminidase__InfluenzaA__ABB80243
augaaccccaaccagaagaucaucaccaucggcuccgucucccucaccaucgccaccaucugcuuccucaugcagaucgccauccucgucaccaccgucacccuccacuucaagcaguacgagugcaacuccccccccaacaaccaggucaugcucugcgagcccaccaucaucgagcgcaacaucaccgagaucgucuaccucaccaacaccaccaucgagaaggagaucugccccaagcucgccgaguaccgcaacugguccaagccccagugcaagaucaccggcuucgcccccuucuccaaggacaacuccauccgccucuccgccggcggcgacaucugggucacccgcgagcccuacgucuccugcgaccccgacaagugcuaccaguucgcccucggccagggcaccacccucaacaacggccacuccaacgacaccguccacgaccgcacccccuaccgcacccuccucaugaacgagcucggcguccccuuccaccucggcaccaagcaggucugcaucgccugguccuccuccuccugccacgacggcaaggccuggcuccacgucugcgucaccggccacgacgagaacgccaccgccuccuucaucuacgacggccgccucgucgacuccaucggcuccugguccaagaagauccuccgcacccaggaguccgagugcgucugcaucaacggcaccugcaccgucgucaugaccgacggcuccgccuccggccgcgccgacaccaagauccucuucaucgaggagggcaagaucguccacaucucccagcucuccggcuccgcccagcacgucgaggagugcuccugcuacccccgcuaccccggcguccgcugcgucugccgcgacaacuggaagggcuccaaccgccccaucgucgacaucaacgucaaggaccacuccaucgucuccuccuacgucugcuccggccucgucggcgacaccccccgcaagaacgacuccuccuccuccucccacugccucaaccccaacaacgaggagggcggccacggcgucaagggcugggccuucgacgacggcaacgacgucuggaugggccgcaccaucuccgagaagcuccgcuccggcuacgagaccuucaaggucaucgagggcugguccaagcccaacuccaagcuccagaucaaccgccaggucaucgucgaccgcggcaaccgcuccggcuacuccggcaucuucuccgucgagggcaaguccugcaucaaccgcugcuucuacgucgagcucauccgcggccgcaagaaggagaacgaggucugguggaccuccaacuccaucgucgucuucugcggcaccuccggcaccuacggcaccggcuccuggcccgacggcgccgacaucaaccucaugcccaucuga

SEQ ID NO: 110571 - RNA, 1410 nt, Artificial Sequence
  derived and/or modified CDS sequence (opt2) from neuraminidase__InfluenzaA__ABB80254
augaaccccaaccagaagaucaucaccaucggcuccgucucccucaccaucgccaccaucugcuuccucaugcagaucgccauccucgucaccaccgucacccuccacuucaagcaguacgagugcuccuccccccccaacaaccaggucaugcucugcgagcccaccaucaucgagcgcaacaucaccgagaucgucuaccucaccaacaccaccaucgagaaggagaucugccccaagcucgccgaguaccgcaacugguccaagccccagugcaagaucaccggcuucgcccccuucuccaaggacaacuccauccgccucuccgccggcggcgacaucugggucacccgcgagcccuacgucuccugcggccccgacaagugcuaccaguucgcccucggccagggcaccacccucaacaaccgccacuccaacgacaccguccacgaccgcacccccuaccgcacccuccucaugaacgagcucggcguccccuuccaccucggcaccaagcaggucugcaucgccugguccuccuccuccugccacgacggcaaggccuggcuccacgucugcgucaccggccacgacgagaacgccaccgccuccuucaucuacgacggccgccucgucgacuccaucggcuccugguccaagaagauccuccgcacccaggaguccgagugcgucugcaucaacggcaucugcaccgucgucaugaccgacggcuccgccuccggccgcgccgacaccaagauccucuucaucgaggagggcaagaucguccacaucuccccccucuccggcuccgcccagcacgucgaggagugcuccugcuacccccgcuaccccggcguccgcugcgucugccgcgacaacuggaagggcuccaaccgccccaucgucgacaucaacgucaaggacuacuccaucgucuccuccuacgucugcuccggccucgucggcgacaccccccgcaagaacgacuccuccuccuccucccacugccucaaccccaacaacgaggagggcggccacggcgucaagggcugggccuucgacgacggcaacgacgucuggaugggccgcaccaucuccgagaaguuccgcuccggcuacgagaccuucaaggucaucgagggcugguccaagcccaacuccaagcuccagaucaaccgccaggucaucgucgaccgcggcaaccgcuccggcuacuccggcaucuucuccgucgagggcaaguccugcaucaaccgcugcuucuacgucgagcucauccgcggccgcaagcaggagaccgaggucugguggaccuccaacuccaucgucgucuucugcggcaccuccggcaccuacggcaccggcuccuggcccgacggcgccgacaucaaccucaugcccaucuga

SEQ ID NO: 110572 - RNA, 1410 nt, Artificial Sequence; identical to SEQ ID NO: 110163
  derived and/or modified CDS sequence (opt2) from neuraminidase__InfluenzaA__ABB80495

SEQ ID NO: 110573 - RNA, 1410 nt, Artificial Sequence; identical to SEQ ID NO: 110550
  derived and/or modified CDS sequence (opt2) from neuraminidase__InfluenzaA__ABB80506

SEQ ID NO: 110574 - RNA, 1410 nt, Artificial Sequence; identical to SEQ ID NO: 110550
  derived and/or modified CDS sequence (opt2) from neuraminidase__InfluenzaA__ABB80517

SEQ ID NO: 110575 - RNA, 1410 nt, Artificial Sequence; identical to SEQ ID NO: 110550
  derived and/or modified CDS sequence (opt2) from neuraminidase__InfluenzaA__ABB80532

SEQ ID NO: 110576 - RNA, 1410 nt, Artificial Sequence
  derived and/or modified CDS sequence (opt2) from neuraminidase__InfluenzaA__ABB80644
augaaccccaaccagaagaucaucaccaucggcuccgucucccucaccaucgccaccaucugcuuccucaugcagaucgccauccucgucaccaccgucacccuccacuucaagcaguacgagugcuccuccccccccaacaaccaggucaugcucugcgagcccaccaucaucgagcgcaacaucaccgagaucgucuaccucaccaacaccaccaucgagaaggagaucugccccaagcucgccgaguaccgcaacugguccaagccccagugcaagaucaccggcuucgcccccuucuccaaggacaacuccauccgccucuccgccggcggcgacaucugggucacccgcgagcccuacgucuccugcgaccccgacaagugcuaccaguucgcccucggccagggcaccacccucaacaaccgccacuccaacgacaccguccacgaccgcacccccuaccgcacccuccucaugaacgagcucggcguccccuuccaccucggcaccaagcaggucugcaucgccugguccuccuccuccugccacgacggcaaggccuggcuccacgucugcgucaccggccacgacgagaacgccaccgccuccuucaucuacgacggccgccucgucgacuccaucggcuccugguccaacaagauccuccgcacccaggaguccgagugcgucugcaucaacggcaccugcaccgucgucaugaccgacggcuccgccuccggccgcgccgacaccaagauccucuucaucgaggagggcaagaucguccacaucuccccccucuccggcuccgcccagcacgucgaggagugcuccugcuacccccgcuaccccggcguccgcugcgucugccgcgacaacuggaagggcuccaaccgccccaucgucgacaucaacgucaaggacuacuccaucgucuccuccuacgucugcuccggccucgucggcgacaccccccgcaagaacgacuccuccuccuccucccacugccucaaccccaacaacgaggagggcggccacggcgucaagggcugggccuucgacgacggcaacgacgucuggaugggccgcaccaucuccgagaaguuccgcuccggcuacgagaccuucaaggucaucgagggcugguccaagcccaacuccaagcuccagaucaaccgccaggucaucgucgaccgcggcaaccgcuccggcuacuccggcaucuucuccgucgagggcaaguccugcaucaaccgcugcuucuacgucgagcucauccgcggccgcaagcaggagaccgaggucugguggaccuccaacuccaucgucgucuucugcggcaccuccggcaccuacggcaccggcuccuggcccgacggcgccgacaucaaccucaugcccaucuga

SEQ ID NO: 110577 - RNA, 1410 nt, Artificial Sequence
  derived and/or modified CDS sequence (opt2) from neuraminidase__InfluenzaA__ABB80664
augaaccccaaccagaagaucaucaccaucggcuccgucucccucaccaucgccaccaucugcuuccucaugcagaucgccauccucgucaccaccgucacccuccacuucaagcaguacgagugcuccuccccccccaacaaccaggucaugcucugcgagcccaccaucaucgagcgcaacaucaccgagaucgucuaccucaccaacaccaccaucgagaaggagaucugccccaagcucgccgaguaccgcaacugguccaagccccagugcaagaucaccggcuucgcccccuucuccaaggacaacuccauccgccucuccgccggcggcgacaucugggucacccgcgagcccuacgucuccugcgaccccgacaagugcuaccaguucgcccucggccagggcaccacccucaacaaccgccacuccaacgacaccguccacgaccgcacccccuaccgcacccuccucaugaacgagcucggcguccccuuccaccucggcaccaagcaggucugcaucgccugguccuccuccuccugccacgacggcaaggccuggcuccacgucugcgucaccggccacgacgagaacgccaccgccuccuucaucuacgacggccgccucgucgacuccaucggcuccugguccaagaagauccuccgcacccaggaguccgagugcgucugcaucaacggcaccugcaccgucgucaugaccgacggcuccgccuccggccgcgccgacaccaagguccucuucaucgaggagggcaagaucguccacaucuccccccucuccggcuccgcccagcacgucgaggagugcuccugcuacccccgcuaccccggcguccgcugcgucugccgcgacaacuggaagggcuccaaccgccccaucgucgacaucaacgucaaggacuacuccaucgucuccuccuacgucugcuccggccucgucggcgacaccccccgcaagaacgacuccuccuccuccucccacugccucaaccccaacaacgaggagggcggccacggcgucaagggcugggccuucgacgacggcaacgacgucuggaugggccgcaccaucuccgagaaguuccgcuccggcuacgagaccuucaaggucaucgagggcugguccaagcccaacuccaagcuccagaucaaccgccaggucaucgucgaccgcggcaaccgcuccggcuacuccggcaucuucuccgucgagggcaaguccugcaucaaccgcugcuucuacgucgagcucauccgcggccgcaagcaggagaccgaggucugguggaccuccaacuccaucgucgucuucugcggcaccuccggcaccuacggcaccggcuccuggcccgacggcgccgacaucaaccucaugcccaucuga

SEQ ID NO: 110578 - RNA, 1410 nt, Artificial Sequence
  derived and/or modified CDS sequence (opt2) from neuraminidase__InfluenzaA__ABB80675
augaaccccaaccagaagaucaucaccaucggcuccgucucccucaccaucgccaccaucugcuuccucaugcagaucgccauccucgucaccaccgucacccuccacuucaagcaguacgagugcaacuccccccccaacaaccaggucaugcucugcgagcccaccaucaucgagcgcaacaucaccgagaucgucuaccucaccaacaccaccaucgagaaggagaucugccccaagcucgccgaguaccgcaacugguccaagccccagugcaagaucaccggcuucgcccccuucuccaaggacaacuccauccgccucgccgccggcggcgacaucugggucacccgcgagcccuacgucuccugcgaccccgacaagugcuaccaguucgcccucggccagggcaccacccucaacaaccgccacuccaacgacaccguccacgaccgcacccccuaccgcacccuccucaugaacgagcucggcguccccuuccaccucggcaccaagcaggucugcaucgccugguccuccuccuccugccacgacggcaaggccuggcuccacgucugcgucaccggccacgacgagaacgccaccgccuccuucaucuacgacggccgccucgucgacuccaucggcuccugguccaagaagauccuccgcacccaggaguccgagugcgucugcaucaacggcaccugcaccgucgucaugaccgacggcuccgccuccggccgcgccgacaccaagauccucuucaucgaggagggcaagaucguccacaucucccagcucuccggcuccgcccagcacgucgaggagugcuccugcuacccccgcuaccccggcguccgcugcgucugccgcgacaacuggaagggcuccaaccgccccaucgucgacaucaacgucaaggacuacuccaucgucuccuccuacgucugcuccggccucgucggcgacaccccccgcaagaacgacuccuccuccuccuccuacugccucaaccccaacaacgaggagggcggccacggcgucaagggcugggccuucgacgacggcgacgacgucuggaugggccgcaccaucuccgagaagcuccgcuccggcuacgagaccuucaaggucaucgagggcugguccaagcccaacuccaagcuccagaucaaccgccaggucaucgucgaccgcggcaaccgcuccggcuacuccggcaucuucuccgucgagggcaaguccugcaucaaccgcugcuucuacgucgagcucauccgcggccgcaagcaggagaccgaggucugguggaccuccaacuccaucgucgucuucugcggcaccuccggcaccuacggcaccggcuccuggcccgacggcgccgacaucaaccucaugcccaucuga

SEQ ID NO: 110579 - RNA, 1410 nt, Artificial Sequence
  derived and/or modified CDS sequence (opt2) from neuraminidase__InfluenzaA__ABB80685
augaaccccaaccagaagaucaucaccaucggcuccgucucccucaccaucgccaccaucugcuuccucaugcagaucgccauccucgucaucaccgucacccuccacuucaagcaguacgagugcaacuccccccccaacaaccaggucaugcucugcgagcccaccaucaucgagcgcaacaucaccgagaucgucuaccucaccaacaccaccaucgagaaggagaucugccccaagcucgccgaguaccgcaacugguccaagccccagugcaagaucaccggcuucgcccccuucuccaaggacaacuccauccgccucuccgccggcggcgacaucugggucacccgcgagcccuacgucuccugcgaccccgacaagugcuaccaguucgcccucggccagggcaccacccucaacaacggccacuccaacgacaccguccacgaccgcacccccuaccgcacccuccucaugaacgagcucggcguccccuuccaccucggcaccaagcaggucugcaucgccugguccuccuccuccugccacgacggcaaggccuggcuccacgucugcgucaccggccacgacgagaacgccaccgccuccuucaucuacgacggccgccucgucgacuccaucggcuccugguccaagaagauccuccgcacccaggaguccgagugcgucugcaucaacggcaccugcaccgucgucaugaccgacggcuccgccuccggccgcgccgacaccaagauccucuucaucgaggagggcaagaucguccacaucucccagcucuccggcuccgcccagcacgucgaggagugcuccugcuacccccgcuaccccggcguccgcugcgucugccgcgacaacuggaagggcuccaaccgccccaucgucgacaucaacgucaaggaccacuccaucgucuccuccuacgucugcuccggccucgucggcgacaccccccgcaagaacgacuccuccuccuccucccacugccucaaccccaacaacgaggagggcggccacggcgucaagggcugggccuucgacgacggcaacgacgucuggaugggccgcaccaucuccgagaagcuccgcuccggcuacgagaccuucaaggucaucgagggcugguccaagcccaacuccaagcuccagaucaaccgccaggucaucgucgaccgcggcaaccgcuccggcuacuccggcaucuucuccgucgagggcaaguccugcaucaaccgcugcuucuacgucgagcucauccgcggccgcaagcaggagaccgaggucugguggaccuccaacuccaucgucgucuucugcggcaccuccggcaccuacggcaccggcuccuggcccgacggcgccgacaucaaccucaugcccaucuga

SEQ ID NO: 110580 - RNA, 1410 nt, Artificial Sequence; identical to SEQ ID NO: 110550
  derived and/or modified CDS sequence (opt2) from neuraminidase__InfluenzaA__ABB80696

SEQ ID NO: 110581 - RNA, 1410 nt, Artificial Sequence
  derived and/or modified CDS sequence (opt2) from neuraminidase__InfluenzaA__ABB80707
augaaccccaaccagaagaucaucaccaucggcuccgucucccucaccaucgccaccaucugcuuccucaugcagaucgccauccucgucaccaccgucacccuccacuucaagcaguacgagugcuccuccccccccaacaaccaggucaugcucugcgagcccaccaucaucgagcgcaacaucaccgagaucgucuaccucaccaacaccaccaucgagaaggagaucugccccaagcucgccgaguaccgcaacugguccaagccccagugcaagaucaccggcuucgcccccuucuccaaggacaacuccauccgccucuccgccggcggcgacaucugggucacccgcgagcccuacgucuccugcggccccgacaagugcuaccaguucgcccucggccagggcaccacccucaacaaccgccacuccaacgacaccguccacgaccgcacccccuaccgcacccuccucaugaacgagcucggcguccccuuccaccucggcaccaagcaggucugcaucgccugguccuccuccuccugccacgacggcaaggccuggcuccacgucugcgucaccggccacgacgagaacgccaccgccuccuucaucuacgacggccgccucgucgacuccaucggcuccugguccaagaagauccuccgcacccaggaguccgagugcgucugcaucaacggcaccugcaccgucgucaugaccgacggcuccgccuccggccgcgccgacaccaagauccucuucaucgaggagggcaagaucguccacaucuccccccucuccggcuccgcccagcacgucgaggagugcuccugcuacccccgcuaccccggcguccgcugcgucugccgcgacaacuggaagggcuccaaccgccccaucgucgacaucaacgucaaggacuacuccaucgucuccuccuacgucugcuccggccucgucggcgacaccccccgcaagaacgacuccuccuccuccucccacugccucaaccccaacaacgaggagggcggccacggcgucaagggcugggccuucgacgacggcaacgacgucuggaugggccgcaccaucuccgagaaguuccgcuccggcuacgagaccuucaaggucaucgagggcugguccaagcccaacuccaagcuccagaucaaccgccaggucaucgucgaccgcggcaaccgcuccggcuacuccggcaucuucuccgucgagggcaaguccugcaucaaccgcugcuucuacgucgagcucauccgcggccgcaagcaggagaccgaggucugguggaccuccaacuccaucgucgucuucugcggcaccuccggcaccuacggcaccggcuccuggcccgacggcgccgacaucaaccucaugcccaucuga

SEQ ID NO: 110582 - RNA, 1410 nt, Artificial Sequence; identical to SEQ ID NO: 110550
  derived and/or modified CDS sequence (opt2) from neuraminidase__InfluenzaA__ABB80716

SEQ ID NO: 110583 - RNA, 1410 nt, Artificial Sequence
  derived and/or modified CDS sequence (opt2) from neuraminidase__InfluenzaA__ABB80725
augaaccccaaccagaagaucaucaccaucggcuccgucucccucaccaucgccaccaucugcuuccucaugcagaucgccauccucgucaccaccgucacccuccacuucaagcaguacgagugcuccuccccccccaacaaccaggucaugcucugcgagcccaccgucaucgagcgcaacaucaccgagaucgucuaccucaccaacaccaccaucgagaaggagaucugccccaagcucgccgaguaccgcaacugguccaagccccagugcaagaucaccggcuucgcccccuucuccaaggacaacuccauccgccucuccgccggcggcgacaucugggucacccgcgagcccuacgucuccugcgaccccgacaagugcuaccaguucgcccucggccagggcaccacccucaacaaccgccacuccaacgacaccguccacgaccgcacccccuaccgcacccuccucaugaacgagcucggcguccccuuccaccucggcaccaagcaggucugcaucgccugguccuccuccuccugccacgacggcaaggccuggcuccacgucugcgucaccggccacgacgagaacgccaccgccuccuucaucuacgacggccgccucgucgacuccaucggcuccugguccaagaagauccuccgcacccaggaguccgagugcgucugcaucaacggcaccugcaccgucgucaugaccgacggcuccgccuccggccgcgccgacaccaagauccucuucaucgaggagggcaagaucguccacaucuccccccucuccggcuccgcccagcacgucgaggagugcuccugcuacccccgcuaccccggcguccgcugcgucugccgcgacaacuggaagggcuccaaccgccccaucgucgacaucaacgucaaggacuacuccaucgucuccuccuacgucugcuccggccucgucggcgacaccccccgcaagaacgacuccuccuccuccucccacugccucaaccccaacaacgaggagggcggccacggcgucaagggcugggccuucgacgacggcaacgacgucuggaugggccgcaccaucuccgagaaguuccgcuccggcuacgagaccuucaaggucaucgagggcugguccaagcccaacuccaagcuccagaucaaccgccaggucaucgucgaccgcggcaaccgcuccggcuacuccggcaucuucuccgucgagggcaaguccugcaucaaccgcugcuucuacgucgagcucauccgcggccgcaagcaggagaccgaggucugguggaccuccaacuccaucgucgccuucugcggcaccuccggcaccuacggcaccggcuccuggcccgacggcgccgacaucaaccucaugcccaucuga

SEQ ID NO: 110584 - RNA, 1410 nt, Artificial Sequence
  derived and/or modified CDS sequence (opt2) from neuraminidase__InfluenzaA__ABB80740
augaaccccaaccagaagaucaucaccaucggcuccgucucccucaccaucgccaccaucugcuuccucaugcagaucgccauccucgucaccaccgucacccuccacuucaagcaguacgagugcugcuccccccccaacaaccaggucaugcucugcgagcccaccaucaucgagcgcaacaucaccgagaucgucuaccucaccaacaccaccaucgagaaggagaucugccccaagcucgccgaguaccgcaacugguccaagccccagugcaagaucaccggcuucgcccccuucuccaaggacaacuccauccgccucuccgccggcggcgacaucugggucacccgcgagcccuacgucuccugcgaccccgacaagugcuaccaguucgcccucggccagggcaccacccucaacaaccgccacuccaacgacaccguccacgaccgcacccccuaccgcacccuccucaugaacgagcucggcguccccuuccaccucggcaccaagcaggucugcaucgccugguccuccuccuccugccacgacggcaaggccuggcuccacgucugcgucaccggccacgacgagaacgccaccgccuccuucaucuacgacggccgccucgucgacuccaucggcuccugguccaagaagauccuccgcacccaggaguccgagugcgucugcaucaacggcaccugcaccgucgucaugaccgacggcuccgccuccggccgcgccgacaccaagauccucuucaucgaggagggcaagaucguccacaucuccccccucuccggcuccgcccagcacgucgaggagugcuccugcuacccccgcuaccccggcguccgcugcgucugccgcgacaacuggaagggcuccaaccgccccaucgucgacaucaacgucaaggacuacuccaucgucuccuccuacgucugcuccggccucgucggcgacaccccccgcaagaacgacuccuccuccuccucccacugccucaaccccaacaacgaggagggcggccacggcgucaagggcugggccuucgacgacggcaacgacgucuggaugggccgcaccaucuccgagaaguuccgcuccggcuacgagaccuucaaggucaucgagggcugguccaagcccaacuccaagcuccagaucaaccgccaggucaucgucgaccgcggcaaccgcuccggcuacuccggcaucuucuccgucgagggcaaguccugcaucaaccgcugcuucuacgucgagcucauccgcggccgcaagcaggagaccgaggucugguggaccuccaacuccaucgucgccuucugcggcaccuccggcaccuacggcaccggcuccuggcccgacggcgccgacaucaaccucaugcccaucuga

SEQ ID NO: 110585 - RNA, 1410 nt, Artificial Sequence; identical to SEQ ID NO: 110550
  derived and/or modified CDS sequence (opt2) from neuraminidase__InfluenzaA__ABB80751

SEQ ID NO: 110586 - RNA, 1410 nt, Artificial Sequence; identical to SEQ ID NO: 110269
  derived and/or modified CDS sequence (opt2) from neuraminidase__InfluenzaA__ABB82186

SEQ ID NO: 110587 - RNA, 1413 nt, Artificial Sequence; identical to SEQ ID NO: 110432
  derived and/or modified CDS sequence (opt2) from neuraminidase__InfluenzaA__ABB82197

SEQ ID NO: 110588 - RNA, 1413 nt, Artificial Sequence; identical to SEQ ID NO: 110422
  derived and/or modified CDS sequence (opt2) from neuraminidase__InfluenzaA__ABB82208

SEQ ID NO: 110589 - RNA, 1413 nt, Artificial Sequence
  derived and/or modified CDS sequence (opt2) from neuraminidase__InfluenzaA__ABB82219
augaaccccaaccagaagaucaucaccaucggcuccaucuccaucgccaucggcaucaucucccucaugcuccagaucggcaacaucaucuccaucugggccucccacuccauccagaccggcucccagaaccacaccggcaucugcaaccagcgcaucaucaccuacgagaacuccaccugggucaaccacaccuacgucaacaucaacaacaccaacgucaucgccgagaaggacaagaccuccgucacccucgccggcaacuccucccucugcuccaucuccggcugggccaucuacaccaaggacaacuccauccgcaucggcuccaagggcgacgucuucgucauccgcgagcccuucaucuccugcuccaaccucgagugccgcaccuucuuccucacccagggcgcccuccucaacgacaagcacuccaacggcaccgucaaggaccgcucccccuaccgcgcccucauguccugcccccucggcgaggcccccucccccuacaacuccaaguucgaguccgucgccugguccgccuccgccugccacgacggcaugggcuggcucaccaucggcaucuccggccccgacaacggcgccgucgccguccucaaguacaacggcaucaucaccgagaccaucaaguccuggaagaagcgcauccuccgcacccaggaguccgagugcgucugcgucaacggcuccugcuucaccaucaugaccgacggccccuccaacggcgccgccuccuacaagaucuucaagaucgagaagggcaaggucaccaaguccaucgagcucaacgcccccaacuuccacuacgaggagugcuccugcuaccccgacaccggcaccgucaugugcgucugccgcgacaacuggcacggcuccaaccgccccugggucuccuucaaccagaaccucgacuaccagaucggcuacaucugcuccggcgucuucggcgacaacccccgccccaaggacggcgagggcuccugcaaccccgucaccgucgacggcgccgacggcgucaagggcuucuccuacaaguacggcaacggcgucuggaucggccgcaccaaguccaaccgccuccgcaagggcuucgagaugaucugggaccccaacggcuggaccgacaccgacuccgacuucuccgucaagcaggacgucgucgccaucaccgacugguccggcuacuccggcuccuucguccagcaccccgagcucaccggccucgacugcauccgccccugcuucugggucgagcucguccgcggccucccccgcgagaacaccaccaucuggaccuccggcuccuccaucuccuucugcggcgucaacuccgacgccgccgacugguccuggcccgacggcgccgagcuccccuucaccaucgacaaguga

SEQ ID NO: 110590 - RNA, 1410 nt, Artificial Sequence
  derived and/or modified CDS sequence (opt2) from neuraminidase__InfluenzaA__ABB82230
augaaccccaaccagaagaucaucaccaucggcuccgucucccucaccaucgccaccgucugcuuccucaugcagaucgccauccucgucaccaccgucacccuccacuucaagcaguacgagugcgacucccccgccaacaaccaggucaugcccugcgagcccaucaucaucgagcgcaacaucaccgagaucgucuaccucaccaacaccaccaucgagaaggagaucugccccaagcucgucgaguaccgcaacugguccaagccccagugcaagaucaccggcuucgcccccuucuccaaggacaacuccauccgccucuccgccggcggcgacaucugggucacccgcgagcccuacgucuccugcgaccccggcaagugcuaccaguucgcccucggccagggcaccacccucgacaacaagcacuccaacgacaccauccacgaccgcaucccccaccgcacccuccucaugaacgagcucggcguccccuuccaccucggcacccgccaggucugcaucgccugguccuccuccuccugccacgacggcaaggccuggcuccacgucugcgucaccggcgacgacaagaacgccaccgccuccuucaucuacgacggccgccucgucgacuccaucggcuccuggucccagaacauccuccgcacccaggaguccgagugcgucugcaucaacggcaccugcaccgucgucaugaccgacggcuccgccuccggccgcgccgacacccgcauccucuucaucgaggagggcaagaucguccacaucuccccccucuccggcuccgcccagcacgucgaggagugcuccugcuacccccgcuaccccggcguccgcugcaucugccgcgacaacuggaagggcuccaaccgccccaucgucgacaucaacgucaaggacuacuccaucgacucccgcuacgucugcuccggccucgucggcgacaccccccgcaacaacgaccgcuccuccaacuccaacugccgcaaccccaacaacgacaagggcaaccacggcgucaagggcugggccuucgacgacggcaacgacgucuggaugggccgcaccaucuccaaggacucccgcuccggcuacgagaccuucaaggucaucggcggcugguccacccccaacuccaagucccagaucaaccgccaggucaucgucgacuccgacaaccgcuccggcuacuccggcaucuucuccgucgagggcaaguccugcaucaaccgcugcuucuacgucgagcucauccgcggccgcgagcaggagacccgcgucugguggaccuccaacuccaucgucgucuucugcggcaccuccggcaccuacggcaccggcuccuggcccgacggcgccgacaucaaccucaugcccaucuga

SEQ ID NO: 110591 - RNA, 1410 nt, Artificial Sequence
  derived and/or modified CDS sequence (opt2) from neuraminidase__InfluenzaA__ABB83018
augaaccccaaccagaagaucaucaccaucggcuccgucucccucaccaucgccaccaucugcuuccucacccagaucgccauccucgucaccaccgucacccuccacuucaagcaguacggcugcaacuccccccccaacaaccaggucaugcucugcgagcccaccaucaucgagcgcaacaucaccgagaucgucuaccucaccaacaccaccaucgagaaggagaucugccccaagcucgccgaguaccgcaacugguccaagccccagugcaacaucaccggcuucgcccccuucuccaaggacaacuccauccgccucuccgccggcggcgacaucugggucacccgcgagcccuacgucuccugcgaccccgacaagugcuaccaguucgcccucggccagggcaccacccucaacaacggccacuccaacgacaccguccacgaccgcacccccuaccgcacccuccucaugaacgagcucggcguccccuuccaccucggcaccaagcaggucugcaucgccugguccuccuccuccugccacgacggcaaggccuggcuccacgucugcgucaccggcgacgacaagaacgccaccgccuccuucaucuacaacggccgccucgucgacuccaucggcuccugguccaagaagauccuccgcacccaggaguccgagugcgucugcaucaacggcaccugcaccgucgucaugaccgacggcuccgccuccggcaaggccgacaccaagauccucuucaucgaggagggcaagaucguccacaccucccuccucuccggcuccgcccagcacgucgaggagugcuccugcuacccccgcuaccccggcguccgcugcgucugccgcgacaacuggaagggcuccaaccgccccaucgucgacaucaacgucaaggacuacuccaucgucuccuccuacgucugcuccggccucgucggcgacaccccccgcaagaacgacuccuccuccuccucccacugccucgaccccaacaacgaggagggcggccacggcgucaagggcugggccuucgacgacggcaacgacgucuggaugggccgcaccaucuccgagaagcuccgcuccggcuacgagaccuucaaggucaucgagggcugguccaagcccaacuccaagcuccagaucaaccgccaggucaucgucgaccgcggcaaccgcuccggcuacuccggcaucuucuccgucgagggcaaguccugcaucaaccgcugcuucuacgucgagcucauccgcggccgcaaccaggagaccgagguccucuggaccuccaacuccaucgucgucuucugcggcaccuccggcaccuacggcaccggcuccuggcccgacggcgccgacaucaaccucaugcccaucuga

SEQ ID NO: 110592 - RNA, 1410 nt, Artificial Sequence; identical to SEQ ID NO: 110591
  derived and/or modified CDS sequence (opt2) from neuraminidase__InfluenzaA__ABB83029

SEQ ID NO: 110593 - RNA, 1410 nt, Artificial Sequence; identical to SEQ ID NO: 110418
  derived and/or modified CDS sequence (opt2) from neuraminidase__InfluenzaA__ABB83130

SEQ ID NO: 110594 - RNA, 1410 nt, Artificial Sequence
  derived and/or modified CDS sequence (opt2) from neuraminidase__InfluenzaA__ABB83141
augaaccccaaccagaagaucaucaccaucggcuccgucucccucaccaucgccaccaucugcuuccucucccagaucgccauccucgucaccaccgucacccuccacuucaagcaguacgagugcaacuccccccccaacaaccaggucaugcucugcgagcccaccaucaucgagcgcaacaucaccgagaucgucuaccucaccaacaccaccaucgagaaggagaucugccccaagcucgccgaguaccgcaacugguccaagccccagugcaacaucaccggcuucgcccccuucuccaaggacaacuccauccgccucuccgccggcggcgacaucugggucacccgcgagcccuacgucuccugcgaccccgacaagugcuaccaguucgcccucggccagggcaccacccucaacaacggccacuccaacgacaccguccacgaccgcacccccuaccgcacccuccucaugaacgagcucggcguccccuuccaccucggcaccaagcaggucugcaucgccugguccuccuccuccugccacgacggcaaggccuggcuccacgucugcgucaccggcgacgacaagaacgccaccgccuccuucaucuacaacggccgccucgucgacuccaucggcuccugguccaagaagauccuccgcacccaggaguccgagugcgucugcaucaacggcaccugcaccgucgucaugaccgacggcuccgccuccggcaaggccgacaccaagauccucuucaucgaggagggcaagaucguccacaccucccuccucuccggcuccgcccagcacgucgaggagugcuccugcuacccccgcuaccccggcguccgcugcgucugccgcgacaacuggaagggcuccaaccgccccaucgucgacaucaacgucaaggacuacuccaucgucuccuccuacgucugcuccggccucgucggcgacaccccccgcaagaacgacuccuccuccuccucccacugccucgaccccaacaacgaggagggcggccacggcgucaagggcugggccuucgacgacggcaacgacgucuggaugggccgcaccaucuccgagaagcuccgcuccggcuacgagaccuucaaggucaucgagggcugguccaagcccaacuccaagcuccagaucaaccgccaggucaucgucgaccgcgacaaccgcuccggcuacuccggcaucuucuccgucgagggcaaguccugcaucaaccgcugcuucuacgucgagcucauccgcggccgcaaccaggagaccgagguccucuggaccuccaacuccaucgucgucuucugcggcaccuccggcaccuacggcaccggcuccuggcccgacggcgccgacaucaaccucaugcccaucuga

SEQ ID NO: 110595 - RNA, 1410 nt, Artificial Sequence
  derived and/or modified CDS sequence (opt2) from neuraminidase__InfluenzaA__ABB86876
augaacaccaaccagcgcaucaucaccaucggcaccgucugccucaucgucggcaucaucucccuccuccuccagaucggcaacaucgucucccucuggaucucccacuccauccagaccggcggcaagaaccacuccgagaugugcaaccagaacgucaucaccuacgucaacaacaccugggucaaccgcaccuacgucaacaucuccaacaccaacaucgccaccguccaggacgucaccuccgucauccucgccggcaacuccucccucugcuccgucuccggcugggccaucuacuccaaggacaacuccauccgcaucggcuccaagggcgacaucuucgucauccgcgagcccuucaucuccugcucccaccucgagugccgcaccuucuuccucacccagggcgcccuccucaacgacaagcacuccaacggcaccgucaaggaccgcucccccuaccgcacccucauguccugccccaucggcgaggcccccucccccuacaacucccgcuucgaguccgucgccugguccgccuccgccugccacgacggcaugggcuggcucaccaucggcaucuccggccccgacaacggcgccgucgccguccucaaguacaacggcaucaucaccgacaccaucaaguccuggcgcaacaagauccuccgcacccaggaguccgagugcgucugcaugaacggcuccugcuucaccguccucaccgacggccccuccaacggccaggccuccuacaagaucuucaaggucgagaagggcaagaucaucaaguccaucgagcucgacgcccccaacuaccacuacgaggagugcuccugcuaccccgacaccggcaaggucaugugcgucugccgcgacaacuggcacgccuccaaccgccccugggucuccuucgaccagaaccucgacuaccagaucggcuacaucugcuccggcgucuucggcgacaacccccgcuccaacgacggcaagggcaacugcggccccguccucuccaacggcgccaacggcgucaagggcuucuccuuccgcuacggcaacggcgucuggaucggccgcaccaaguccaucaacucccgcuccggcuucgagaugaucugggaccccaacggcuggaccggcaccgacuccuccuucuccaugaagcaggacaucaucgcccucaccgacugguccggcuacuccggcuccuucguccagcaccccgagcucaccggcaugaacugcauccgccccugcuucugggucgagcucauccgcggccagcccaaggaguccaccaucugggccuccggcuccuccaucuccuucugcggcgucgacuccgagaccaccuccugguccuggcccgacggcgccgaccuccccuucaccaucgacaaguga

SEQ ID NO: 110596 - RNA, 1410 nt, Artificial Sequence
  derived and/or modified CDS sequence (opt2) from neuraminidase__InfluenzaA__ABB86886
augaacaccaaccagcgcaucaucaccaucggcaccgccugccucgccaucggcaucgucucccuccuccuccagaucggcaacaucgucucccucuggaucucccacuccauccagaccgaggagaagaaccacuccgagaccugcucccagaacuucaucacccacgagaacaacaccugggucaaccagaccuacaucaacaucuccaacaccaacaacgucgucggccagggcgucaccuccaucaugcucgccggcaacuccucccucugccccaucuccggcugggccaucuacuccaaggacaacuccauccgcaucggcuccaagggcgacaucuucgucauccgcgagcccuucaucuccugcucccaccucgagugccgcaccuucuuccucacccagggcgcccuccucaacgacaagcacuccaacggcaccgucaaggaccgcucccccuaccgcacccucauguccugccccaucggcgaggcccccucccccuacaacucccgcuucgaguccgucgccugguccgccuccgccugccacgacggcaugggcuggcucaccaucggcaucuccggccccgacaacggcgccgucgccgucuucaaguacaacggcaucaucaccgacaccaucaaguccuggcgcaacaagauccuccgcacccaggaguccgagugcgucugcaucaacggcuccugcuucaccaucaugaccgacggccccuccaacggccaggccuccuacaagaucuucaagauggagaagggcaagaucaucaaguccgucgagcucgacgcccccaacuaccacuacgaggaguccuccugcuaccccgacaccggcaaggucgucugcgucugccgcgacaacuggcacgccuccaaccgccccugggucuccuucgaccagaaccucgacuaccagaucggcuacaucugcuccggcgucuucggcgacaacccccgcuccaacgacggcaagggcaacugcggccccguccucuccaacggcgccaacggcgucaaggaggucuccuuccgcuacggcaacggcgucuggaucggccgcaccaaguccaucuccucccgcuccggcuucgagaugaucugggaccccaacggcuggaccgagaccgacuccuccuucuccaucaagcaggacaucaucgcccucaccgacugguccggcuacuccggcuccuucguccagcaccccgagcucaccggcaugaacugcaucaagcccugcuucugggucgagcucauccgcggccagcccaaggaguccaccaucuggaccuccggcuccuccaucuccuucugcggcgucgacuccgagaccgccuccugguccuggcccgacggcgccgaccuccccuucaccaucgacaaguga

SEQ ID NO: 110597 - RNA, 1410 nt, Artificial Sequence
  derived and/or modified CDS sequence (opt2) from neuraminidase__InfluenzaA__ABB86898
augaaccccaaccagaagaucaucaccaucggcuccgucucccucacccucgccaccaucugcuuccucaugcagaucgccauccucgucaccaccgucacccuccacuucaagcagcaggagugcaacuccccccccaacaaccaggucaugcucugcgagcccaccaucaucgagcgcaacaucaccgagaucgucuaccucaccaacaccaccaucgagaaggagaucugccccaagcucgccgaguaccgcaacugguccaagccccagugcaacaucaccggcuucgcccccuucuccaaggacaacuccauccgccucuccgccggcggcgacaucugggucacccgcgagcccuacgucuccugcgaccccgacaagugcuaccaguucgcccucggccagggcaccacccucaacaacggccacuccaacaacaccguccacgaccgcacccccuaccgcacccuccucaugaacgagcucggcguccccuuccaccucggcacccgccaggucugcaucgccugguccuccuccuccugccacgacggcaaggccuggcuccacgucugcaucaccggcgacgacaagaacgccaccgccuccuucaucuacaacggccgccucgucgacuccaucggcuccugguccaagaagauccuccgcacccaggaguccgagugcgucugcaucaacggcaccugcaccgucgucaugaccgacggcuccgccuccggcaaggccgacaccaagauccucuucaucgaggagggcaagaucguccacaucuccacccucuccggcuccgcccagcacgucgaggagugcuccugcuacccccgcuaccccggcguccgcugcgucugccgcgacaacuggaagggcuccaaccgccccaucgucgacaucaacgucaaggacuacuccaucgucuccuccuacgucugcuccggccucgucggcgacaccccccgcaagaacgacuccuucuccuccucccacugccucgaccccaacaacgaggagggcggccacggcgucaagggcugggccuucgacgacggcaacgacgucuggaugggccgcaccaucuccgagaagcuccgcuccggcuacgagaccuucaaggucaucgagggcugguccaagcccaacuccaagcuccagaucaaccgccaggucaucgucgagcgcggcucccgcuccggcuacuccggcaucuucuccgucgagggcaaguccugcaucaaccgcugcuucuacgucgagcucauccgcggccgcaaggaggagaccaaggucugguggaccuccaacuccaucgucgucuucugcggcaccuccggcaccuacggcaccggcuccuggcccgacggcgccgacaucaaccucaugcccaucuga

SEQ ID NO: 110598 - RNA, 1410 nt, Artificial Sequence
  derived and/or modified CDS sequence (opt2) from neuraminidase__InfluenzaA__ABB86906
augaacaccaaccagcgcaucaucaccaucggcaccgucugccucaucgucggcaucaucucccuccuccuccagaucggcaacaucgucucccucuggaucucccacuccauccagaccggcggcaagaaccacuccgagaugugcaaccagaacgucaucaccuacgucaacaacaccugggucaaccgcaccuacgucaacaucuccaacaccaacaucgccaccguccaggacgucaccuccgucauccucgccggcaacuccucccucugcuccgucuccggcugggccaucuacuccaaggacaacuccauccgcaucggcuccaagggcgacaucuucgucauccgcgagcccuucaucuccugcucccaccucgagugccgcaccuucuuccucacccagggcgcccuccucaacgacaagcacuccaacggcaccgucaaggaccgcucccccuaccgcacccucauguccugccccaucggcgaggcccccucccccuacaacucccgcuucgaguccgucgccugguccgccuccgccugccacgacggcaugggcuggcucaccaucggcaucuccggccccgacaacggcgccgucgccguccucaaguacaacggcaucaucaccgacaccaucaaguccuggcgcaacaagauccuccgcacccaggaguccgagugcgucugcaugaacggcuccugcuucaccguccucaccgacggccccuccaacggccaggccuccuacgagaucuucaaggucgagaagggcaagaucaucaaguccaucgagcucgacgcccccaacuaccacuacgaggagugcuccugcuaccccgacaccggcaaggucaugugcgucugccgcgacaacuggcacgccuccaaccgccccugggucuccuucgaccagaaccucaacuaccagaucggcuacaucugcuccggcgucuucggcgacaacccccgcuccaacgacggcaagggcaacugcggccccguccucuccaacggcgccaacggcgucaagggcuucuccuuccgcuacggcaacggcgucuggaucggccgcaccaaguccaucuccucccgcuccggcuucgagauggucugggaccccaacggcuggaccggcaccgacucccgcuucuccaugaagcaggacaucaucgcccucaccgacugguccggcuacuccggcuccuucguccagcaccccgagcucaccggcaugaacugcauccgccccugcuucugggucgagcucauccgcggccagcccaaggaguccaccaucugggccuccggcuccuccaucuccuucugcggcgucaacuccgagaccgccuccugguccuggcccgacggcgccgaccuccccuucaccaucgacaaguga

SEQ ID NO: 110599 - RNA, 1410 nt, Artificial Sequence
  derived and/or modified CDS sequence (opt2) from neuraminidase__InfluenzaA__ABB86916
augaaccccaaccagaagaucaucaccaucggcuccgucucccucaccaucgccaccaucugcuuccucacccagaucgccauccucgucaccaccgucacccuccacuucaagcaguacgagugcaacuccccccccaacaaccaggucaugcucugcgagcccaccaucaucgagcgcaacaucaccgagaucgucuaccucaccaacaccaccaucgagaaggagaucugccccaagcucgccgaguaccgcaacugguccaagccccagugcaacaucaccggcuucgcccccuucuccaaggacaacuccauccgccucuccgccggcggcgacaucugggucacccgcgagcccuacgucuccugcgaccccgacaagugcuaccaguucgcccucggccagggcaccacccucaacaacggccacuccaacgacaccguccacgaccgcacccccuaccgcacccuccucaugaacgagcucggcguccccuuccaccucggcaccaagcaggucugcaucgccugguccuccuccuccugccacgacggcaaggccuggcuccacgucugcaucaccggcgacgacaagaacgccaccgccuccuucaucuacaacggccgccucgucgacuccaucuccuccugguccaagaagauccuccgcacccaggaguccgagugcgucugcaucaacggcaccugcaccgucgucaugaccgacggcuccgccuccggcaaggccgacaccaagauccucuucaucgaggagggcaagaucguccacaccucccuccucuccggcuccgcccagcacgucgaggagugcuccugcuacccccgcuaccccggcguccgcugcgucugccgcgacaacuggaagggcuccaaccgccccaucgucgacaucaacgucaaggacuacuccaucgucuccuccuacgucugcuccggccucgucggcgacaccccccgcaagaacgacuccuccuccuccucccacugccucgaccccaacaacgaggagggcggccacggcgucaagggcugggccuucgacgacggcaacgacgucuggaugggccgcaccaucuccgagaagcuccgcuccggcuacgagaccuucaaggucaucgagggcugguccaagcccaacuccaagcuccagaucaaccgccaggucaucgucgaccgcgacaaccgcuccggcuacuccggcaucuucuccgucgagggcaaguccugcaucaaccgcugcuucuacgucgagcucauccgcggccgcaaccaggagaccgagguccucuggaccuccaacuccaucgucgucuucugcggcaccuccggcaccuacggcaccggcuccuggcccgacggcgccgacaucaaccucaugcccaucuga

SEQ ID NO: 110600 - RNA, 1410 nt, Artificial Sequence
  derived and/or modified CDS sequence (opt2) from neuraminidase__InfluenzaA__ABB86928
augaaccccaaccagaagaucaucaccaucggcuccgucucccucaccaucgccaccaucugcuuccucaugcagaucgccauccucgucaccaccgucacccuccacuucaagcaguacgagugcaacuccccccccaacaaccaggucaugcucugcgagcccaccaucaucgagcgcaacaucaccgagaucgucuaccucaccaacaccaccaucgagaaggagaucugccccaagcucgccgaguaccgcaacugguccaagccccagugcaacaucaccggcuucgcccccuucuccaaggacaacuccauccgccucuccgccggcggcgacaucugggucacccgcgagcccuacgucuccugcgaccccgacaagugcuaccaguucgcccucggccagggcaccacccucaacaacggccacuccaacgacaccguccacgaccgcacccccuaccgcacccuccucaugaacgagcucggcguccccuuccaccucggcacccgccaggucugcaucgccugguccuccuccuccugccacgacggcaaggccuggcuccacgucugcaucaccggcgacgacaagaacgccaccgccuccuucaucuacaacggccgccucgucgacuccaucggcuccugguccaagaagauccuccgcacccaggaguccgagugcgucugcaucaacggcaccugcaccgucgucaugaccgacggcuccgccuccggcaaggccgacaccaagauccucuucaucgaggagggcaagaucguccacaucuccacccucuccggcuccgcccagcacgucgaggagugcuccugcuacccccgcuaccccggcguccgcugcgucugccgcgacaacuggaagggcuccaaccgccccaucgucgacaucaacgucaaggacuacuccaucgucuccuccuacgucugcuccggccucgucggcgacaccccccgcaagaacgacuccuucuccuccucccacugccucaaccccaacaacgaggagggcggccacggcgucaagggcugggccuucgacgacggcaacgacgucuggaugggccgcaccaucuccgagaagcuccgcuccggcuacgagaccuucaaggucaucgagggcugguccaagcccaacuccaagcuccagaucaaccgccaggucaucgucgagcgcggcaaccgcuccggcuacuccggcaucuucuccaucgagggcaaguccugcaucaaccgcugcuucuacgucgagcucauccgcggccgcaaggaggagaccaaggucugguggaccuccaacuccaucgucgucuucugcggcaccuccggcaccuacggcaccggcuccuggcccgacggcgccgacaucaaccucaugcccaucuga

SEQ ID NO: 110601 - RNA, 1410 nt, Artificial Sequence
  derived and/or modified CDS sequence (opt2) from neuraminidase__InfluenzaA__ABB86936
augaacaccaaccagcgcaucaucaccaucggcaccgucugccucaucgucggcaucaucucccuccuccuccagaucggcaacaucgucucccucuggaucaaccacuccauccagaccgagggcaagaaccacuccgagaugugcaaccagaacgucaucaccuacgucaacaacaccugggucaaccgcaccuacgucaacaucuccaacaccaacaucgccaccguccaggacgucaccuccgucauccucgccggcaacuccucccucugccccgucuccggcugggccaucuacuccaaggacaacuccauccgcaucggcuccaagggcgacaucuucgucauccgcgagcccuucaucuccugcucccaccucgagugccgcaccuucuuccucacccagggcgcccuccucaacgacaagcacuccaacggcaccguccgcgaccgcucccccuaccgcacccucauguccugccccaccggcgaggcccccucccccuacaacucccgcuucgaguccgucgccugguccgccuccgccugccacgacggcaugggcuggcucaccaucggcaucuccggccccgacaacggcgccgucgccguccucaaguacaacggcaucaucaccgacaccaucaaguccuggcgcaacaagauccuccgcacccaggaguccgagugcgucugcaugaacggcuccugcuucaccguccucaccgacggccccuccaacggccaggccuccuacaagaucuucaaggucgagaagggcaagaucaucaaguccaucgagcucgacgcccccaacuaccacuacgaggagugcuccugcuaccccgacaccggcaaggucaugugcgucugccgcgacaacuggcacgccuccaaccgccccuggaucuacuucgaccagaaccucgacuaccagaucggcuacaucugcuccggcgucuucggcgacaacccccgcuccaacgacggcaagggcaacugcggccccguccucuccaacggcgccaacggcgucaagggcuucuccuuccgcuacggcaacggcgucuggaucggccgcaccaaguccaucaacucccgcuccggcuucgagaugaucugggaccccaacggcuggaccggcaccgacuccuccuucuccaugaagcaggacauccucgccaccaccgacugguccggcuacuccggcuccuucguccagcaccccgagcucaccggcaugaacugcauccgccccugcuucugggucgagcucauccgcggccagcccaaggaguccaccaucugggccuccggcuccuccaucuccuucugcggcgucaacuccgagaccgccaacugguccuggcccgacggcgccgaccuccccuucaccaucgacaaguga

SEQ ID NO: 110602 - RNA, 1410 nt, Artificial Sequence
  derived and/or modified CDS sequence (opt2) from neuraminidase__InfluenzaA__ABB86947
augaacaccaaccagcgcaucaucaccaucggcaccgucugccucaucgucggcaucaucucccuccucucccagaucggcaacaucgucucccucuggaucauccacuccauccagaccggcggcaagaaccacuccgagaugugcaaccagaacgucaucaccuacgucaacaacaccugggucaaccgcaccuacaucaacaucuccaacaccaacaucgccaccgucaaggacgucaccuccgucauccucgccggcaacuccucccucugccccgucuccggcugggccaucuacuccaaggacaacuccauccgcaucggcuccaagggcgacaucuucgucauccgcgagcccuucaucuccugcucccaccucgagugccgcaccuucuuccucacccagggcgcccuccucaacgacaagcacuccaacggcaccgucaaggaccgcucccccuaccgcacccucauguccugccccaucggcgaggcccccucccccuacaacucccgcuucgaguccgucgccugguccgccuccgccugccacgacggcaugggcuggcucaccaucggcaucuccggccccgacaacggcgccgucgccguccucaaguacaacggcaucaucaccgacaccaucaaguccuggcgcaacaagauccuccgcacccaggaguccgagugcgucugcaugaacggcuccugcuucaccguccucaccgacggccccuccaacggccaggccuccuacaagaucuucaaggucgagaagggcaagaucaucaaguccaucgagcucgacgcccccaacuaccacuacgaggagugcuccugcuaccccgacgccggcaaggucaugugcgucugccgcgacaacuggcacgccuccaaccgccccugggucuccuucgaccagaaccucgacuaccagaugggcuacaucugcuccggcgucuucggcgacaacccccgcuccaacgacggcaagggcaacugcggccccguccucuccaacggcgccaacggcgucaagggcuucuccuuccgcuacggcaacggcgucuggaucggccgcaccaaguccaucaacucccgcuccggcuucgagaugaucugggaccccaacggcuggaccggcaccgacuccuccuucuccaugaagcaggacaucaucgcccucaccgacugguccggcuacuccggcuccuucguccagcaccccgagcucaccggcaugaacugcauccgccccugcuucugggucgagcucauccgcggccagcccaaggaguccaccaucugggccuccggcuccuccaucuccuucugcggcgucaacuccgagaccgccuccugguccuggcccgacggcgccgaccuccccuucaccaucgacaaguga

SEQ ID NO: 110603 - RNA, 1410 nt, Artificial Sequence
  derived and/or modified CDS sequence (opt2) from neuraminidase__InfluenzaA__ABB86957
augaacaccaaccagcgcaucaucaccgucggcaccgucugccucaucgucggcaucgucucccuccuccuccagaucggcaacaucgucucccucuggaucucccacuccauccagaccggcgagaagaaccacuccgaggucugcaaccagaacaucaucaccuacgagaacaagaccugggucaaccagaccuacgucaacaucuccaacaccaacaucgccgagggccagggcgucaccuccaucaucauggccggcaacuccucccucugccccgucuccggcugggccaucuacuccaaggacaacuccauccgcaucggcuccaagggcgacaucuucgucauccgcgagcccuucaucuccugcucccaccucgagugccgcaccuucuuccucacccagggcgcccuccucaacgaccgccacuccaacggcaccgucaaggaccgcucccccuaccgcacccucauguccugccccaucggcgaggcccccucccccuacaacucccgcuucgaguccgucgccugguccgccuccgccugccacgacggcaugggcuggcucaccaucggcaucuccggcuccgacaacgaggccgucgccguccucaaguacaacggcaucaucaccgacaccaucaaguccuggcgcaacaagauccuccgcacccaggaguccgagugcgucugcaucaacggcuccugcuucaccaucaugaccgacggccccuccaacggccaggccuccuacaagaucuucaagauggagaagggcaagaucaucaaguccgucgagcucgaggcccccaacuaccacuacgaggagugcuccugcuaccccgacaccggcaaggucgucugcgucugccgcgacaacuggcacgccuccaaccgccccugggucuccuucaaccagaaccucgacuaccagaucggcuacaucugcuccggcgucuucggcgacaacccccgcuccaacgacggcaagggcaacugcggccccguccccuccaacggcgccaacggcgucaagggcuucuccuuccgcuacggcaacggcgucuggaucggccgcaccaaguccaucuucucccgcuccggcuucgagaugaucugggaccccaacggcuggaccgagaccgacuccuccuucuccaucaagcaggacaucaucgcccucaccgacugguccggcuacuccggcuccuucguccagcaccccgagcucaccggcaugaacugcauccgccccugcuucugggucgagcucauccgcggccagcccaaggaguccaccaucuggaccuccggcuccuccaucuccuucugcggcgucgacuccgagaccgccuccugguccuggcccgacggcgccgaccuccccuucaccaucgacaaguga

SEQ ID NO: 110604 - RNA, 1410 nt, Artificial Sequence
  derived and/or modified CDS sequence (opt2) from neuraminidase__InfluenzaA__ABB96333
augaaccccaaccagaagaucaucaccaucggcuccgucucccucaccaucgccaccaucugcuuccucaugcagaucgccauccucgucaccaccgucacccuccacuucaagcaguacgacugcgacucccccgccaacaaccaggucaugcccugcgagcccaucaucaucgagcgcaacaucaccgagaucgucuaccucaccaacaccaccaucgagaaggagaucugccccaagcucgucgaguaccgcaacugguccaagccccagugcaagaucaccggcuucgcccccuucuccaaggacaacuccauccgccucuccgccggcggcgacaucugggucacccgcgagcccuacgucuccugcgaccccggcaagugcuaccaguucgcccucggccagggcaccacccucgacaacaagcacuccaacgacaccauccacgaccgcaccccccaccgcacccuccucaugaacgagcucggcguccccuuccaccucggcacccgccaggucugcaucgccugguccuccuccuccugccacgacggcaaggccuggcuccacgucugcgucaccggcuacgacaagaacgccaccgccuccuucaucuacgacggccgccucgucgacuccaucggcuccugguccaagaacauccuccgcacccaggaguccgagugcgucugcaucaacggcaccugcaccgucgucaugaccgacggcuccgccuccgagcgcgccgacaccaagauccucuucaucgaggagggcaagaucguccacaucuccccccucuccggcuccgcccagcacgucgaggagugcuccugcuacccccgcuaccccggcguccgcugcgucugccgcgacaacuggaagggcuccaaccgccccgucgucgacaucaacgucaaggacuacuccaucgccuccuccuacgucugcuccggccucgucggcgacaccccccgcaagaacgaccgcuacuccuccuccuacugccgcaaccccaacaacgagaagggcaaccacggcgucaagggcugggccuucgacgacggcaacgacgucuggaugggccgcaccaucuccgacgagucccgcuccggcuacgagaccuucaaggucaucggcggcugguccacccccaacuccaagcuccagaucaaccgccaggucaucgucgacuccgacaaccgcuccggcuacuccggcaucuucuccgucgagggcaaguccugcaucaaccgcugcuucuacgucgagcucauccgcggccgcgagcaggagacccgcgucugguggaccuccaacuccaucgucgucuucugcggcaccuccggcaccuacggcaccggcuccuggcccgacggcgccgacaucaaccucaugcccaucuga

SEQ ID NO: 110605 - RNA, 1410 nt, Artificial Sequence
  derived and/or modified CDS sequence (opt2) from neuraminidase__InfluenzaA__ABB96344
augaaccccaaccagaagaucaucaccaucggcuccgucucccucaccaucgccaccaucugcuuccucaugcagaucgccauccucgucaccaccgucacccuccacuucaagcaguacgagugcgacucccccgccaacaaccaggucaugcccugcgagcccaucaucaucgagcgcaacaucaccgagaucgucuaccucaccaacaccaccaucgagaaggagaucugccccaagcucgucgaguaccgcaacugguccaagccccagugcaagaucaccggcuucgcccccuucuccaaggacaacuccauccgccucuccgccggcggcgacaucugggucacccgcgagcccuacgucuccugcgaccccggccgcugcuaccaguucgcccucggccagggcaccacccucgacaacaagcacuccaacgacaccauccacgaccgcaccccccaccgcacccuccucaugaacgagcucggcguccccuuccaccucggcacccgccaggucugcaucgccugguccuccuccuccugccacgacggcaaggccuggcuccacgucugcgucaccggcuacgacaagaacgccaccgccuccuucaucuacgacggccgccucgucgacuccaucggcuccugguccaagaacauccuccgcacccaggaguccgagugcgucugcaucaacggcaccugcaccgucgucaugaccgacggcuccgccuccgagcgcgccgacaccaagguccucuucaucgaggagggcaagaucguccacaucuccccccucuccggcuccgcccagcacgucgaggagugcuccugcuacccccgcuaccccggcguccgcugcgucugccgcgacaacuggaagggcuccaaccgccccgucgucgacaucaacgucaaggacuacuccaucgccuccuccuacgucugcuccggccucgucggcgacaccccccgcaagaacgaccgcuacuccuccuccuacugccgcaaccccaacaacgagaagggcaaccacggcgucaagggcugggccuucgacgacggcaacgacgucuggaugggccgcaccaucuccgacgagucccgcuccggcuacgagaccuucaaggucaucggcggcugguccacccccaacuccaagcuccagaucaaccgccaggucaucgucgacuccgacaaccgcuccggcuacuccggcaucuucuccgucgagggcaaguccugcaucaaccgcugcuucuacgucgagcucauccgcggccgcgagcaggagacccgcgucugguggaccuccaacuccaucgucgucuucugcggcaccuccggcaccuacggcaccggcuccuggcccgacggcgccgacaucaaccucaugcccaucuga

SEQ ID NO: 110606 - RNA, 1410 nt, Artificial Sequence
  derived and/or modified CDS sequence (opt2) from neuraminidase__InfluenzaA__ABB96398
augaaccccaaccagaagaucaucaccaucggcuccgucucccucaccaucgccaccaucugcuuccucaugcagaucgccauccucgucaccaccgucacccuccacuucaagcaguacgagugcgacucccccgccaacaaccaggucaugcccugcgagcccaucaucaucgagcgcaacaucaccgagaucgucuaccucaccaacaccaccaucgagaaggagaccugccccaagcucgucgaguaccgcaacugguccaagccccagugcaagaucaccggcuucgcccccuucuccaaggacaacuccauccgccucuccgccggcggcgacaucugggucacccgcgagcccuacgucuccugcgaccccggcaagugcuaccaguucgcccucggccagggcaccacccucgacaacaagcacuccaacgacaccauccacgaccgcacccccuaccgcacccuccucaugaacgagcucggcguccccuuccaccucggcacccgccaggucugcaucgccugguccuccuccuccugccacgacggcaaggccuggcuccacgucugcgucaccggcuacgacaagaacgccaccgccuccuucaucuacgacggccgccucgucgacuccaucggcuccugguccaagaacauccuccgcacccaggaguccgagugcgucugcaucaacggcaccugcaccgucgucaugaccgacggcuccgccuccgagcgcgccgacaccaagauccucuucaucgaggagggcaagaucguccacaucuccccccucuccggcuccgcccagcacgucgaggagugcuccugcuacccccgcuaccccggcguccgcugcgucugccgcgacaacuggaagggcuccaaccgccccgucgucgacaucaacgucaaggacuacuccaucgccuccuccuacgucugcuccggccucgucggcgacaccccccgcaagaacgaccgcuccuccuccuccuacugccgcaaccccaacaacgagaagggcaaccacggcgucaagggcugggccuucgacgacggcaacgacgucuggaugggccgcaccaucuccgaggagucccgcuccggcuacgagaccuucaaggucaucggcggcugguccacccccaacuccaagcuccagaucaaccgccaggucaucgucgacuccgacaaccgcuccggcuacuccggcaucuucuccgucgagggcaaguccugcaucaaccgcugcuucuacgucgagcucauccgcggccgcgagcaggagacccgcgucugguggaccuccaacuccaucgucgucuucugcggcaccuccggcaccuacggcaccggcuccuggcccgacggcgccgacaucaaccucaugcccaucuga

SEQ ID NO: 110607 - RNA, 1410 nt, Artificial Sequence; identical to SEQ ID NO: 110418
  derived and/or modified CDS sequence (opt2) from neuraminidase__InfluenzaA__ABB96490

SEQ ID NO: 110608 - RNA, 1410 nt, Artificial Sequence
  derived and/or modified CDS sequence (opt2) from neuraminidase__InfluenzaA__ABB96501
augaaccccaaccagaagaucaucaccaucggcuccgucucccucaccaucgccaccaucugcuuccucaugcagaucgccauccucgucaccaccgucacccuccacuucaagcaguacgagugcuccuccccccccaacaaccaggucaugcccugcgagcccaucaucaucgagcgcaacaucaccgagaucgucuaccucaccaacaccaccaucgagaaggagaucugccccaagcucgucgaguaccgcaacugguccaagccccagugcaagaucaccggcuucgcccccuucuccaaggacaacuccauccgccucuccgccggcggcgacaucugggucacccgcgagcccuacgucuccugcgaccccuccaagugcuaccaguucgcccucggccagggcaccacccucgacaacaagcacuccaacgacaccauccacgaccgcaccccccaccgcacccuccucaugaacgagcucggcguccccuuccaccucggcacccgccaggucugcaucgccugguccuccuccuccugccacgacggcaaggccuggcuccacgucugcgucaccggcuacgacaagaacgccaccgccuccuucaucuacgacggccgccucgucgacuccaucggcuccugguccaagaacauccuccgcacccaggaguccgagugcgucugcaucaacggcaccugcaccgucgucaugaccgacggcuccgccuccgagcgcgccgacaccaagauccucuucaucgaggagggcaagaucguccacaucuccccccucuccggcuccgcccagcacgucgaggagugcuccugcuacccccgcuaccccggcguccgcugcgucugccgcgacaacuggaagggcuccaaccgccccgucgucgacaucaacgucaaggacuacuccaucgucuccuccuacgucugcuccggccucgucggcgacaccccccgcaagaacgaccgcuccuccuccuccuacugccgcaaccccaacaacgagaagggcaaccacggcgucaagggcugggccuucgacgacggcaacgacgucuggaugggccgcaccaucuccgaggagucccgcuccggcuacgagaccuucaaggucaucggcggcugguccacccccaacuccaagucccagaucaaccgccaggucaucgucgacuccggcaaccgcuccggcuacuccggcaucuucuccgucgagggcaaguccugcaucaaccgcugcuucuacgucgagcucauccgcggccgcgagcaggagacccgcgucugguggaccuccaacuccaucgucgucuucugcggcaccuccggcaccuacggcaccggcuccuggcccgacggcgccgacaucaaccucaugcccaucuga

SEQ ID NO: 110609 - RNA, 1410 nt, Artificial Sequence
  derived and/or modified CDS sequence (opt2) from neuraminidase__InfluenzaA__ABB96534
augaaccccaaccagaagaucaucaccaucggcuccgucucccucaccaucgccaccaucugcuuccucaugcagaucgccauccucgucaccaccgucacccuccacuucaagcaguacgagugcuccuccccccccaacaaccaggucaugcucugcgagcccaccaucaucgagcgcaacaucaccgagaucgucuaccucaccaacaccaccaucgagaaggagaucugccccaagcucgccgaguaccgcaacugguccaagccccagugcaagaucaccggcuucgcccccuucuccaaggacaacuccauccgccucuccgccggcggcgacaucugggucacccgcgagcccuacgucuccugcgaccccgacaagugcuaccaguucgcccucggccagggcaccacccucaacaaccgccacuccaacgacaccguccacgaccgcacccccuaccgcacccuccucaugaacgagcucggcguccccuuccaccucggcaccaagcaggucugcaucgccugguccuccuccuccugccacgacggcaaggccuggcuccacgucugcgucaccggccacgacgagaacgccaccgccuccuucaucuacgacggccgccucgucgacuccaucggcuccugguccaagaagauccuccgcacccaggaguccgagugcgucugcaucaacggcaccugcaccgucgucaugaccgacggcuccgccuccggccgcgccgacaccaagauccucuucaucgaggagggcaagaucguccacaucuccccccucuccggcuccgcccagcacgucgaggagugcuccugcuacccccgcuaccccggcguccgcugcgucugccgcgacaacuggaagggcuccaaccgccccaucgucgacaucaacgucaaggacuacuccaucgucuccuccuacgucugcuccggccucgucggcgacaccccccgcaagaacgacuccuccuccuccucccacugccucaaccccaacaacgaggagggcggccacggcgucaagggcugggccuucgacgacggcaacgacgucuggaugggccgcaccaucuccgagaaguuccgcuccggcuacgagaccuucaaggucaucgagggcugguccaagcccaacuccaagcuccagaucaaccgccaggucaucgucgaccgcggcaaccgcuccggcuacuccggcaucuucuccgucgagggcaaguccugcaucaaccgcugcuucuacgucgagcucauccgcggccgcaagcaggagaccgaggucugguggaccuccaacuccaucgucgucuucugcggcaccuccggcaccuacggcaccggcuccuggcccgacggcgccgacaucaaccucaugcccaucuga

SEQ ID NO: 110610 - RNA, 1410 nt, Artificial Sequence
  derived and/or modified CDS sequence (opt2) from neuraminidase__InfluenzaA__ABC02237
augaaccccaaccagaagaucaucaccaucggcuccgucucccucaccaucgccaccaucugcuuccucaugcagaucgccauccucgucaccaccgucacccuccacuucaagcaguacgagugcuccuccccccccaacaaccaggucaugcucugcgagcccaccaucaucgagcgcaacaucaccgagaucgucuaccucaccaacaccaccaucgagaaggagaucugccccaagcucgccgaguaccgcaacugguccaagccccagugcaagaucaccggcuucgcccccuucuccaaggacaacuccauccgccucuccgccggcggcgacaucugggucacccgcgagcccuacgucuccugcgaccccgacaagugcuaccaguucgcccucggccagggcaccacccucaacaaccgccacuccaacgacaccguccacgaccgcacccccuaccgcacccuccucaugaacgagcucggcguccccuuccaccucggcaccaagcaggucugcaucgccugguccuccuccuccugccacgacggcaaggccuggcuccacgucugcgucaccggccacgacgagaacgccaccgccuccuucaucuacgacggccgccucgucgacuccaucggcuccugguccaagaagauccuccgcacccaggaguccgagugcgucugcaucaacggcaccugcaccgucgucaugaccgacggcuccgccuccggccgcgccgacaccaagauccucuucaucgaggagggcaagaucguccacaucucccagcucuccggcuccgcccagcacgucgaggagugcuccugcuacccccgcuaccccggcguccgcugcgucugccgcgacaacuggaagggcuccaaccgccccaucgucgacaucaacaucaaggacuacuccaucgucuccuccuacgucugcuccggccucgucggcgacaccccccgcaagaacgacuccuccuccuccucccacugccucaaccccaacaacgaggagggcggccacggcgucaagggcugggccuucgacgacggcaacgacgucuggaugggccgcaccaucuccgagaaguuccgcuccggcuacgagaccuucaaggucaucgagggcugguccaagcccaacuccaagcuccagaucaaccgccaggucaucgucgaccgcggcaaccgcuccggcuacuccggcaucuucuccgucgagggcaaguccugcaucaaccgcugcuucuacgucgagcucauccgcggccgcaagcaggagaccgaggucugguggaccuccaacuccaucgucgccuucugcggcaccuccggcaccuacggcaccggcuccuggcccgacggcgccgacaucaaccucaugcccaucuga

SEQ ID NO: 110611 - RNA, 1410 nt, Artificial Sequence
  derived and/or modified CDS sequence (opt2) from neuraminidase__InfluenzaA__ABC02258
augaaccccaaccagaagaucaucaccaucggcuccgucucccucaccaucgccaccaucugcuuccucaugcagaucgccauccucgucaccaccgucacccuccacuucaagcaguacgagugcgacucccccgccaacaaccagaucaugcccugcgagcccaccaucaucgagcgcaacaucaccgagaucgucuaccucaccaacaucaccaucgagaaggagaucugccccaagcucgucgaguaccgcaacugguccaagccccagugcaagaucaccggcuucgcccccuucuccaaggacaacuccauccgccucuccgccggcggcgacaucugggucacccgcgagcccuacgucuccugcgaccccuccaagugcuaccaguucgcccucggccagggcaccacccucgacaacaagcacuccaacgacaccauccacgaccgcaccccccaccgcacccuccucaugaacgagcucggcguccccuuccaccucggcacccgccaggucugcaucgccugguccuccuccuccugccacgacggcaaggccuggcuccacgucugcgucaccggcuacgacaagaacgccaccgccuccuucaucuacgacggccgccucgucgacuccaucggcuccuggucccagaacauccuccgcacccaggaguccgagugcgucugcaucaacggcaccugcaccgucgucaugaccgacggcuccgccuccggccgcgccgacaccaagauccucuucaucgaggagggcaagaucguccacaucuccccccucuccggcuccgcccagcacgucgaggagugcuccugcuacccccgcuaccccggcguccgcugcaucugccgcgacaacuggaagggcuccaaccgccccgucgucgacaucaacgucaaggacuacuccaucgacuccuccuacgucugcuccggccucgucggcgacaccccccgcaagaacgaccgcuccuccaacuccuacugccgcaaccccaacaacgagaagggcaaccacggcgucaagggcugggccuucgacgacggcaacgacgucuggaugggccgcaccaucuccgaggacucccgcuccggcuacgagaccuucaaggucaucggcggcugguccacccccaacuccaagcuccagaucaaccgccaggucaucgucgacuccgacaaccgcuccggcuacuccggcaucuucuccgucgagggcaaguccugcaucaaccgcugcuucuacgucgagcucauccgcggccgcgagcaggagacccgcgucugguggaccuccaacuccaucgucgucuucugcggcaccuccggcaccuacggcgccggcuccuggcccgacggcgccgacaucaaccucaugcccaucuga

SEQ ID NO: 110612 - RNA, 1410 nt, Artificial Sequence
  derived and/or modified CDS sequence (opt2) from neuraminidase__InfluenzaA__ABC02269
augaaccccaaccagaagaucaucaccaucggcuccgucucccucaccaucgccaccaucugcuuccucaugcagaucgccauccucgucaccaccgucacccuccacuucaagcaguacgagugcgacucccccgccaacaaccaggucaugcccugcgagcccaucaucaucgagcgcaacaucaccgagaucgucuaccucaccaacaccaccaucgagaaggagaucugccccaagcucgucgaguaccgcaacugguccaagccccagugcaagaucaccggcuucgcccccuucuccaaggacaacuccauccgccucuccgccggcggcgacaucugggucacccgcgagcccuacgucuccugcgaccccggcaagugcuaccaguucgcccucggccagggcaccacccucgacaacaagcacuccaacgacaccauccacgaccgcaccccccaccgcacccuccucaugaacgagcucggcguccccuuccaccucggcacccgccaggucugcaucgccugguccuccuccuccugccacgacggcaaggccuggcuccacgucugcgucaccggcuacgacaagaacgccaccgccuccuucaucuacgacggccgccucgucgacuccaucggcuccuggucccagaacauccuccgcacccaggaguccgagugcgucugcaucaacggcaccugcaccgucgucaugaccgacggcuccgccuccggccgcgccgacaccaagauccucuucaucgaggagggcaagaucguccacaccuccccccucuccggcuccgcccagcacgucgaggagugcuccugcuacccccgcuaccccggcguccgcugcaucugccgcgacaacuggaagggcuccaaccgccccgucgucgacaucaacgucaaggacuacuccaucgacuccuccuacgucugcuccggccucgucggcgacaccccccgcaacaacgaccgcuccuccuccuccuacugccgcaaccccaacaacgagaagggcacccacggcgucaagggcugggccuucgacgacggcaacgacgucuggaugggccgcaccaucuccgaggacucccgcuccggcuacgagaccuucaaggucaucggcggcugguccacccccaacuccaagcuccagaucaaccgccaggucaucgucgacuccgacaaccgcuccggcuacuccggcaucuucuccgucgagggcaaguccugcaucaaccgcugcuucuacgucgagcucauccgcggccgcgagcaggagacccgcgucugguggaccuccaacuccaucgucgucuucugcggcaccuccggcaccuacggcaccggcuccuggcccgacggcgccgacaucaaccucaugcccaucuga

SEQ ID NO: 110613 - RNA, 1413 nt, Artificial Sequence
  derived and/or modified CDS sequence (opt2) from neuraminidase__InfluenzaA__ABC02280
augaaccccaaccagaagaucaucaccaucggcuccaucuccaucgccaucggcaucaucucccucaugcuccagaucggcaacaucaucuccaucugggccucccacuccauccagaccggcucccagaaccacaccggcgucugcaaccagcgcaucaucaccuacgagaacuccaccugggucaaccacaccuacgucaacaucaacaacaccaacgucaucgccggcaaggacaagaccuccgucacccucgccggcaacuccucccucugcuccaucuccggcugggccaucuacaccaaggacaacuccauccgcaucggcuccaagggcgacgucuucgucauccgcgagcccuucaucuccugcucccaccucgagugccgcaccuucuuccucacccagggcucccuccucaacgacaagcacuccaacggcaccgucaaggaccgcucccccuaccgcgcccucauguccugcccccucggcgaggcccccucccccuacaacuccaaguucgaguccgucgccugguccgccuccgccugccacgacggcaugggcuggcucaccaucggcaucuccggccccgacaacggcgccgucgccguccucaaguacaacggcaucaucaccgagaccaucaaguccuggaagaagcagauccuccgcacccaggaguccgagugcgucugcgucaacggcuccugcuucaccaucaugaccgacggccccuccaacggcgccgccuccuacaagaucuucaagaucgagaagggcaaggucaccaaguccaucgagcucaacgcccccaacuuccacuacgaggagugcuccugcuaccccgacaccggcaccgucaugugcgucugccgcgacaacuggcacggcuccaaccgccccugggucuccuucaaccagaaccucgacuaccagaucggcuacaucugcuccggcgucuucggcgacaacccccgccccaaggacggcgagggcuccugcaaccccgucaccgucgacggcgccaacggcgucaagggcuucuccuacaaguacggcaacggcgucuggaucggccgcaccaaguccaaccgccuccgcaagggcuucgagaugaucugggaccccaacggcuggaccgacaccgacuccgacuucuccgucaagcaggacgucgucgccaucaccgacugguccggcuacuccggcuccuucguccagcaccccgagcucaccggccucgacugcauccgccccugcuucugggucgagcucguccgcggccuccccaaggagaacaccaccaucuggaccuccggcuccuccaucuccuucugcggcgucaacuccgacaccgccaacugguccuggcccgacggcgccgagcuccccuucaccaucgacaaguga

SEQ ID NO: 110614 - RNA, 1410 nt, Artificial Sequence; identical to SEQ ID NO: 110609
  derived and/or modified CDS sequence (opt2) from neuraminidase__InfluenzaA__ABC02302

SEQ ID NO: 110615 - RNA, 1410 nt, Artificial Sequence; identical to SEQ ID NO: 110606
  derived and/or modified CDS sequence (opt2) from neuraminidase__InfluenzaA__ABC02313

SEQ ID NO: 110616 - RNA, 1410 nt, Artificial Sequence; identical to SEQ ID NO: 110611
  derived and/or modified CDS sequence (opt2) from neuraminidase__InfluenzaA__ABC02324

SEQ ID NO: 110617 - RNA, 1410 nt, Artificial Sequence
  derived and/or modified CDS sequence (opt2) from neuraminidase__InfluenzaA__ABC02335
augaaccccaaccagaagaucaucaccaucggcuccgucucccucaccaucgccaccaucugcuuccucaugcagaucgccauccucgucaccaccgucacccuccacuucaagcaguacgagugcgacucccccgccaacaaccaggucaugcccugcgagcccaucaucaucgagcgcaacaucaccgagaucgucuaccucaccaacaccaccaucgagaaggagaucugccccaagcucgucgaguaccgcaacugguccaagccccagugcaagaucaccggcuucgcccccuucuccaaggacaacuccauccgccucuccgccggcggcgacaucugggucacccgcgagcccuacgucuccugcgaccccggcaagugcuaccaguucgcccucggccagggcaccacccucgacaacaagcacuccaacgacaccauccacgaccgcaccccccaccgcacccuccucaugaacgagcucggcguccccuuccaccucggcacccgccaggucugcaucgccugguccuccuccuccugccacgacggcaaggccuggcuccacgucugcgucaccggcuacgacaagaacgccaccgccuccuucaucuacgacggccgccucgucgacuccaucggcuccuggucccagaacauccuccgcacccaggaguccgagugcgucugcaucaacggcaccugcaccgucgucaugaccgacggcuccgccuccggccgcgccgacaccaagauccucuucaucaaggagggcaagaucguccacaucuccccccucuccggcuccgcccagcacgucgaggagugcuccugcuacccccgcuaccccggcguccgcugcaucugccgcgacaacuggaagggcuccaaccgccccgucgucgacaucaacgucaaggacuacuccaucgacuccuccuacgucugcuccggccucgucggcgacaccccccgcaacaacgaccgcuccuccaacuccuacugccgcaaccccaacaacgagaagggcaaccacggcgucaagggcugggccuucgacgacggcaacgacgucuggaugggccgcaccaucuccgaggacucccgcuccggcuacgagaccuucaaggucaucggcggcugguccacccccaacuccaagcuccagaucaaccgccaggucaucgucgacuccgacaaccgcuccggcuacuccggcaucuucuccgucgagggcaaguccugcaucaaccgcugcuucuacgucgagcucauccgcggccgcgagcaggagacccgcgucugguggaccuccaacuccaucgucgucuucugcggcaccuccggcaccuacggcaccggcuccuggcccgacggcgccgacaucaaccucaugcccaucuga

SEQ ID NO: 110618 - RNA, 1410 nt, Artificial Sequence
  derived and/or modified CDS sequence (opt2) from neuraminidase__InfluenzaA__ABC39808
augaaccccaaccagaagaucaucaccaucggcuccgucucccucaccaucgccaccaucugcuuccucaugcagaucgccauccucgucaccaccgucacccuccacuucaagcaguacgagugcuccuccccccccaacaaccaggucaugcccugcgagcccaucaucaucgagcgcaacaucaccgagaucgucuaccucaccaacaccaccaucgagaaggagaucugccccaagcucgucgaguaccgcaacugguccaagccccagugcaagaucaccggcuucgcccccuucuccaaggacaacuccauccgccucuccgccggcggcgacaucugggucacccgcgagcccuacgucuccugcgaccccuccaagugcuaccaguucgcccucggccagggcaccacccucgacaacaagcacuccaacgacaccauccacgaccgcaccccccaccgcacccuccucaugaacgagcucggcguccccuuccaccucggcacccgccaggucugcaucgccugguccuccuccuccugccacgacggcaaggccuggcuccacgucugcgucaccggcuacgacaagaacgccaccgccuccuucaucuacgacggccgccucgucgacuccaucggcuccugguccaagaacauccuccgcacccaggaguccgagugcgucugcaucaacggcaccugcaccgucgucaugaccgacggcuccgccuccgagcgcgccgacaccaagauccucuucaucgaggagggcaagaucguccacaucuccccccucuccggcuccgcccagcacgucgaggagugcuccugcuacccccgcuaccccggcguccgcugcgucugccgcgacaacuggaagggcuccaaccgccccgucgucgacaucaacgucaaggacuacuccaucgucuccuccuacgucugcuccggccucgucggcgacaccccccgcaagaacgaccgcuccuccuccuccuacugccgcaaccccaacaacgagaagggcgaccacggcgucaagggcugggccuucgacgacggcaacgacgucuggaugggccgcaccaucuccgaggagucccgcuccggcuacgagaccuucaaggucaucggcggcugguccacccccaacuccaagucccagaucaaccgccaggucaucgucgacuccggcaaccgcuccggcuacuccggcaucuucuccgucgagggcaaguccugcaucaaccgcugcuucuacgucgagcucauccgcggccgcaagcaggagacccgcgucugguggaccuccaacuccaucgucgucuucugcggcaccuccggcaccuacggcaccggcuccuggcccgacggcgccgacaucaaccucaugcccaucuga

SEQ ID NO: 110619 - RNA, 1410 nt, Artificial Sequence; identical to SEQ ID NO: 110418
  derived and/or modified CDS sequence (opt2) from neuraminidase__InfluenzaA__ABC40525

SEQ ID NO: 110620 - RNA, 1413 nt, Artificial Sequence
  derived and/or modified CDS sequence (opt2) from neuraminidase__InfluenzaA__ABC40536
augaaccccaaccagaagaucaucaccaucggcuccaucuccaucgccaucggcaucaucucccucaugcuccagaucggcaacaucaucuccaucugggccucccacuccauccagaccggcucccagaaccacaccggcgucugcaaccagcgcaucaucaccuacgagaacuccaccugggucaaccacaccuacgucaacaucaacaacaccaacgucaucgccggcaaggacaagaccuccgucacccucgccggcaacuccucccucugcuccaucuccggcugggccaucuacaccaaggacaacuccauccgcaucggcuccaagggcgacgucuucgucauccgcgagcccuucaucuccugcucccaccucgagugccgcaccuucuuccucacccagggcgcccuccucaacgacaagcacuccaacggcaccgucaaggaccgcucccccuaccgcgcccucauguccugcccccucggcgaggcccccucccccuacaacuccaaguucgaguccgucgccugguccgccuccgccugccacgacggcaugggcuggcucaccaucggcaucuccggccccgacaacggcgccgucgccguccucaaguacaacggcaucaucaccgagaccaucaaguccuggaagaagcagauccuccgcacccaggaguccgagugcgucugcgucaacggcuccugcuucaccaucaugaccgacggccccuccaacggcgccgccuccuacaagaucuucaagaucgagaagggcaaggucaucaaguccaucgagcucaacgcccccaacuuccacuacgaggagugcuccugcuaccccgacaccggcaccgucaugugcgucugccgcgacaacuggcacggcuccaaccgccccugggucuccuucaaccagaaccucgacuaccagaucggcuacaucugcuccggcgucuucggcgacaacccccgccccaaggacggcgagggcuccugcaaccccgucaccgucgacggcgccaacggcgucaagggcuucuccuacaaguacggcaacggcgucuggaucggccgcaccaaguccaaccgccuccgcaagggcuucgagaugaucugggaccccaacggcuggaccgacaccgacuccgacuucuccgucaagcaggacgucgucgccaucaccgacugguccggcuacuccggcuccuucguccagcaccccgagcucaccggccucgacugcauccgccccugcuucugggucgagcucguccgcggccuccccaaggagaacaccaccaucuggaccuccggcuccuccaucuccuucugcggcgucaacuccgacaccgccaacugguccuggcccgacggcgccgagcuccccuucaccaucgacaaguga

SEQ ID NO: 110621 - RNA, 1410 nt, Artificial Sequence; identical to SEQ ID NO: 110612
  derived and/or modified CDS sequence (opt2) from neuraminidase__InfluenzaA__ABC40547

SEQ ID NO: 110622 - RNA, 1410 nt, Artificial Sequence
  derived and/or modified CDS sequence (opt2) from neuraminidase__InfluenzaA__ABC40558
augaaccccaaccagaagaucaucaccaucggcuccgucucccucaccaucgccaccaucugcuuccucaugcagaucgccauccucgucaccaccgucacccuccacuucaagcaguacgagugcuccuccccccccaacaaccaggucaugcccugcgagcccaucaucaucgagcgcaacaucaccgagaucgucuaccucaccaacaccaccaucgagaaggagaucugccccaagcucgucgaguaccgcaacugguccaagccccagugcaagaucaccggcuucgcccccuucuccaaggacaacuccauccgccucuccgccggcggcgacaucugggucacccgcgagcccuacgucuccugcgaccccggcaagugcuaccaguucgcccucggccagggcaccacccucgacaacaagcacuccaacgacaccauccacgaccgcacccccuaccgcacccuccucaugaacgagcucggcguccccuuccaccucggcacccgccaggucugcaucgccugguccuccuccuccugccacgacggcaaggccuggcuccacgucugcgucaccggccacgacaagaacgccaccgccuccuucaucuacgacggccgccucgucgacuccaucggcuccugguccaaguccauccuccgcacccaggaguccgagugcgucugcaucaacggcaccugcaccgucgucaugaccgacggcuccgccuccgagcgcgccgacaccaagauccucuucaucgaggagggcaagaucguccacaucuccccccucuccggcuccgcccagcacgucgaggagugcuccugcuacccccgcuaccccggcguccgcugcgucugccgcgacaacuggaagggcuccaaccgccccgucgucgacaucaacgucaaggacuacuccaucgucuccuccuacgucugcuccggccucgucggcgacaccccccgcaagaacgaccgcuccuccuccuccuacugccagaaccccaacaacgagaagggcaaccacggcgucaagggcugggccuucgacgacggcaacgacgucuggaugggccgcaccaucuccgaggagucccgcuccggcuacgagaccuucaaggucaucggcggcugguccacccccaacuccaagcuccagaucaaccgccaggucaucgucgacaucgacaaccgcuccggcuacuccggcaucuucuccgucgagggcaaguccugcaucaaccgcugcuucuacgucgagcucauccgcggccgcgagcaggagacccgcgucugguggaccuccaacuccaucgucgucuucugcggcaccuccggcaccuacggcaccggcuccuggcccgacggcgccgacaucaaccucaugcccaucuga

SEQ ID NO: 110623 - RNA, 1410 nt, Artificial Sequence
  derived and/or modified CDS sequence (opt2) from neuraminidase__InfluenzaA__ABC40611
augaaccccaaccagaagaucaucaccaucggcuccaucucccucaccaucgccaccaucugcuuccucaugcagaucgccauccucgucaccaccgucacccuccacuucaagcaguacgagugcaacucccuccccaacaaccaggucaugcucugcgagcccaccaucaucgagcgcaacaucaccgagaucgucuaccucaccaacaccaccaucgagaaggagaucugccccaagcucgccgaguaccgcaacugguccaagccccagugcaagaucaccggcuucgcccccuucuccaaggacaacuccauccgccucuccgccggcggcgacaucugggucacccgcgagcccuacgucuccugcgaccccgacaagugcuaccaguucgcccucggccagggcaccacccucaacaaccgccacuccaacgacaccguccacgaccgcacccccuaccgcacccuccucaugaacgagcucggcguccccuuccaccucggcaccaagcaggucugcaucgccugguccuccuccuccugccacgacggcaaggccuggcuccacgucugcgucaccggccacgacgagaacgccaccgccuccuucaucuacgacggccgccucgucgacuccaucggcuccugguccaagaagauccuccgcacccaggaguccgagugcgucugcaucaacggcaccugcaccgucgucaugaccgacggcuccgccuccggccgcgccgacaccaagauccucuucaucgaggagggcaagaucauccacaucucccagcucuccggcuccgcccagcacgucgaggagugcuccugcuacccccgcuaccccggcguccgcugcgucugccgcgacaacuggaagggcuccaaccgccccaucgucgacaucaacgucaaggacuacuccaucgucuccuccuacgucugcuccggccucgucggcgacaccccccgcaagaacgacuccuccuccuccucccacugccucaaccccaacaacgaggagggcggccacggcgucaagggcugggccuucgacgacggcaacgacgucuggaugggccgcaccaucuccgagaaguuccgcuccggcuacgagaccuucaaggucaucgagggcugguccaagcccaacuccaagcuccagaucaaccgccaggucaucgucgaccgcgacaaccgcuccggcuacuccggcaucuucuccgucgagggcaaguccugcaucaaccgcugcuucuacgucgagcucauccgcggccgcaagcaggagaccgaggucugguggaccuccaacuccaucgucgucuucugcggcaccuccggcaccuacggcaccggcuccuggcccgacggcgccgacaucaaccucaugcccaucuga

SEQ ID NO: 110624 - RNA, 1410 nt, Artificial Sequence
  derived and/or modified CDS sequence (opt2) from neuraminidase__InfluenzaA__ABC40622
augaaccccaaccagaagaucaucaccaucggcuccgucucccucaccaucgccaccaucugcuuccucaugcagaucgccauccucgucaccaccgucacccuccacuucaagcaguacgagugcgacucccccgccaacaaccaggucaugcccugcgagcccaucaucaucgagcgcaacaucaccgagaucgucuaccucaccaacaccaccaucgagaaggagaucugccccaagcucgucgaguaccgcaacugguccaagccccagugcaagaucaccggcuucgcccccuucuccaaggacaacuccauccgccucuccgccggcggcgacaucugggucacccgcgagcccuacgucuccugcgaccccggcaagugcuaccaguucgcccucggccagggcaccacccucgacaacaagcacuccaacgacaccauccacgaccgcaccccccaccgcacccuccucaugaacgagcucggcguccccuuccaccucggcacccgccaggucugcaucgccugguccuccuccuccugccacgacggcaaggccuggcuccacgucugcgucaccggcuacgacaagaacgccaccgccuccuucaucuacgacggccgccucgucgacuccaucggcuccuggucccagaacauccuccgcacccaggaguccgagugcgucugcaucaacggcaccugcaccgucgucaugaccgacggcaacgccuccggccgcgccgacaccaagauccucuucaucgaggagggcaagaucguccacaucuccccccucuccggcuccgcccagcacgucgaggagugcuccugcuacccccgcuaccccggcguccgcugcaucugccgcgacaacuggaagggcuccaaccgccccgucgucgacaucaacgucaaggacuacuccaucgacuccuccuacgucugcuccggccucgucggcgacaccccccgcaacaacgaccgcuccuccaacuccuacugccgcaaccccaacaacgagaagggcaaccacggcgucaagggcugggccuucgacgacggcaacgacgucuggaugggccgcaccaucuccgaggacucccgcuccggcuacgagaccuucaaggucaucggcggcugguccacccccaacuccaagcuccagaucaaccgccaggucaucgucgacuccgacaaccgcuccggcuacuccggcaucuucuccgucgagggcaaguccugcaucaaccgcugcuucuacgucgagcucauccgcggccgcgagcaggagacccgcgucugguggaccuccaacuccaucgucgucuucugcggcaccuccggcaccuacggcaccggcuccuggcccgacggcgccgacaucaaccucaugcccaucuga

SEQ ID NO: 110625 - RNA, 1410 nt, Artificial Sequence
  derived and/or modified CDS sequence (opt2) from neuraminidase__InfluenzaA__ABC40634
augaaccccaaccagaagaucaucaccaucggcuccgucucccucaccaucgccaccaucugcuuccucacccagaucgccauccucgucaccaccgucacccuccacuucaagcaguacgagugcaacuccccccccaacaaccaggucaugcucugcgagcccaccaucaucgagcgcaacaucaccgagaucgucuaccucaccaacaccaccaucgagaaggagaucugccccaagcucgccgaguaccgcaacugguccaagccccagugcaacaucaccggcuucgcccccuucuccaaggacaacuccauccgccucuccgccggcggcgacaucugggucacccgcgagcccuacgucuccugcgaccccgacaagugcuaccaguucgcccucggccagggcaccacccucaacaacggccacuccaacgacaccguccacgaccgcacccccuaccgcacccuccucaugaacgagcucggcguccccuuccaccucggcaccaagcaggucugcaucgccugguccuccuccuccugccacgacggcaaggccuggcuccacgucugcgucaccggcgacgacaagaacgccaccgccuccuucaucuacaacggccgccucgucgacuccaucggcuccugguccaagaagauccuccgcacccaggaguccgagugcgucugcaucgacggcaccugcaccgucgucaugaccgacggcuccgccuccggcaaggccgacaccaagauccucuucaucgaggagggcaagaucguccacaccucccuccucuccggcuccgcccagcacgucgaggagugcuccugcuacccccgcuaccccggcguccgcugcgucugccgcgacaacuggaagggcuccaaccgccccaucgucgacaucaacgucaaggacuacuccaucgucuccuccuacgucugcuccggccucgucggcgacaccccccgcaagaacgacuccuccuccuccucccacugccucgaccccaacaacgaggagggcggccacggcgucaagggcugggccuucgacgacggcaacgacgucuggaugggccgcaccaucuccgagaagcuccgcuccggcuacgagaccuucaaggucaucgagggcugguccaagcccaacuccaagcuccagaucaaccgccaggucaucgucgaccgcggcaaccgcuccggcuacuccggcaucuucuccgucgagggcaaguccugcaucaaccgcugcuucuacgucgagcucauccgcggccgcaaccaggagaccgagguccucuggaccuccaacuccaucgucgucuucugcggcaccuccggcaccuacggcaccggcuccuggcccgacggcgccgacaucaaccucaugcccaucuga

SEQ ID NO: 110626 - RNA, 1410 nt, Artificial Sequence
  derived and/or modified CDS sequence (opt2) from neuraminidase__InfluenzaA__ABC40645
augaaccccaaccagaagaucaucaccaucggcuccgucucccucaccaucuccaccaucugcuucuucaugcagaucgccauccucaucaccaccgucacccuccacuucaagcaguacgaguucaacuccccccccaacaaccaggucaugcucugcgagcccaccaucaucgagcgcaacaucaccgagaucgucuaccucaccaacaccaccaucgagaaggagaucugccccaagcucgccgaguaccgcaacugguccaagccccagugcaacaucaccggcuucgcccccuucuccaaggacaacuccauccgccucuccgccggcggcgacaucugggucacccgcgagcccuacgucuccugcgaccccgacaagugcuaccaguucgcccucggccagggcaccacccucaacaacguccacuccaacgacaccguccacgaccgcacccccuaccgcacccuccucaugaacgagcucggcguccccuuccaccucggcaccaagcaggucugcaucgccugguccuccuccuccugccacgacggcaaggccuggcuccacgucugcgucaccggcgacgacgagaacgccaccgccuccuucaucuacaacggccgccucgucgacuccgucgucuccugguccaagaagauccuccgcacccaggaguccgagugcgucugcaucaacggcaccugcaccgucgucaugaccgacggcuccgccuccggcaaggccgacaccaagauccucuucaucgaggagggcaagaucguccacaccuccacccucuccggcuccgcccagcacgucgaggagugcuccugcuacccccgcuaccccggcguccgcugcgucugccgcgacaacuggaagggcuccaaccgccccaucgucgacaucaacaucaaggacuacuccaucgucuccuccuacgucugcuccggccucgucggcgacaccccccgcaagaacgacuccuccuccuccucccacugccucgaccccaacaacgaggagggcggccacggcgucaagggcugggccuucgacgacggcaacgacgucuggaugggccgcaccaucuccgagaagcuccgcuccggcuacgagaccuucaaggucaucgagggcugguccaaccccaacuccaagcuccagaucaaccgccaggucaucgucgaccgcggcaaccgcuccggcuacuccggcaucuucuccgucgagggcaaguccugcaucaaccgcugcuucuacgucgagcucauccgcggccgcaagcaggagaccgagguccucuggaccuccaacuccaucgucgucuucugcggcaccuccggcaccuacggcaccggcuccuggcccgacggcgccgacaucaaccucaugcccaucuga

SEQ ID NO: 110627 - RNA, 1410 nt, Artificial Sequence
  derived and/or modified CDS sequence (opt2) from neuraminidase__InfluenzaA__ABC41706
augaaccccaaccagaagaucaucaccaucggcuccgucucccucaccaucgccaccaucugcuuccucaugcagaucgccauccucgucaccaccgucacccuccacuucaagcagcacgagugcaacuccccccccaacaaccaggucaugcucugcgagcccaccaucaucgagcgcaacaucaccgagaucgucuaccucaccaacaccaccaucgagaaggagaucugccccaagcucgucgaguaccgcaacugguccaagccccagugcaacaucaccggcuucgcccccuucuccaaggacaacuccauccgccucuccgccggcggcgacaucugggucacccgcgagcccuacgucuccugcgaccccgacaagugcuaccaguucgcccucggccagggcaccacccucaacaacggccacuccaacgacaccguccacgaccgcacccccuaccgcacccuccucaugaacgagcucggcguccccuuccaccucggcacccgccaggucugcaucgccugguccuccuccuccugccacgacggcaaggccuggcuccacgucugcgucaccggcgacgacaagaacgccaccgccuccuucaucuacaacggccgccucgucgacuccaucggcuccugguccaagaagauccuccgcacccaggaguccgagugcgucugcaucaacggcaccugcaccgucgucaugaccgacggcuccgccuccggcaaggccgacaccaagauccucuucaucgaggagggcaagaucguccacaucuccacccucuccggcuccgcccagcacgucgaggagugcuccugcuacccccgcuaccccggcguccgcugcgucugccgcgacaacuggaagggcuccaaccgccccaucgucgacaucaacgucaaggacuacuccaucgucuccuccuacgucugcuccggccucgucggcgacaccccccgcaagaacgacuccuucuccuccucccacugccucgaccccaacaacgaggagggcggccacggcgucaagggcugggccuucgacgacggcaacgacgucuggaugggccgcaccaucuccgagaagcuccgcuccggcuacgagaccuucaaggucaucgagggcugguccaagcccaacuccaagcuccagaucaaccgccaggucaucgucgagcgcggcaaccgcuccggcuacuccggcaucuucuccgucgagggcaaguccugcaucaaccgcugcuucuacgucgagcucauccgcggccgcaaggaggagaccgaggucugguggaccuccaacuccaucgucgucuucugcggcaccuccggcaccuacggcaccggcuccuggcccgacggcgccgacaucaaccucaugcccaucuga

SEQ ID NO: 110628 - RNA, 1413 nt, Artificial Sequence
  derived and/or modified CDS sequence (opt2) from neuraminidase__InfluenzaA__ABC41717
augaaccccaaccagaagaucaucaccaucggcuccaucuccaucgccaucggcaucaucucccucaugcuccagaucggcaacaucaucuccaucugggccucccacuccauccagaccggcucccagaaccacaccggcaucugcaaccagcgcaucaucaccuacgagaacuccaccugggucaaccacaccuacgucaacaucaacaacaccaacgucgucgccggcaaggacaagaccuccgucacccucgccggcaacuccucccucugcuccaucuccggcugggccaucuacaccaaggacaacuccauccgcaucggcuccaagggcgacgucuucgucauccgcgagcccuucaucuccugcucccaccucgagugccgcaccuucuuccucacccagggcgcccuccucaacgacaagcacuccaacggcaccgucaaggaccgcucccccuaccgcgcccucauguccugcccccucggcgaggcccccucccccuacaacuccaaguucgaguccgucgccugguccgccuccgccugccacgacggcaugggcuggcucaccaucggcaucuccggccccgacaacggcgccgucgccguccucaaguacaacggcaucaucaccgagaccaucaaguccuggaagaagcgcauccuccgcacccaggaguccgagugcgucugcgucaacggcuccugcuucaccaucaugaccgacggccccuccaacggcgccgccuccuacaagaucuucaagaucgagaagggcaaggucaccaaguccaucgagcucaacgcccccaacuuccacuacgaggagugcuccugcuaccccgacaccggcaccgucaugugcgucugccgcgacaacuggcacggcuccaaccgccccugggucuccuucaaccagaaccucgacuaccagaucggcuacaucugcuccggcgucuucggcgacaacccccgccccaaggacggcaagggcuccugcaaccccgucaccgucgacggcgccgacggcgucaagggcuucuccuacaaguacggcaacggcgucuggaucggccgcaccaaguccaaccgccuccgcaagggcuucgagaugaucugggaccccaacggcuggaccgacaccgacuccgacuucuccgucaagcaggacgucgucgccgucaccgacugguccggcuacuccggcuccuucguccagcaccccgagcucaccggccucgacugcauccgccccugcuucugggucgagcucguccgcggccucccccgcgagaacaccaccaucuggaccuccggcuccuccaucuccuucugcggcgucgacuccgacaccgccaacugguccuggcccgacggcgccgagcuccccuucaccaucgacaaguga

SEQ ID NO: 110629 - RNA, 1410 nt, Artificial Sequence
  derived and/or modified CDS sequence (opt2) from neuraminidase__InfluenzaA__ABC41728
augaaccccaaccagaagaucaucaccaucggcuccgucucccucaccaucgccaccaucugcuuccucaugcagaucgccauccucgucaccaccgucacccuccacuucaagcagcacgagugcaacuccccccccaacaaccaggucaugcucugcgagcccaccaucaucgagcgcaacaucaccgagaucgucuaccucaccaacaccaccaucgagaaggagaucugccccaagcucgucgaguaccgcaacugguccaagccccagugcaacaucaccggcuucgcccccuucuccaaggacaacuccauccgccucuccgccggcggcgacaucugggucacccgcgagcccuacgucuccugcgaccccgacaagugcuaccaguucgcccucggccagggcaccacccucaacaacggccacuccaacgacaccguccacgaccgcacccccuaccgcacccuccucaugaacgagcucggcguccccuuccaccucggcacccgccaggucugcaucgccugguccuccuccuccugccacgacggcaaggccuggcuccacgucugcgucaccggcgacgacaagaacgccaccgccuccuucaucuacaacggccgccucgucgacuccaucggcuccugguccaagaacauccuccgcacccaggaguccgagugcgucugcaucaacggcaccugcaccgucgucaugaccgacggcuccgccuccggcaaggccgacaccaagauccucuucaucgaggagggcaagaucguccacaucuccacccucuccggcuccgcccagcacgucgaggagugcuccugcuacccccgcuaccccggcguccgcugcgucugccgcgacaacuggaagggcuccaaccgccccaucgucgacaucaacgucaaggacuacuccaucgucuccuccuacgucugcuccggccucgucggcgacaccccccgcaagaacgacuccuucuccuccucccacugccucgaccccaacaacgaggagggcggccacggcgucaagggcugggccuucgacgacggcaacgacgucuggaugggccgcaccaucuccgagaagcuccgcuccggcuacgagaccuucaaggucaucgagggcugguccaagcccaacuccaagcuccagaucaaccgccaggucaucgucgagcgcggcaaccgcuccggcuacuccggcaucuucuccgucgagggcaaguccugcaucaaccgcugcuucuacgucgagcucauccgcggccgcaaggaggagaccgaggucugguggaccuccaacuccaucgucgucuucugcggcaccuccggcaccuacggcaccggcuccuggcccgacggcgccgacaucaaccucaugcccaucuga

SEQ ID NO: 110630 - RNA, 1410 nt, Artificial Sequence; identical to SEQ ID NO: 110627
  derived and/or modified CDS sequence (opt2) from neuraminidase__InfluenzaA__ABC41742

SEQ ID NO: 110631 - RNA, 1410 nt, Artificial Sequence; identical to SEQ ID NO: 110627
  derived and/or modified CDS sequence (opt2) from neuraminidase__InfluenzaA__ABC41956

SEQ ID NO: 110632 - RNA, 1410 nt, Artificial Sequence; identical to SEQ ID NO: 110627
  derived and/or modified CDS sequence (opt2) from neuraminidase__InfluenzaA__ABC41967

SEQ ID NO: 110633 - RNA, 1410 nt, Artificial Sequence; identical to SEQ ID NO: 110627
  derived and/or modified CDS sequence (opt2) from neuraminidase__InfluenzaA__ABC42017

SEQ ID NO: 110634 - RNA, 1410 nt, Artificial Sequence; identical to SEQ ID NO: 110627
  derived and/or modified CDS sequence (opt2) from neuraminidase__InfluenzaA__ABC42117

SEQ ID NO: 110635 - RNA, 1410 nt, Artificial Sequence; identical to SEQ ID NO: 110627
  derived and/or modified CDS sequence (opt2) from neuraminidase__InfluenzaA__ABC42128

SEQ ID NO: 110636 - RNA, 1410 nt, Artificial Sequence; identical to SEQ ID NO: 110627
  derived and/or modified CDS sequence (opt2) from neuraminidase__InfluenzaA__ABC42139

SEQ ID NO: 110637 - RNA, 1410 nt, Artificial Sequence
  derived and/or modified CDS sequence (opt2) from neuraminidase__InfluenzaA__ABC42150
augaaccccaaccagaagaucaucaccaucggcuccgucucccucaccaucgccaccaucugcuuccucaugcagaucgccauccucgccaccaccgucacccuccacuucaagcagcacgagugcaacuccccccccaacaaccaggucaugcucugcgagcccaccaucaucgagcgcaacaucaccgagaucgucuaccucaccaacaccaccaucgagaaggagaucugccccaagcucgucgaguaccgcaacugguccaagccccagugcaacaucaccggcuucgcccccuucuccaaggacaacuccauccgccucuccgccggcggcgacaucugggucacccgcgagcccuacgucuccugcgaccccgacaagugcuaccaguucgcccucggccagggcaccacccucaacaacggccacuccaacgacaccguccacgaccgcacccccuaccgcacccuccucaugaacgagcucggcguccccuuccaccucggcacccgccaggucugcaucgccugguccuccuccuccugccacgacggcaaggccuggcuccacgucugcgucaccggcgacgacaagaacgccaccgccuccuucaucuacaacggccgccucgucgacuccaucggcuccugguccaagaagauccuccgcacccaggaguccgagugcgucugcaucaacggcaccugcaccgucgucaugaccgacggcuccgccuccggcaaggccgacaccaagauccucuucaucgaggagggcaagaucguccacaucuccacccucuccggcuccgcccagcacgucgaggagugcuccugcuacccccgcuaccccggcguccgcugcgucugccgcgacaacuggaagggcuccaaccgccccaucgucgacaucaacgucaaggacuacuccaucgucuccuccuacgucugcuccggccucgucggcgacaccccccgcaagaacgacuccuucuccuccucccacugccucgaccccaacaacgaggagggcggccacggcgucaagggcugggccuucgacgacggcaacgacgucuggaugggccgcaccaucuccggcaagcuccgcuccggcuacgagaccuucaaggucaucgagggcugguccaagcccaacuccaagcuccagaucaaccgccaggucaucgucgagcgcggcaaccgcuccggcuacuccggcaucuucuccgucgagggcaaguccugcaucaaccgcugcuucuacgucgagcucauccgcggccgcaaggaggagaccgaggucugguggaccuccaacuccaucgucgucuucugcggcaccuccggcaccuacggcaccggcuccuggcccgacggcgccgacaucaaccucaugcccaucuga

SEQ ID NO: 110638 - RNA, 1410 nt, Artificial Sequence; identical to SEQ ID NO: 110627
  derived and/or modified CDS sequence (opt2) from neuraminidase__InfluenzaA__ABC42161

SEQ ID NO: 110639 - RNA, 1410 nt, Artificial Sequence
  derived and/or modified CDS sequence (opt2) from neuraminidase__InfluenzaA__ABC42172
augaaccccaaccagaagaucaucaccaucggcuccgucucccucaccaucgccaccaucugcucccucaugcagaucgccauccucgucaccaccgucacccuccacuucaagcagcacgagugcaacuccccccccaacaaccaggucaugcucugcgagcccaccaucaucgagcgcaacaucaccgagaucgucuaccucaccaacaccaccaucgagaaggagaucugccccaagcucgucgaguaccgcaacugguccaagccccagugcaacaucaccggcuucgcccccuucuccaaggacaacuccauccgccucuccgccggcggcgacaucugggucacccgcgagcccuacgucuccugcgaccccgacaagugcuaccaguucgcccucggccagggcaccacccucaacaacggccacuccaacgacaccguccacgaccgcacccccuaccgcacccuccucaugaacgagcucggcguccccuuccaccucggcacccgccaggucugcaucgccugguccuccuccuccugccacgacggcaaggccuggcuccacgucugcgucaccggcgacgacaagaacgccaccgccuccuucaucuacaacggccgccucgucgacuccaucggcuccugguccaagaagauccuccgcacccaggaguccgagugcgucugcaucaacggcaccugcaccgucgucaugaccgacggcuccgccuccggcaaggccgacaccaagauccucuucaucgaggagggcaagaucguccacaucuccacccucuccggcuccgcccagcacgucgaggagugcuccugcuacccccgcuaccccggcguccgcugcgucugccgcgacaacuggaagggcuccaaccgccccaucgucgacaucaacgucaaggacuacuccaucgucuccuccuacgucugcuccggccucgucggcgacaccccccgcaagaacgacuccuucuccuccucccacugccucgaccccaacaacgaggagggcggccacggcgucaagggcugggccuucgacgacggcaacgacgucuggaugggccgcaccaucuccgagaagcuccgcuccggcuacgagaccuucaaggucaucgagggcugguccaagcccaacuccaagcuccagaucaaccgccaggucaucgucgagcgcggcaaccgcuccggcuacuccggcaucuucuccgucgagggcaaguccugcaucaaccgcugcuucuacgucgagcucauccgcggccgcaaggaggagaccgaggucugguggaccuccaacuccaucgucgucuucugcggcaccuccggcaccuacggcaccggcuccuggcccgacggcgccgacaucaaccucaugcccaucuga

SEQ ID NO: 110640 - RNA, 1410 nt, Artificial Sequence; identical to SEQ ID NO: 110627
  derived and/or modified CDS sequence (opt2) from neuraminidase__InfluenzaA__ABC42183

SEQ ID NO: 110641 - RNA, 1410 nt, Artificial Sequence; identical to SEQ ID NO: 110627
  derived and/or modified CDS sequence (opt2) from neuraminidase__InfluenzaA__ABC42195

SEQ ID NO: 110642 - RNA, 1410 nt, Artificial Sequence; identical to SEQ ID NO: 110627
  derived and/or modified CDS sequence (opt2) from neuraminidase__InfluenzaA__ABC42310

SEQ ID NO: 110643 - RNA, 1410 nt, Artificial Sequence; identical to SEQ ID NO: 110627
  derived and/or modified CDS sequence (opt2) from neuraminidase__InfluenzaA__ABC42321

SEQ ID NO: 110644 - RNA, 1410 nt, Artificial Sequence; identical to SEQ ID NO: 110627
  derived and/or modified CDS sequence (opt2) from neuraminidase__InfluenzaA__ABC42349

SEQ ID NO: 110645 - RNA, 1410 nt, Artificial Sequence; identical to SEQ ID NO: 110627
  derived and/or modified CDS sequence (opt2) from neuraminidase__InfluenzaA__ABC42464

SEQ ID NO: 110646 - RNA, 1410 nt, Artificial Sequence; identical to SEQ ID NO: 110627
  derived and/or modified CDS sequence (opt2) from neuraminidase__InfluenzaA__ABC42497

SEQ ID NO: 110647 - RNA, 1410 nt, Artificial Sequence; identical to SEQ ID NO: 110627
  derived and/or modified CDS sequence (opt2) from neuraminidase__InfluenzaA__ABC42508

SEQ ID NO: 110648 - RNA, 1410 nt, Artificial Sequence; identical to SEQ ID NO: 110627
  derived and/or modified CDS sequence (opt2) from neuraminidase__InfluenzaA__ABC42519

SEQ ID NO: 110649 - RNA, 1410 nt, Artificial Sequence; identical to SEQ ID NO: 110627
  derived and/or modified CDS sequence (opt2) from neuraminidase__InfluenzaA__ABC42530

SEQ ID NO: 110650 - RNA, 1410 nt, Artificial Sequence; identical to SEQ ID NO: 110627
  derived and/or modified CDS sequence (opt2) from neuraminidase__InfluenzaA__ABC42577

SEQ ID NO: 110651 - RNA, 1410 nt, Artificial Sequence; identical to SEQ ID NO: 110627
  derived and/or modified CDS sequence (opt2) from neuraminidase__InfluenzaA__ABC42588

SEQ ID NO: 110652 - RNA, 1410 nt, Artificial Sequence; identical to SEQ ID NO: 110363
  derived and/or modified CDS sequence (opt2) from neuraminidase__InfluenzaA__ABC42599

SEQ ID NO: 110653 - RNA, 1410 nt, Artificial Sequence; identical to SEQ ID NO: 110363
  derived and/or modified CDS sequence (opt2) from neuraminidase__InfluenzaA__ABC42610

SEQ ID NO: 110654 - RNA, 1410 nt, Artificial Sequence; identical to SEQ ID NO: 110363
  derived and/or modified CDS sequence (opt2) from neuraminidase__InfluenzaA__ABC42621

SEQ ID NO: 110655 - RNA, 1410 nt, Artificial Sequence; identical to SEQ ID NO: 110363
  derived and/or modified CDS sequence (opt2) from neuraminidase__InfluenzaA__ABC42632

SEQ ID NO: 110656 - RNA, 1410 nt, Artificial Sequence; identical to SEQ ID NO: 110363
  derived and/or modified CDS sequence (opt2) from neuraminidase__InfluenzaA__ABC42643

SEQ ID NO: 110657 - RNA, 1410 nt, Artificial Sequence; identical to SEQ ID NO: 110363
  derived and/or modified CDS sequence (opt2) from neuraminidase__InfluenzaA__ABC42654

SEQ ID NO: 110658 - RNA, 1410 nt, Artificial Sequence; identical to SEQ ID NO: 110363
  derived and/or modified CDS sequence (opt2) from neuraminidase__InfluenzaA__ABC42665

SEQ ID NO: 110659 - RNA, 1410 nt, Artificial Sequence; identical to SEQ ID NO: 110363
  derived and/or modified CDS sequence (opt2) from neuraminidase__InfluenzaA__ABC42676

SEQ ID NO: 110660 - RNA, 1410 nt, Artificial Sequence; identical to SEQ ID NO: 110363
  derived and/or modified CDS sequence (opt2) from neuraminidase__InfluenzaA__ABC42687

SEQ ID NO: 110661 - RNA, 1410 nt, Artificial Sequence; identical to SEQ ID NO: 110363
  derived and/or modified CDS sequence (opt2) from neuraminidase__InfluenzaA__ABC42698

SEQ ID NO: 110662 - RNA, 1410 nt, Artificial Sequence; identical to SEQ ID NO: 110363
  derived and/or modified CDS sequence (opt2) from neuraminidase__InfluenzaA__ABC42709

SEQ ID NO: 110663 - RNA, 1410 nt, Artificial Sequence; identical to SEQ ID NO: 110363
  derived and/or modified CDS sequence (opt2) from neuraminidase__InfluenzaA__ABC42720

SEQ ID NO: 110664 - RNA, 1410 nt, Artificial Sequence
  derived and/or modified CDS sequence (opt2) from neuraminidase__InfluenzaA__ABC42742
augaaccccaaccagaagaucaucaccaucggcuccgucucccucaccaucuccaccaucugcuucuucaugcagaucgccauccucaugaccaccgucacccuccacuucaagcaguacgaguucaacuccccccccaacaaccaggucaugcucugcgagcccaccaucaucgagcgcaacaucaccgagaucgucuaccucaccaacaccaccaucgagaaggagaucugccccaagcucgccgaguaccgcaacugguccaagccccagugcgacaucaccggcuucgcccccuucuccaaggacaacuccauccgccucuccgccggcggcgacaucugggucacccgcgagcccuacgucuccugcgaccccgacaagugcuaccaguucgcccucggccagggcaccacccucaacaacguccacuccaacgacaccguccacgaccgcacccccuaccgcacccuccucaugaacgagcucggcguccccuuccaccucggcaccaagcaggucugcaucgccugguccuccuccuccugccacgacggcaaggccuggcuccacgucugcgucaccggcgacgacaagaacgccaccgccuccuucaucuacaacggccgccucgucgacuccaucgucuccugguccaaggagauccuccgcacccaggaguccgagugcgucugcaucaacggcaccugcaccgucgucaugaccgacggcuccgccuccggcaaggccgacaccaagauccucuucaucgaggagggcaagaucguccacaccuccacccucuccggcuccgcccagcacgucgaggagugcuccugcuacccccgcuaccccggcguccgcugcgucugccgcgacaacuggaagggcuccaaccgccccaucgucgacaucaacaucaaggacuacuccaucgucuccuccuacgucugcuccggccucgucggcgacaccccccgccgcaacgacuccuccuccuccucccacugccucgaccccaacaacgaggagggcggccacggcgucaagggcugggccuucgacgacggcaacgacgucuggaugggccgcaccaucuccgagaagcuccgcuccggcuacgagaccuucaaggucaucgagggcugguccaaccccaacuccaagcuccagaucaaccgccaggucaucgucgaccgcggcaaccgcuccggcuacuccggcaucuucuccgucgagggcaaguccugcaucaaccgcugcuucuacgucgagcucauccgcggccgcaaggaggagaccgagguccucuggaccuccaacuccaucgucgucuucugcggcaccuccggcaccuacggcaccggcuccuggcccgacggcgccgacaucaaccucaugcccaucuga

SEQ ID NO: 110665 - RNA, 1410 nt, Artificial Sequence; identical to SEQ ID NO: 110363
  derived and/or modified CDS sequence (opt2) from neuraminidase__InfluenzaA__ABC42764

SEQ ID NO: 110666 - RNA, 1410 nt, Artificial Sequence; identical to SEQ ID NO: 110363
  derived and/or modified CDS sequence (opt2) from neuraminidase__InfluenzaA__ABC42775

SEQ ID NO: 110667 - RNA, 1410 nt, Artificial Sequence; identical to SEQ ID NO: 110363
  derived and/or modified CDS sequence (opt2) from neuraminidase__InfluenzaA__ABC42786

SEQ ID NO: 110668 - RNA, 1410 nt, Artificial Sequence; identical to SEQ ID NO: 110363
  derived and/or modified CDS sequence (opt2) from neuraminidase__InfluenzaA__ABC42797

SEQ ID NO: 110669 - RNA, 1410 nt, Artificial Sequence; identical to SEQ ID NO: 110363
  derived and/or modified CDS sequence (opt2) from neuraminidase__InfluenzaA__ABC42808

SEQ ID NO: 110670 - RNA, 1410 nt, Artificial Sequence; identical to SEQ ID NO: 110363
  derived and/or modified CDS sequence (opt2) from neuraminidase__InfluenzaA__ABC42819

SEQ ID NO: 110671 - RNA, 1410 nt, Artificial Sequence
  derived and/or modified CDS sequence (opt2) from neuraminidase__InfluenzaA__ABC42841
augaaccccaaccagaagaucaucaccaucggcuccgucucccucaccaucuccaccaucugcuucuucaugcagaucgccauccucaucaccaccgucacccuccacuucaagcaguacgaguucaacuccccccccaacaaccaggucaugcucugcgagcccaccaucaucgagcgcaacaucaccgagaucgucuaccucaccaacaccaccaucgagaaggagaucugccccaagcucgccgaguaccgcaacugguccaagccccagugcgacaucaccggcuucgcccccuucuccaaggacaacuccauccgccucuccgccggcggcgacaucugggucacccgcgagcccuacgucuccugcgaccccgacaagugcuaccaguucgcccucggccagggcaccacccucaacaacguccacuccaacgacaccguccacgaccgcacccccuaccgcacccuccucaugaacgagcucggcguccccuuccaccucggcaccaagcaggucugcaucgccugguccuccuccuccugccacgacggcaaggccuggcuccacgucugcgucaccggcgacgacaagaacgccaccgccuccuucaucuacaacggccgccucgucgacuccaucgucuccugguccaaggagauccuccgcacccaggaguccgagugcgucugcaucaacggcaccugcaccgucgucaugaccgacggcuccgccucccgcaaggccgacaccaagauccucuucaucgaggagggcaagaucguccacaccuccacccucuccggcuccgcccagcacgucgaggagugcuccugcuacccccgcuaccccggcguccgcugcgucugccgcgacaacuggaagggcuccaaccgccccaucgucgacaucaacaucaaggacuacuccaucgucuccuccuacgucugcuccggccucgucggcgacaccccccgcaagaacgacuccuccuccuccucccacugccucgaccccaacaacgaggagggcggccacggcgucaagggcugggccuucgacgacggcaacgacgucuggaugggccgcaccaucuccgagaagcuccgcuccggcuacgagaccuucaaggucaucgagggcugguccaaccccaacuccaagcuccagaucaaccgccaggucaucgucgaccgcggcaaccgcuccggcuacuccggcaucuucuccgucgagggcaaguccugcaucaaccgcugcuucuacgucgagcucauccgcggccgcaaggaggagaccgagguccucuggaccuccaacuccaucgucgucuucugcggcaccuccggcaccuacggcaccggcuccuggcccgacggcgccgacaucaaccucaugcccaucuga

SEQ ID NO: 110672 - RNA, 1410 nt, Artificial Sequence; identical to SEQ ID NO: 110363
  derived and/or modified CDS sequence (opt2) from neuraminidase__InfluenzaA__ABC42852

SEQ ID NO: 110673 - RNA, 1410 nt, Artificial Sequence; identical to SEQ ID NO: 110363
  derived and/or modified CDS sequence (opt2) from neuraminidase__InfluenzaA__ABC42863

SEQ ID NO: 110674 - RNA, 1410 nt, Artificial Sequence; identical to SEQ ID NO: 110202
  derived and/or modified CDS sequence (opt2) from neuraminidase__InfluenzaA__ABC42874

SEQ ID NO: 110675 - RNA, 1410 nt, Artificial Sequence; identical to SEQ ID NO: 110202
  derived and/or modified CDS sequence (opt2) from neuraminidase__InfluenzaA__ABC42885

SEQ ID NO: 110676 - RNA, 1410 nt, Artificial Sequence; identical to SEQ ID NO: 110202
  derived and/or modified CDS sequence (opt2) from neuraminidase__InfluenzaA__ABC42896

SEQ ID NO: 110677 - RNA, 1410 nt, Artificial Sequence; identical to SEQ ID NO: 110627
  derived and/or modified CDS sequence (opt2) from neuraminidase__InfluenzaA__ABC42914

SEQ ID NO: 110678 - RNA, 1410 nt, Artificial Sequence; identical to SEQ ID NO: 110627
  derived and/or modified CDS sequence (opt2) from neuraminidase__InfluenzaA__ABC42932

SEQ ID NO: 110679 - RNA, 1410 nt, Artificial Sequence
  derived and/or modified CDS sequence (opt2) from neuraminidase__InfluenzaA__ABC42943
augaaccccaaccagaagaucaucaccaucggcuccgucucccucaccaucgccaccaucugcuuccucaugcagaucgccauccucgucaccaccgucacccuccacuucaagcagcacgagugcaacuccccccccaacaaccaggucaugcucugcgagcccaccaucaucgagcgcaacaucaccgagaucgucuaccucaccaacaccaccaucgagaaggagaucugccccaagcucgucggcuaccgcaacugguccaagccccagugcaacaucaccggcuucgcccccuucuccaaggacaacuccauccgccucuccgccggcggcgacaucugggucacccgcgagcccuacgucuccugcgaccccgacaagugcuaccaguucgcccucggccagggcaccacccucaacaacggccacuccaacgacaccguccacgaccgcacccccuaccgcacccuccucaugaacgagcucggcguccccuuccaccucggcacccgccaggucugcaucgccugguccuccuccuccugccacgacggcaaggccuggcuccacgucugcgucaccggcgacgacaagaacgccaccgccuccuucaucuacaacggccgccucgucgacuccaucggcuccugguccaagaagauccuccgcacccaggaguccgagugcgucugcaucaacggcaccugcaccgucgucaugaccgacggcuccgccuccggcaaggccgacaccaagauccucuucaucgaggagggcaagaucguccacaucuccacccucuccggcuccgcccagcacgucgaggagugcuccugcuacccccgcuaccccggcguccgcugcgucugccgcgacaacuggaagggcuccaaccgccccaucgucgacaucaacgucaaggacuacuccaucgucuccuccuacgucugcuccggccucgucggcgacaccccccgcaagaacgacuccuucuccuccucccacugccucgaccccaacaacgaggagggcggccacggcgucaagggcugggccuucgacgacggcaacgacgucuggaugggccgcaccaucuccgagaagcuccgcuccggcuacgagaccuucaaggucaucgagggcugguccaagcccaacuccaagcuccagaucaaccgccaggucaucgucgagcgcggcaaccgcuccggcuacuccggcaucuucuccgucgagggcaaguccugcaucaaccgcugcuucuacgucgagcucauccgcggccgcaaggaggagaccgaggucugguggaccuccaacuccaucgucgucuucugcggcaccuccggcaccuacggcaccggcuccuggcccgacggcgccgacaucaaccucaugcccaucuga

SEQ ID NO: 110680 - RNA, 1410 nt, Artificial Sequence; identical to SEQ ID NO: 110627
  derived and/or modified CDS sequence (opt2) from neuraminidase__InfluenzaA__ABC42954

SEQ ID NO: 110681 - RNA, 1410 nt, Artificial Sequence; identical to SEQ ID NO: 110627
  derived and/or modified CDS sequence (opt2) from neuraminidase__InfluenzaA__ABC42965

SEQ ID NO: 110682 - RNA, 1410 nt, Artificial Sequence
  derived and/or modified CDS sequence (opt2) from neuraminidase__InfluenzaA__ABC42976
augaaccccaaccagaagaucaucaccaucggcuccgucucccucaccaucgccaccaucugcuuccucaugcagaucgccauccucgucaccaccgucacccuccacuucaagcagcacgagugcaacuccccccccaacaaccaggccaugcucugcgagcccaccaucaucgagcgcaacaucaccgagaucgucuaccucaccaacaccaccaucgagaaggagaucugccccaagcucgucgaguaccgcaacugguccaagccccagugcaacaucaccggcuucgcccccuucuccaaggacaacuccauccgccucuccgccggcggcgacaucugggucacccgcgagcccuacgucuccugcgaccccgacaagugcuaccaguucgcccucggccagggcaccacccucaacaacggccacuccaacgacaccguccacgaccgcacccccuaccgcacccuccucaugaacgagcucggcguccccuuccaccucggcacccgccaggucugcaucgccugguccuccuccuccugccacgacggcaaggccuggcuccacgucugcgucaccggcgacgacaagaacgccaccgccuccuucaucuacaacggccgccucgucgacuccaucggcuccugguccaagaagauccuccgcacccaggaguccgagugcgucugcaucaacggcaccugcaccgucgucaugaccgacggcuccgccuccggcaaggccgacaccaagauccucuucaucgaggagggcaagaucguccacaucuccacccucuccggcuccgcccagcacgucgaggagugcuccugcuacccccgcuaccccggcguccgcugcgucugccgcgacaacuggaagggcuccaaccgccccaucgucgacaucaacgucaaggacuacuccaucgucuccuccuacgucugcuccggccucgucggcgacaccccccgcaagaacgacuccuucuccuccucccacugccucgaccccaacaacgaggagggcggccacggcgucaagggcugggccuucgacgacggcaacgacgucuggaugggccgcaccaucuccgagaagcuccgcuccggcuacgagaccuucaaggucaucgagggcugguccaagcccaacuccaagcuccagaucaaccgccaggucaucgucgagcgcggcaaccgcuccggcuacuccggcaucuucuccgucgagggcaaguccugcaucaaccgcugcuucuacgucgagcucauccgcggccgcaaggaggagaccgaggucugguggaccuccaacuccaucgucgucuucugcggcaccuccggcaccuacggcaccggcuccuggcccgacggcgccgacaucaaccucaugcccaucuga

SEQ ID NO: 110683 - RNA, 1410 nt, Artificial Sequence; identical to SEQ ID NO: 110627
  derived and/or modified CDS sequence (opt2) from neuraminidase__InfluenzaA__ABC42987

SEQ ID NO: 110684 - RNA, 1410 nt, Artificial Sequence; identical to SEQ ID NO: 110627
  derived and/or modified CDS sequence (opt2) from neuraminidase__InfluenzaA__ABC42998

SEQ ID NO: 110685 - RNA, 1410 nt, Artificial Sequence; identical to SEQ ID NO: 110627
  derived and/or modified CDS sequence (opt2) from neuraminidase__InfluenzaA__ABC43009

SEQ ID NO: 110686 - RNA, 1410 nt, Artificial Sequence; identical to SEQ ID NO: 110627
  derived and/or modified CDS sequence (opt2) from neuraminidase__InfluenzaA__ABC43020

SEQ ID NO: 110687 - RNA, 1410 nt, Artificial Sequence
  derived and/or modified CDS sequence (opt2) from neuraminidase__InfluenzaA__ABC43042
augaaccccaaccagaagaucaucaccaucggcuccgucucccucaccaucgccaccaucugcuuccucaugcagaucgccauccucgucaccaccgucacccuccacuucaagcagcacgagugcaacuccccccccaacaaccaggucaugcucugcgagcccaccaucaucgagcgcaacaucaccgagaucgucuaccucaccaacaccaccaucgagaaggagaucugccccaagcucgucgaguaccgcaacugguccaagccccagugcaacaucaccggcuucgcccccuucuccaaggacaacuccauccgccucuccgccggcggcgacaucugggucacccgcgagcccuacgucuccugcgaccccgacaagugcuaccaguucgcccucggccagggcaccacccucaacaacggccacuccaacgacaccguccacgaccgcacccccuaccgcacccuccucaugaacgagcucggcguccccuuccaccucggcacccgccaggucugcaucgccugguccuccuccuccugccacgacggcaaggccuggcuccacgucugcgucaccggcgacgacaagaacgccaccgccuccuucaucuacaacggccgccucgucgacuccaucggcuccugguccaagaagauccuccgcacccaggaguccgagugcgucugcaucaacggcaccugcaccgucgucaugaccgacggcuccgccuccggcaaggccgacaccaagauccucuucaucgaggagggcaagaucguccacaucuccacccucuccggcuccgcccagcacgucgaggagugcuccugcuacccccgcuaccccggcguccgcugcgucugccgcgacaacuggaagggcuccaaccgccccaucgucgacaucaacgucaaggacuacuccaucgucuccuccuacgucugcuccggccucgucggcgacaccccccgcaagaacgacuccuucuccuccucccacugccucgaccccaacaacgaggagggcggccacggcgucaagggcugggccuucgacgacggcaacgacgucuggaugggccgcaccaucuccgagaagcuccgcuccggcuacgagaccuucaaggucaucgagggcugguccaagcccaacuccaagcuccagaucaaccgccaggucaucgucgagcgcggcaaccgcuccggcuacuccggcaucuucuccgucgagggcaaguccugcaucaaccgcugcuucuacgucgagcucauccgcggccgcaaggaggagaccgaggucugguggaccuccaacuccaucgucgucuucugcggcaccuccggcaccuacggcaccggcuccuggcccgacggcgccgacaucaaccucauguccaucuga

SEQ ID NO: 110688 - RNA, 1410 nt, Artificial Sequence; identical to SEQ ID NO: 110627
  derived and/or modified CDS sequence (opt2) from neuraminidase__InfluenzaA__ABC43053

SEQ ID NO: 110689 - RNA, 1410 nt, Artificial Sequence
  derived and/or modified CDS sequence (opt2) from neuraminidase__InfluenzaA__ABC43064
augaaccccaaccagaagaucaucaccaucggcuccgucucccucaccaucgccaccaucugcuuccucaugcagaucgccauccucgucaccaccgucacccuccacuucaagcagcacgagugcaacuccccccccaacaaccaggucaugcucugcgagcccaccaucaucgagcgcaacaucaccgagaucgucuaccucaccaacaccaccaucgagaaggagaucugccccaagcucgucgaguaccgcaacugguccaagccccagugcaacaucaccggcuucgcccccuucuccaaggacaacuccauccgccucuccgccggcggcgacaucugggucacccgcgagcccuacgucuccugcgaccccgacaagugcuaccaguucgcccucggccagggcaccacccucaacaacggccacuccaacgacaccguccacgaccgcacccccuaccgcacccuccucaugaacgagcucggcguccccuuccaccucggcacccgccaggucugcaucgccugguccuccuccuccugccacgacggcaaggccuggcuccacgucugcgucaccggcgacgacaagaacgccaccgccuccuucaucuacaacggccgccucgucgacuccaucggcuccugguccaagaagauccuccgcacccaggaguccgagugcgucugcaucaacggcaccugcaccgucgucaugaccgacggcuccgccuccggcaaggccgacaccaagauccucuucaucgaggagggcaagaucguccacaucuccacccucuccggcuccgcccagcacgucgaggagugcuccugcuacccccgcuaccccggcguccgcugcgucugccgcgacaacuggaagggcuccaaccgccccaucgucgacaucaacgucaaggacuacuccaucgucuccuccuacgucugcuccggccucgucggcgacaccccccgcaagaacgacuccuucuccuccucccacugccucgaccccaacaacgaggagggcggccacggcgucaagggcugggccuucgacgacggcaacgacgucuggaugggccgcaccaucuccgagaagcuccgcuccggcuacgagaccuucaaggucaucgagggcugguccaagcccaacuccaagcuccagaucaaccgccaggucaucgucgagcgcggcaaccgcuccggcuacuccggcaucuucuccgucgagggcaaguccugcaucaaccgcugcuucuacgucgagcucauccgcggccgcaaggagaagaccgaggucugguggaccuccaacuccaucgucgucuucugcggcaccuccggcaccuacggcaccggcuccuggcccgacggcgccgacaucaaccucaugcccaucuga

SEQ ID NO: 110690 - RNA, 1410 nt, Artificial Sequence; identical to SEQ ID NO: 110627
  derived and/or modified CDS sequence (opt2) from neuraminidase__InfluenzaA__ABC43075

SEQ ID NO: 110691 - RNA, 1410 nt, Artificial Sequence
  derived and/or modified CDS sequence (opt2) from neuraminidase__InfluenzaA__ABC43086
augaaccccaaccagaagaucaucaccaucggcuccgucucccucaucaucgccaccaucugcuuccucaugcagaucgccauccucgucaccaccgucacccuccacuucaagcagcacgagugcaacuccccccccaacaaccaggucaugcucugcgagcccaccaucaucgagcgcaacaucaccgagaucgucuaccucaccaacaccaccaucgagaaggagaucugccccaagcucgucgaguaccgcaacugguccaagccccagugcaacaucaccggcuucgcccccuucuccaaggacaacuccauccgccucuccgccggcggcgacaucugggucacccgcgagcccuacgucuccugcgaccccgacaagugcuaccaguucgcccucggccagggcaccacccucaacaacggccacuccaacgacaccguccacgaccgcacccccuaccgcacccuccucaugaacgagcucggcguccccuuccaccucggcacccgccaggucugcaucgccugguccuccuccuccugccacgacggcaaggccuggcuccacgucugcgucaccggcgacgacaagaacgccaccgccuccuucaucuacaacggccgccucgucgacuccaucggcuccugguccaagaagauccuccgcacccaggaguccgagugcgucugcaucaacggcaccugcaccgucgucaugaccgacggcuccgccuccggcaaggccgacaccaagauccucuucaucgaggagggcaagaucguccacaucuccacccucuccggcuccgcccagcacgucgaggagugcuccugcuacccccgcuaccccggcguccgcugcgucugccgcgacaacuggaagggcuccaaccgccccaucgucgacaucaacgucaaggacuacuccaucgucuccuccuacgucugcuccggccucgucggcgacaccccccgcaagaacgacuccuucuccuccucccacugccucgaccccaacaacgaggagggcggccacggcgucaagggcugggccuucgacgacggcaacgacgucuggaugggccgcaccaucuccgagaagcuccgcuccggcuacgagaccuucaaggucaucgagggcugguccaagcccaacuccaagcuccagaucaaccgccaggucaucgucgagcgcggcaaccgcuccggcuacuccggcaucuucuccgucgagggcaaguccugcaucaaccgcugcuucuacgucgagcucauccgcggccgcaaggaggagaccgaggucugguggaccuccaacuccaucgucgucuucugcggcaccuccggcaccuacggcaccggcuccuggcccgacggcgccgacaucaaccucaugcccaucuga

SEQ ID NO: 110692 - RNA, 1410 nt, Artificial Sequence; identical to SEQ ID NO: 110627
  derived and/or modified CDS sequence (opt2) from neuraminidase__InfluenzaA__ABC43097

SEQ ID NO: 110693 - RNA, 1410 nt, Artificial Sequence; identical to SEQ ID NO: 110627
  derived and/or modified CDS sequence (opt2) from neuraminidase__InfluenzaA__ABC43108

SEQ ID NO: 110694 - RNA, 1410 nt, Artificial Sequence; identical to SEQ ID NO: 110627
  derived and/or modified CDS sequence (opt2) from neuraminidase__InfluenzaA__ABC43119

SEQ ID NO: 110695 - RNA, 1410 nt, Artificial Sequence; identical to SEQ ID NO: 110363
  derived and/or modified CDS sequence (opt2) from neuraminidase__InfluenzaA__ABC43130

SEQ ID NO: 110696 - RNA, 1410 nt, Artificial Sequence; identical to SEQ ID NO: 110363
  derived and/or modified CDS sequence (opt2) from neuraminidase__InfluenzaA__ABC43141

SEQ ID NO: 110697 - RNA, 1410 nt, Artificial Sequence; identical to SEQ ID NO: 110363
  derived and/or modified CDS sequence (opt2) from neuraminidase__InfluenzaA__ABC43152

SEQ ID NO: 110698 - RNA, 1410 nt, Artificial Sequence; identical to SEQ ID NO: 110363
  derived and/or modified CDS sequence (opt2) from neuraminidase__InfluenzaA__ABC43163

SEQ ID NO: 110699 - RNA, 1410 nt, Artificial Sequence; identical to SEQ ID NO: 110363
  derived and/or modified CDS sequence (opt2) from neuraminidase__InfluenzaA__ABC43174

SEQ ID NO: 110700 - RNA, 1410 nt, Artificial Sequence
  derived and/or modified CDS sequence (opt2) from neuraminidase__InfluenzaA__ABC43185
augaaccccaaccagaagaucaucaccaucggcuccgucucccucaccaucuccaccaucugcuucuucaugcagaucgccauccucaucaccaccgucacccuccacuucaagcaguacgaguucaacuccccccccaacaaccaggucaugcucugcgagcccaccaucaucgagcgcaacaucaccgagaucgucuaccucaccaacaccaccaucgagaaggagaucugccccaagcucgccgaguaccgcaacugguccaagccccagugcgacaucaccggcuucgcccccuucuccaaggacaacuccauccgccucuccgccggcggcgacaucugggucacccgcgagcccuacgucuccugcgaccccgacaagugcuaccaguucgcccucggccagggcaccacccucaacaacguccacuccaacgacaccguccacgaccgcacccccuaccgcacccuccucaugaacgagcucggcguccccuuccaccucggcaccaagcaggucugcaucgccugguccuccuccuccugccacgacggcaaggccuggcuccacgucugcgucaccggcgacgacaagaacgccaccgccuccuucaucuacaacggccgccucgucgacuccaucgucuccugguccaaggagauccuccgcacccaggaguccgagugcgucugcaucaacggcaccugcaccgucgucaugaccgacggcuccgccuccggcaaggccgacacccgcauccucuucaucgaggagggcaagaucguccacaccuccacccucuccggcuccgcccagcacgucgaggagugcuccugcuacccccgcuaccccggcguccgcugcgucugccgcgacaacuggaagggcuccaaccgccccaucgucgacaucaacaucaaggacuacuccaucgucuccuccuacgucugcuccggccucgucggcgacaccccccgcaagaacgacuccuccuccuccucccacugccucgaccccaacaacgaggagggcggccacggcgucaagggcugggccuucgacgacggcaacgacgucuggaugggccgcaccaucuccgagaagcuccgcuccggcuacgagaccuucaaggucaucgagggcugguccaaccccaacuccaagcuccagaucaaccgccaggucaucgucgaccgcggcaaccgcuccggcuacuccggcaucuucuccgucgagggcaaguccugcaucaaccgcugcuucuacgucgagcucauccgcggccgcaaggaggagaccgagguccucuggaccuccaacuccaucgucgucuucugcggcaccuccggcaccuacggcaccggcuccuggcccgacggcgccgacaucaaccucaugcccaucuga

SEQ ID NO: 110701 - RNA, 1410 nt, Artificial Sequence; identical to SEQ ID NO: 110363
  derived and/or modified CDS sequence (opt2) from neuraminidase__InfluenzaA__ABC43478

SEQ ID NO: 110702 - RNA, 1410 nt, Artificial Sequence; identical to SEQ ID NO: 110363
  derived and/or modified CDS sequence (opt2) from neuraminidase__InfluenzaA__ABC43489

SEQ ID NO: 110703 - RNA, 1410 nt, Artificial Sequence; identical to SEQ ID NO: 110363
  derived and/or modified CDS sequence (opt2) from neuraminidase__InfluenzaA__ABC43500

SEQ ID NO: 110704 - RNA, 1410 nt, Artificial Sequence
  derived and/or modified CDS sequence (opt2) from neuraminidase__InfluenzaA__ABC43511
augaaccccaaccagaagaucaucaccaucggcuccgucucccucaccaucuccaccaucugcuucuucaugcagaucgccauccucaucaccaccgucacccuccacuucaagcaguacgaguucaacuccccccccaacaaccaggucaugcucugcgagaccaccaucaucgagcgcaacaucaccgagaucgucuaccucaccaacaccaccaucgagaaggagaucugccccaagcucgccgaguaccgcaacugguccaagccccagugcgacaucaccggcuucgcccccuucuccaaggacaacuccauccgccucuccgccggcggcgacaucugggucacccgcgagcccuacgucuccugcgaccccgacaagugcuaccaguucgcccucggccagggcaccacccucaacaacguccacuccaacgacaccguccacgaccgcacccccuaccgcacccuccucaugaacgagcucggcguccccuuccaccucggcaccaagcaggucugcaucgccugguccuccuccuccugccacgacggcaaggccuggcuccacgucugcgucaccggcgacgacaagaacgccaccgccuccuucaucuacaacggccgccucgucgacuccaucgucuccugguccaaggagauccuccgcacccaggaguccgagugcgucugcaucaacggcaccugcaccgucgucaugaccgacggcuccgccuccggcaaggccgacaccaagauccucuucaucgaggagggcaagaucguccacaccuccacccucuccggcuccgcccagcacgucgaggagugcuccugcuacccccgcuaccccggcguccgcugcgucugccgcgacaacuggaagggcuccaaccgccccaucgucgacaucaacaucaaggacuacuccaucgucuccuccuacgucugcuccggccucgucggcgacaccccccgcaagaacgacuccuccuccuccucccacugccucgaccccaacaacgaggagggcggccacggcgucaagggcugggccuucgacgacggcaacgacgucuggaugggccgcaccaucuccgagaagcuccgcuccggcuacgagaccuucaaggucaucgagggcugguccaaccccaacuccaagcuccagaucaaccgccaggucaucgucgaccgcggcaaccgcuccggcuacuccggcaucuucuccgucgagggcaaguccugcaucaaccgcugcuucuacgucgagcucauccgcggccgcaaggaggagaccgagguccucuggaccuccaacuccaucgucgucuucugcggcaccuccggcaccuacggcaccggcuccuggcccgacggcgccgacaucaaccucaugcccaucuga

SEQ ID NO: 110705 - RNA, 1410 nt, Artificial Sequence; identical to SEQ ID NO: 110363
  derived and/or modified CDS sequence (opt2) from neuraminidase__InfluenzaA__ABC43522

SEQ ID NO: 110706 - RNA, 1410 nt, Artificial Sequence; identical to SEQ ID NO: 110363
  derived and/or modified CDS sequence (opt2) from neuraminidase__InfluenzaA__ABC43533

SEQ ID NO: 110707 - RNA, 1410 nt, Artificial Sequence; identical to SEQ ID NO: 110363
  derived and/or modified CDS sequence (opt2) from neuraminidase__InfluenzaA__ABC43544

SEQ ID NO: 110708 - RNA, 1410 nt, Artificial Sequence; identical to SEQ ID NO: 110363
  derived and/or modified CDS sequence (opt2) from neuraminidase__InfluenzaA__ABC43555

SEQ ID NO: 110709 - RNA, 1410 nt, Artificial Sequence; identical to SEQ ID NO: 110606
  derived and/or modified CDS sequence (opt2) from neuraminidase__InfluenzaA__ABC46557

SEQ ID NO: 110710 - RNA, 1410 nt, Artificial Sequence
  derived and/or modified CDS sequence (opt2) from neuraminidase__InfluenzaA__ABC46579
augaaccccaaccagaagaucaucaccaucggcuccgucucccucaccaucgccaccaucugcuuccucaugcagaucgccauccucgucaccaccgucacccuccacuucaagcaguacgagugcuccuccccccccaacaaccaggucaugcccugcgagcccaucaucaucgagcgcaacaucaccgagaucgucuaccucaccaacaccaccaucgagaaggagaucugccccaagcucgucgaguaccgcaacugguccaagccccagugcaagaucaccggcuucgcccccuucuccaaggacaacuccauccgccucuccgccggcggcgacaucugggucacccgcgagcccuacgucuccugcgaccccggcaagugcuaccaguucgcccucggccagggcaccacccucgacaacaagcacuccaacgacaccauccacgaccgcacccccuaccgcacccuccucaugaacgagcucggcguccccuuccaccucggcacccgccaggucugcaucgccugguccuccuccuccugccacgacggcaaggccuggcuccacgucugcgucaccggccacgacaagaacgccaccgccuccuucaucuacgacggccgccucgucgacuccaucggcuccugguccaagaacauccuccgcacccaggaguccgagugcgucugcaucaacggcaccugcaccgucgucaugaccgacggcuccgccuccgagcgcgccgacaccaagauccucuucaucgaggagggcaagaucguccacaucuccccccucuccggcuccgcccagcacgucgaggagugcuccugcuacccccgcuaccccggcguccgcugcgucugccgcgacaacuggaagggcuccaaccgccccgucgucgacaucaacgucaaggacuacuccaucgucuccuccuacgucugcuccggccucgucggcgacaccccccgcaagaacgaccgcuccuccuccuccuacugccgcaaccccaacaacgagaagggcaaccacggcgucaagggcugggccuucgacgacggcaacgacgucuggaugggccgcaccaucuccgaggagucccgcuccggcuacgagaccuucaaggucaucggcggcugguccacccccaacuccaagcuccagaucaaccgccaggucaucgucgacuccgacaaccgcuccggcuacuccggcaucuucuccgucgagggcaaguccugcaucaaccgcugcuucuacgucgagcucauccgcggccgcgagcaggagacccgcgucugguggaccuccaacuccaucgucgucuucugcggcaccuccggcaccuacggcaccggcuccuggcccgacggcgccgacaucaaccucaugcccaucuga

SEQ ID NO: 110711 - RNA, 1410 nt, Artificial Sequence; identical to SEQ ID NO: 110550
  derived and/or modified CDS sequence (opt2) from neuraminidase__InfluenzaA__ABC50170

SEQ ID NO: 110712 - RNA, 1410 nt, Artificial Sequence; identical to SEQ ID NO: 110550
  derived and/or modified CDS sequence (opt2) from neuraminidase__InfluenzaA__ABC50181

SEQ ID NO: 110713 - RNA, 1410 nt, Artificial Sequence; identical to SEQ ID NO: 110550
  derived and/or modified CDS sequence (opt2) from neuraminidase__InfluenzaA__ABC50192

SEQ ID NO: 110714 - RNA, 1410 nt, Artificial Sequence; identical to SEQ ID NO: 110202
  derived and/or modified CDS sequence (opt2) from neuraminidase__InfluenzaA__ABC50203

SEQ ID NO: 110715 - RNA, 1410 nt, Artificial Sequence
  derived and/or modified CDS sequence (opt2) from neuraminidase__InfluenzaA__ABC50214
augaaccccaaccagaagaucaucaccaucggcuccgucucccucaccaucgccaccaucugcuuccucaugcagaucgccauccucgucaccaccgucacccuccacuucaagcaguacgagugcaacuccccccccaacaaccaggucaugcucugcgagcccaccaucaucgagcgcaacaucaccgagaucgucuaccucaccaacaccaccaucgagaaggagaucugccccaagcucgccgaguaccgcaacugguccaagccccagugcaacaucaccggcuucgcccccuucuccaaggacaacuccauccgccucuccgccggcggcgacaucugggucacccgcgagcccuacgucuccugcgaccccgacaagugcuaccaguucgcccucggccagggcaccacccucaacaacggccacuccaacgacaccguccacgaccgcacccccuaccgcacccuccucaugaacgagcucggcguccccuuccaccucggcacccgccaggucugcaucgccugguccuccuccuccugccacgacggcaaggccuggcuccacgucugcgucaccggcgacgacgagaacgccaccgccuccuucaucuacaacggccgccucgucgacuccaucggcuccugguccaagaagauccuccgcacccaggaguccgagugcgucugcaucaacggcaccugcaccgucgucaugaccgacggcuccgccuccggcaaggccgacaccaagauccucuucaucgaggagggcaagaucguccacaucuccacccucuccggcuccgcccagcacgucgaggagugcuccugcuacccccgcuaccccggcguccgcugcgucugccgcgacaacuggaagggcuccaaccgccccaucaucgacaucaacgucaaggacuacuccaucgucuccuccuacgucugcuccggccucgucggcgacaccccccgcaagaacgacuccuucuccuccucccacugccucgaccccaacaacgaggagggcggccacggcgucaagggcugggccuucgacgacggcaacgacgucuggaugggccgcaccaucuccgagaagcuccgcuccggcuacgagaccuucaaggucaucgagggcugguccaagcccaaccccaagcuccagaccaaccgccaggucaucgucgagcgcggcaaccgcuccggcuacuccggcaucuucuccgucgagggcaaguccugcaucaaccgcugcuucuacgucgagcucauccgcggccgcaaggaggagaccgaggucugguggaccuccaacuccaucgucgucuucugcggcaccuccggcaccuacggcaccggcuccuggcccgacggcgccgacaucaaccucaugcccaucuga

SEQ ID NO: 110716 - RNA, 1410 nt, Artificial Sequence; identical to SEQ ID NO: 110202
  derived and/or modified CDS sequence (opt2) from neuraminidase__InfluenzaA__ABC50225

SEQ ID NO: 110717 - RNA, 1410 nt, Artificial Sequence; identical to SEQ ID NO: 110202
  derived and/or modified CDS sequence (opt2) from neuraminidase__InfluenzaA__ABC50247

SEQ ID NO: 110718 - RNA, 1410 nt, Artificial Sequence
  derived and/or modified CDS sequence (opt2) from neuraminidase__InfluenzaA__ABC50258
augaaccccaaccagaagaucaucaccaucggcuccgucucccucaccaucgccaccaucugcuuccucaugcagaucgccauccucgucaccaccgucacccuccacuucaagcaguacgagugcaacuccccccccaacaaccaggucaugcucugcgagcccaccaucaucgagcgcaacaucaccgagaucgucuaccucaccaacaccaccaucgagaaggagaucugccccaagcucgccgaguaccgcaacugguccaagccccagugcaacaucaccggcuucgcccccuucuccaaggacaacuccauccgccucuccgccggcggcgacaucugggucacccgcgagcccuacgucuccugcgaccccgacaagugcuaccaguucgcccucggccagggcaccacccucaacaacggccacuccaacgacaccguccacgaccgcacccccuaccgcacccuccucaugaacgagcucggcguccccuuccaccucggcacccgccaggucugcaucgccugguccuccuccuccugccacgacggcaaggccuggcuccacgucugcgucaccggcgacgacgagaacgccaccgccuccuucaucuacaacggccgccucgucgacuccaucggcuccugguccaagaagauccuccgcacccaggaguccgagugcgucugcaucaacggcaccugcaccgucgucaugaccgacggcuccgccuccggcaaggccgacaccaagauccucuucaucgaggagggcaagaucguccacaucuccacccucuccggcuccgcccagcacgucgaggagugcuccugcuacccccgcuaccccggcguccgcugcgucugccgcgacaacuggaagggcuccaaccgccccaucaucgacaucaacgucaaggacuacuccaucgucuccuccuacgucugcuccggccucgucggcgacaccccccgcaagaacgacuccuucuccuccucccacugccucgaccccaacaacgaggagggcggccacggcgucaagggcugggccuucgacgacggcaacgacgucuggaugggccgcaccaucuccgagaagcuccgcuccggcuacgagaccuucaaggucaucgagggcugguccaagcccaacuccaagcuccagaccaaccgccaggucaucgucgagcgcggcaaccgcuccggcuacuccggcaucuucuccaucgagggcaaguccugcaucaaccgcugcuucuacgucgagcucauccgcggccgcaaggaggagaccgaggucugguggaccuccaacuccaucgucgucuucugcggcaccuccggcaccuacggcaccggcuccuggcccgacggcgccgacaucaaccucaugcccaucuga

SEQ ID NO: 110719 - RNA, 1410 nt, Artificial Sequence; identical to SEQ ID NO: 110202
  derived and/or modified CDS sequence (opt2) from neuraminidase__InfluenzaA__ABC50280

SEQ ID NO: 110720 - RNA, 1410 nt, Artificial Sequence; identical to SEQ ID NO: 110202
  derived and/or modified CDS sequence (opt2) from neuraminidase__InfluenzaA__ABC50291

SEQ ID NO: 110721 - RNA, 1410 nt, Artificial Sequence
  derived and/or modified CDS sequence (opt2) from neuraminidase__InfluenzaA__ABC50302
augaaccccaaccagaagaucaucaccaucggcuccgucucccucaccaucgccaccaucugcuuccucaugcagaucgccauccucaucaccaccgucacccuccacuucaagcaguacgagugcaacuccccccccaacaaccaggucaugcucugcgagcccaccaucaucgagcgcaacaucaccgagaucgucuaccucaccaacaccaccaucgagaaggagaucugccccaagcucgccgaguaccgcaacugguccaagccccagugcaacaucaccggcuucgcccccuucuccaaggacaacuccauccgccucuccgccggcggcgacaucugggucacccgcgagcccuacgucuccugcgaccccgacaagugcuaccaguucgcccucggccagggcaccacccucaacaacggccacuccaacgacaccguccacgaccgcacccccuaccgcacccuccucaugaacgagcucggcguccccuuccaccucggcacccgccaggucugcaucgccugguccuccuccuccugccacgacggcaaggccuggcuccacgucugcgucaccggcgacgacgagaacgccaccgccuccuucaucuacaacggccgccucgucgacuccaucggcuccugguccaagaagauccuccgcacccaggaguccgagugcgucugcaucaacggcaccugcaccgucgucaugaccgacggcuccgccuccggcaaggccgacaccaagauccucuucaucgaggagggcaagaucguccacaucuccacccucuccggcuccgcccagcacgucgaggagugcuccugcuacccccgcuaccccggcguccgcugcgucugccgcgacaacuggaagggcuccaaccgccccaucgucgacaucaacgucaaggacuacuccaucgucuccuccuacgucugcuccggccucgucggcgacaccccccgcaagaacgacuccuucuccuccucccacugccucgaccccaacaacgaggagggcggccacggcgucaagggcugggccuucgacgacggcaacgacgucuggaugggccgcaccaucuccgagaagcuccgcuccggcuacgagaccuucaaggucaucgagggcugguccaagcccaacuccaagcuccagaccaaccgccaggucaucgucgagcgcggcaaccgcuccggcuacuccggcaucuucuccgucgagggcaaguccugcaucaaccgcugcuucuacgucgagcucauccgcggccgcaaggaggagaccgaggucugguggaccuccaacuccaucgucgucuucugcggcaccuccggcaccuacggcaccggcuccuggcccgacggcgccgacaucaaccucaugcccaucuga

SEQ ID NO: 110722 - RNA, 1410 nt, Artificial Sequence
  derived and/or modified CDS sequence (opt2) from neuraminidase__InfluenzaA__ABC50313
augaaccccaaccagaagaucaucaccaucggcuccgucucccucaccaucgccaccaucugcuuccucaugcagaucgccauccucgucaccaccgucacccuccacuucaagcagcacgagugcaacuccccccccaacaaccaggucaugcucugcgagcccaccaucaucgagcgcaacaucaccgagaucgucuaccucaccaacaccaccaucgagaaggagaucugccccaagcucgccgaguaccgcaacugguccaagccccagugcaacaucaccggcuucgcccccuucuccaaggacaacuccauccgccucuccgccggcggcgacaucugggucacccgcgagcccuacgucuccugcgaccccgacaagugcuaccaguucgcccucggccagggcaccacccucaacaacggccacuccaacgacaccguccacgaccgcacccccuaccgcacccuccucaugaacgagcucggcguccccuuccaccucggcacccgccaggucugcaucgccugguccuccuccuccugccacgacggcaaggccuggcuccacgucugcgucaccggcgacgacgagaacgccaccgccuccuucaucuacaacggccgccucgucgacuccaucggcuccugguccaagaagauccuccgcacccaggaguccgagugcgucugcaucaacggcaccugcaccgucgucaugaccgacggcuccgccuccggcaaggccgacaccaagauccucuucaucgaggagggcaagaucguccacaucuccacccucuccggcuccgcccagcacgucgaggagugcuccugcuacccccgcuaccccggcguccgcugcgucugccgcgacaacuggaagggcuccaaccgccccaucgucgacaucaacgucaaggacuacuccaucgucuccuccuacgucugcuccggccucgucggcgacaccccccgcaagaacgacuccuucuccuccucccacugccucgaccccaacaacgaggagggcggccacggcgucaagggcugggccuucgacgacggcaacgacgucuggaugggccgcaccaucuccgagaagcuccgcuccggcuacgagaccuucaaggucaucgagggcugguccaagcccaacuccaagcuccagaccaaccgccaggucaucgucgagcgcggcaaccgcuccggcuacuccggcaucuucuccgucgagggcaaguccugcaucaaccgcugcuucuacgucgagcucauccgcggccgcaaggaggagaccgaggucugguggaccuccaacuccaucgucgucuucugcggcaccuccggcaccuacggcaccggcuccuggcccgacggcgccgacaucaaccucaugcccaucuga

SEQ ID NO: 110723 - RNA, 1410 nt, Artificial Sequence; identical to SEQ ID NO: 110202
  derived and/or modified CDS sequence (opt2) from neuraminidase__InfluenzaA__ABC50324

SEQ ID NO: 110724 - RNA, 1410 nt, Artificial Sequence; identical to SEQ ID NO: 110190
  derived and/or modified CDS sequence (opt2) from neuraminidase__InfluenzaA__ABC50335

SEQ ID NO: 110725 - RNA, 1410 nt, Artificial Sequence
  derived and/or modified CDS sequence (opt2) from neuraminidase__InfluenzaA__ABC50346
augaaccccaaccagaagaucaucaccaucggcuccgucucccucaccaucgccaccaucugcuuccucaugcagaucgccauccucgucaccaccgucacccuccacuucaagcaguacgagugcaacuccccccccaacaaccaggucaugcucugcgagcccaccaucaucgagcgcaacaucaccgagaucgucuaccucaccaacaccaccaucgagaaggagaucugccccaagcucgccgaguaccgcaacugguccaagccccagugcaacaucaccggcuucgcccccuucuccaaggacaacuccauccgccucuccgccggcggcgacaucugggucacccgcgagcccuacgucuccugcgaccccgacaagugcuaccaguucgcccucggccagggcaccacccucaacaacggccacuccaacgacaccguccacgaccgcacccccuaccgcacccuccucaugaacgagcucggcguccccuuccaccucggcacccgccaggucugcaucgccugguccuccuccuccugccacgacggcaaggccuggcuccacgucugcgucaccggcgacgacgagaacgccaccgccuccuucaucuacaacggccgccucgucgacuccaucggcuccugguccaagaagauccuccgcacccaggaguccgagugcgucugcaucaacggcaccugcaccgucgucaugaccgacggcuccgccuccggcaaggccgacaccaagauccucuucaucgaggagggcaagaucguccacaucuccacccucuccggcuccgcccagcacgucgaggagugcuccugcuacccccgcuaccccggcguccgcugcgucugccgcgacaacuggaagggcuccaaccgccccaucaucgacaucaacgucaaggacuacuccaucgucuccuccuacgucugcuccggccucgucggcgacaccccccgcaagaacgacuccuucuccuccucccacugccucgaccccaacaacgaggagggcggccacggcgucaagggcugggccuucgacgacggcaacgacgucuggaugggccgcaccaucuccgagaagcuccgcuccggcuacgagaccuucaaggucaucgagggcugguccaagcccaacuccaagcuccagaccaaccgccaggucaucgucgagcgcggcaaccgcuccggcuacuccggcaucuucuccgucgagggcaaguccugcaucaaccgcugcuucuacgucgagcucauccgcggccgcaaggaggagaccgaggucugguggaccuccaacuccaucgucgucuucugcggcaccuccggcaccuacggcaccggcuccuggcccgacggcgccgacaucaaccucaugcccaucuga

SEQ ID NO: 110726 - RNA, 1410 nt, Artificial Sequence; identical to SEQ ID NO: 110202
  derived and/or modified CDS sequence (opt2) from neuraminidase__InfluenzaA__ABC50357

SEQ ID NO: 110727 - RNA, 1410 nt, Artificial Sequence; identical to SEQ ID NO: 110202
  derived and/or modified CDS sequence (opt2) from neuraminidase__InfluenzaA__ABC50368

SEQ ID NO: 110728 - RNA, 1410 nt, Artificial Sequence; identical to SEQ ID NO: 110202
  derived and/or modified CDS sequence (opt2) from neuraminidase__InfluenzaA__ABC50379

SEQ ID NO: 110729 - RNA, 1410 nt, Artificial Sequence; identical to SEQ ID NO: 110202
  derived and/or modified CDS sequence (opt2) from neuraminidase__InfluenzaA__ABC50390

SEQ ID NO: 110730 - RNA, 1410 nt, Artificial Sequence
  derived and/or modified CDS sequence (opt2) from neuraminidase__InfluenzaA__ABC50412
augaaccccaaccagaagaucaucaccaucggcuccgucucccucaccaucuccaccaucugcuucuucaugcagaucgccauccucaucaccaccgucacccuccacuucaagcaguacgaguucaacuccccccccaacaaccaggucaugcucugcgagcccaccaucaucgagcgcaacaucaccgagaucgucuaccucaccaacaccaccaucgagaaggagaucugccccaagcucgccgaguaccgcaacugguccaagccccagugcgacaucaccggcuucgcccccuucuccaaggacaacuccauccgccucuccgccggcggcgacaucugggucacccgcgagcccuacgucuccugcgaccccgacaagugcuaccaguucgcccucggccagggcaccacccucaacaacguccacuccaacgacaccguccacgaccgcacccccuaccgcacccuccucaugaacgagcucggcguccccuuccaccucggcaccaagcaggucugcaucgccugguccuccuccuccugccacgacggcaaggccuggcuccacgucugcgucaccggcgacgacaagaacgccaccgccuccuucaucuacaacggccgccucgucgacuccaucgucuccugguccaaggagauccuccgcacccaggaguccgagugcgucugcaucaacggcaccugcaccgucgucaugaccgacggcuccgccuccggcaaggccgacaccaagauccucuucaucgaggagggcaagaucguccacaccuccacccucuccggcuccgcccagcacgucgaggagugcuccugcuacccccgcuaccccggcguccgcugcgucugccgcgacaacuggaagggcuccaaccgccccaucgucgacaucaacaucaaggacuacuccaucgucuccuccuacgucugcuccggccucgucggcgacaccccccgcaagaacgacuccuccuccuccucccacugccucgaccccaacaacgaggagggcggccacggcgucaagggcugggccuucgacgacggcaacgacgucuggaugggccgcaccaucuccgagaagcuccgccucggcuacgagaccuucaaggucaucgagggcugguccaaccccaacuccaagcuccagaucaaccgccaggucaucgucgaccgcggcaaccgcuccggcuacuccggcaucuucuccgucgagggcaaguccugcaucaaccgcugcuucuacgucgagcucauccgcggccgcaaggaggagaccgagguccucuggaccuccaacuccaucgucgucuucugcggcaccuccggcaccuacggcaccggcuccuggcccgacggcgccgacaucaaccucaugcccaucuga

SEQ ID NO: 110731 - RNA, 1410 nt, Artificial Sequence; identical to SEQ ID NO: 110730
  derived and/or modified CDS sequence (opt2) from neuraminidase__InfluenzaA__ABC50423

SEQ ID NO: 110732 - RNA, 1410 nt, Artificial Sequence; identical to SEQ ID NO: 110315
  derived and/or modified CDS sequence (opt2) from neuraminidase__InfluenzaA__ABC54671

SEQ ID NO: 110733 - RNA, 1410 nt, Artificial Sequence; identical to SEQ ID NO: 110447
  derived and/or modified CDS sequence (opt2) from neuraminidase__InfluenzaA__ABC54682

SEQ ID NO: 110734 - RNA, 1410 nt, Artificial Sequence; identical to SEQ ID NO: 110627
  derived and/or modified CDS sequence (opt2) from neuraminidase__InfluenzaA__ABC67322

SEQ ID NO: 110735 - RNA, 1410 nt, Artificial Sequence; identical to SEQ ID NO: 110202
  derived and/or modified CDS sequence (opt2) from neuraminidase__InfluenzaA__ABC67474

SEQ ID NO: 110736 - RNA, 1410 nt, Artificial Sequence; identical to SEQ ID NO: 110725
  derived and/or modified CDS sequence (opt2) from neuraminidase__InfluenzaA__ABC67546

SEQ ID NO: 110737 - RNA, 1410 nt, Artificial Sequence
  derived and/or modified CDS sequence (opt2) from neuraminidase__InfluenzaA__ABC67557
augaaccccaaccagaagaucaucaccaucggcuccgucucccucaccaucuccaccaucugcuucuucaugcagaucgccauccucgucaccaccgucacccuccacuucaagcaguacgaguucaacuccccccccaacaaccaggucaugcucugcgagcccaccaucaucgagcgcaacaucaccgagaucgucuaccucaccaacaccaccaucgagaaggagaucugccccaagcucgccgaguaccgcaacugguccaagccccagugcgacaucaccggcuucgcccccuucuccaaggacaacuccauccgccucuccgccggcggcgacaucugggucacccgcgagcccuacgucuccugcgaccccgacaagugcuaccaguucgcccucggccagggcaccacccucaacaacguccacuccaacgacaccguccacgaccgcacccccuaccgcacccuccucaugaacgagcucggcguccccuuccaccucggcaccaagcaggucugcaucgccugguccuccuccuccugccacgacggcaaggccuggcuccacgucugcgucaccggcgacgacaagaacgccaccgccuccuucaucuacaacggccgccucgucgacuccaucgucuccugguccaagaagauccuccgcacccaggaguccgagugcgucugcaucaacggcaccugcaccgucgucaugaccgacggcuccgccuccggcaaggccgacaccaagauccucuucaucgaggagggcaagaucguccacaccuccacccucuccggcuccgcccagcacgucgaggagugcuccugcuacccccgcuaccccggcguccgcugcgucugccgcgacaacuggaagggcuccaaccgccccaucgucgacaucaacaucaaggacuacuccaucgucuccuccuacgucugcuccggccucgucggcgacaccccccgcaagaacgacuccuccuccuccucccacugccucgaccccaacaacgaggagggcggccacggcgucaagggcugggccuucgacgacggcaacgacgucuggaugggccgcaccaucuccgagaagcuccgcuccggcuacgagaccuucaaggucaucgagggcugguccaaccccaacuccaagcuccagaucaaccgccaggucaucgucgaccgcggcaaccgcuccggcuacuccggcaucuucuccgucgagggcaaguccugcaucaaccgcugcuucuacgucgagcucauccgcggccgcaaggaggagaccgagguccucuggaccuccaacuccaucgucgucuucugcggcaccuccggcaccuacggcaccggcuccuggcccgacggcgccgacaucaaccucaugcccaucuga

SEQ ID NO: 110738 - RNA, 1410 nt, Artificial Sequence
  derived and/or modified CDS sequence (opt2) from neuraminidase__InfluenzaA__ABC67568
augaaccccaaccagaagaucaucaccaucggcuccgucucccucaccaucgccaccaucugcuuccucaugcagaucgccauccucgucaccaccgucacccuccacuucaagcaguacgagugcgacucccccgccaacaaccaggucaugcccugcgagcccaucaucaucgagcgcaacaucaccgagaucgucuaccucaccaacaccaccaucgagaaggagaucugccccaagcucgucgaguaccgcaacugguccaagccccagugcaagaucaccggcuucgcccccuucuccaaggacaacuccauccgccucuccgccggcggcgacaucugggucacccgcgagcccuacgucuccugcgaccccggcaagugcuaccaguucgcccucggccagggcaccacccucgacaacaagcacuccaacgacaccauccacgaccgcaccccccaccgcacccuccucaugaacgagcucggcguccccuuccaccucggcacccgccaggucugcaucgccugguccuccuccuccugccacgacggcaaggccuggcuccacgucugcgucaccggcuacgacaagaacgccaccgccuccuucaucuacgacggccgccucgucgacuccaucggcuccuggucccagaacauccuccgcacccaggaguccgagugcgucugcaucaacggcaccugcaccgucgucaugaccgacggcuccgccuccggccgcgccgacaccaagauccucuucaucgaggagggcaagaucguccacaucuccccccucuccggcuccgcccagcacgucgaggagugcuccugcuacccccgcuaccccggcguccgcugcaucugccgcgacaacuggaagggcuccaaccgccccgucgucgacaucaacgucaaggacuacuccaucgacuccuccuacgucugcuccggccucgucggcgacaccccccgcaacaacgaccgcuccuccaacuccuacugccgcaaccccaacaacgagaagggcaaccacggcgucaagggcugggccuucgacgacggcaacgacgucuggaugggccgcaccaucuccgaggacucccgcuccggcuacgagaccuucaaggucaucggcggcugguccacccccaacuccaagcuccagaucaaccgccaggucaucgucgacuccgacaaccgcuccggcuacuccggcaucuucuccgucgagggcaaguccugcaucaaccgcugcuucuacgucgagcucauccgcggccgcgagcaggagacccgcgucugguggaccuccaacuccaucgucgucuucugcggcaccuccggcaccuacggcaccggcuccuggcccgacggcgccaacaucaaccucaugcccaucuga

SEQ ID NO: 110739 - RNA, 1410 nt, Artificial Sequence
  derived and/or modified CDS sequence (opt2) from neuraminidase__InfluenzaA__ABC67579
augaaccccaaccagaagaucaucaccaucggcuccgucucccucaccaucgccaccaucugcuuccucaugcagaucgccauccucgucaccaccgucacccuccacuucaagcaguacgagugcaacuccccccccaacaaccaggucaugcucugcgagcccaccaucaucgagcgcaacaucaccgagaucgucuaccucaccaacaccaccaucgagaaggagaucugccccaagcccgccgaguaccgcaacugguccaagccccagugcaagaucaccggcuucgcccccuucuccaaggacaacuccauccgccucuccgccggcggcgacaucugggucacccgcgagcccuacgucuccugcgaccccgacaagugcuaccaguucgcccucggccagggcaccacccucaacaacggccacuccaacgacaccguccacgaccgcacccccuaccgcacccuccucaugaacgagcucggcguccccuuccaccucggcaccaagcaggucugcaucgccugguccuccuccuccugccacgacggcaaggccuggcuccacgucugcgucaccggccacgacgagaacgccaccgccuccuucaucuacgacggccgccucgucgacuccaucggcuccugguccaagaagauccuccgcacccaggaguccgagugcgucugcaucaacggcaccugcaccgucgucaugaccgacggcuccgccuccggccgcgccgacaccaagauccucuucaucgaggagggcaagaucguccacaucucccagcucuccggcuccgcccagcacgucgaggagugcuccugcuacccccgcuaccccggcguccgcugcgucugccgcgacaacuggaagggcuccaaccgccccaucgucgacaucaacgucaaggaccacuccaucgucuccuccuacgucugcuccggccucgucggcgacaccccccgcaagaacgacuccuccuccuccucccacugccucaaccccaacaacgaggagggcggccacggcgucaagggcugggccuucgacgacggcaacgacgucuggaugggccgcaccaucuccgagaagcuccgcuccggcuacgagaccuucaaggucaucgagggcugguccaagcccaacuccaagcuccagaucaaccgccaggucaucgucgaccgcggcaaccgcuccggcuacuccggcaucuucuccgucgagggcaaguccugcaucaaccgcugcuucuacgucgagcucauccgcggccgcaagcaggagaccgaggucugguggaccuccaacuccaucgucgucuucugcggcaccuccggcaccuacggcaccggcuccuggcccgacggcgccgacaucaaccucaugcccaucuga

SEQ ID NO: 110740 - RNA, 1410 nt, Artificial Sequence; identical to SEQ ID NO: 110363
  derived and/or modified CDS sequence (opt2) from neuraminidase__InfluenzaA__ABC67590

SEQ ID NO: 110741 - RNA, 1410 nt, Artificial Sequence; identical to SEQ ID NO: 110363
  derived and/or modified CDS sequence (opt2) from neuraminidase__InfluenzaA__ABC67601

SEQ ID NO: 110742 - RNA, 1410 nt, Artificial Sequence; identical to SEQ ID NO: 110202
  derived and/or modified CDS sequence (opt2) from neuraminidase__InfluenzaA__ABC67612

SEQ ID NO: 110743 - RNA, 1410 nt, Artificial Sequence; identical to SEQ ID NO: 110202
  derived and/or modified CDS sequence (opt2) from neuraminidase__InfluenzaA__ABC67623

SEQ ID NO: 110744 - RNA, 1410 nt, Artificial Sequence
  derived and/or modified CDS sequence (opt2) from neuraminidase__InfluenzaA__ABC67634
augaaccccaaccagaagaucaucaccaucggcuccgucucccucaccaucgccaccaucugcuuccucaugcagaucgccauccucgucaccaccgucacccuccacuucaagcaguacgagugcaaccccccccccaacaaccaggucaugcucugcgagcccaccaucaucgagcgcaacaucaccgagaucgucuaccucaccaacaccaccaucgagaaggagaucugccccaagcucgccgaguaccgcaacugguccaagccccagugcaacaucaccggcuucgcccccuucuccaaggacaacuccauccgccucuccgccggcggcgacaucugggucacccgcgagcccuacgucuccugcgaccccgacaagugcuaccaguucgcccucggccagggcaccacccucaacaacggccacuccaacgacaccguccacgaccgcacccccuaccgcacccuccucaugaacgagcucggcguccccuuccaccucggcacccgccaggucugcaucgccugguccuccuccuccugccacgacggcaaggccuggcuccacgucugcgucaccggcgacgacgagaacgccaccgccuccuucaucuacaacggccgccucgucgacuccaucggcuccugguccaagaagauccuccgcacccaggaguccgagugcgucugcaucaacggcaccugcaccgucgucaugaccgacggcuccgccuccggcaaggccgacaccaagauccucuucaucgaggagggcaagaucguccacaucuccacccucuccggcuccgcccagcacgucgaggagugcuccugcuacccccgcuaccccggcguccgcugcgucugccgcgacaacuggaagggcuccaaccgccccaucgucgacaucaacgucaaggacuacuccaucgucuccuccuacgucugcuccggccucgucggcgacaccccccgcaagaacgacuccuucuccuccucccacugccucgaccccaacaacgaggagggcggccacggcgucaagggcugggccuucgacgacggcaacgacgucuggaugggccgcaccaucuccgagaagcuccgcuccggcuacgagaccuucaaggucaucgagggcugguccaagcccaacuccaagcuccagaccaaccgccaggucaucgucgagcgcggcaaccgcuccggcuacuccggcaucuucuccgucgagggcaaguccugcaucaaccgcugcuucuacgucgagcucauccgcggccgcaaggaggagaccgaggucugguggaccuccaacuccaucgucgucuucugcggcaccuccggcaccuacggcaccggcuccuggcccgacggcgccgacaucaaccucaugcccaucuga

SEQ ID NO: 110745 - RNA, 1410 nt, Artificial Sequence; identical to SEQ ID NO: 110202
  derived and/or modified CDS sequence (opt2) from neuraminidase__InfluenzaA__ABC67645

SEQ ID NO: 110746 - RNA, 1410 nt, Artificial Sequence; identical to SEQ ID NO: 110202
  derived and/or modified CDS sequence (opt2) from neuraminidase__InfluenzaA__ABC67656

SEQ ID NO: 110747 - RNA, 1410 nt, Artificial Sequence
  derived and/or modified CDS sequence (opt2) from neuraminidase__InfluenzaA__ABC67700
augaaccccaaccagaagaucaucaccaucggcuccgucucccucaccaucuccaccaucugcuucuucaugcagaucgccauccucaucaccaccgucacccuccacuucaagcaguacgaguucaacuccccccccaacaaccaggucaugcucugcgagcccaccaucaucgagcgcaacaucaccgagaucgucuaccucaccaacaccaccaucgagaaggagaucugccccaagcucgccgaguaccgcaacugguccaagccccagugcaacaucaccggcuucgcccccuucuccaaggacaacuccauccgccucuccgccggcggcgacaucugggucacccgcgagcccuacgucuccugcgaccccgacaagugcuaccaguucgcccucggccagggcaccacccucaacaacguccacuccaacgacaccguccacgaccgcacccccuaccgcacccuccucaugaacgagcucggcguccccuuccaccucggcaccaagcaggucugcaucgccugguccuccuccuccugccacgacggcaaggccuggcuccacgucugcgucaccggcgacgacaagaacgccaccgccuccuucaucuacaacggccgccucgucgacuccaucgucuccugguccaaggagauccuccgcacccaggaguccgagugcgucugcaucaacggcaccugcaccgucgucaugaccgacggcuccgccuccggcaaggccgacaccaagauccucuucaucgaggagggcaagaucguccacaccuccacccucuccggcuccgcccagcacgucgaggagugcuccugcuacccccgcuaccccggcguccgcugcgucugccgcgacaacuggaagggcuccaaccgccccaucgucgacaucaacaucaaggacuacuccaucgucuccuccuacgucugcuccggccucgucggcgacaccccccgcaagaacgacuccuccuccuccucccacugccucgaccccaacaacgaggagggcggccacggcgucaagggcugggccuucgacgacggcaacgacgucuggaugggccgcaccaucuccgagaagcuccgcuccggcuacgagaccuucaaggucaucgagggcugguccaacuccaacuccaagcuccagaucaaccgccaggucaucgucgaccgcggcaaccgcuccggcuacuccggcaucuucuccgucgagggcaaguccugcaucaaccgcugcuucuacgucgagcucauccgcggccgcaaggaggagaccgagguccucuggaccuccaacuccaucgucgucuucugcggcaccuccggcaccuacggcaccggcuccuggcccgacggcgccgacaucaaccucaugcccaucuga

SEQ ID NO: 110748 - RNA, 1410 nt, Artificial Sequence
  derived and/or modified CDS sequence (opt2) from neuraminidase__InfluenzaA__ABC67711
augaaccccaaccagaagaucaucaccaucggcuccgucucccucaccaucuccaccaucugcuucuucaugcagaucgccauccucaucaccaccgucacccuccacuucaagcaguacgaguucaacuccccccccaacaaccaggucaugcucugcgagcccaccaucaucgagcgcaacaucaccgagaucgucuaccucaccaacaccaccaucgagaaggagaucugccccaagcucgccgaguaccgcaacugguccaagccccagugcaacaucaccggcuucgcccccuucuccaaggacaacuccauccgccucuccgccggcggcgacaucugggucacccgcgagcccuacgucuccugcgaccccgacaagugcuaccaguucgcccucggccagggcaccacccucaacaacguccacuccaacgacaccguccacgaccgcacccccuaccgcacccuccucaugaacgagcucggcguccccuuccaccucggcaccaagcaggucugcaucgccugguccuccuccuccugccacgacggcaaggccuggcuccacgucugcgucaccggcgacgacaagaacgccaccgccuccuucaucuacaacggccgccucgucgacuccaucgucuccugguccaaggagauccuccgcacccaggaguccgagugcgucugcaucaacggcaccugcaccgucgucaugaccgacggcuccgccuccggcaaggccgacaccaagauccucuucaucgaggagggcaagaucguccacaccuccacccucuccggcuccgcccagcacgucgaggagugcuccugcuacccccgcuaccccggcguccgcugcgucugccgcgacaacuggaagggcuccaaccgccccaucgucgacaucaacaucaaggacuacuccaucgucuccuccuacgucugcuccggccucgucggcgacaccccccgcaagaacgacuccuccuccuccucccacugccucgaccccaacaacgaggagggcggccacggcgucaagggcugggccuucgacgacggcaacgacgucuggaugggccgcaccaucuccgagaagcuccgcuccggcuacgagaccuucaaggucaucgagggcugguccaaccccaacuccaagcuccagaucaaccgccaggucaucgucgaccgcggcaaccgcuccggcuacuccggcaucuucuccgucgagggcaaguccugcaucaaccgcugcuucuacgucgagcucauccgcggccgcaaggaggagaccgagguccucuggaccuccaacuccaucgucgucuucugcggcaccuccggcaccuacggcaccggcuccuggcccgacggcgccgacaucaaccucaugcccaucuga

SEQ ID NO: 110749 - RNA, 1410 nt, Artificial Sequence
  derived and/or modified CDS sequence (opt2) from neuraminidase__InfluenzaA__ABC67736
augaaccccaaccagaagaucaucaccaucggcuccgucucccucaccaucuccaccaucugcuucuucaugcagaucgccauccucaucaccaccgucacccuccacuucaagcaguacgaguucaacuccccccccaacaaccaggucaugcucugcgagcccaccaucaucgagcgcaacaucaccgagaucgucuaccucaccaacaccaccaucgagaaggagaucugccccaagcucgccgaguaccgcaacugguccaagccccagugcaacaucaccggcuucgcccccuucuccaaggacaacuccauccgccucuccgccggcggcgacaucugggucacccgcgagcccuacgucuccugcgaccccgacaagugcuaccaguucgcccucggccagggcaccacccucaacaacguccacuccaacgacaccguccacgaccgcacccccuaccgcacccuccucaugaacgagcucggcguccccuuccaccucggcaccaagcaggucugcgucgccugguccuccuccuccugccacgacggcaaggccuggcuccacgucugcgucaccggcgacgacaagaacgccaccgccuccuucaucuacaacggccgccucgucgacuccaucgucuccugguccaaggagauccuccgcacccaggaguccgagugcgucugcaucaacggcaccugcaccgucgucaugaccgacggcuccgccuccggcaaggccgacaccaagauccucuucaucgaggagggcaagaucguccacaccuccacccucuccggcuccgcccagcacgucgaggagugcuccugcuacccccgcuaccccggcguccgcugcgucugccgcgacaacuggaagggcuccaaccgccccaucgucgacaucaacaucaaggacuacuccaucgucuccuccuacgucugcuccggccucgucggcgacaccccccgcaagaacgacuccuccuccuccucccacugccucgaccccaacaacgaggagggcggccacggcgucaagggcugggccuucgacgacggcaacgacgucuggaugggccgcaccaucuccgagaagcuccgcuccggcuacgagaccuucaaggucaucgagggcugguccaaccccaacuccaagcuccagaucaaccgccaggucaucgucgaccgcggcaaccgcuccggcuacuccggcaucuucuccgucgagggcaaguccugcaucaaccgcugcuucuacgucgagcucauccgcggccgcaaggaggagaccgagguccucuggaccuccaacuccaucgucgucuucugcggcaccuccggcaccuacggcaccggcuccuggcccgacggcgccgacaucaaccucaugcccaucuga

SEQ ID NO: 110750 - RNA, 1410 nt, Artificial Sequence
  derived and/or modified CDS sequence (opt2) from neuraminidase__InfluenzaA__ABC67809
augaaccccaaccagaagaucaucaccaucggcuccgucucccucaccaucuccaccaucugcuucuucaugcagaucgccauccucaucaccaccgucacccuccacuucaagcaguacgaguucaacuccccccccaacaaccaggucaugcucugcgagcccaccaucaucgagcgcaacaucaccgagaucgucuaccucaccaacaccaccaucgagaaggagaucugccccaagcucgccgaguaccgcaacugguccaagccccagugcgacaucaccggcuucgcccccuucuccaaggacaacuccauccgccucuccgccggcggcgacaucugggucacccgcgagcccuacgucuccugcgaccccgacaagugcuaccaguucgcccucggccagggcaccacccucaacaacguccacuccaacgacaccguccacgaccgcacccccuaccgcacccuccucaugaacgagcucggcguccccuuccaccucggcaccaagcaggucugcaucgccugguccuccuccuccugccacgacggcaaggccuggcuccacgucugcgucaccggcgacgacaagaacgccaccgccuccuucaucuacaacggccgccucgucgacuccaucgucuccugguccaagaagauccuccgcacccaggaguccgagugcgucugcaucaacggcaccugcaccgucgucaugaccgacggcuccgccuccggcaaggccgacaccaagauccucuucaucgaggagggcaagaucguccacaccuccacccucuccggcuccgcccagcacgucgaggagugcuccugcuacccccgcuaccccggcguccgcugcgucugccgcgacaacuggaagggcuccaaccgccccaucgucgacaucaacaucaaggacuacuccaucgucuccuccuacgucugcuccggccucgucggcgacaccccccgcaagaacgacuccuccuccuccucccacugccucgaccccaacaacgaggagggcggccacggcgucaagggcugggccuucgacgacggcaacgacgucuggaugggccgcaccaucuccgagaagcuccgcuccggcuacgagaccuucaaggucaucgagggcugguccaaccccaacuccaagcuccagaucaaccgccaggucaucgucgaccgcggcaaccgcuccggcuacuccggcaucuucuccgucgagggcaaguccugcaucaaccgcugcuucuacgucgagcucauccgcggccgcaaggaggagaccgagguccucuggaccuccaacuccaucgucgucuucugcggcaccuccggcaccuacggcaccggcuccuggcccgacggcgccgacaucaaccucaugcccaucuga

SEQ ID NO: 110751 - RNA, 1410 nt, Artificial Sequence; identical to SEQ ID NO: 110627
  derived and/or modified CDS sequence (opt2) from neuraminidase__InfluenzaA__ABC67820

SEQ ID NO: 110752 - RNA, 1410 nt, Artificial Sequence; identical to SEQ ID NO: 110606
  derived and/or modified CDS sequence (opt2) from neuraminidase__InfluenzaA__ABC67842

SEQ ID NO: 110753 - RNA, 1410 nt, Artificial Sequence; identical to SEQ ID NO: 110202
  derived and/or modified CDS sequence (opt2) from neuraminidase__InfluenzaA__ABC67853

SEQ ID NO: 110754 - RNA, 1410 nt, Artificial Sequence; identical to SEQ ID NO: 110606
  derived and/or modified CDS sequence (opt2) from neuraminidase__InfluenzaA__ABC67864

SEQ ID NO: 110755 - RNA, 1410 nt, Artificial Sequence; identical to SEQ ID NO: 110725
  derived and/or modified CDS sequence (opt2) from neuraminidase__InfluenzaA__ABC67886

SEQ ID NO: 110756 - RNA, 1410 nt, Artificial Sequence; identical to SEQ ID NO: 110202
  derived and/or modified CDS sequence (opt2) from neuraminidase__InfluenzaA__ABC67897

SEQ ID NO: 110757 - RNA, 1410 nt, Artificial Sequence; identical to SEQ ID NO: 110202
  derived and/or modified CDS sequence (opt2) from neuraminidase__InfluenzaA__ABC67970

SEQ ID NO: 110758 - RNA, 1410 nt, Artificial Sequence
  derived and/or modified CDS sequence (opt2) from neuraminidase__InfluenzaA__ABC67981
augaaccccaaccagaagaucaucaccaucggcuccgucucccucaccaucgccaccaucugcuuccucaugcagaucgccauccucgucaccaccgucacccuccacuucaagcaguacgagugcaacuccccccccaacaaccaggucaugcucugcgagcccaccaucaucgagcgcaacaucaccgagaucgucuaccucaccaacaccaccaucgagaaggagaucugccccaagcucgccgaguaccgcaacugguccaagccccagugcaacaucaccggcuucgcccccuucuccaaggacaacuccauccgccucuccgccggcggcgacaucugggucacccgcgagcccuacgucuccugcgaccccgacaagugcuaccaguucgcccucggccagggcaccacccucaacaacggccacuccaacgacaccguccacgaccgcacccccuaccgcacccuccucaugaacgagcucggcguccccuuccaccucggcacccgccaggucugcaucgccugguccuccuccuccugccacgacggcaaggccuggcuccacgucugcgucaccggcgacgacgagaacgccaccgccuccuucaucuacaacggccgccucgucgacuccaucggcuccugguccaagaagauccuccgcacccaggaguccgagugcgucugcaucaacggcaccugcaccgucgucaugaccgacggcuccgccuccggcaaggccgacaccaagauccucuucaucgaggagggcaagaucguccacaucuccacccucuccggcuccgcccagcacgucgaggagugcuccugcuacccccaguaccccggcguccgcugcgucugccgcgacaacuggaagggcuccaaccgccccaucgucgacaucaacgucaaggacuacuccaucgucuccuccuacgucugcuccggccucgucggcgacaccccccgcaagaacgacuccuucuccuccucccacugccucgaccccaacaacgaggagggcggccacggcgucaagggcugggccuucgacgacggcaacgacgucuggaugggccgcaccaucuccgagaagcuccgcuccggcuacgagaccuucaaggucaucgagggcugguccaagcccaacuccaagcuccagaccaaccgccaggucaucgucgagcgcggcaaccgcuccggcuacuccggcaucuucuccgucgagggcaaguccugcaucaaccgcugcuucuacgucgagcucauccgcggccgcaaggaggagaccgaggucugguggaccuccaacuccaucgucgucuucugcggcaccuccggcaccuacggcaccggcuccuggcccgacggcgccgacaucaaccucaugcccaucuga

SEQ ID NO: 110759 - RNA, 1410 nt, Artificial Sequence
  derived and/or modified CDS sequence (opt2) from neuraminidase__InfluenzaA__ABC67992
augaaccccaaccagaagaucaucaccaucggcuccgucucccucaccaucgccaccaucugcuuccucaugcagaucgccauccucgucaccaccgucacccuccacuucaagcaguacgagugcaacuccccccccaacaaccaggucaugcucugcgagcccaccaucaucgagcgcaacaucaccgagaucgucuaccucaccaacaccaccaucgagaaggagaucugccccaagcucgccgaguaccgcaacugguccaagccccagugcaacaucaccggcuucgcccccuucuccaaggacaacuccauccgccucuccgccggcggcgacaucugggucacccgcgagcccuacgucuccugcgaccccgacaagugcuaccaguucgcccucggccagggcaccacccucaacaacggccacuccaacgacaccguccacgaccgcacccccuaccgcacccuccucaugaacgagcucggcguccccuuccaccucggcacccgccaggucugcaucgccugguccuccuccuccugccacgacggcaaggccuggcuccacgucugcgucaccggcgacgacgagaacgccaccgccuccuucaucuacaacggccgccucgucgacuccaucggcuccugguccaagaagauccuccgcacccaggaguccgagugcgucugcaucaacggcaccugcaccgucgucaugaccgacggcuccgccuccggcaaggccgacaccaagauccucuucaucgaggagggcaagaucguccacaucuccacccucuccggcuccgcccagcacgucgaggagugcuccugcuacccccgcuaccccggcguccgcugcgucugccgcgacaacuggaagggcuccaaccgccccaucgucgacaucaacgucaaggacuacuccaucgucuccuccuacgucugcuccggccucgucggcgacaccccccgcaagaacaacuccuucuccuccucccacugccucgaccccaacaacgaggagggcggccacggcgucaagggcugggccuucgacgacggcaacgacgucuggaugggccgcaccaucuccgagaagcuccgcuccggcuacgagaccuucaaggucaucgagggcugguccaagcccaacuccaagcuccagaccaaccgccaggucaucgucgagcgcggcaaccgcuccggcuacuccggcaucuucuccgucgagggcaaguccugcaucaaccgcugcuucuacgucgagcucauccgcggccgcaaggaggagaucgaggucugguggaccuccaacuccaucgucgucuucugcggcaccuccggcaccuacggcaccggcuccuggcccgacggcgccgacaucaaccucaugcccaucuga

SEQ ID NO: 110760 - RNA, 1410 nt, Artificial Sequence; identical to SEQ ID NO: 110725
  derived and/or modified CDS sequence (opt2) from neuraminidase__InfluenzaA__ABC68003

SEQ ID NO: 110761 - RNA, 1410 nt, Artificial Sequence
  derived and/or modified CDS sequence (opt2) from neuraminidase__InfluenzaA__ABC68052
augaaccccaaccagaagaucaucaccaucggcuccgucucccucaccaucgccaccaucugcuuccucaugcagaucgccauccucgucaccaccgucacccuccacuucaagcaguacgagugcaacuccccccccaacaaccaggucaugcucugcgagcccaccaucaucgagcgcaacaucaccgagaucgucuaccucaccaacaccaccaucgagaaggagaucugccccaagcucgccgaguaccgcaacugguccaagccccagugcaacaucaccggcuucgcccccuucuccaaggacaacuccauccgccucuccgccggcggcgacaucugggucacccgcgagcccuacgucuccugcgaccccgacaagugcuaccaguucgcccucggccagggcaccacccucaacaacggccacuccaacgacaccguccacgaccgcacccccuaccgcacccuccucaugaacgagcucggcguccccuuccaccucggcacccgccaggucugcaucgccugguccuccuccuccugccacgacggcaaggccuggcuccacgucugcgucaccggcgacgacgagaacgccaccgccuccuucaucuacaacggccgccucgucgacuccaucggcuccugguccaagaagauccuccgcacccaggaguccgagugcgucugcaucaacggcaccugcaccgucgucaugaucgacggcuccgccuccggcaaggccgacaccaagauccucuucaucgaggagggcaagaucguccacaucuccacccucuccggcuccgcccagcacgucgaggagugcuccugcuacccccgcuaccccggcguccgcugcgucugccgcgacaacuggaagggcuccaaccgccccaucgucgacaucaacgucaaggacuacuccaucgucuccuccuacgucugcuccggccucgucggcgacaccccccgcaagaacgacuccuucuccuccucccacugccucgaccccaacaacgaggagggcggccacggcgucaagggcugggccuucgacgacggcaacgacgucuggaugggccgcaccaucuccgagaagcuccgcuccggcuacgagaccuucaaggucaucgagggcugguccaagcccaacuccaagcuccagaccaaccgccaggucaucgucgagcgcggcaaccgcuccggcuacuccggcaucuucuccgucgagggcaaguccugcaucaaccgcugcuucuacgucgagcucauccgcggccgcaaggaggagaccgaggucugguggaccuccaacuccaucgucgucuucugcggcaccuccggcaccuacggcaccggcuccuggcccgacggcgccgacaucaaccucaugcccaucuga

SEQ ID NO: 110762 - RNA, 1410 nt, Artificial Sequence; identical to SEQ ID NO: 110202
  derived and/or modified CDS sequence (opt2) from neuraminidase__InfluenzaA__ABC68063

SEQ ID NO: 110763 - RNA, 1410 nt, Artificial Sequence; identical to SEQ ID NO: 110202
  derived and/or modified CDS sequence (opt2) from neuraminidase__InfluenzaA__ABC68074

SEQ ID NO: 110764 - RNA, 1410 nt, Artificial Sequence; identical to SEQ ID NO: 110748
  derived and/or modified CDS sequence (opt2) from neuraminidase__InfluenzaA__ABC68085

SEQ ID NO: 110765 - RNA, 1410 nt, Artificial Sequence
  derived and/or modified CDS sequence (opt2) from neuraminidase__InfluenzaA__ABC68096
augaaccccaaccagaagaucaucaccaucggcuccgucucccucaccaucgccaccaucugcuuccucaugcagaucgccauccucgucaccaccgucacccuccacuucaagcaguacgagugcaacuccccccccaacaaccaggucaugcucugcgagcccaccaucaucgagcgcaacaucaccgagaucgucuaccucaccaacaccaccaucgagaaggagaucugccccaagcucgccgaguaccgcaacugguccaagccccagugcaacaucaccggcuucgcccccuucuccaaggacaacuccauccgccucuccgccggcggcgacaucugggucacccgcgagcccuacgucuccugcgaccccgacaagugcuaccaguucgcccucggccagggcaccacccucaacaacggccacuccaacgacaccguccacgaccgcacccccuaccgcacccuccucaugaacgagcucggcguccccuuccaccucggcacccgccaggucugcaucgccugguccuccuccuccugccacgacggcaaggccuggcuccacgucugcgucaccggcgacgacgagaacgccaccgccuccuucaucuacaacggccgccucgucgacuccaucggcuccugguccaagaagauccuccgcacccaggaguccgagugcgucugcaucaacggcaccugcaccgucgucaugaccgacggcuccgccuccggcaaggccgacaccaagauccucuucaucgaggagggcaagaucguccacaucuccacccucuccggcuccgcccagcacgucgaggagugcuccugcuacccccgcuaccccggcguccgcugcgucugccgcgacaacuggaagggcuccaaccgccccaucgucgacaucaacgucaaggacuacuccaucgucuccuccuacgucugcuccggccucgucggcgacaccccccgcaagaacgacuccuucuccuccucccacugccucgaccccaacaacgaggagggcggccacggcgucaagggcugggccuucgacgacggcaacgacgucuggaugggccgcaccaucuccgagaagcuccgcuccggcuacgagaccuucaaggucaucgagggcugguccaagcccaacuccaagcuccacaucaaccgccaggucaucgucgagcgcggcaaccgcuccggcuacuccggcaucuucuccgucgagggcaaguccugcaucaaccgcugcuucuacgucgagcucauccgcggccgcaaggaggagaccgaggucugguggaccuccaacuccaucgucgucuucugcggcaccuccggcaccuacggcaccggcuccuggcccgacggcgccgacaucaaccucaugcccaucuga

SEQ ID NO: 110766 - RNA, 1410 nt, Artificial Sequence
  derived and/or modified CDS sequence (opt2) from neuraminidase__InfluenzaA__ABC68225
augaaccccaaccagaagaucaucaccaucggcuccgucucccucaccaucgccaccaucugcuuccucaugcagaucgccauccucgucaccaccgucacccuccacuucaagcaguacgagugcaacuccccccccaacaaccaggucaugcucugcgagcccaccaucaucgagcgcaacaucaccgagaucgucuaccucaccaacaccaccaucgagaaggagaucugccccaagcucgccgaguaccgcaacugguccaagccccagugcaacaucaccggcuucgcccccuucuccaaggacaacuccauccgccucuccgccggcggcgacaucugggucacccgcgagcccuacgucuccugcgaccccgacaagugcuaccaguucgcccucggccagggcaccacccucaacaacggccacuccaacgacaccguccacgaccgcacccccuaccgcacccuccucaugaacgagcucggcguccccuuccaccucggcaccaagcaggucugcaucgccugguccuccuccuccugccacgacggcaaggccuggcuccacgucugcgucaccggcgacgacgagaacgccaccgccuccuucaucuacaacggccgccucgucgacuccaucggcuccugguccaagaagauccuccgcacccaggaguccgagugcgucugcaucaacggcaccugcaccgucgucaugaccgacggcuccgccuccggcaaggccgacaccaagauccucuucaucgaggagggcaagaucguccacaccuccucccucuccggcuccgcccagcacgucgaggagugcuccugcuacccccgcuaccccggcguccgcugcgucugccgcgacaacuggaagggcuccaaccgccccaucgucgacaucaacgucaaggacuacuccaucgucuccuccuacgucugcuccggccucgucggcgacaccccccgcaagaacgacuccuccuccuccucccacugccucgaccccaacaacgaggagggcggccacggcgucaagggcugggccuucgacgacggcaacgacgucuggaugggccgcaccaucuccgagaagcuccgcuccggcuacgagaccuucaaggucaucgagggcugguccaagcccaacuccaagcuccagaucaaccgccaggucaucgucgaccgcggcaaccgcuccggcuacuccggcaucuucuccgucgaguccaaguccugcaucaaccgcugcuucuacgucgagcucauccgcggccgcaagcaggagaccgagguccucuggaccuccaacuccaucgucgucuucugcggcaccuccggcaccuacggcaccggcuccuggcccgacggcgccgacaucaaccucaugcccaucuga

SEQ ID NO: 110767 - RNA, 1410 nt, Artificial Sequence; identical to SEQ ID NO: 110555
  derived and/or modified CDS sequence (opt2) from neuraminidase__InfluenzaA__ABC68236

SEQ ID NO: 110768 - RNA, 1350 nt, Artificial Sequence
  derived and/or modified CDS sequence (opt2) from neuraminidase__InfluenzaA__ABC72646
augaaccccaacaagaagaucaucaccaucggcuccaucugcauggucaccggcauggucucccucaugcuccagaucggcaaccucaucuccaucugggucucccacuccauccacaccggcaaccagcagaaggccgagcccaucuccaacaccaacuuccucaccgagaaggccgucgccuccgucaagcucgccggcaacuccucccucugccccaucaacggcugggccgucuacuccaaggacaacuccauccgcaucggcuccaagggcgacgucuucgucauccgcgagcccuucaucuccugcucccaccucgagugccgcaccuucuuccucacccagggcucccuccucaacgacaagcacuccaacggcaccgucaaggaccgcuccccccaccgcacccucauguccugccccgucggcgaggcccccucccccuacaacucccgcuucgaguccgucgccugguccgccuccgccugccacgacggcaccuccuggcucaccaucggcaucuccggccccgacuccggcgccgucgccguccucaaguacaacggcaucaucaccgacaccaucaaguccuggcgcaacaacauccuccgcacccaggaguccgagugcgccugcgucaacggcuccugcuucaccgucaugaccgacggccccuccaacggccaggccucccacaagaucuucaagauggacaagggcaaggucgucaaguccgucgagcucgacgcccccaacuaccacuacgaggagugcuccugcuaccccgacgccggcgagaucaccugcgucugccgcgacaacuggcacggcuccaaccgccccugggucuccuucaaccagaaccucgaguaccagaucggcuacaucugcuccggcgucuucggcgacaccccccgccccaacgacggcaccggcuccugcggccccgucuccuccaacggcaccuacggcgucaagggcuucuccuucaaguacggcaacggcgucuggaucggccgcaccaaguccaccaacucccgcuccggcuucgagaugaucugggaccccaacggcuggaccgagaccgacuccuccuucuccgucaagcaggacaucgucgccaucaccgacugguccggcuacuccggcuccuucguccagcaccccgagcucaccggccucgacugcauccgccccugcuucugggucgagcucauccgcggccgccccaaggaguccaccaucuggaccuccggcuccuccaucuccuucugcggcgucaacuccgacaccgucggcugguccuggcccgacggcgccgagcuccccuucaccaucgacaaguga

SEQ ID NO: 110769 - RNA, 1410 nt, Artificial Sequence; identical to SEQ ID NO: 110131
  derived and/or modified CDS sequence (opt2) from neuraminidase__InfluenzaA__ABC84392

SEQ ID NO: 110770 - RNA, 1410 nt, Artificial Sequence; identical to SEQ ID NO: 110545
  derived and/or modified CDS sequence (opt2) from neuraminidase__InfluenzaA__ABC84403

SEQ ID NO: 110771 - RNA, 1410 nt, Artificial Sequence; identical to SEQ ID NO: 110550
  derived and/or modified CDS sequence (opt2) from neuraminidase__InfluenzaA__ABC84414

SEQ ID NO: 110772 - RNA, 1410 nt, Artificial Sequence
  derived and/or modified CDS sequence (opt2) from neuraminidase__InfluenzaA__ABC84425
augaaccccaaccagaagaucaucaccaucggcuccgucucccucaccaucuccaccaucugcuucuucaugcagaucgccauccucaucaccaccgucacccuccacuucaagcaguacgaguucaacuccccccccaacaaccaggucaugcucugcgagcccaccaucaucgagcgcaacaucaccgagaucgucuaccucaccaacaccaccaucgagaaggagaucugccccaagcucgccgaguaccgcaacugguccaagccccagugcgacaucaccggcuucgcccccuucuccaaggacaacuccauccgccucuccgccggcggcgacaucugggucacccgcgagcccuacgucuccugcgaccccgacaagugcuaccaguucgcccucggccagggcaccacccucaacaacguccacuccaacgacaccguccacgaccgcacccccuaccgcacccuccucaugaacgagcucggcguccccuuccaccucggcaccaagcaggucugcaucgccugguccuccuccuccugccacgacggcaaggccuggcuccacgucugcgucaccggcgacgacaagaacgccaccgccuccuucaucuacaacggccgccucgucgacuccaucgucuccugguccaaggagauccuccgcacccaggaguccgagugcgucugcaucaacggcaccugcaccgucgucaugaccgacggcuccgccuccggcaaggccgacaccaagauccucuucaucgaggagggcaagaucguccacaccuccacccucuccggcuccgcccagcacgucgaggagugcuccugcuacccccgcuaccccggcguccgcugcgucugccgcgacaacuggaagggcuccaaccgccccaucgucgacaucaacaucaaggacuacuccaucgucuccuccuacgucugcuccggccucgucggcgacaccccccgcaagaacgacuccuccuccuccucccacugccucgaccccaacaacgaggagggcggccacggcgucaagggcugggccuucgacgacggcaacgacgucuggaugggccgcaccaucuccgagaagcuccgcuccggcuacgagaccuucaaggucaucgagggcugguccaaccccaacuccaagcuccagaucaaccgccaggucaucgucgaccgcggcaaccgcuccggcuacuccggcaucuucuccgucgagggcaagaacugcaucaaccgcugcuucuacgucgagcucauccgcggccgcaaggaggagaccgagguccucuggaccuccaacuccaucgucgucuucugcggcaccuccggcaccuacggcaccggcuccuggcccgacggcgccgacaucaaccucaugcccaucuga

SEQ ID NO: 110773 - RNA, 1410 nt, Artificial Sequence; identical to SEQ ID NO: 110363
  derived and/or modified CDS sequence (opt2) from neuraminidase__InfluenzaA__ABC84436

SEQ ID NO: 110774 - RNA, 1410 nt, Artificial Sequence
  derived and/or modified CDS sequence (opt2) from neuraminidase__InfluenzaA__ABC84447
augaaccccaaccagaagaucaucaccaucggcuccgucucccucaccaucgccaccaucugcuuccucaugcagaucgccauccucgucaccaccgucacccuccacuucaagcaguacgagugcaacuccccccccaacaaccaggucaugcucugcgagcccaccaucaucgagcgcaacaucaccgagaucguccaccucaccaacaccaccaucgagaaggagaucugccccaagcucgccgaguaccgcaacugguccaagccccagugcaacaucaccggcuucgcccccuucuccaaggacaacuccauccgccucuccgccggcggcgacaucugggucacccgcgagcccuacgucuccugcgaccccgacaagugcuaccaguucgcccucggccagggcaccacccucaacaacggccacuccaacgacaccguccacgaccgcacccccuaccgcacccuccucaugaacgagcucggcguccccuuccaccucggcacccgccaggucugcaucgccugguccuccuccuccugccacgacggcaaggccuggcuccacgucugcgucaccggcgacgacgagaacgccaccgccuccuucaucuacaacggccgccucgucgacuccaucggcuccugguccaagaagauccuccgcacccaggaguccgagugcgucugcaucaacggcaccugcaccgucgucaugaccgacggcuccgccuccggcaaggccgacaccaagauccucuucaucgaggagggcaagaucguccacaucuccacccucuccggcuccgcccagcacgucgaggagugcuccugcuacccccgcuaccccggcguccgcugcgucugccgcgacaacuggaagggcuccaaccgccccaucgucgacaucaacgucaaggacuacuccaucgucuccuccuacgucugcuccggccucgucggcgacaccccccgcaagaacgacuccuucuccuccucccacugccucgaccccaacaacgaggagggcggccacggcgucaagggcugggccuucgacgacggcaacgacgucuggaugggccgcaccaucuccgagaagcuccgcuccggcuacgagaccuucaaggucaucgagggcugguccaagcccaacuccaagcuccagaccaaccgccaggucaucgucgagcgcggcaaccgcuccggcuacuccggcaucuucuccgucgagggcaaguccugcaucaaccgcugcuucuacgucgagcucauccgcggccgcaaggaggagaccgaggucugguggaccuccaacuccaucgucgucuucugcggcaccuccggcaccuacggcaccggcuccuggcccgacggcgccgacaucaaccucaugcccaucuga

SEQ ID NO: 110775 - RNA, 1410 nt, Artificial Sequence; identical to SEQ ID NO: 110750
  derived and/or modified CDS sequence (opt2) from neuraminidase__InfluenzaA__ABC84501

SEQ ID NO: 110776 - RNA, 1410 nt, Artificial Sequence; identical to SEQ ID NO: 110750
  derived and/or modified CDS sequence (opt2) from neuraminidase__InfluenzaA__ABC84512

SEQ ID NO: 110777 - RNA, 1410 nt, Artificial Sequence
  derived and/or modified CDS sequence (opt2) from neuraminidase__InfluenzaA__ABC84523
augaaccccaaccagaagaucaucaccaucggcuccgucucccucaccaucuccaccaucugcuucuucaugcagaucgccauccucaucaccaccgucacccuccacuucaagcaguacgaguucaacuccccccccaacaaccaggucaugcucugcgagcccaccaucaucgagcgcaacaucaccgagaucgucuaccucaccaacaccaccaucgagaaggagaucugccccaagcucgccgaguaccgcaacugguccaagccccagugcaacaucaccggcuucgcccccuucuccaaggacaacuccauccgccucuccgccggcggcgacaucugggucacccgcgagcccuacgucuccugcgaccccgacaagugcuaccaguucgcccucggccagggcaccacccucaacaacguccacuccaacgacaccguccacgaccgcacccccuaccgcacccuccucaugaacgagcucggcguccccuuccaccucggcaccaagcaggucugcaucgccugguccuccuccuccugccacgacggcaaggccuggcuccacgucugcgucaccggcgacgacaagaacgccaccgccuccuucaucuacaacggccgccucgccgacuccaucgucuccugguccaaggagauccuccgcacccaggaguccgagugcgucugcaucaacggcaccugcaccgucgucaugaccgacggcuccgccuccggcaaggccgacaccaagauccucuucaucgaggagggcaagaucguccacaccuccacccucuccggcuccgcccagcacgucgaggagugcuccugcuacccccgcuaccccggcguccgcugcgucugccgcgacaacuggaagggcuccaaccgccccaucgucgacaucaacaucaaggacuacuccaucgucuccuccuacgucugcuccggccucgucggcgacaccccccgcaagaacgacuccuccuccuccucccacugccucgaccccaacaacgaggagggcggccacggcgucaagggcugggccuucgacgacggcaacgacgucuggaugggccgcaccaucuccgagaagcuccgcuccggcuacgagaccuucaaggucaucgagggcugguccaaccccaacuccaagcuccagaucaaccgccaggucaucgucgaccgcggcaaccgcuccggcuacuccggcaucuucuccgucgagggcaaguccugcaucaaccgcugcuucuacgucgagcucauccgcggccgcaaggaggagaccgagguccucuggaccuccaacuccaucgucgucuucugcggcaccuccggcaccuacggcaccggcuccuggcccgacggcgccgacaucaaccucaugcccaucuga

SEQ ID NO: 110778 - RNA, 1410 nt, Artificial Sequence
  derived and/or modified CDS sequence (opt2) from neuraminidase__InfluenzaA__ABC84545
augaaccccaaccagaagaucaucaccaucggcuccgucucccucaccaucgccaccaucugcuuccucaugcagaucgccauccucgucaccaccgucacccuccacuucaagcaguacgagugcgacucccccgccaacaaccaggucaugcccugcgagcccaucaucaucgagcgcaacaucaccgagaucgucuaccucaccaacaccaccaucgagaaggagaucugccccaagcucgucgaguaccgcaacugguccaagccccagugcaagaucaccggcuucgcccccuucuccaaggacaacuccauccgccucuccgccggcggcgacaucugggucacccgcgagcccuacgucuccugcgaccccggcaagugcuaccaguucgcccucggccagggcaccacccucgacaacaagcacuccaacgacaccauccacgaccgcaccccccaccgcacccuccucaugaacgagcucggcguccccuuccaccucggcacccgccaggucugcaucgccugguccuccuccuccugccacgacggcaaggccuggcuccacgucugcgucaccggcuacgacaagaacgccaccgccuccuucaucuacgacggccgccucgucgacuccaucggcuccuggucccagaacauccuccgcacccaggaguccgagugcgucugcaucaacggcaccugcaccgucgucaugaccgacggcuccgccuccggcuccgccgacaccaagauccucuucaucgaggagggcaagaucguccacaucuccccccucuccggcuccgcccagcacgucgaggagugcuccugcuacccccgcuaccccggcguccgcugcaucugccgcgacaacuggaagggcuccaaccgccccgucgucgacaucaacgucaaggaccacuccaucgacuccuccuacgucugcuccggccucgucggcgacaccccccgcaacaacgaccgcuccuccaacuccuacugccgcaaccccaacaacgagaagggcaaccacggcgucaagggcugggccuucgacgacggcaacgacgucuggaugggccgcaccaucuccgaggacucccgcuccggcuacgagaccuucaaggucaucggcggcugguccacccccaacuccaagcuccagaucaaccgccaggucaucgucgacuccgacaaccgcuccggcuacuccggcaucuucuccgucgagggcaaguccugcaucaaccgcugcuucuacgucgagcucauccgcggccgcgagcaggagacccgcgucugguggaccuccaacuccaucgucgucuucugcggcaccuccggcaccuacggcaccggcuccuggcccgacggcgccgacaucaaccucaugcccaucuga

SEQ ID NO: 110779 - RNA, 1410 nt, Artificial Sequence; identical to SEQ ID NO: 110766
  derived and/or modified CDS sequence (opt2) from neuraminidase__InfluenzaA__ABC84574

SEQ ID NO: 110780 - RNA, 1410 nt, Artificial Sequence; identical to SEQ ID NO: 110766
  derived and/or modified CDS sequence (opt2) from neuraminidase__InfluenzaA__ABC85757

SEQ ID NO: 110781 - RNA, 1410 nt, Artificial Sequence; identical to SEQ ID NO: 110777
  derived and/or modified CDS sequence (opt2) from neuraminidase__InfluenzaA__ABC85768

SEQ ID NO: 110782 - RNA, 1410 nt, Artificial Sequence; identical to SEQ ID NO: 110766
  derived and/or modified CDS sequence (opt2) from neuraminidase__InfluenzaA__ABC85779

SEQ ID NO: 110783 - RNA, 1410 nt, Artificial Sequence; identical to SEQ ID NO: 110766
  derived and/or modified CDS sequence (opt2) from neuraminidase__InfluenzaA__ABC85790

SEQ ID NO: 110784 - RNA, 1410 nt, Artificial Sequence; identical to SEQ ID NO: 110750
  derived and/or modified CDS sequence (opt2) from neuraminidase__InfluenzaA__ABC85801

SEQ ID NO: 110785 - RNA, 1410 nt, Artificial Sequence; identical to SEQ ID NO: 110750
  derived and/or modified CDS sequence (opt2) from neuraminidase__InfluenzaA__ABC85812

SEQ ID NO: 110786 - RNA, 1410 nt, Artificial Sequence; identical to SEQ ID NO: 110777
  derived and/or modified CDS sequence (opt2) from neuraminidase__InfluenzaA__ABC85823

SEQ ID NO: 110787 - RNA, 1410 nt, Artificial Sequence; identical to SEQ ID NO: 110749
  derived and/or modified CDS sequence (opt2) from neuraminidase__InfluenzaA__ABC85834

SEQ ID NO: 110788 - RNA, 1410 nt, Artificial Sequence; identical to SEQ ID NO: 110750
  derived and/or modified CDS sequence (opt2) from neuraminidase__InfluenzaA__ABC85845

SEQ ID NO: 110789 - RNA, 1410 nt, Artificial Sequence; identical to SEQ ID NO: 110777
  derived and/or modified CDS sequence (opt2) from neuraminidase__InfluenzaA__ABC85856

SEQ ID NO: 110790 - RNA, 1410 nt, Artificial Sequence; identical to SEQ ID NO: 110749
  derived and/or modified CDS sequence (opt2) from neuraminidase__InfluenzaA__ABC85867

SEQ ID NO: 110791 - RNA, 1410 nt, Artificial Sequence; identical to SEQ ID NO: 110748
  derived and/or modified CDS sequence (opt2) from neuraminidase__InfluenzaA__ABC85900

SEQ ID NO: 110792 - RNA, 1410 nt, Artificial Sequence
  derived and/or modified CDS sequence (opt2) from neuraminidase__InfluenzaA__ABC85911
augaaccccaaccagaagaucaucaccaucggcuccgucucccucaccaucgccaccaucugcuuccucaugcagaucgccauccucgucaccaccgucacccuccacuucaagcaguacgagugcaacuccccccccaacaaccaggucaugcucugcgagcccaccaucaucgagcgcaacaucaccgagaucgucuaccucaccaacaccaccaucgagaaggagaucugccccaagcucgccgaguaccgcaacugguccaagccccagugcaacaucaccggcuucgcccccuucuccaaggacaacuccauccgccucuccgccggcggcgacaucugggucacccgcgagcccuacgucuccugcgaccccgacaagugcuaccaguucgcccucggccagggcaccacccucaacaacggccacuccaacgacaccguccacgaccgcacccccuaccgcacccuccucaugaacgagcucggcguccccuuccaccucggcacccgccaggucugcaucgccugguccuccuccuccugccacgacggcaaggccuggcuccacgucugcgucaccggcgacgacgagaacgccaccgccuccuucaucuacaacggccgccucgucgacuccaucggcuccugguccaagaagauccuccgcacccaggaguccgagugcgucugcaucaacggcaccugcaccgucgucaugaccgacggcuccgccuccggcaaggccgacaccaagauccucuucaucgaggagggcaagaucguccacaucuccacccucuccggcuccgcccagcacgucgaggagugcuccugcuacccccgcuaccccggcguccgcugcgucugccgcgacaacuggaagggcuccaaccgccccaucgucgacaucaacgucaaggacuacuccaucgucuccuccuacgucugcuccggccucgucggcgacaccccccgcaagaacgacuccuucuccuccucccacugccucgaccccaacaacgaggagggcggccacggcgucaagggcugggccuucgacgacggcaacgacauguggaugggccgcaccaucuccgagaagcuccgcuccggcuacgagaccuucaaggucaucgagggcugguccaagcccaacuccaagcuccagaccaaccgccaggucaucgucgagcgcggcaaccgcuccggcuacuccggcaucuucuccgucgagggcaaguccugcaucaaccgcugcuucuacgucgagcucauccgcggccgcaaggaggagaccgaggucugguggaccuccaacuccaucgucgucuucugcggcaccuccggcaccuacggcaccggcuccuggcccgacggcgccgacaucaaccucaugcccaucuga

SEQ ID NO: 110793 - RNA, 1410 nt, Artificial Sequence
  derived and/or modified CDS sequence (opt2) from neuraminidase__InfluenzaA__ABC85922
augaaccccaaccagaagaucaucaccaucggcuccgucucccucaccaucgccaccaucugcuuccucaugcagaucgccauccucgucaccaccgucacccuccacuucaagcaguacgagugcaacuccccccccaacaaccaggucaugcucugcgagcccaccaccaucgagcgcaacaucaccgagaucgucuaccucaccaacaccaccaucgagaaggagaucugccccaagcucgccgaguaccgcaacugguccaagccccagugcaacaucaccggcuucgcccccuucuccaaggacaacuccauccgccucuccgccggcggcgacaucugggucacccgcgagcccuacgucuccugcgacuccgacaagugcuaccaguucgcccucggccagggcaccacccucaacaacggccacuccaacgacaccguccacgaccgcacccccuaccgcacccuccucaugaacgagcucggcguccccuuccaccucggcacccgccaggucugcaucgccugguccuccuccuccugccacgacggcaaggccuggcuccacgucugcgucaccggcgacgacgagaacgccaccgccuccuucaucuacaacggccgccucgucgacuccaucggcuccugguccaagaagauccuccgcacccaggaguccgagugcgucugcaucaacggcaccugcaccgucgucaugaccgacggcuccgccuccggcaaggccgacaccaagauccucuucaucgaggagggcaagaucguccacaucuccacccucuccggcuccgcccagcacgucgaggagugcuccugcuacccccgcuaccccggcguccgcugcgucugccgcgacaacuggaagggcuccaaccgccccaucgucgacaucaacgucaaggacuacuccaucgucuccuccuacgucugcuccggccucgucggcgacaccccccgcaagaacgacuccuucuccuccucccacugccucgaccccaacaacgaggagggcggccacggcgucaagggcugggccuucgacgacggcaacgacgucuggaugggccgcaccaucuccgagaagcuccgcuccggcuacgagaccuucaaggucaucgagggcugguccaagcccaacuccaagcuccagaccaaccgccaggucaucgucgagcgcggcaaccgcuccggcuacuccggcaucuucuccgucgagggcaaguccugcaucaaccgcugcuucuacgucgagcucauccgcggccgcaaggaggagaccgaggucugguggaccuccaacuccaucgucgucuucugcggcaccuccggcaccuacggcaccggcuccuggcccgacggcgccgacaucaaccucaugcccaucuga

SEQ ID NO: 110794 - RNA, 1410 nt, Artificial Sequence; identical to SEQ ID NO: 110202
  derived and/or modified CDS sequence (opt2) from neuraminidase__InfluenzaA__ABC85933

SEQ ID NO: 110795 - RNA, 1410 nt, Artificial Sequence
  derived and/or modified CDS sequence (opt2) from neuraminidase__InfluenzaA__ABC85955
augaaccccaaccagaagaucaucaccaucggcuccgucucccucaccaucgccaccaucugcuuccucaugcagaucgccauccucgucaccaccgucacccuccacuucaagcaguacgagugcaacuccccccccaacaaccaggucaugcucugcgagcccaccaucaucgagcgcaacaucaccgagaucgucuaccucaccaacaccaccaucgagaaggagaucugccccaagcucgccgaguaccgcaacugguccaagccccagugcaacaucaccggcuucgcccccuucuccaaggacaacuccauccgccucuccgccggcggcgacaucugggucacccgcgagcccuacgucuccugcgaccccgacaagugcuaccaguucgcccucggccagggcaccacccucaacaacggccacuccaacgacaccguccacgaccgcacccccuaccgcacccuccucaugaacgagcucggcguccccuuccaccucggcacccgccaggucugcaucgccugguccuccuccuccugccacgacggcaaggccuggcuccacgucugcgucaccggcgacgacgagaacgccaccgccuccuucaucuacaacggccgccucgucgacuccaucggcuccugguccaagaagauccuccgcacccaggaguccgagugcgucugcaucaacggcaccugcaccgucgucaugaccgacggcuccgccuccggcaaggccgacaccaagauccucuucaucgaggagggcaagaucguccacaucuccacccucuccggcuccgcccagcacgucgaggagugcuccugcuacccccgcuaccccggcguccgcugcgucugccgcgacaacuggaagggcuccaaccgccccaucgucgacaucaacgucaaggacuacuccaucgucuccuccuacgucugcuccggccucgucggcgacaccccccgcaagaacgacuccuucuccuccucccacugccucgaccccaacaacgaggagggcggccacggcgucaagggcugggccuucgacgacggcaacgacgucuggaugggccgcaccaucuccgagaagcuccgcuccggcuacgagaccuucaaggucaucgagggcugguccaagcccaacuccaagcuccagaccaaccgccaggucaucgucgagcgcggcaaccgcuccggcuacuccggcaucuucuccgucgagggcaaguccugcaucaaccgcugcuucuacgucgagcucauccgcggccgcaaggaggagaccgaggucugguggaccuccaacuccaucgucgucuucugcggcaccuccggcaccuacggcaccggcuccuggcccgacggcgccgacaucaaccgcaugcccaucuga

SEQ ID NO: 110796 - RNA, 1410 nt, Artificial Sequence; identical to SEQ ID NO: 110202
  derived and/or modified CDS sequence (opt2) from neuraminidase__InfluenzaA__ABC85966

SEQ ID NO: 110797 - RNA, 1410 nt, Artificial Sequence; identical to SEQ ID NO: 110202
  derived and/or modified CDS sequence (opt2) from neuraminidase__InfluenzaA__ABC85977

SEQ ID NO: 110798 - RNA, 1410 nt, Artificial Sequence
  derived and/or modified CDS sequence (opt2) from neuraminidase__InfluenzaA__ABC85988
augaaccccaaccagaagaucaucaccaucggcuccgucucccucaccaucgccaccaucugcuuccucaugcagaucgccauccucgucaccaccgucacccuccacuucaagcaguacgagugcaacuccccccccaacaaccaggucaugcucugcgagcccaccaucaucgagcgcaacaucaccgagaucgucuaccucaccaacaccaccaucgagaagggcaucugccccaagcucgccgaguaccgcaacugguccaagccccagugcaacaucaccggcuucgcccccuucuccaaggacaacuccauccgccucuccgccggcggcgacaucugggucacccgcgagcccuacgucuccugcgaccccgacaagugcuaccaguucgcccucggccagggcaccacccucaacaacggccacuccaacgacaccguccacgaccgcacccccuaccgcacccuccucaugaacgagcucggcguccccuuccaccucggcacccgccaggucugcaucgccugguccuccuccuccugccacgacggcaaggccuggcuccacgucugcgucaccggcgacgacgagaacgccaccgccuccuucaucuacaacggccgccucgucgacuccaucggcuccugguccaagaagauccuccgcacccaggaguccgagugcgucugcaucaacggcaccugcaccgucgucaugaccgacggcuccgccuccggcaaggccgacaccaagauccucuucaucgaggagggcaagaucguccacaucuccacccucuccggcuccgcccagcacgucgaggagugcuccugcuacccccgcuaccccggcguccgcugcgucugccgcgacaacuggaagggcuccaaccgccccaucgucgacaucaacgucaaggacuacuccaucgucuccuccuacgucugcuccggccucgucggcgacaccccccgcaagaacgacuccuucuccuccucccacugccucgaccccaacaacgaggagggcggccacggcgucaagggcugggccuucgacgacggcaacgacgucuggaugggccgcaccaucuccgagaagcuccgcuccggcuacgagaccuucaaggucaucgagggcugguccaagcccaacuccaagcuccagaccaaccgccaggucaucgucgagcgcggcaaccgcuccggcuacuccggcaucuucuccgucgagggcaaguccugcaucaaccgcugcuucuacgucgagcucauccgcggccgcaaggaggagaccgaggucugguggaccuccaacuccaucgucgucuucugcggcaccuccggcaccuacggcaccggcuccuggcccgacggcgccgacaucaaccucaugcccaucuga

SEQ ID NO: 110799 - RNA, 1410 nt, Artificial Sequence; identical to SEQ ID NO: 110363
  derived and/or modified CDS sequence (opt2) from neuraminidase__InfluenzaA__ABC85999

SEQ ID NO: 110800 - RNA, 1410 nt, Artificial Sequence; identical to SEQ ID NO: 110363
  derived and/or modified CDS sequence (opt2) from neuraminidase__InfluenzaA__ABC86010

SEQ ID NO: 110801 - RNA, 1410 nt, Artificial Sequence
  derived and/or modified CDS sequence (opt2) from neuraminidase__InfluenzaA__ABC86021
augaaccccaaccagaagaucaucaccaucggcuccgucucccucaccaucuccaccaucugcuucuucaugcagaucgccauccucaucaccaccgucacccuccacuucaagcaguacgaguucaacuccccccccaacaaccaggucaugcucugcgagcccaccaucaucgagcgcaacaucaccgagaucgucuaccucaccaacaccaccaucgagaaggagaucugccccaagcucgccgaguaccgcaacugguccaagccccagugcgacaucaccggcuucgcccccuucuccaaggacaacuccauccgccucuccgccggcggcgacaucugggucacccgcgagcccuacgucuccugcgaccccgacaagugcuaccaguucgcccucggccagggcaccacccucaacaacguccacuccaacgacaccguccacgaccgcacccccuaccgcacccuccucaugaacgagcucggcguccccuuccaccucggcaccaagcaggucugcaucgccugguccuccuccuccugccacgacggcaaggccuggcuccacgucugcgucaccggcgacgacaagaacgccaccgccuccuucaucuacaacggccgccucgucgacuccaucgucuccugguccaaggagauccuccgcacccaggaguccgagugcgucugcaucaacggcaccugcaccgucgucaugaccgacggcuccgccuccggcaaggccgacaccaagauccucuucaucgaggagggcaagaucguccacaccuccacccucuccggcuccgcccagcacgucgaggagugcuccugcuacccccgcuaccccggcguccgcugcgucugccgcgacaacuggaagggcuccaaccgccccaucgucgacaucaacaucaaggacuacuccaucgucuccuccuacgucugcuccggccucgucggcgacaccccccgcaagaacgacuccuccuccuccucccacugccucgaccccaacaacgaggagggcggccacggcgucaagggcugggccuucgacgacggcaacgacgucuggaugggccgcaccaucuccgagaagcuccgcuccggcuacgagaccuucaaggucaucgagggcugguccaaccccaacuccaagcuccagaucaaccgccaggucaucgucgaccgcggcaaccgcuccggcuacuccggcaucuucuccgucgagggcaaguccugcaucaaccgcugcuucuacgucgagcucauccgcggccgcaaggaggagaccgagguccucuggaccuccaacuccaucgucgucuucugcggcaccuccggcaccuacggcaccggcuccuggcccgacggcgccaacaucaaccucaugcccaucuga

SEQ ID NO: 110802 - RNA, 1410 nt, Artificial Sequence; identical to SEQ ID NO: 110627
  derived and/or modified CDS sequence (opt2) from neuraminidase__InfluenzaA__ABC86127

SEQ ID NO: 110803 - RNA, 1410 nt, Artificial Sequence; identical to SEQ ID NO: 110710
  derived and/or modified CDS sequence (opt2) from neuraminidase__InfluenzaA__ABC86140

SEQ ID NO: 110804 - RNA, 1410 nt, Artificial Sequence; identical to SEQ ID NO: 110520
  derived and/or modified CDS sequence (opt2) from neuraminidase__InfluenzaA__ABC86151

SEQ ID NO: 110805 - RNA, 1413 nt, Artificial Sequence
  derived and/or modified CDS sequence (opt2) from neuraminidase__InfluenzaA__ABC86240
augaaccccaaccagaagaucaucaccaucggcuccaucuccgucgccaucggcaucaucucccucauccuccagaucggcaacaucaucuccaucugggccucccacuccauccagaccggcucccagaacuacaccggcaucugcaaccagaagaucaucaccuacgagaaccgcaccugggucaaccagaccuacgucaacaucaacaacaccaacgucgucgccggcaaggacaagaccuccaugacccucgccggcaacuccucccucugccccauccgcggcugggccaucuacaccaaggacaacuccauccgcaucggcuccaagggcgacgucuucgucauccgcgagcccuucaucuccugcucccaccucgagugccgcaccuucuuccucacccagggcgcccuccucaacgacaagcacuccaacggcaccaucaaggaccgcucccccuuccgcgcccucauguccugcccccucggcgaggcccccucccccuacaacucccgcuucgaguccgucgccugguccgccuccgccugccacgacggccucggcuggcucaccaucggcaucuccggccccgacaacggcgccgucgccguccucaaguacaacggcaucaucaccgagaccaucaaguccuggaagaagcagauccuccgcacccaggaguccgagugcgucugcgucaacggcuccugcuucaccaucaugaccgacggccccuccaaccgcgccgccuccuaccgcaucuucaagaucgagaagggccgcgucaccaaguccaucgagcucgacgcccccaacuaccacuacgaggagugcuccugcuaccccgacaccggcaccgucaugugcgucugccgcgacaacuggcacggcuccaaccgccccugggucuccuucaaccagaaccucgacuaccagaucggcuacaucugcuccggcgucuucggcgacaacccccgccccaaggacggcgagggcuccugcaaccccgucaccgucgacggcgccgacggcgucaagggcuucuccuaccgcuacggcaacggcgucuggaucggccgcaccaaguccaaccgccuccgcaagggcuucgagaugaucugggaccccaacggcuggaccgacaccgacuccgacuucuccaugaagcaggacgucgucgccaugaccgacugguccggcuacuccggcuccuucguccagcaccccgagcucaccggccucgacugcaugcgccccugcuucugggucgagcucguccgcggccucccccgcgagaacaccaccaucuggaccuccggcuccuccaucuccuucugcggcgucaacuccgagaccgccaacugguccuggcccgacggcgccgagcuccccuucaccaucgacaaguga

SEQ ID NO: 110806 - RNA, 1410 nt, Artificial Sequence
  derived and/or modified CDS sequence (opt2) from neuraminidase__InfluenzaA__ABC97377
augaaccccaaccagaagaucaucaccaucggcuccgucucccucaccaucgccaccaucugcuuccucaugcagaucgccauccucgucaccaccgucacccuccacuucaagcaguacgagugcgacucccccgccaacaaccaggucaugcccugcgagcccaucaucaucgagcgcaacaucaccgagaucgucuaccucaccaacaccaccaucgagaaggagaucugccccaagcucgucgaguaccgcaacugguccaagccccagugcaagaucaccggcuucgcccccuucuccaaggacaacuccauccgccucuccgccggcggcgacaucugggucacccgcgagcccuacgucuccugcgaccccggcaagugcuaccaguucgcccucggccagggcaccacccucgacaacaagcacuccaacgacaccauccacgaccgcaccccccaccgcacccuccucaugaacgagcucggcguccccuuccaccucggcacccgccaggucugcaucgccugguccuccuccuccugccacgacggcaaggccuggcuccacgucugcgucaccggcuacgacaagaacgccaccgccuccuucaucuacgacggccgccucgucgacuccaucggcuccuggucccagaacauccuccgcacccaggaguccgagugcgucugcaucaacggcaccugcaccgucgucaugaccgacggcuccgccuccggcuccgccgacaccaagauccucuucaucgaggagggcaagaucguccacaucuccccccucuccggcuccgcccagcacgucgaggagugcuccugcuacccccgcuaccccggcguccgcugcaucugccgcgacaacuggaagggcuccaaccgccccgucgucgacaucaacgucaaggacuacuccaucgacuccuccuacgucugcuccggccucgucggcgacaccccccgcaacaacgaccgcuccuccaacuccuacugccgcaaccccaacaacgagaagggcaaccacggcgucaagggcugggccuucgacgacggcaacgacgucuggaugggccgcaccaucuccgaggacucccgcuccggcuacgagaccuucaaggucaucggcggcugguccacccccaacuccaagcuccagaucaaccgccaggucaucgucgacuccgacaaccgcuccggcuacuccggcaucuucuccgucgagggcaaguccugcaucaaccgcugcuucuacgucgagcucauccgcggccgcgagcaggagacccgcgucugguggaccuccaacuccaucgucgucuucugcggcaccuccggcaccuacggcaccggcuccuggcccgacggcgccgacaucaaccucaugcccaucuga

SEQ ID NO: 110807 - RNA, 1410 nt, Artificial Sequence; identical to SEQ ID NO: 110173
  derived and/or modified CDS sequence (opt2) from neuraminidase__InfluenzaA__ABD15452

SEQ ID NO: 110808 - RNA, 1410 nt, Artificial Sequence; identical to SEQ ID NO: 110261
  derived and/or modified CDS sequence (opt2) from neuraminidase__InfluenzaA__ABD15463

SEQ ID NO: 110809 - RNA, 1410 nt, Artificial Sequence; identical to SEQ ID NO: 110181
  derived and/or modified CDS sequence (opt2) from neuraminidase__InfluenzaA__ABD15474

SEQ ID NO: 110810 - RNA, 1410 nt, Artificial Sequence
  derived and/or modified CDS sequence (opt2) from neuraminidase__InfluenzaA__ABD15485
augaaccccaaccagaagaucaucaccaucggcuccgucucccucaccaucgccaccaucugcuuccucaugcagaucgccauccucgucaccaccgucacccuccacuucaagcagcacgagugcaacuccccccccaacaaccaggucaugcucugcgagcccaccaucaucgagcgcaacaucaccgagaucgucuaccucaccaacaccaccaucgagaaggagaucugccccaagcucgccgaguaccgcaacugguccaagccccagugcaacaucaccggcuucgcccccuucuccaaggacaacuccauccgccucuccgccggcggcgacaucugggucacccgcgagcccuacgucuccugcgaccccgacaagugcuaccaguucgcccucggccagggcaccacccucaacaacggccacuccaacgacaccguccacgaccgcacccccuaccgcacccuccucaugaacgagcucggcguccccuuccaccucggcacccgccaggucugcaucgccugguccuccuccuccugccacgacggcaaggccuggcuccacgucugcgucaccggcgacgacaagaacgccaccgccuccuucaucuacaacggccgccucgucgacuccaucggcuccugguccaagaagauccuccgcacccaggaguccgagugcgucugcaucaacggcaccugcaccgucgucaugaccgacggcuccgccuccggcaaggccgacaccaagauccucuucaucgaggagggcaagaucguccacaucuccacccucuccggcuccgcccagcacgucgaggagugcuccugcuacccccgcuaccccggcguccgcugcgucugccgcgacaacuggaagggcuccaaccgccccaucgucgacaucaacgucaaggacuacuccaucgucuccuccuacgucugcuccggccucgucggcgacaccccccgcaagaacgacuccuucuccuccucccacugccucgaccccaacaacgaggagggcggccacggcgucaagggcugggccuucgacgacggcaacgacgucuggaugggccgcaccaucuccgagaagcuccgcuccggcuacgagaccuucaaggucaucgagggcugguccaagcccaacuccaagcuccagaucaaccgccaggucaucgucgagcgcggcaaccgcuccggcuacuccggcaucuucuccgucgagggcaaguccugcaucaaccgcugcuucuacgucgagcucauccgcggccgcaaggaggagaccgaggucugguggaccuccaacuccaucgucgucuucugcggcaccuccggcaccuacggcaccggcuccuggcccgacggcgccaacaucaaccucaugcccaucuga

SEQ ID NO: 110811 - RNA, 1410 nt, Artificial Sequence; identical to SEQ ID NO: 110261
  derived and/or modified CDS sequence (opt2) from neuraminidase__InfluenzaA__ABD15496

SEQ ID NO: 110812 - RNA, 1410 nt, Artificial Sequence; identical to SEQ ID NO: 110181
  derived and/or modified CDS sequence (opt2) from neuraminidase__InfluenzaA__ABD15507

SEQ ID NO: 110813 - RNA, 1413 nt, Artificial Sequence
  derived and/or modified CDS sequence (opt2) from neuraminidase__InfluenzaA__ABD15518
augaaccccaaccagaagaucaucaccaucggcuccaucuccaucgccaucggcaucaucucccucaugcuccagaucggcaacaucaucuccaucugggccucccacuccauccagaccggcucccagaaccacaccggcaucugcaaccagcgcaucaucaccuacgagaacuccaccugggucaaccacaccuacgucaacaucaacaacaccaacgucgucgccggcaaggacaagaccuccgucacccucgccggcaacuccucccucugcuccaucuccggcugggccaucuacaccaaggacaacuccauccgcaucggcuccaagggcgacgucuucgucauccgcgagcccuucaucuccugcucccaccucgagugccgcaccuucuuccucacccagggcgcccuccucaacgacaagcacuccaacggcaccgucaaggaccgcucccccuaccgcgcccucauguccugcccccucggcgaggcccccucccccuacaacuccaaguucgaguccgucgccugguccgccuccgccugccacgacggcaugggcuggcucaccaucggcaucuccggccccgacaacggcgccgucgccguccucaaguacaacggcaucaucaccgagaccaucaaguccuggaagaagcgcauccuccgcacccaggaguccgagugcgucugcgucaacggcuccugcuucaccaucaugaccgacggccccuccaacggcggcgccuccuacaagaucuucaagaucgagaagggcaaggucaccaaguccaucgagcucaacgcccccaacuuccacuacgaggagugcuccugcuaccccgacaccggcaccgucaugugcgucugccgcgacaacuggcacggcuccaaccgccccugggucuccuucaaccagaaccucgacuaccagaucggcuacaucugcuccggcgucuucggcgacaacccccgccccaaggacggcaagggcuccugcaaccccgucaccgucgacggcgccgacggcgucaagggcuucuccuacaaguacggcaacggcgucuggaucggccgcaccaaguccaaccgccuccgcaagggcuucgagaugaucugggaccccaacggcuggaccgacaccgacuccgacuucuccgucaagcaggacgucgucgccaucaccgacugguccggcuacuccggcuccuucguccagcaccccgagcucaccggccucgacugcauccgccccugcuucugggucgagcucguccgcggccucccccgcgagaacaccaccaucuggaccuccggcuccuccaucuccuucugcggcgucgacuccgacaccgccaacugguccuggcccgacggcgccgagcuccccuucaccaucgacaaguga

SEQ ID NO: 110814 - RNA, 1410 nt, Artificial Sequence; identical to SEQ ID NO: 110363
  derived and/or modified CDS sequence (opt2) from neuraminidase__InfluenzaA__ABD15529

SEQ ID NO: 110815 - RNA, 1410 nt, Artificial Sequence; identical to SEQ ID NO: 110550
  derived and/or modified CDS sequence (opt2) from neuraminidase__InfluenzaA__ABD15551

SEQ ID NO: 110816 - RNA, 1410 nt, Artificial Sequence
  derived and/or modified CDS sequence (opt2) from neuraminidase__InfluenzaA__ABD15562
augaaccccaaccagaagaucaucaccaucggcuccgucucccucaccaucgccaccaucugcuuccucaugcagaucgccauccucgucaccaccgucacccuccacuucaagcaguacgagugcuccuccccccccaacaaccaggucaugcucugcgagcccaccaucaucgagcgcaacaucaccgagaucgucuaccucaccaacaccaccaucgagaaggagaucugccccaagcucgccgaguaccgcaacugguccaagccccagugcaagaucaccggcuucgcccccuucuccaaggacaacuccauccgccucuccgccggcggcgacaucugggucacccgcgagcccuacgucuccugcgaccccgacaagugcuaccaguucgcccucggccagggcaccacccucaacaaccgccacuccaacgacaccguccacgaccgcacccccuaccgcacccuccucaugaacgagcucggcguccccuuccaccucggcaccaagcaggucugcaucgccugguccuccuccuccugccacgacggcaaggccuggcuccacgucugcgucaccggccacgacgagaacgccaccgccuccuucaucuacgacggccgccucgucgacuccaucggcuccugguccaagaagauccuccgcacccaggaguccgagugcgucugcaucaacggcaccugcaccaucgucaugaccgacggcuccgccuccggccgcgccgacaccaagauccucuucaucgaggagggcaagaucguccacaucuccccccucuccggcuccgcccagcacgucgaggagugcuccugcuacccccgcuaccccggcguccgcugcgucugccgcgacaacuggaagggcuccaaccgccccaucgucgacaucaacgucaaggacuacuccaucgucuccuccuacgucugcuccggccucgucggcgacaccccccgcaagaacgacuccuccuccuccucccacugccucaaccccaacaacgaggagggcggccacggcgucaagggcugggccuucgacgacggcaacgacgucuggaugggccgcaccaucuccgagaaguuccgcuccggcuacgagaccuucaaggucaucgagggcugguccaagcccaacuccaagcuccagaucaaccgccaggucaucgucgaccgcggcaaccgcuccggcuacuccggcaucuucuccgucgagggcaaguccugcaucaaccgcugcuucuacgucgagcucauccgcggccgcaagcaggagaccgaggucugguggaccuccaacuccaucgucgucuucugcggcaccuccggcaccuacggcaccggcuccuggcccgacggcgccgacaucaaccucaugcccaucuga

SEQ ID NO: 110817 - RNA, 1410 nt, Artificial Sequence
  derived and/or modified CDS sequence (opt2) from neuraminidase__InfluenzaA__ABD15573
augaaccccaaccagaagaucaucaccaucggcuccgucucccucaccaucgccaccaucugcuuccucaugcagaucgccauccucgucaccaccgucacccuccacuucaagcaguacgagugcaacuccccccccaacaaccaggucaugcucugcgagcccaccaucaucgagcgcaacaucaccgagaucgucuaccucaccaacaccaccaucgagaaggagaucugccccaagcucgccgaguaccgcaacugguccaagccccagugcaagaucaccggcuucgcccccuucuccaaggacaacuccauccgccucuccgccggcggcgacaucugggucacccgcgagcccuacgucuccugcgaccccgacaagugcuaccaguucgcccucggccagggcaccacccucaacaacggccacuccaacgacaccguccacgaccgcacccccuaccgcacccuccucaugaacgagcucggcguccccuuccaccucggcaccaagcaggucugcauggccugguccuccuccuccugccacgacggcaaggccuggcuccacgucugcgucaccggccacgacgagaacgccaccgccuccuucaucuacgacggccgccucgucgacuccaucggcuccugguccaagaagauccuccgcacccaggaguccgagugcgucugcaucaacggcaccugcaccgucgucaugaccgacggcuccgccuccggccgcgccgacaccaagauccucuucaucgaggagggcaagaucguccacaucucccagcucuccggcuccgcccagcacgucgaggagugcuccugcuacccccgcuaccccggcguccgcugcgucugccgcgacaacuggaagggcuccaaccgccccaucgucgacaucaacgucaaggaccacuccaucgucuccuccuacgucugcuccggccucgucggcgacaccccccgcaagaacgacuccuccuccuccucccacugccucaaccccaacaacgaggagggcggccacggcgucaagggcugggccuucgacgacggcaacgacgucuggaugggccgcaccaucuccgagaagcuccgcuccggcuacgagaccuucaaggucaucgagggcugguccaagcccaacuccaagcuccagaucaaccgccaggucaucgucgaccgcggcaaccgcuccggcuacuccggcaucuucuccgucgagggcaaguccugcaucaaccgcugcuucuacgucgagcucauccgcggccgcaagcaggagaccgaggucugguggaccuccaacuccaucgucgucuucugcggcaccuccggcaccuacggcaccggcuccuggcccgacggcgccgacaucaaccucaugcccaucuga

SEQ ID NO: 110818 - RNA, 1410 nt, Artificial Sequence
  derived and/or modified CDS sequence (opt2) from neuraminidase__InfluenzaA__ABD15584
augaaccccaaccagaagaucaucaccaucggcuccgucucccucaccaucgccaccaucugcuuccucaugcagaucgccauccucgucaccaccgucacccuccacuucaagcaguacgagugcuccuccccccccaacaaccaggucaugcucugcgagcccaccaucaucgagcgcaacaucaccgagaucgucuaccucaccaacaccaccaucgagaaggagaucugccccaagcucgccgaguaccgcaacugguccaagccccagugcaagaucaccggcuucgcccccuucuccaaggacaacuccauccgccucuccgccggcggcgacaucugggucacccgcgagcccuacgucuccugcgaccccgacaagugcuaccaguucgcccucggccagggcaccacccucaacaaccgccacuccaacgacaccguccacgaccgcacccccuaccgcacccuccucaugaacgagcucggcguccccuuccaccucggcaccaagcaggucugcaucgccugguccuccuccuccugccacgacggcaaggccuggcuccacgucugcgucaccggccacgacgagaacgccaccgccuccuucaucuacgacggccgccucgucgacuccaucggcuccugguccaagaagauccuccgcacccaggaguccgagugcgucugcaucaacggcaccugcaccgucgucaugaccgacggcuccgccuccggccgcgccgacaccaagauccucuucaucgaggagggcaagaucguccacaucuccccccucuccggcuccgcccagcacgucgaggagugcuccugcuacccccgcuaccccggcguccgcugcgucugccgcgacaacuggaagggcuccaaccgccccaucgucgacaucaacgucaaggacuacuccaucgucuccuccuacgucugcuccggccucgucggcgacaccccccgcaagaacgacuccuccuccuccucccacugccucaaccccaacaacgaggagggcggccacggcgucaagggcugggccuucgacgacgagaacgacgucuggaugggccgcaccaucuccgagaaguuccgcuccggcuacgagaccuucaaggucaucgagggcugguccaagcccaacuccaagcuccagaucaaccgccaggucaucgucgaccgcggcaaccgcuccggcuacuccggcaucuucuccgucgagggcaaguccugcaucaaccgcugcuucuacgucgagcucauccgcggccgcaagcaggagaccgaggucugguggaccuccaacuccaucaucgucuucugcggcaccuccggcaccuacggcaccggcuccuggcccgacggcgccgacaucaaccucaugcccaucuga

SEQ ID NO: 110819 - RNA, 1410 nt, Artificial Sequence; identical to SEQ ID NO: 110550
  derived and/or modified CDS sequence (opt2) from neuraminidase__InfluenzaA__ABD15595

SEQ ID NO: 110820 - RNA, 1410 nt, Artificial Sequence; identical to SEQ ID NO: 110550
  derived and/or modified CDS sequence (opt2) from neuraminidase__InfluenzaA__ABD15606

SEQ ID NO: 110821 - RNA, 1410 nt, Artificial Sequence; identical to SEQ ID NO: 110550
  derived and/or modified CDS sequence (opt2) from neuraminidase__InfluenzaA__ABD15617

SEQ ID NO: 110822 - RNA, 1410 nt, Artificial Sequence; identical to SEQ ID NO: 110609
  derived and/or modified CDS sequence (opt2) from neuraminidase__InfluenzaA__ABD15639

SEQ ID NO: 110823 - RNA, 1410 nt, Artificial Sequence; identical to SEQ ID NO: 110766
  derived and/or modified CDS sequence (opt2) from neuraminidase__InfluenzaA__ABD15650

SEQ ID NO: 110824 - RNA, 1410 nt, Artificial Sequence; identical to SEQ ID NO: 110289
  derived and/or modified CDS sequence (opt2) from neuraminidase__InfluenzaA__ABD15661

SEQ ID NO: 110825 - RNA, 1410 nt, Artificial Sequence; identical to SEQ ID NO: 110766
  derived and/or modified CDS sequence (opt2) from neuraminidase__InfluenzaA__ABD15683

SEQ ID NO: 110826 - RNA, 1410 nt, Artificial Sequence; identical to SEQ ID NO: 110289
  derived and/or modified CDS sequence (opt2) from neuraminidase__InfluenzaA__ABD15694

SEQ ID NO: 110827 - RNA, 1410 nt, Artificial Sequence; identical to SEQ ID NO: 110766
  derived and/or modified CDS sequence (opt2) from neuraminidase__InfluenzaA__ABD15705

SEQ ID NO: 110828 - RNA, 1410 nt, Artificial Sequence; identical to SEQ ID NO: 110766
  derived and/or modified CDS sequence (opt2) from neuraminidase__InfluenzaA__ABD15727

SEQ ID NO: 110829 - RNA, 1410 nt, Artificial Sequence
  derived and/or modified CDS sequence (opt2) from neuraminidase__InfluenzaA__ABD15749
augaaccccaaccagaagaucaucaccaucggcuccgucucccucaccaucgccaccaucugcuuccucaugcagaucgccguccucgucaccaccgucacccuccacuucaagcaguacgagugcaacuccccccccaacaaccaggucaugcucugcgagcccaccaucaucgagcgcaacaucaccgagaucgucuaccucaccaacaccaccaucgagaaggagaucugccccaagcucgccgaguaccgcaacugguccaagccccagugcaacaucaccggcuucgcccccuucuccaaggacaacuccauccgccucuccgccggcggcgacaucugggucacccgcgagcccuacgucuccugcgaccccgacaagugcuaccaguucgcccucggccagggcaccacccucaacaacggccacuccaacgacaccguccacgaccgcacccccuaccgcacccuccucaugaacgagcucggcguccccuuccaccucggcaccaagcaggucugcaucgccugguccuccuccuccugccacgacggcaaggccuggcuccacgucugcgucaccggcgacgacgagaacgccaccgccuccuucaucuacaacggccgccucgucgacuccaucggcuccugguccaagaagauccuccgcacccaggaguccgagugcgucugcaucaacggcaccugcaccgucgucaugaccgacggcuccgccuccggcaaggccgacaccaagauccucuucaucgaggagggcaagaucguccacaccucccuccucuccggcuccgcccagcacgucgaggagugcuccugcuacccccgcuaccccggcguccgcugcgucugccgcgacaacuggaagggcuccaaccgccccaucgucgacaucaacgucaaggacuacuccaucgucuccuccuacgucugcuccggccucgucggcgacaccccccgcaagaacgacuccuccuccuccucccacugccucgaccccaacaacgaggagggcggccacggcgucaagggcugggccuucgacgacggcaacgacgucuggaugggccgcaccaucuccgagaagcuccgcuccggcuacgagaccuucaaggucaucgagggcugguccaagcccaacuccaagcuccagaucaaccgccaggucaucgucgaccgcggcaaccgcuccggcuacuccggcaucuucuccgucgagggcaaguccugcaucaaccgcugcuucuacgucgagcucauccgcggccgcaagcaggagaccgagguccucuggaccuccaacuccaucgucgucuucugcggcaccuccggcaccuacggcaccggcuccuggcccgacggcgccgacaucaaccucaugcccaucuga

SEQ ID NO: 110830 - RNA, 1410 nt, Artificial Sequence; identical to SEQ ID NO: 110829
  derived and/or modified CDS sequence (opt2) from neuraminidase__InfluenzaA__ABD15760

SEQ ID NO: 110831 - RNA, 1410 nt, Artificial Sequence; identical to SEQ ID NO: 110766
  derived and/or modified CDS sequence (opt2) from neuraminidase__InfluenzaA__ABD15771

SEQ ID NO: 110832 - RNA, 1410 nt, Artificial Sequence; identical to SEQ ID NO: 110766
  derived and/or modified CDS sequence (opt2) from neuraminidase__InfluenzaA__ABD15782

SEQ ID NO: 110833 - RNA, 1410 nt, Artificial Sequence; identical to SEQ ID NO: 110766
  derived and/or modified CDS sequence (opt2) from neuraminidase__InfluenzaA__ABD15793

SEQ ID NO: 110834 - RNA, 1410 nt, Artificial Sequence; identical to SEQ ID NO: 110750
  derived and/or modified CDS sequence (opt2) from neuraminidase__InfluenzaA__ABD16306

SEQ ID NO: 110835 - RNA, 1410 nt, Artificial Sequence
  derived and/or modified CDS sequence (opt2) from neuraminidase__InfluenzaA__ABD16317
augaaccccaaccagaagaucaucaccaucggcuccgucucccucaccaucuccaccaucugcuucuucaugcagaucgccauccucaucaccaccgucacccuccacuucaagcaguacgaguucaacuccccccccaacaaccaggucaugcucugcgagcccaccaucaucgagcgcaacaucaccgagaucgucuaccucaccaacaccaccaucgagaaggagaucugccccaagcucgccgaguaccgcaacugguccaagccccagugcaacaucaccggcuucgcccccuucuccaaggacaacuccauccgccucuccgccggcggcgacaucugggucacccgcgagcccuacgucuccugcgaccccgacaagugcuaccaguucgcccucggccagggcaccacccucaacaacguccacuccaacgacaccguccgcgaccgcacccccuaccgcacccuccucaugaacgagcucggcguccccuuccaccucggcaccaagcaggucugcaucgccugguccuccuccuccugccacgacggcaaggccuggcuccacgucugcgucaccggcgacgacaagaacgccaccgccuccuucaucuacaacggccgccucgucgacuccaucgucuccugguccaaggagauccuccgcacccaggaguccgagugcgucugcaucaacggcaccugcaccgucgucaugaccgacggcuccgccuccggcaaggccgacaccaagauccucuucaucgaggagggcaagaucguccacaccuccacccucuccggcuccgcccagcacgucgaggagugcuccugcuacccccgcuaccccggcguccgcugcgucugccgcgacaacuggaagggcuccaaccgccccaucgucgacaucaacaucaaggacuacuccaucgucuccuccuacgucugcuccggccucgucggcgacaccccccgcaagaacgacuccuccuccuccucccacugccucgaccccaacaacgaggagggcggccacggcgucaagggcugggccuucgacgacggcaacgacgucuggaugggccgcaccaucuccgagaagcuccgcuccggcuacgagaccuucaaggucaucgagggcugguccaaccccaacuccaagcuccagaucaaccgccaggucaucgucgaccgcggcaaccgcuccggcuacuccggcaucuucuccgucgagggcaaguccugcaucaaccgcugcuucuacgucgagcucauccgcggccgcaaggaggagaccgagguccucuggaccuccaacuccaucgucgucuucugcggcaccuccggcaccuacggcaccggcuccuggcccgacggcgccgacaucaaccucaugcccaucuga

SEQ ID NO: 110836 - RNA, 1410 nt, Artificial Sequence; identical to SEQ ID NO: 110750
  derived and/or modified CDS sequence (opt2) from neuraminidase__InfluenzaA__ABD16328

SEQ ID NO: 110837 - RNA, 1410 nt, Artificial Sequence
  derived and/or modified CDS sequence (opt2) from neuraminidase__InfluenzaA__ABD16339
augaaccccaaccagaagaucaucaccaucggcuccgucucccucaccaucuccaccaucugcuucuucaugcagaucgccauccucaucaccaccgucacccuccacuucaagcaguacgaguucaacuccccccccaacaaccaggucaugcucugcgagcccaccaucaucgagcgcaacaucaccgagaucgucuaccucaccaacaccaccaucgagaaggagaucugccccaagcucgccgaguaccgcaacugguccaagccccagugcgacaucaccggcuucgcccccuucuccaaggacaacuccauccgccucuccgccggcggcgacaucugggucacccgcgagcccuacgucuccugcgaccccgacaagugcuaccaguucgcccucggccagggcaccacccucaacaacguccacuccaacgacaccguccacgaccgcacccccuaccgcacccuccucaugaacgagcucggcguccccuuccaccucggcaccaagcaggucugcaucgccugguccuccuccuccugccacgacggcaaggccuggcuccacgucugcgucaccggcgacgacaagaacgccaccgccuccuucaucuacaacggccgccucgucgacuccaucgucuccugguccaagaagauccuccgcacccaggaguccgagugcgucugcaucaacggcaccugcaccgucgucaugaccgacggcuccgccuccggcaaggccgacaccaagauccucuucaucgaggagggcaagaucguccacaccuccacccucuccggcuccgcccagcacgucgaggagugcuccugcuacccccgcuaccccggcguccgcugcgucugccgcgacaacuggaagggcuccaaccgccccaucgucgacaucaacaucaaggacuacuccaucgucuccuccuacgucugcuccggccucgucggcgacaccccccgcaagaacgacuccuccuccuccggccacugccucgaccccaacaacgaggagggcggccacggcgucaagggcugggccuucgacgacggcaacgacgucuggaugggccgcaccaucuccgagaagcuccgcuccggcuacgagaccuucaaggucaucgagggcugguccaaccccaacuccaagcuccagaucaaccgccaggucaucgucgaccgcggcaaccgcuccggcuacuccggcaucuucuccgucgagggcaaguccugcaucaaccgcugcuucuacgucgagcucauccgcggccgcaaggaggagaccgagguccucuggaccuccaacuccaucgucgucuucugcggcaccuccggcaccuacggcaccggcuccuggcccgacggcgccgacaucaaccucaugcccaucuga

SEQ ID NO: 110838 - RNA, 1410 nt, Artificial Sequence
  derived and/or modified CDS sequence (opt2) from neuraminidase__InfluenzaA__ABD16361
augaaccccaaccagaagaucaucaccaucggcuccgucucccucaccaucuccaccaucugcuucuucaugcagaucgccauccucaucaccaccgucacccuccacuucaagcaguacgaguucaacuccccccccaacaaccaggucaugcucugcgagcccaccaucaucgagcgcaacaucaccgagaucgucuaccucaccaacaccaccaucgagaaggagaucugccccaagcucgccgaguaccgcaacugguccaagccccagugcgacaucaccggcuucgcccccuucuccaaggacaacuccauccgccucuccgccggcggcgacaucugggucacccgcgagcccuacgucuccugcgaccccgacaagugcuaccaguucgcccucggccagggcaccacccucaacaacguccacuccaacgacaccguccacgaccgcacccccuaccgcacccuccucaugaacgagcucggcguccccuuccaccucggcaccaagcaggucugcaucgccugguccuccuccuccugccacgacggcaaggccuggcuccacgucugcgucaccggcgacgacaagaacgccaccgccuccuucaucuacaacggcaagcucgucgacuccaucgucuccugguccaagaagauccuccgcacccaggaguccgagugcgucugcaucaacggcaccugcaccgucgucaugaccgacggcuccgccuccggcaaggccgacaccaagauccucuucaucgaggagggcaagaucguccacaccuccacccucuccggcuccgcccagcacgucgaggagugcuccugcuacccccgcuaccccggcguccgcugcgucugccgcgacaacuggaagggcuccaaccgccccaucgucgacaucaacaucaaggacuacuccaucgucuccuccuacgucugcuccggccucgucggcgacaccccccgcaagaacgacuccuccuccuccucccacugccucgaccccaacaacgaggagggcggccacggcgucaagggcugggccuucgacgacggcaacgacgucuggaugggccgcaccaucuccgagaagcuccgcuccggcuacgagaccuucaaggucaucgagggcugguccaaccccaacuccaagcuccagaucaaccgccaggucaucgucgaccgcggcaaccgcuccggcuacuccggcaucuucuccgucgagggcaaguccugcaucaaccgcugcuucuacgucgagcucauccgcggccgcaaggaggagaccgagguccucuggaccuccaacuccaucgucgucuucugcggcaccuccggcaccuacggcaccggcuccuggcccgacggcgccgacaucaaccucaugcccaucuga

SEQ ID NO: 110839 - RNA, 1410 nt, Artificial Sequence; identical to SEQ ID NO: 110750
  derived and/or modified CDS sequence (opt2) from neuraminidase__InfluenzaA__ABD16475

SEQ ID NO: 110840 - RNA, 1410 nt, Artificial Sequence; identical to SEQ ID NO: 110750
  derived and/or modified CDS sequence (opt2) from neuraminidase__InfluenzaA__ABD16486

SEQ ID NO: 110841 - RNA, 1410 nt, Artificial Sequence; identical to SEQ ID NO: 110777
  derived and/or modified CDS sequence (opt2) from neuraminidase__InfluenzaA__ABD16497

SEQ ID NO: 110842 - RNA, 1410 nt, Artificial Sequence; identical to SEQ ID NO: 110750
  derived and/or modified CDS sequence (opt2) from neuraminidase__InfluenzaA__ABD16508

SEQ ID NO: 110843 - RNA, 1410 nt, Artificial Sequence
  derived and/or modified CDS sequence (opt2) from neuraminidase__InfluenzaA__ABD16519
augaaccccaaccagaagaucaucaccaucggcuccgucucccucaccaucuccaccaucugcuucuucaugcagaucgccauccucaucaccaccgucacccuccacuucaagcaguacgaguucaacuccccccccaacaaccaggucaugcucugcgagcccaccaucaucgagcgcaacaucaccgagaucgucuaccucaccaacaccaccaucgagaaggagaucugccccaagcucgccgaguaccgcaacugguccaagccccagugcgacaucaccggcuucgcccccuucuccaaggacaacuccauccgccucuccgccggcggcgacaucugggucacccgcgagcccuacgucuccugcgaccccgacaagugcuaccaguucgcccucggccagggcaccacccucaacaacguccacuccaacgacaccguccacgaccgcacccccuaccgcacccuccucaugaacgagcucggcguccccuuccaccucggcaccaagcaggucugcaucgccugguccuccuccuccugccacgacggcaaggccuggcuccacgucugcgucaccggcgacgacaagaacgccaccgccuccuucaucuacaacggccgccucgucgacuccaucgucuccugguccaaggacauccuccgcacccaggaguccgagugcgucugcaucaacggcaccugcaccgucgucaugaccgacggcuccgccuccggcaaggccgacaccaagauccucuucaucgaggagggcaagaucguccacaccuccacccucuccggcuccgcccagcacgucgaggagugcuccugcuacccccgcuaccccggcguccgcugcgucugccgcgacaacuggaagggcuccaaccgccccaucgucgacaucaacaucaaggacuacuccaucgucuccuccuacgucugcuccggccucgucggcgacaccccccgcaagaccgacuccuccuccuccucccacugccucgaccccaacaacgaggagggcggccacggcgucaagggcugggccuucgacgacggcaacgacgucuggaugggccgcaccaucuccgagaagcuccgccucggcuacgagaccuucaaggucaucgagggcugguccaaccccaacuccaagcuccagaucaaccgccaggucaucgucgaccgcggcaaccgcuccggcuacuccggcaucuucuccgucgagggcaaguccugcaucaaccgcugcuucuacgucgagcucauccgcggccgcaaggaggagaccgagguccucuggaccuccaacuccaucgucgucuucugcggcaccuccggcaccuacggcaccggcuccuggcccgacggcgccgacaucaaccucaugcccaucuga

SEQ ID NO: 110844 - RNA, 1410 nt, Artificial Sequence
  derived and/or modified CDS sequence (opt2) from neuraminidase__InfluenzaA__ABD16530
augaaccccaaccagaagaucaucaccaucggcuccgucucccucaccaucgccaccaucugcuuccucaugcagaucgccauccucgucaccaccgucacccuccacuucaagcagcacgagugcaacuccccccccaacaaccaggucaugcucugcgagcccaccaucaucgagcgcaacaucaccgagaucgucuaccucaccaacaccaccaucgagaaggagaucugccccaagcucgucgaguaccgcaacugguccaagccccagugcaacaucaccggcuucgcccccuucuccaaggacaacuccauccgccucuccgccggcggcgacaucugggucacccgcgagcccuacgucuccugcgaccccgacaagugcuaccaguucgcccucggccagggcaccacccucaacaacggccacuccaacgacaccguccacgaccgcacccccuaccgcacccuccucaugaacgagcucggcguccccuuccaccucggcacccgccaggucugcaucgccugguccuccuccuccugccacgacggcaaggccuggcuccacgucugcgucaccggcgacgacaagaacgccaccgccuccuucaucuacaacggccgccucgucgacuccaucggcuccugguccaagaagauccuccgcacccaggaguccgagugcgucugcaucaacggcaccugcaccgucgucaugaccgacggcuccgccuccggcaaggccgacaccaagauccucuucaucgaggagggcaagaucguccacaucuccacccucuccggcuccgcccagcacgucgaggagugcuccugcuacccccgcuaccccggcguccgcugcgucugccgcgacaacuggaagggcuccaaccgccccaucgucgacaucaacgucaaggacuacuccaucgucuccuccuacgucugcuccggccucgucggcgacaccccccgcaagaacgacuccuucuccuccucccacugccucgaccccaacaacgaggagggcggccacggcgucaagggcugggccuucgacgacggcaacgacgucuggaugggccgcaccaucuccgagaagcuccgcuccggcuacgagaccuucaaggucaucgagggcugguccaagcccaacuccaagcuccagaucaaccgccaggucaucgucgagcgcggcaaccgcuccggcuacuccggcaucuucuccgucgagggcaagcgcugcaucaaccgcugcuucuacgucgagcucauccgcggccgcaaggaggagaccgaggucugguggaccuccaacuccaucgucgucuucugcggcaccuccggcaccuacggcaccggcuccuggcccgacggcgccgacaucaaccucaugcccaucuga

SEQ ID NO: 110845 - RNA, 1410 nt, Artificial Sequence; identical to SEQ ID NO: 110627
  derived and/or modified CDS sequence (opt2) from neuraminidase__InfluenzaA__ABD16541

SEQ ID NO: 110846 - RNA, 1410 nt, Artificial Sequence; identical to SEQ ID NO: 110750
  derived and/or modified CDS sequence (opt2) from neuraminidase__InfluenzaA__ABD16552

SEQ ID NO: 110847 - RNA, 1410 nt, Artificial Sequence; identical to SEQ ID NO: 110749
  derived and/or modified CDS sequence (opt2) from neuraminidase__InfluenzaA__ABD16563

SEQ ID NO: 110848 - RNA, 1410 nt, Artificial Sequence
  derived and/or modified CDS sequence (opt2) from neuraminidase__InfluenzaA__ABD16574
augaaccccaaccagaagaucaucaccaucggcuccgucucccucaccaucgccaccaucugcuuccucaugcagaucgccauccucgucaccaccgucacccuccacuucaagcaguacgagugcuccuccccccccaacaaccaggucaugcccugcgagcccaccaucaucgagcgcaacaucaccgagaucgucuaccucaccaacaccaccaucgagaaggagaucugccccaagcucgucgaguaccgcaacugguccaagccccagugcaagaucaccggcuucgcccccuucuccaaggacaacuccauccgccucuccgccggcggcgacaucugggucacccgcgagcccuacgucuccugcgaccccggcaagugcuaccaguucgcccucggccagggcaccacccucaacaaccgccacuccaacgacaccguccacgaccgcacccccuaccgcacccuccucaugaacgagcucggcguccccuuccaccucggcaccaagcaggucugcaucgccugguccuccuccuccugccacgacggcaaggccuggcuccacgucugcgucaccggccacgacgagaacgccaccgccuccuucaucuacgacggccgccucgucgacuccaucggcuccugguccaagaacauccuccgcacccaggaguccgagugcgucugcaucaacggcaccugcaccgucgucaugaccgacggcuccgccuccgagcgcgccgacaccaagauccucuucaucgaggagggcaagaucguccacaucuccccccucuccggcuccgcccagcacgucgaggagugcuccugcuacccccgcuaccccggcguccgcugcgucugccgcgacaacuggaagggcuccaaccgccccaucgucgacaucaacgucaaggacuacuccaucgucuccuccuacgucugcuccggccucgucggcgacaccccccgcaagaacgaccgcuccuccuccuccuacugccgcaaccccaacaacgagaagggcucccacggcgucaagggcugggccuucgacgacggcaacgacgucuggaugggccgcaccaucggcgaggagcuccgcuccggcuacgagaccuucaaggucaucggcggcugguccacccccaacuccaagcuccagaucaaccgccaggucaucgucgacuccggcaaccgcuccggcuacuccggcaucuucuccgucgagggcaaguccugcaucaaccgcugcuucuacgucgagcucauccgcggccgcaagaaggagacccgcgucugguggaccuccaacuccaucgucgucuucugcggcaccuccggcaccuacggcaccggcuccuggcccgacggcgccgacaucaaccucaugcccaucuga

SEQ ID NO: 110849 - RNA, 1410 nt, Artificial Sequence
  derived and/or modified CDS sequence (opt2) from neuraminidase__InfluenzaA__ABD16585
augaaccccaaccagaagaucaucaccaucggcuccgucucccucaccaucgccaccaucugcuuccucaugcagaucgccauccucgucaccaccgucacccuccacuucaagcaguacgagugcuccuccccccccaacaaccaggucaugcccugcgagcccaccaucaucgagcgcaacaucaccgagaucgucuaccucaccaacaccaccaucgagaaggagaucugccccaagcucgucgaguaccgcaacugguccaagccccagugcaagaucaccggcuucgcccccuucuccaaggacaacuccauccgccucuccgccggcggcgacaucugggucacccgcgagcccuacgucuccugcgaccccggcaagugcuaccaguucgcccucggccagggcaccacccucaacaaccgccacuccaacgacaccguccacgaccgcacccccuaccgcacccuccucaugaacgagcucggcguccccuuccaccucggcaccaagcaggucugcaucgccugguccuccuccuccugccacgacggcaaggccuggcuccacgucugcgucaccggccacgacaagaacgccaccgccuccuucaucuacgacggccgccucgucgacuccaucggcuccugguccaagaacauccuccgcacccaggaguccgagugcgucugcaucaacggcaccugcaccgucgucaugaccgacggcuccgccuccgagcgcgccgacaccaagauccucuucaucgaggagggcaagaucguccacaucuccccccucuccggcuccgcccagcacgucgaggagugcuccugcuacccccgcuaccccggcguccgcugcgucugccgcgacaacuggaagggcuccaaccgccccaucgucgacaucaacgucaaggacuacuccaucgucuccuccuacgucugcuccggccucgucggcgacaccccccgcaagaacgaccgcuccuccuccuccuacugccgcaaccccaacaacgagaagggcucccacggcgucaagggcugggccuucgacgacggcaacgacgucuggaugggccgcaccaucggcgaggagcuccgcuccggcuacgagaccuucaaggucaucggcggcugguccacccccaacuccaagcuccagaucaaccgccaggucaucgucgacuccggcaaccgcuccggcuacuccggcaucuucuccgucgagggcaaguccugcaucaaccgcugcuucuacgucgagcucauccgcggccgcgagcaggagacccgcgucugguggaccuccaacuccaucgucgucuucugcggcaccuccggcaccuacggcaccggcuccuggcccgacggcgccgacaucaaccucaugcccaucuga

SEQ ID NO: 110850 - RNA, 1410 nt, Artificial Sequence
  derived and/or modified CDS sequence (opt2) from neuraminidase__InfluenzaA__ABD16721
augaaccccaaccagaagaucaucaccaucggcuccgucucccucaccaucgccaccaucugcuuccucaugcagaucgccauccucgucaccaccgucacccuccacuucaagcaguacgagugcuccuccccccccaacaaccaggucaugcccugcgagcccaucaucaucgagcgcaacaucaccaagaucgucuaccucaccaacaccaccaucgagaaggagaucugccccaagcucgucgaguaccgcaacugguccaagccccagugcaagaucaccggcuucgcccccuucuccaaggacaacuccauccgccucuccgccggcggcgacaucugggucacccgcgagcccuacgucuccugcgaccccggcaagugcuaccaguucgcccucggccagggcaccacccucaacaacaagcacuccaacgacaccauccacgaccgcacccccuaccgcacccuccucaugaacgagcucggcguccccuuccaccucggcaccaagcaggucugcaucgccugguccuccuccuccugccacgacggcaaggccuggcuccacgucugcgucaccggccacgacaagaacgccaccgccuccuucaucuacgacggccgccucgucgacuccaucggcuccugguccaagaacauccuccgcacccaggaguccgagugcgucugcaucaacggcaccugcaccgucgucaugaccgacggcuccgccuccgagcgcgccgacaccaagauccucuucaucgaggagggcaagaucguccacaucuccccccucuccggcuccgcccagcacgucgaggagugcuccugcuacccccgcuaccccggcguccgcugcgucugccgcgacaacuggaagggcuccaaccgccccaucgucgacaucaacgucaaggacuacuccaucgucuccuccuacgucugcuccggccucgucggcgacaccccccgcaagaacgaccgcuccuccuccuccuacugccagaaccccaacaacgagaagggcaaccacggcgucaagggcugggccuucgacgacggcaacgacgucuggaugggccgcaccaucggcgaggagcuccgcuccggcuacgagaccuucaaggucaucggcggcugguccacccccaacuccaagcuccagaucaaccgccaggucaucgucgacuccaagaaccgcuccggcuacuccggcaucuucuccgucgagggcaaguccugcaucaaccgcugcuucuacgucgagcucauccgcggccgcgagcaggagacccgcgucugguggaccuccaacuccaucgucgucuucugcggcaccuccggcaccuacggcaccggcuccuggcccgacggcgccgacaucaaccucaugcccaucuga

SEQ ID NO: 110851 - RNA, 1410 nt, Artificial Sequence; identical to SEQ ID NO: 110520
  derived and/or modified CDS sequence (opt2) from neuraminidase__InfluenzaA__ABD16732

SEQ ID NO: 110852 - RNA, 1410 nt, Artificial Sequence
  derived and/or modified CDS sequence (opt2) from neuraminidase__InfluenzaA__ABD16743
augaaccccaaccagaagaucaucaccaucggcuccgucucccucaccaucgccaccaucugcuuccucaugcagaucgccauccucgucaccaccgucacccuccacuucaagcaguacgagugcgacucccccgccaacaaccaggucaugcccugcgagcccaucaucaucgagcgcaacaucaccgagaucgucuaccucaccaacaccaccaucgagaaggagaucugccccaagcucgucgaguaccgcaacugguccaagccccagugcaagaucaccggcuucgcccccuucuccaaggacaacuccauccgccucuccgccggcggcgacaucugggucacccgcgagcccuacgucuccugcgaccccggcaagugcuaccaguucgcccucggccagggcaccacccucgacaacaagcacuccaacgacaccauccacgaccgcaccccccaccgcacccuccucaugaacgagcucggcguccccuuccaccucggcacccgccaggucugcaucgccugguccuccuccuccugccacgacggcaaggccuggcuccacgucugcgucaccggcuacgacaagaacgccaccgccuccuucaucuacgacggccgccucgucgacuccaucggcuccuggucccagaacauccuccgcacccaggaguccgagugcgucugcaucaacggcaccugcaccgucgucaugaccgacggcuccgccuccggccgcgccgacaccaagauccucuucaucgaggagggcaagaucguccacaccuccccccucuccggcuccgcccagcacgucgaggagugcuccugcuacccccgcuaccccggcguccgcugcaucugccgcgacaacuggaagggcuccaaccgccccgucgucgacaucaacgucaaggacuacuccaucgacuccuccuacgucugcuccggccucgucggcgacaccccccgcaacaacgaccgcuccuccuccuccuacugccgcaaccccaacaacgagaagggcacccacggcgucaagggcugggccuucgacgacggcaacgacgucuggaugggccgcaccaucuccgaggacucccgcuccggcuacgagaccuucaaggucaucggcggcugguccacccccaacuccaagcuccagaugaaccgccaggucaucgucgacuccgacaaccgcuccggcuacuccggcaucuucuccgucgagggcaaguccugcaucaaccgcugcuucuacgucgagcucauccgcggccgcgagcaggagacccgcgucugguggaccuccaacuccaucgucgucuucugcggcaccuccggcaccuacggcaccggcuccuggcccgacggcgccgacaucaaccucaugcccaucuga

SEQ ID NO: 110853 - RNA, 1410 nt, Artificial Sequence; identical to SEQ ID NO: 110612
  derived and/or modified CDS sequence (opt2) from neuraminidase__InfluenzaA__ABD16754

SEQ ID NO: 110854 - RNA, 1410 nt, Artificial Sequence; identical to SEQ ID NO: 110710
  derived and/or modified CDS sequence (opt2) from neuraminidase__InfluenzaA__ABD16765

SEQ ID NO: 110855 - RNA, 1410 nt, Artificial Sequence; identical to SEQ ID NO: 110154
  derived and/or modified CDS sequence (opt2) from neuraminidase__InfluenzaA__ABD17326

SEQ ID NO: 110856 - RNA, 1410 nt, Artificial Sequence
  derived and/or modified CDS sequence (opt2) from neuraminidase__InfluenzaA__ABD38137
augaaccccaaccagaagaucaucaccaucggcuccgucucccucaccaucgccaccaucugcuuccucaugcagaucgccauccucgucaccaccgucacccuccacuucaagcaguacgagugcaacuccccccccaacaaccaggucaugcucugcgagcccaccaucaucgagcgcaacaucaccgagaucgucuaccucaccaacaccaccaucgagaaggagaucugccccaagcucgccgaguaccgcaacugguccaagccccagugcaacaucaccggcuucgcccccuucuccaaggacaacuccauccgccucuccgccggcggcgacaucugggucacccgcgagcccuacgucuccugcgaccccgacaagugcuaccaguucgcccucggccagggcaccacccucaacaacggccacuccaacgacaccguccacgaccgcacccccuaccgcacccuccucaugaacgagcucggcguccccuuccaccucggcacccgccaggucugcaucgccugguccuccuccuccugccacgacggcaaggccuggcuccacgucugcgucaccggcgacgacgagaacgccaccgccuccuucaucuacaacggccgccucgucgacuccaucggcuccugguccaagaagauccuccgcacccaggaguccgagugcgucugcaucaacggcaccugcaccgucgucaugaccgacggcuccgccuccggcaaggccgacaccaagauccucuucaucgaggagggcaagaucguccacaucuccacccucuccggcuccgcccagcacgucgaggagugcuccugcuacccccgcuaccccggcguccgcugcgucugccgcgacaacuggaagggcuccaaccgccccaucaucgacaucaacgucaaggacuacuccaucgucuccuccuacgucugcuccggccucgucggcgacaccccccgcaagaacgacuccuucuccuccucccacugccucgaccccaacaacgaggagggcggccacggcgucaagggcugggccuucgacgacggcaacgacgucuggaugggccgcaccaucuccgagaagcuccgcuccggcuacgagaccuucaaggucaucgagggcugguccaagcccaacuccaagcuccagaccaaccgccaggucaucgucgagcgcggcaaccgcuccggcuacuccggcaucuucuccgucgagggcaaguccugcaucaaccgcugcuucuacgucgagcucauccgcggccgcaaggaggagcccgaggucugguggaccuccaacuccaucgucgucuucugcggcacccccggcaccuacggcaccggcuccuggcccgacggcgccgacaucaaccucaugcccaucuga

SEQ ID NO: 110857 - RNA, 1413 nt, Artificial Sequence; identical to SEQ ID NO: 110422
  derived and/or modified CDS sequence (opt2) from neuraminidase__InfluenzaA__ABD60782

SEQ ID NO: 110858 - RNA, 1410 nt, Artificial Sequence
  derived and/or modified CDS sequence (opt2) from neuraminidase__InfluenzaA__ABD60793
augaaccccaaccagaagaucaucaccaucggcuccgucucccucaccaucgccaccaucugcuuccucaugcagaucgccauccucgucaccaccgucacccuccacuucaagcaguacgagugcgacucccccgucaacaaccaggucaugcccugcgagcccaucaucaucgagcgcaacaucaccgagaucgucuaccucaccaacaccaccaucgagaaggagaucugccccaagcucgucgaguaccgcaacugguccaagccccagugcaagaucaccggcuucgcccccuucuccaaggacaacuccauccgccucuccgccggcggcgacaucugggucacccgcgagcccuacgucuccugcgaccccggcaagugcuaccaguucgcccucggccagggcaccacccucgacaacaagcacuccaacgacaccauccacgaccgcaccccccaccgcacccuccucaugaacgagcucggcguccccuuccaccucggcacccgccaggucugcaucgccugguccuccuccuccugccacgacggcaaggccuggcuccacgucugcgucaccggcuacgacaagaacgccaccgccuccuucaucuacgacggccgccucgucgacuccaucgucuccuggucccagaacauccuccgcacccaggaguccgagugcgucugcaucaacggcaccugcaccgucgucaugaccgacggcuccgccuccgagcgcgccgacaccaagauccucuucaucgaggagggcaagaucguccacaucuccccccucuccggcuccgcccagcacgucgaggagugcuccugcuacccccgcuaccccggcguccgcugcaucugccgcgacaacuggaagggcuccaaccgccccgucgucgacaucaacgucaaggacuacuccaucgacuccuccuacgucugcuccggccucgucggcgacaccccccgcaacaacgaccgcuccuccaacuccuacugccgcaaccccaacaacgagaagggcaaccacggcgucaagggcugggccuucgacgacggcaacgaccucuggaugggccgcaccaucuccgaggacucccgcuccggcuacgagaccuucaaggucaucggcggcugguccacccccaacuccaagcuccagaucaaccgccaggucaucgucgacuccgacaaccgcuccggcuacuccggcaucuucuccgucgagggcaaguccugcaucaaccgcugcuucuacgucgagcucauccgcggccgcgagcaggagacccgcgucugguggaccuccaacuccaucaucgucuucugcggcaccuccggcaccuacggcaccggcuccuggcccgacggcgccgacaucaaccucaugcccaucuga

SEQ ID NO: 110859 - RNA, 1410 nt, Artificial Sequence; identical to SEQ ID NO: 110555
  derived and/or modified CDS sequence (opt2) from neuraminidase__InfluenzaA__ABD60804

SEQ ID NO: 110860 - RNA, 1410 nt, Artificial Sequence; identical to SEQ ID NO: 110748
  derived and/or modified CDS sequence (opt2) from neuraminidase__InfluenzaA__ABD60815

SEQ ID NO: 110861 - RNA, 1410 nt, Artificial Sequence; identical to SEQ ID NO: 110750
  derived and/or modified CDS sequence (opt2) from neuraminidase__InfluenzaA__ABD60826

SEQ ID NO: 110862 - RNA, 1410 nt, Artificial Sequence; identical to SEQ ID NO: 110829
  derived and/or modified CDS sequence (opt2) from neuraminidase__InfluenzaA__ABD60837

SEQ ID NO: 110863 - RNA, 1410 nt, Artificial Sequence
  derived and/or modified CDS sequence (opt2) from neuraminidase__InfluenzaA__ABD60848
augaaccccaaccagaagaucaucaccaucggcuccgucucccucaccaucgccaccaucugcuuccucaugcaggucgccauccucgucaccaccgucacccuccacuucaagcaguacgagugcaacuccccccccaacaaccaggucaugcucugcgagcccaccaucaucgagcgcaacaucaccgagaucgucuaccucaccaacaccaccaucgagaaggagaucugccccaagcucgccgaguaccgcaacugguccaagccccagugcaacaucaccggcuucgcccccuucuccaaggacaacuccauccgccucuccgccggcggcgacaucugggucacccgcgagcccuacgucuccugcgaccccgacaagugcuaccaguucgcccucggccagggcaccacccucaacaacggccacuccaacgacaccguccacgaccgcacccccuaccgcacccuccucaugaacgagcucggcguccccuuccaccucggcaccaagcaggucugcaucgccugguccuccuccuccugccacgacggcaaggccuggcuccacgucugcgucaccggcgacgacgagaacgccaccgccuccuucaucuacaacggccgccucgucgacuccaucggcuccugguccaagaagauccuccgcacccaggaguccgagugcgucugcaucaacggcaccugcaccgucgucaugaccgacggcuccgccuccggcaaggccgacaccaagauccucuucaucgaggagggcaagaucguccacaccucccuccucuccggcuccgcccagcacgucgaggagugcuccugcuacccccgcuaccccggcguccgcugcgucugccgcgacaacuggaagggcuccaaccgccccaucgucgacaucaacgucaaggacuacuccaucgucuccuccuacgucugcuccggccucgucggcgacaccccccgcaagaacgacuccuccuccuccucccacugccucgaccccaacaacgaggagggcggccacggcgucaagggcugggccuucgacgacggcaacgacgucuggaugggccgcaccaucuccgagaagcuccgcuccggcuacgagaccuucaaggucaucgagggcugguccaagcccaacuccaagcuccagaucaaccgccaggucaucgucgaccgcggcaaccgcuccggcuacuccggcaucuucuccgucgagggcaaguccugcaucaaccgcugcuucuacgucgagcucauccgcggccgcaagcaggagaccgagguccucuggaccuccaacuccaucgucgucuucugcggcaccuccggcaccuacggcaccggcuccuggcccgacggcgccgacaucaaccucaugcccaucuga

SEQ ID NO: 110864 - RNA, 1413 nt, Artificial Sequence
  derived and/or modified CDS sequence (opt2) from neuraminidase__InfluenzaA__ABD60881
augaaccccaaccagaagaucaucaccaucggcuccaucuccaucgccaucggcaucaucucccucaugcuccagaucggcaacaucaucuccaucugggccucccacuccauccagaccggcucccagaaccacaccggcaucugcaaccagcgcaucaucaccuacgagaacuccaccugggucaaccacaccuacgucaacaucaacaacaccaacgucgucgccggcaaggacaagaccuccgucacccucgccggcaacuccucccucugcuccaucuccggcugggccaucuacaccaaggacaacuccauccgcaucggcuccaagggcgacgucuucgucauccgcgagcccuucaucuccugcucccaccucgagugccgcaccuucuuccucacccagggcgcccuccucaacgacaagcacuccaacggcaccgucaaggaccgcucccccuaccgcgcccucauguccugcccccucggcgaggcccccucccccuacaacuccaaguucgaguccgucgccugguccgccuccgccugccacgacggcaugggcuggcucaccaucggcaucuccggccccgacaacggcgccgucgccguccucaaguacaacggcaucaucaccgagaccaucaaguccuggaagaagcgcauccuccgcacccaggaguccgagugcgucugcgucaacggcuccugcuucaccaucaugaccgacggccccuccaacggcgccgccuccuacaagaucuucaagaucgagaagggcaaggucaccaaguccaucgagcucaacgcccccaacuuccacuacgaggagugcuccugcuaccccgacaccggcaccgucaugugcgucugccgcgacaacuggcacggcuccaaccgccccugggucuccuucaaccagaaccucgacuaccagaucggcuacaucugcuccggcgucuucggcgacaacccccgccccaaggacggcgagggcuccugcaaccccgucaccgucgacggcgccgacggcgucaagggcuucuccuacaaguacggcaacggcgucuggaucggccgcaccaaguccaaccgccuccgcaagggcuucgagaugaucugggaccccaacggcuggaccgacaccgacuccaacuucuccgucaagcaggacgucgucgccaucaccgacugguccggcuacuccggcuccuucguccagcaccccgagcucaccggccucgacugcauccgccccugcuucugggucgagcucguccgcggccucccccgcgagaacaccaccaucuggaccuccggcuccuccaucuccuucugcggcgucaacuccgacaccgccaacugguccuggcccgacggcgccgagcuccccuucaccaucgacaaguga

SEQ ID NO: 110865 - RNA, 1413 nt, Artificial Sequence
  derived and/or modified CDS sequence (opt2) from neuraminidase__InfluenzaA__ABD60892
augaaccccaaccagaagaucaucaccaucggcuccaucuccaucgccaucggcaucaucucccucaugcuccagaucggcaacaucaucuccaucugggccucccacuccauccagaccggcucccagaaccacaccggcaucugcaaccagcgcgucaucaccuacgagaacuccaccugggucaaccacaccuacgucaacaucaacaacaccaacgucgucgccggcaaggacaagaccuccgucacccucgccggcaacuccucccucugcuccaucuccggcugggccaucuacaccaaggacaacuccauccgcaucggcuccaagggcgacgucuucgucauccgcgagcccuucaucuccugcucccaccucgagugccgcaccuucuuccucacccagggcgcccuccucaacgacaagcacuccaacggcaccgucaaggaccgcucccccuaccgcgcccucauguccugcccccucggcgaggcccccucccccuacaacuccaaguucgaguccgucgccugguccgccuccgccugccacgacggcaugggcuggcucaccaucggcaucuccggccccgacaacggcgccgucgccguccucaaguacaacggcaucaucaccgagaccaucaaguccuggaagaagcgcauccuccgcacccaggaguccgagugcgucugcgucaacggcuccugcuucaccaucaugaccgacggccccuccaacggcgccgccuccuacaagaucuucaagaucgagaagggcaaggucaccaaguccaucgagcucaacgcccccaacuuccacuacgaggagugcuccugcuaccccgacaccggcaccgucaugugcgucugccgcgacaacuggcacggcuccaaccgccccugggucuccuucaaccagaaccucgacuaccagaucggcuacaucugcuccggcgucuucggcgacaacccccgccccaaggacggcgagggcuccugcaaccccgucaccgucgacggcgccgacggcgucaagggcuucuccuacaaguacggcaacggcgucuggaucggccgcaccaaguccaaccgccuccgcaagggcuucgagaugaucugggaccccaacggcuggaccgacaccgacuccaacuucuccgucaagcaggacgucgucgccaucaccgacugguccggcuacuccggcuccuucguccagcaccccgagcucaccggccucgacugcauccgccccugcuucugggucgagcucguccgcggccucccccgcgagaacaccaccaucuggaccuccggcuccuccaucuccuucugcggcgucaacuccgacaccgccaacugguccuggcccgacggcgccgagcuccccuucaccaucgacaaguga

SEQ ID NO: 110866 - RNA, 1413 nt, Artificial Sequence; identical to SEQ ID NO: 110864
  derived and/or modified CDS sequence (opt2) from neuraminidase__InfluenzaA__ABD60903

SEQ ID NO: 110867 - RNA, 1413 nt, Artificial Sequence; identical to SEQ ID NO: 110451
  derived and/or modified CDS sequence (opt2) from neuraminidase__InfluenzaA__ABD60914

SEQ ID NO: 110868 - RNA, 1410 nt, Artificial Sequence
  derived and/or modified CDS sequence (opt2) from neuraminidase__InfluenzaA__ABD60925
augaaccccaaccagaagaucaucaccaucggcuccgucucccucaccaucgccaccaucugcuuccucaugcagaucgccauccucgucaccaccgucacccuccacuucaagcagcacgagugcaacuccccccccaacaaccaggucaugcucugcgagcccaccaucaucgagcgcaacaucaccgagaucgucuaccucaccaacaccaccaucgagaaggagaucugccccaagcucgccgaguaccgcaacugguccaagccccagugcaacaucaccggcuucgcccccuucuccaaggacaacuccauccgccucuccgccggcggcgacaucugggucacccgcgagcccuacgucuccugcgaccccgacaagugcuaccaguucgcccucggccagggcaccacccucaacaacggccacuccaacgacaccguccacgaccgcacccccuaccgcacccuccucaugaacgagcucggcguccccuuccaccucggcacccgccaggucugcaucgccugguccuccuccuccugccacgacggcaaggccuggcuccacgucugcgucaccggcgacgacaagaacgccaccgccuccuucaucuacaacggccgccucgucgacuccaucggcuccugguccaagaagauccuccgcacccaggaguccgagugcgucugcaucaacggcaccugcaccgucgucaugaccgacggcuccgccuccggcaaggccgacaccaagauccucuucaucgaggagggcaagaucguccacaucuccacccucuccggcuccgcccagcacgucgaggagugcuccugcuacccccgcuaccccggcguccgcugcgucugccgcgacaacuggaagggcuccaaccgccccaucgucgacaucaacaucaaggacuacuccaucgucuccuccuacgucugcuccggccucgucggcgacaccccccgcaagaacgacuccuucuccuccucccacugccucgaccccaacaacgaggagggcggccacggcgucaagggcugggccuucgacgacggcaacgacgucuggaugggccgcaccaucuccgagaagcuccgcuccggcuacgagaccuucaaggucaucgagggcugguccaagcccaacuccaagcuccagaucaaccgccaggucaucgucgagcgcggcaaccgcuccggcuacuccggcaucuucuccgucgagggcaaguccugcaucaaccgcugcuucuacgucgagcucauccgcggccgcaaggaggagaccgaggucugguggaccuccaacuccaucgucgucuucugcggcaccuccggcaccuacggcaccggcuccuggcccgacggcgccgacaucaaccucaugcccaucuga

SEQ ID NO: 110869 - RNA, 1413 nt, Artificial Sequence
  derived and/or modified CDS sequence (opt2) from neuraminidase__InfluenzaA__ABD60947
augaaccccaaccagaagaucaucaccaucggcuccaucugcauggccaucggcaucaucucccucauccuccagaucggcaacaucaucuccaucugggucucccacuccauccagaccggcucccagaaccacaccggcaucugcaaccagcgcaucaucaccuacgagaacuccaccugggucaaccagaccuacgucaacaucuccaacaccaacgucgucgccggcaaggacaccaccuccaugacccucgccggcaacuccucccucugccccauccgcggcugggccaucuacuccaaggacaacuccauccgcaucggcuccaagggcgacgucuucgucauccgcgagcccuucaucuccugcucccaccucgagugccgcaccuucuuccucacccagggcgcccuccucaacgacaagcacuccaacggcaccaucaaggaccgcucccccuaccgcgcccucauguccugccccaucggcgaggcccccucccccuacaacucccgcuucgaguccgucgccugguccgccuccgccugccacgacggcaugggcuggcucaccaucggcaucuccggccccgacgacggcgccgucgccguccucaaguacaacggcaucaucaccgagaccaucaaguccuggcgcaagcagauccuccgcacccaggaguccgagugcgucugcgucaacggcuccugcuucaccaucaugaccgacggccccuccgacggccccgccuccuaccgcaucuucaagaucgagaagggcaagaucaccaaguccaucgagcucgacgcccccaacucccacuacgaggagugcuccugcuaccccgacaccggcaccgucaugugcgucugccgcgacaacuggcacggcuccaaccgccccugggucuccuucaaccagaaccucgacuaccagaucggcuacaucugcuccggcgucuucggcgacaacccccgccccaaggacggcaagggcuccugcgaccccgucaacgucgacggcgccgacggcgucaagggcuucuccuaccgcuacggcaacggcgucuggaucggccgcaccaaguccaacuccucccgcaagggcuucgagaugaucugggaccccaacggcuggaccgacaccgacuccaacuuccucgucaagcaggacgucgucgccaugaccgacugguccggcuacuccggcuccuucguccagcaccccgagcucaccggccucgacugcaugcgccccugcuucugggucgagcucauccgcggccgcccccgcgagaagaccaccaucuggaccuccggcuccuccaucuccuucugcggcgucaacuccgacaccgucaacugguccuggcccgacggcgccgagcuccccuucaccaucgacaaguga

SEQ ID NO: 110870 - RNA, 1410 nt, Artificial Sequence
  derived and/or modified CDS sequence (opt2) from neuraminidase__InfluenzaA__ABD61263
augaaccccaaccagaagaucaucaccaucggcuccgucucccucaccaucgccaccaucugcuuccucaugcagaucgccauccucgucaccaccgucacccuccacuucaagcagcacgagugcaacuccccccccaacaaccaggucaugcucugcgagcccaccaucaucgagcgcaacaucaccgagaucgucuaccucaccaacaccaccaucgagaaggagaucugccccaagcucgccgaguaccgcaacugguccaagccccagugcaacaucaccggcuucgcccccuucuccaaggacaacuccauccgccucuccgccggcggcgacaucugggucacccgcgagcccuacgucuccugcgaccccgacaagugcuaccaguucgcccucggccagggcaccacccucaacaacggccacuccaacgacaccguccacgaccgcacccccuaccgcacccuccucaugaacgagcucggcguccccuuccaccucggcacccgccaggucugcaucgccugguccuccuccuccugccacgacggcaaggccuggcuccacgucugcgucaccggcgacgacaagaacgccaccgccuccuucaucuacaacggccgccucgucgacuccaucggcuccugguccaagaagauccuccgcacccaggaguccgagugcgucugcaucaacggcaccugcaccgucgucaugaccgacggcuccgccuccggcaaggccgacaccaagauccucuucaucgaggagggcaagaucguccacaucuccacccucuccggcuccgcccagcacgucgaggagugcuccugcuacccccgcuaccccggcguccgcugcgucugccgcgacaacuggaagggcuccaaccgccccaucgucgacaucaacgucaaggacuacuccaucgucuccuccuacgucugcuccggccucgucggcgacaccccccgcaagaacgacuccuucuccuccucccacugccucgaccccaacaacgaggagggcggccacggcaugaagggcugggccuucgacgacggcaacgacgucuggaugggccgcaccaucuccgagaagcuccgcuccggcuacgagaccuucaaggucaucgagggcugguccaagcccaacuccaagcuccaggucaaccgccaggucaucgucgagcgcggcaaccgcuccggcuacuccggcaucuucuccgucgagggcaaguccugcaucaaccgcugcuucuacgucgagcucauccgcggccgcaaggaggagaccgaggucugguggaccuccaacuccaucgucgucuucugcggcaccuccggcaccuacggcaccggcuccuggcccgacggcgccgacaucaaccucaugcccaucuga

SEQ ID NO: 110871 - RNA, 1410 nt, Artificial Sequence; identical to SEQ ID NO: 110181
  derived and/or modified CDS sequence (opt2) from neuraminidase__InfluenzaA__ABD61274

SEQ ID NO: 110872 - RNA, 1410 nt, Artificial Sequence
  derived and/or modified CDS sequence (opt2) from neuraminidase__InfluenzaA__ABD61285
augaaccccaaccagaagaucaucaccaucggcuccgucucccucaccaucuccaccaucugcuucuucaugcagaucgccauccucaucaccaccgucacccuccacuucaagcaguacgaguucaacuccccccccaacaaccaggucaugcucugcgagcccaccaucaucgagcgcaacaucaccgagaucgucuaccucaccaacaccaccaucgagaaggagaucugccccaagcucgccgaguaccgcaacugguccaagccccagugcgacaucaccggcuucgcccccuucuccaaggacaacuccauccgccucuccgccggcggcgacaucugggucacccgcgagcccuacgucuccugcgaccccgacaagugcuaccaguucgcccucggccagggcaccacccucaacaacguccacuccaacgacaccguccacgaccgcacccccuaccgcacccuccucaugaacgagcucggcguccccuuccaccucggcaccaagcaggucugcaucgccugguccuccuccuccugccacgacggcaaggccuggcuccacgucugcgucaccggcgacgacaagaacgccaccgccuccuucaucuacaacggccgccucgucgacuccaucgucuccugguccaaggagauccuccgcacccaggaguccgagugcgucugcaucaacggcaccugcaccgucgucaugaccgacggcaacgccuccggcaaggccgacaccaagauccucuucaucgaggagggcaagaucguccacaccuccacccucuccggcuccgcccagcacgucgaggagugcuccugcuacccccgcuaccccggcguccgcugcgucugccgcgacaacuggaagggcuccaaccgccccaucgucgacaucaacaucaaggacuacuccaucgucuccuccuacgucugcuccggccucgucggcgacaccccccgcaagaacgacuccuccuccuccucccacugccucgaccccaacaacgaggagggcggccacggcgucaagggcugggccuucgacgacggcaacgacgucuggaugggccgcaccaucuccgagaagcuccgcuccggcuacgagaccuucaaggucaucgagggcugguccaaccccaacuccaagcuccagaucaaccgccaggucaucgucgaccgcggcaaccgcuccggcuacuccggcaucuucuccgucgagggcaaguccugcaucaaccgcugcuucuacgucgagcucauccgcggccgcaaggaggagaccgagguccucuggaccuccaacuccaucgucgucuucugcggcaccuccggcaccuacggcaccggcuccuggcccgacggcgccgacaucaaccucaugcccaucuga

SEQ ID NO: 110873 - RNA, 1410 nt, Artificial Sequence; identical to SEQ ID NO: 110627
  derived and/or modified CDS sequence (opt2) from neuraminidase__InfluenzaA__ABD61296

SEQ ID NO: 110874 - RNA, 1410 nt, Artificial Sequence; identical to SEQ ID NO: 110748
  derived and/or modified CDS sequence (opt2) from neuraminidase__InfluenzaA__ABD61307

SEQ ID NO: 110875 - RNA, 1410 nt, Artificial Sequence; identical to SEQ ID NO: 110766
  derived and/or modified CDS sequence (opt2) from neuraminidase__InfluenzaA__ABD61318

SEQ ID NO: 110876 - RNA, 1410 nt, Artificial Sequence; identical to SEQ ID NO: 110097
  derived and/or modified CDS sequence (opt2) from neuraminidase__InfluenzaA__ABD61340

SEQ ID NO: 110877 - RNA, 1410 nt, Artificial Sequence; identical to SEQ ID NO: 110097
  derived and/or modified CDS sequence (opt2) from neuraminidase__InfluenzaA__ABD61351

SEQ ID NO: 110878 - RNA, 1410 nt, Artificial Sequence
  derived and/or modified CDS sequence (opt2) from neuraminidase__InfluenzaA__ABD61362
augaaccccaaccagaagaucaucaccaucggcuccgucucccucaccaucgccaccaucugcuuccucaugcagaucgccauccucgucaccaccgucacccuccacuucaagcaguacgagugcaacuccccccccaacaaccaggucaugcucugcgagcccaccaucaucgagcgcaacaucaccgagaucgucuaccucaccaacaccaccaucgagaaggaggucugccccaagcucgccgaguaccgcaacugguccaagccccagugcaacaucaccggcuucgcccccuucuccaaggacaacuccauccgccucuccgccggcggcgacaucugggucacccgcgagcccuacgucuccugcgaccccgacaagugcuaccaguucgcccucggccagggcaccacccucaacaacggccacuccaacgacaccguccacgaccgcacccccuaccgcacccuccucaugaacgagcucggcguccccuuccaccucggcaccaagcaggucugcaucgccugguccuccuccuccugccacgacggcaaggccuggcuccacgucugcgucaccggcgacgacgagaacgccaccgccuccuucaucuacaacggccgccucgucgacuccaucggcuccugguccaagaagauccuccgcacccaggaguccgagugcgucugcaucaacggcaccugcaccgucgucaugaccgacggcuccgccuccggcaaggccgacaccaagauccucuucaucgaggagggcaagaucguccacaccuccucccucuccggcuccgcccagcacgucgaggagugcuccugcuacccccgcuaccccggcguccgcugcgucugccgcgacaacuggaagggcuccaaccgccccaucgucgacaucaacgucaaggacuacuccaucgucuccuccuacgucugcuccggccucgucggcgacaccccccgcaagaacgacuccuccuccuccucccacugccucgaccccaacaacgaggagggcggccacggcgucaagggcugggccuucgacgacggcaacgacgucuggaugggccgcaccaucuccgagaagcuccgcuccggcuacgagaccuucaaggucaucgagggcugguccaagcccaacuccaagcuccagaucaaccgccaggucaucgucgaccgcggcaaccgcuccggcuacuccggcaucuucuccgucgagggcaaguccugcaucaaccgcugcuucuacgucgagcucauccgcggccgcaagcaggagaccgagguccucuggaccuccaacuccaucgucgucuucugcggcaccuccggcaccuacggcaccggcuccuggcccgacggcgccgacaucgaccucaugcccaucuga

SEQ ID NO: 110879 - RNA, 1410 nt, Artificial Sequence; identical to SEQ ID NO: 110829
  derived and/or modified CDS sequence (opt2) from neuraminidase__InfluenzaA__ABD61373

SEQ ID NO: 110880 - RNA, 1410 nt, Artificial Sequence
  derived and/or modified CDS sequence (opt2) from neuraminidase__InfluenzaA__ABD61384
augaaccccaaccagaagaucaucaccaucggcuccgucucccucaccaucgccaccaucugcuuccucaugcagaucgccauccucgucaccaccgucacccuccacuucaagcaguacgagugcaacuccccccccaacaaccaggucaugcucugcgagcccaccaucaucgagcgcaacaucaccgagaucgucuaccucaccaacaccaccaucgagaaggagaucugccccaagcucgccgaguaccgcaacugguccaagccccagugcaacaucaccggcuucgcccccuucuccaaggacaacuccauccgccucuccgccggcggcgacaucugggucacccgcgagcccuacgucuccugcgaccccgacaagugcuaccaguucgcccucggccagggcaccacccucaacaacggccacuccaacgacaccguccacgaccgcacccccuaccgcacccuccucaugaacgagcucggcguccccuuccaccucggcaccaagcaggucugcaucgccugguccuccuccuccugccacgacggcaaggccuggcuccacgucugcgucaccggcgacgacgagaacgccaccgccuccuucaucuacaacggccgccucgucgacuccaucggcuccugguccaagaagauccuccgcacccaggaguccgagugcgucugcaucaacggcaccugcaccgucgucaugaccgacggcuccgccuccggcaaggccgacaccaagauccucuucaucgaggagggcaagaucguccacaccuccucccucuccggcuccgcccagcacgucgaggagugcuccugcuacccccgcuaccccggcguccgcugcgucugccgcgacaacuggaagggcuccaaccgccccaucgucgacaucaacaucaaggacuacuccaucgucuccuccuacgucugcuccggccucgucggcgacaccccccgcaagaacgacuccuccuccuccucccacugccucgaccccaacaacgaggagggcggccacggcgucaagggcugggccuucgacgacggcaacgacgucuggaugggccgcaccaucuccgagaagcuccgcuccggcuacgagaccuucaaggucaucgagggcugguccaagcccaacuccaagcuccagaucaaccgccaggucaucgucgaccgcggcaaccgcuccggcuacuccggcaucuucuccgucgaguccaaguccugcaucaaccgcugcuucuacgucgagcucauccgcggccgcaagcaggagaccgagguccucuggaccuccaacuccaucgucgucuucugcggcaccuccggcaccuacggcaccggcuccuggcccgacggcgccgacaucaaccucaugcccaucuga

SEQ ID NO: 110881 - RNA, 1410 nt, Artificial Sequence; identical to SEQ ID NO: 110766
  derived and/or modified CDS sequence (opt2) from neuraminidase__InfluenzaA__ABD61395

SEQ ID NO: 110882 - RNA, 1410 nt, Artificial Sequence; identical to SEQ ID NO: 110863
  derived and/or modified CDS sequence (opt2) from neuraminidase__InfluenzaA__ABD61406

SEQ ID NO: 110883 - RNA, 1413 nt, Artificial Sequence; identical to SEQ ID NO: 110864
  derived and/or modified CDS sequence (opt2) from neuraminidase__InfluenzaA__ABD61521

SEQ ID NO: 110884 - RNA, 1410 nt, Artificial Sequence
  derived and/or modified CDS sequence (opt2) from neuraminidase__InfluenzaA__ABD61532
augaaccccaaccagaagaucaucaccaucggcuccgucucccucaccaucgccaccaucugcuuccucaugcagaucgccauccucgucaccaccgucacccuccacuucaagcaguacgagugcuccuccccccccaacaaccaggucaugcccugcgagcccaucaucaucgagcgcaacaucaccgagaucgucuaccucaccaacaccaccaucgagaaggagaucugccccaagcucgucgaguaccgcaacugguccaagccccagugcaagaucaccggcuucgcccccuucuccaaggacaacuccauccgccucuccgccggcggcgacaucugggucacccgcgagcccuacgucuccugcgaccccggcaagugcuaccaguucgcccucggccagggcaccacccucaacaacaagcacuccaacgacaccauccacgaccgcacccccuaccgcacccuccucaugaacgagcucggcguccccuuccaccucggcaccaagcaggucugcaucgccugguccuccuccuccugccacgacggcaaggccuggcuccacgucugcgucaccggccacgacaagaacgccaccgccuccuucaucuacgacggccgccucgucgacuccaucggcuccugguccaagaacauccuccgcacccaggaguccgagugcgucugcaucaacggcaccugcaccgucgucaugaccgacggcuccgccuccgagcgcgccgacaccaagauccucuucaucgaggagggcaagaucguccacaucuccccccucuccggcuccgcccagcacgucgaggagugcuccugcuacccccgcuaccccggcguccgcugcgucugccgcgacaacuggaagggcuccaaccgccccaucgucgacaucaacgucaaggacuacuccaucgucuccuccuacgucugcuccggccucgucggcgacaccccccgcaagaacgaccgcuccuccuccuccuacugccgcaaccccaacaacgagaagggcaaccacggcgucaagggcugggccuucgacgacggcaacgacgucuggaugggccgcaccaucggcgaggagcuccgcuccggcuacgagaccuucaaggucaucggcggcugguccacccccaacuccaagcuccagaucaaccgccaggucaucgucgacuccgagaaccgcuccggcuacuccggcaucuucuccgucgagggcaaguccugcaucaaccgcugcuucuacgucgagcucauccgcggccgcgagcaggagacccgcgucugguggaccuccaacuccaucgucgucuucugcggcaccuccggcaccuacggcaccggcuccuggcccgacggcgccgacaucucccucaugcccaucuga

SEQ ID NO: 110885 - RNA, 1413 nt, Artificial Sequence
  derived and/or modified CDS sequence (opt2) from neuraminidase__InfluenzaA__ABD61543
augaaccccaaccagaagaucaucaccaucggcuccaucuccaucgccaucggcaucaucucccucaugcuccagaucggcaacaucaucuccaucugggccucccacuccauccagaccggcucccagaaccacaccggcaucugcaaccagcgcaucaucaccuacgagaacuccaccugggucaaccacaccuacgucaacaucaacaacaccaacgucgucgccggcaaggacaagaccuccgucacccucgccggcaacuccucccucugcuccaucuccggcugggccaucuacaccaaggacaacuccauccgcaucggcuccaagggcgacgucuucgucauccgcgagcccuucaucuccugcucccaccucgagugccgcaccuucuuccucacccagggcgcccuccucaacgacaagcacuccaacggcaccgucaaggaccgcucccccuaccgcgcccucauguccugcccccucggcgaggcccccucccccuacaacuccaaguucgaguccgucgccugguccgccuccgccugccacgacggcaugggcuggcucaccaucggcaucuccggccccgacaacggcgccgucgccguccucaaguacaacggcaucaucaccgagaccaucaaguccuggaagaagcgcauccuccgcacccaggaguccgagugcgucugcgucaacggcuccugcuucaccaucaugaccgacggccccuccaacggcgccgccuccuacaagaucuucaagaucgagaagggcaaggucaccaaguccaucgagcucaacgcccccaacuuccacuacgaggagugcuccugcuaccccgacaccggcaccgucaugugcgucugccgcgacaacuggcacggcuccaaccgccccugggucuccuucaaccagaaccucgacuaccagaucggcuacaucugcuccggcgucuucggcgacaacccccgccccaaggacggcgagggcuccugcaaccccgucaccgucgacggcgccgacggcgucaagggcuucuccuacaaguacggcaacggcgucuggaucggccgcaccaaguccaaccgccuccgcaagggcuucgagaugaucugggaccccaacggcuggaccgacaccgacuccaacuucuccgucaagcaggacgucgucgccaucaccgacugguccggcuacuccggcaacuucguccagcaccccgagcucaccggccucgacugcauccgccccugcuucugggucgagcucguccgcggccucccccgcgagaacaccaccaucuggaccuccggcuccuccaucuccuucugcggcgucaacuccgacaccgccaacugguccuggcccgacggcgccgagcuccccuucaccaucgacaaguga

SEQ ID NO: 110886 - RNA, 1413 nt, Artificial Sequence; identical to SEQ ID NO: 110864
  derived and/or modified CDS sequence (opt2) from neuraminidase__InfluenzaA__ABD63066

SEQ ID NO: 110887 - RNA, 1410 nt, Artificial Sequence; identical to SEQ ID NO: 110289
  derived and/or modified CDS sequence (opt2) from neuraminidase__InfluenzaA__ABD77601

SEQ ID NO: 110888 - RNA, 1410 nt, Artificial Sequence
  derived and/or modified CDS sequence (opt2) from neuraminidase__InfluenzaA__ABD77612
augaaccccaaccagaagaucaucaccaucggcuccgucucccucaccaucgccaccaucugcuuccucaugcagaucgccauccucgucaccaccgucacccuccacuucaagcaguacgagugcaacuccccccccaacaaccaggucaugcucugcgagcccaccaucaucgagcgcaacaucaccgagaucgucuaccucaccaacaccaccaucgagaaggagaugugccccaagcucgccgaguaccgcaacuggcucaagccccagugcaacaucaccggcuucgcccccuucuccaaggacaacuccauccgccucuccgccggcggcgacaucugggucacccgcgagcccuacgucuccugcgaccccgacaagugcuaccaguucgcccucggccagggcaccacccucaacaacggccacuccaacgacaccguccacgaccgcacccccuaccgcacccuccucaugaacgagcucggcguccccuuccaccucggcaccaagcaggucugcaucgccugguccuccuccuccugccacgacggcaaggccuggcuccacgucugcgucaccggcgacgacgagaacgccaccgccuccaucaucuacaacggccgccucgucgacuccaucggcuccugguccaagaagauccuccgcacccaggaguccgagugcgucugcaucaacggcaccugcaccgucgucaugaccgacggcuccgccuccggcaaggccgacaccaagauccucuucaucaaggagggcaagaucguccacaccuccucccucuccggcuccgcccagcacgucgaggagugcuccugcuacccccgcuaccccggcguccgcugcgucugccgcgacaacuggaagggcuccaaccgccccaucgucgacaucaacgucaaggacuacuccaucgucuccuccuacgucugcuccggccucgucggcgacaccccccgcaagaacgacuccuccuccuccucccacugccucgaccccaacaacgaggagggcggccacggcgucaagggcugggccuucgacgacggcaacgacgucuggaugggccgcaccaucuccgagaagcuccgcuccggcuacgagaccuucaaggucaucgagggcugguccaaggccaacuccaagcuccagaucaaccgccaggucaucgucgaccgcggcaaccgcuccggcuacuccggcaucuucuccgucgaguccaaguccugcaucaaccgcugcuucuacgucgagcucauccgcggccgcaagcaggagaccgagguccucuggaccuccaacuccaucgucgucuucugcggcaccuccggcaccuacggcaccggcuccuggcccgacggcgccgacaucaaccucaugcccaucuga

SEQ ID NO: 110889 - RNA, 1410 nt, Artificial Sequence
  derived and/or modified CDS sequence (opt2) from neuraminidase__InfluenzaA__ABD77634
augaaccccaaccagaagaucaucaccaucggcuccgucucccucaccaucgccaccaucugcuuccucaugcagaucgccauccucgucaccaccgucacccuccacuucaagcaguacgagugcaacuccccccccaacaaccaggucaugcucugcgagcccaccaucaucgagcgcaacaucaccgagaucgucuaccucaccaacaccaccaucgagaaggagaugugccccaagcucgccgaguaccgcaacugguccaagccccagugcaacaucaccggcuucgcccccuucuccaaggacaacuccauccgccucuccgccggcggcgacaucugggucacccgcgagcccuacgucuccugcgaccccgacaagugcuaccaguucgcccucggccagggcaccacccucaacaacggccacuccaacgacaccguccacgaccgcacccccuaccgcacccuccucaugaacgagcucggcguccccuuccaccucggcaccaagcaggucugcaucgccugguccuccuccuccugccacgacggcaaggccuggcuccacgucugcgucaccggcgacgacgagaacgccaccgccuccaucaucuacaacggccgccucgucgacuccaucggcuccugguccaagaagauccuccgcacccaggaguccgagugcgucugcaucaacggcaccugcaccgucgucaugaccgacggcuccgccuccggcaaggccgacaccaagauccucuucaucaaggagggcaagaucguccacaccuccucccucuccggcuccgcccagcacgucgaggagugcuccugcuacccccgcuaccccggcguccgcugcgucugccgcgacaacuggaagggcuccaaccgccccaucgucgacaucaacgucaaggacuacuccaucgucuccuccuacgucugcuccggccucgucggcgacaccccccgcaagaacgacuccuccuccuccucccacugccucgaccccaacaacgaggagggcggccacggcgucaagggcugggccuucgacgacggcaacgacgucuggaugggccgcaccaucuccgagaagcuccgcuccggcuacgagaccuucaaggucaucgagggcugguccaaggccaacuccaagcuccagaucaaccgccaggucaucgucgaccgcggcaaccgcuccggcuacuccggcaucuucuccgucgaguccaaguccugcaucaaccgcugcuucuacgucgagcucauccgcggccgcaagcaggagaccgagguccucuggaccuccaacuccaucgucgucuucugcggcaccuccggcaccuacggcaccggcuccuggcccgacggcgccgacaucaaccucaugcccaucuga

SEQ ID NO: 110890 - RNA, 1410 nt, Artificial Sequence; identical to SEQ ID NO: 110889
  derived and/or modified CDS sequence (opt2) from neuraminidase__InfluenzaA__ABD77645

SEQ ID NO: 110891 - RNA, 1410 nt, Artificial Sequence; identical to SEQ ID NO: 110889
  derived and/or modified CDS sequence (opt2) from neuraminidase__InfluenzaA__ABD77656

SEQ ID NO: 110892 - RNA, 1410 nt, Artificial Sequence; identical to SEQ ID NO: 110162
  derived and/or modified CDS sequence (opt2) from neuraminidase__InfluenzaA__ABD77700

SEQ ID NO: 110893 - RNA, 1413 nt, Artificial Sequence; identical to SEQ ID NO: 110864
  derived and/or modified CDS sequence (opt2) from neuraminidase__InfluenzaA__ABD77722

SEQ ID NO: 110894 - RNA, 1413 nt, Artificial Sequence; identical to SEQ ID NO: 110864
  derived and/or modified CDS sequence (opt2) from neuraminidase__InfluenzaA__ABD77733

SEQ ID NO: 110895 - RNA, 1410 nt, Artificial Sequence
  derived and/or modified CDS sequence (opt2) from neuraminidase__InfluenzaA__ABD77744
augaaccccaaccagaagaucaucaccaucggcuccgucucccucaccaucgccaccaucugcuuccucaugcagaucgucauccucgucaccaccgucacccuccacuucaagcaguacgagugcaacuccccccccaacaaccaggucaugcucugcgagcccaccaucaucgagcgcaacaucaccgagaucgucuaccucaccaacaccaccaucgagaaggagaucugccccaagcucgccgaguaccgcaacugguccaagccccagugcaacaucaccggcuucgcccccuucuccaaggacaacuccauccgccucuccgccggcggcgacaucugggucacccgcgagcccuacgucuccugcgaccccgacaagugcuaccaguucgcccucggccagggcaccacccucaacaacggccacuccaacgacaccguccacgaccgcacccccuaccgcacccuccucaugaacgagcucggcguccccuuccaccucggcaccaagcaggucugcaucgccugguccuccuccuccugccacgacggcaaggccuggcuccacgucugcgucaccggcgacgacgagaacgccaccgccuccuucaucuacaacggccgccucgucgacuccaucggcuccugguccaagaagauccuccgcacccaggaguccgagugcgucugcaucaacggcaccugcaccgucgucaugaccgacggcuccgccuccggcaaggccgacaccaagauccucuucaucgaggagggcaagaucguccacaccucccuccucuccggcuccgcccagcacgucgaggagugcuccugcuacccccgcuaccccggcguccgcugcgucugccgcgacaacuggaagggcuccaaccgccccaucgucgacaucaacgucaaggacuacuccaucgucuccuccuacgucugcuccggccucgucggcgacaccccccgcaagaacgacuccuccuccuccucccacugccucgaccccaacaacgaggagggcggccacggcgucaagggcugggccuucgacgacggcaacgacgucuggaugggccgcaccaucuccgagaagcuccgcuccggcuacgagaccuucaaggucaucgagggcugguccaagcccaacuccaagcuccagaucaaccgccaggucaucgucgaccgcggcaaccgcuccggcuacuccggcaucuucuccgucgagggcaaguccugcaucaaccgcugcuucuacgucgagcucauccgcggccgcaagcaggagaccgagguccucuggaccuccaacuccaucgucgucuucugcggcaccuccggcaccuacggcaccggcuccuggcccgacggcgccgacaucaaccucaugcccaucuga

SEQ ID NO: 110896 - RNA, 1410 nt, Artificial Sequence; identical to SEQ ID NO: 110889
  derived and/or modified CDS sequence (opt2) from neuraminidase__InfluenzaA__ABD77755

SEQ ID NO: 110897 - RNA, 1410 nt, Artificial Sequence; identical to SEQ ID NO: 110889
  derived and/or modified CDS sequence (opt2) from neuraminidase__InfluenzaA__ABD77766

SEQ ID NO: 110898 - RNA, 1410 nt, Artificial Sequence
  derived and/or modified CDS sequence (opt2) from neuraminidase__InfluenzaA__ABD77777
augaaccccaaccagaagaucaucaccaucggcuccgucucccucaccaucgccaccaucugcuuccucaugcagaucgucauccucgucaccaccgucacccuccacuucaagcaguacgagugcaacuccccccccaacaaccaggucaugcccugcgagcccaccaucaucgagcgcaacaucaccgagaucgucuaccucaccaacaccaccaucgagaaggagaucugccccaagcucgccgaguaccgcaacugguccaagccccagugcaacaucaccggcuucgcccccuucuccaaggacaacuccauccgccucuccgccggcggcgacaucugggucacccgcgagcccuacgucuccugcgaccccgacaagugcuaccaguucgcccucggccagggcaccacccucaacaacggccacuccaacgacaccguccacgaccgcacccccuaccgcacccuccucaugaacgagcucggcguccccuuccaccucggcaccaagcaggucugcaucgccugguccuccuccuccugccacgacggcaaggccuggcuccacgucugcgucaccggcgacgacgagaacgccaccgccuccuucaucuacaacggccgccucgucgacuccaucggcuccugguccaagaagauccuccgcacccaggaguccgagugcgucugcaucaacggcaccugcaccgucgucaugaccgacggcuccgccuccggcaaggccgacaccaagauccucuucaucgaggagggcaagaucguccacaccucccuccucuccggcuccgcccagcacgucgaggagugcuccugcuacccccgcuaccccggcguccgcugcgucugccgcgacaacuggaagggcuccaaccgccccaucgucgacaucaacgucaaggacuacuccaucgucuccuccuacgucugcuccggccucgucggcgacaccccccgcaagaacgacuccuccuccuccucccacugccucgaccccaacaacgaggagggcggccacggcgucaagggcugggccuucgacgacggcaacgacgucuggaugggccgcaccaucuccgagaagcuccgcuccggcuacgagaccuucaaggucaucgagggcugguccaagcccaacuccaagcuccagaucaaccgccaggucaucgucgaccgcggcaaccgcuccggcuacuccggcaucuucuccgucgagggcaaguccugcaucaaccgcugcuucuacgucgagcucauccgcggccgcaagcaggagaccgagguccucuggaccuccaacuccaucgucgucuucugcggcaccuccggcaccuacggcaccggcuccuggcccgacggcgccgacaucaaccucaugcccaucuga

SEQ ID NO: 110899 - RNA, 1410 nt, Artificial Sequence; identical to SEQ ID NO: 110898
  derived and/or modified CDS sequence (opt2) from neuraminidase__InfluenzaA__ABD77788

SEQ ID NO: 110900 - RNA, 1362 nt, Artificial Sequence
  derived and/or modified CDS sequence (opt2) from neuraminidase__InfluenzaA__ABD77799
augaaccccaaccagaagaucaucaccaucggcuccaucugcauggucgucggcaucaucucccucauccuccagaucggcaacaucaucuccaucuggaucucccacuccauccagaccggcaaccagaaccacaccggcaucugcaaccagggcaucaucaccuacaacgucgucgccggccaggacuccaccuccgucauccucaccggcaacuccucccucugccccauccgcggcugggccauccacuccaaggacaacggcauccgcaucggcuccaagggcgacgucuucgucauccgcgagcccuucaucuccugcucccaccucgagugccgcaccuucuuccucacccagggcgcccuccucaacgacaagcacuccaacggcaccgucaaggaccgcucccccuaccgcgcccucauguccugccccgucggcgaggcccccucccccuacaacucccgcuucgaguccgucgccugguccgccuccgccugccacgacggcaugggcuggcucaccaucggcaucuccggccccgacaacggcgccgucgccguccucaaguacaacggcaucaucaccgagaccaucaaguccuggcgcaagaagauccuccgcacccaggaguccgagugcaccugcgucaacggcuccugcuucaccaucaugaccgacggccccuccaacggccucgccuccuacaagaucuucaagaucgagaagggcaaggucaccaaguccaucgagcucaacgcccccaacucccacuacgaggagugcuccugcuaccccgacaccggcaaggucaugugcgucugccgcgacaacuggcacggcuccaaccgccccugggucuccuucgaccagaaccucgacuaccagaucggcuacaucugcuccggcgucuucggcgacaacccccgccccaaggacggcaccggcuccugcggccccgucuccgccgacggcgccaacggcgucaagggcuucuccuaccgcuacggcaacggcgucuggaucggccgcaccaaguccgacuccucccgccacggcuucgagaugaucugggaccccaacggcuggaccgagaccgacucccgcuucuccguccgccaggacgucgucgccaugaccgaccgcuccggcuacuccggcuccuucguccagcaccccgagcucaccggccucgacugcaugcgccccugcuucugggucgagcucauccgcggccgccccgaggaggagaccaucuggaccuccggcuccaucaucuccuucugcggcgucaacuccgacaccgucgacugguccuggcccgacggcgccgagcuccccuucaccaucgacaaguga

SEQ ID NO: 110901 - RNA, 1410 nt, Artificial Sequence
  derived and/or modified CDS sequence (opt2) from neuraminidase__InfluenzaA__ABD77810
augaaccccaaccagaagaucaucaccaucggcuccaucugcauggucgucggcaucaucucccucauccuccagaucggcaacaucgucuccaucuggaucucccacuccauccagaccggcaaccagaaccacaccggcaccugcaaccaguccaucaucaccuacaagaacuccaccugggucaaccagaccuacgucaacaucuccaacaccaacgucgucgccggcaaggacaccaccuccgucauccucgccggcaacuccucccucugccccauccgcggcugggccaucuacuccaaggacaacggcguccgcaucggcuccaagggcgacgucuucgucauccgcgagcccuucaucuccugcucccaccucgagugccgcaccuucuuccucacccagggcgcccuccucaacgacaagcacuccaacggcaccgucaaggaccgcucccccuaccgcgcccucauguccugccccgucggcgaggcccccucccccuacaacucccgcuucgaguccgucgccugguccgccuccgccugccacgacggcaugggcuggcucaccaucggcaucuccggccccgacgacggcgccgucgccguccucaaguacaacggcaucaucaccgagaccaucaaguccuggcgcaaggagauccuccgcacccaggaguccgagugcgucugcgucaacggcuccugcuucaccaucaugaccgacggccccuccggcggccccgccuccuacaagaucuucaagaucgagaagggcaaggucaccaaguccaucgagcucgacgcccccaacucccacuacgaggagugcuccugcuaccccgacaccuccaaggucaugugcgucugccgcgacaacuggcacggcuccaaccgccccugggucuccuucgaccagaaccucgacuaccagaugggcuacaucugcuccggcgucuucggcgacaacccccgccccaaggacggcaagggcuccugcggccccgucuacgucgacggcgccaacggcgucaagggcuucuccuaccgcuacggcaacggcgucuggaucggccgcaccaaguccaacuccucccgccagggcuucgagaugaucugggaccccaacggcuggaccgagaccgacuccaacuucuucaccaagcaggacgucgucgccgucaccgacugguccggcuacuccggcuccuucguccagcaccccgagcucaccggccucgacugcaugcgccccugcuucugggucgagcucauccgcggccgccccaaggagaacaccaucuggaccuccggcuccuccaucuccuucugcggcgucaacuccgacaccgucgacugguccuggcccgacggcgccgagcuccccuucaccaucgacaaguga

SEQ ID NO: 110902 - RNA, 1410 nt, Artificial Sequence
  derived and/or modified CDS sequence (opt2) from neuraminidase__InfluenzaA__ABD77832
augaaccccaaccagaagaucaucaccaucggcuccgucucccucaccaucgccaccaucugcuuccucaugcagaucgccauccucgucaccaccgucacccuccacuucaagcaguacgagugcaacuccccccccaacaaccaggucaugcucugcgagcccaccaucaucgagcgcaacaucaccgagaucgucuaccucaccaacaccaccaucgagaaggagaucugccccaagcucgccgaguaccgcaacugguccaagccccagugcaagaucaccggcuucgcccccuucuccaaggacaacuccauccgccucuccgccggcggcgacaucugggucacccgcgagcccuacgucuccugcgaccccgacaagugcuaccaguucgcccucggccagggcaccacccucaacaaccgccacuccaacgacaccguccacgaccgcacccccuaccgcacccuccucaugaacgagcucggcguccccuuccaccucggcaccaagcaggucugcaucgccugguccuccuccuccugccacgacggcaaggccuggcuccacgucugcgucaccggccacgacgagaacgccaccgccuccuucaucuacggcggccgccucgucgacuccaucggcuccugguccaagaagauccuccgcacccaggaguccgagugcgucugcaucaacggcaccugcaccgucgucaugaccgacggcuccgccuccggccgcgccgacaccaagauccucuucaucgaggagggcaagaucguccacaucuccccccucuccggcuccgcccagcacgucgaggagugcuccugcuacccccgcuacuccggcguccgcugcgucugccgcgacaacuggaagggcuccaaccgccccaucgucgacaucaacgucaaggacuacuccaucgucuccuccuacgucugcuccggccucgucggcgacaccccccgcaagaacgacuccuccuccuccucccacugccucaaccccaacaacgaggagggcggccacggcgucaagggcugggccuucgacgacggcaacgacgucuggaugggccgcaccaucuccgagaaguuccgcuccggcuacgagaccuucaaggucaucggcggcugguccaagcccaacuccaagcuccagaucaaccgccaggucaucgucgaccgcggcaaccgcuccggcuacuccggcaucuucuccgucgagggcaaguccugcaucaaccgcugcuucuacgucgagcucauccgcggccgcaagcaggagaccgaggucugguggaccuccaacuccaucgucgucuucugcggcaccuccggcaccuacggcaccggcuccuggcccgacggcgccgacaucaaccucaugcccaucuga

SEQ ID NO: 110903 - RNA, 1410 nt, Artificial Sequence
  derived and/or modified CDS sequence (opt2) from neuraminidase__InfluenzaA__ABD77876
augaaccccaaccagaagaucaucaccaucggcuccgucucccucaccaucgccaccaucugcuuccucaugcagaucgccauccucgucaccaccgucacccuccacuucaagcaguacgagugcaacuccccccccaacaaccaggucaugcucugcgagcccaccaucaucgagcgcaacaucaccgagaucgucuaccucaccaacaccaccaucgagaaggagaucugccccaagcucgccgaguaccgcaacugguccaagccccagugcaagaucaccggcuucgcccccuucuccaaggacaacuccauccgccucuccgccggcggcgacaucugggucacccgcgagcccuacgucuccugcgaccccgacaagugcuaccaguucgcccucggccagggcaccacccucaacaaccgccacuccaacgacaccguccacgaccgcacccccuaccgcacccuccucaugaacgagcucggcguccccuuccaccucggcaccaagcaggucugcaucgccugguccuccuccuccugccacgacggcaaggccuggcuccacgucugcgucaccggccacgacgagaacgccaccgccuccuucaucuacgacggccgccucgucgacuccaucggcuccugguccaagaagauccuccgcacccaggaguccgagugcgucugcaucaacggcaccugcaccgucgucaugaccgacggcuccgccuccggccgcgccgacaccaagauccucuucaucgaggagggcaagaucguccacaucuccccccucuccggcuccgcccagcacgucgaggagugcuccugcuacccccgcuacuccggcguccgcugcgucugccgcgacaacuggaagggcuccaaccgccccaucgucgacaucaacgucaaggacuacuccaucgucuccuccuacgucugcuccggccucgucggcgacaccccccgcaagaacgacuccuccuccuccucccacugccucaaccccaacaacgaggagggcggccacggcgucaagggcugggccuucgacgacggcaacgacgucuggaugggccgcaccaucuccgagaagcuccgcuccggcuacgagaccuucaaggucaucgagggcugguccaagcccaacuccaagcuccagaucaaccgccaggucaucgucgaccgcggcaaccgcuccggcuacuccggcaucuucuccgucgagggcaaguccugcaucaaccgcugcuucuacgucgagcucauccgcggccgcaagcaggagaccgaggucugguggaccuccaacuccaucgucgucuucugcggcaccuccggcaccuacggcaccggcuccuggcccgacggcgccgacaucaaccucaugcccaucuga

SEQ ID NO: 110904 - RNA, 1410 nt, Artificial Sequence; identical to SEQ ID NO: 110162
  derived and/or modified CDS sequence (opt2) from neuraminidase__InfluenzaA__ABD77887

SEQ ID NO: 110905 - RNA, 1410 nt, Artificial Sequence
  derived and/or modified CDS sequence (opt2) from neuraminidase__InfluenzaA__ABD77898
augaaccccaaccagaagaucaucaccaucggcuccgucucccucaccaucgccaccaucugcuuccucaugcagaucgccauccucgucaccaccgucacccuccacuucaagcaguacgagugcaacuccccccccaacaaccaggucaugcucugcgagcccaccaucaucgagcgcaacaucaccgagaucgucuaccucaccaacaccaccaucgagaaggagaucugccccaagcucgccgaguaccgcaacugguccaagccccagugcaagaucaccggcuucgcccccuucuccaaggacaacuccauccgccucuccgccggcggcgacaucugggucacccgcgagcccuacgucuccugcgaccccgacaagugcuaccaguucgcccucggccagggcaccacccucaacaaccgccacuccaacgacaccguccacgaccgcacccccuaccgcacccuccucaugaacgagcucggcguccccuuccaccucggcaccaagcaggucugcaucgccugguccuccuccuccugccacgacggcaaggccuggcuccacgucugcgucaccggccacgacgagaacgccaccgccuccuucaucuacgacggccgccucgucgacuccaucggcuccugguccaagaagauccuccgcacccaggaguccgagugcgucugcaucaacggcaccugcaccgucgucaugaccgacggcuccgccuccggccgcgccgacaccaagauccucuucaucgaggagggcaagaucauccacaucuccccccucuccggcuccgcccagcacgucgaggagugcuccugcuacccccgcuaccccggcguccgcugcgucugccgcgacaacuggaagggcuccaaccgccccaucgucgacaucaacgucaaggacuacuccaucgucuccuccuacgucugcuccggccucgucggcgacaccccccgcaagaacgacuccuccuccuccucccacugccucaaccccaacaacgaggagggcggccacggcgucaagggcugggccuucgacgacggcuccgacgucuggaugggccgcaccaucuccgagaagcuccgcuccggcuacgagaccuucaaggucaucgagggcugguccaagcccaacuccaagcuccagaucaaccgccaggucaucgucgaccgcggcaaccgcuccggcuacuccggcaucuucuccgucgagggcaaguccugcaucaaccgcugcuucuacgucgagcucauccgcggccgcaagcaggagaccgaggucugguggaccuccaacuccaucgucgucuucugcggcaccuccggcaccuacggcaccggcuccuggcccgacggcgccgacaucaaccucaugcccaucuga

SEQ ID NO: 110906 - RNA, 1410 nt, Artificial Sequence
  derived and/or modified CDS sequence (opt2) from neuraminidase__InfluenzaA__ABD77909
augaaccccaaccagaagaucaucaccaucggcuccgucucccucaccaucgccaccaucugcuuccucaugcagaucgccauccucgucaccaccgucacccuccacuucaagcaguacgagugcaacuccccccccaacaaccaggucaugcucugcgagcccaccaucaucgagcgcaacaucaccgagaucgucuaccucaccaacaccaccaucgagaaggagaucugccccaagcucgccgaguaccgcaacugguccaagccccagugcaagaucaccggcuucgcccccuucuccaaggacaacuccauccgccucuccgccggcggcgacaucugggucacccgcgagcccuacgucuccugcgaccccgacaagugcuaccaguucgcccucggccagggcaccacccucaacaaccgccacuccaacgacaccguccacgaccgcacccccuaccgcacccuccucaugaacgagcucggcguccccuuccaccucggcaccaagcaggucugcaucgccugguccuccuccuccugccacgacggcaaggccuggcuccacgucugcgucaccggccacgacgagaacgccaccgccuccuucaucuacgacggccgccucgucgacuccaucggcuccugguccaagaagauccuccgcacccaggaguccgagugcgucugcaucaacggcaccugcaccgucgucaugaccgacggcuccgccuccggccgcgccgacaccaagauccucuucaucgaggagggcaagaucguccacaucuccccccucuccggcuccgcccagcacgucgaggagugcuccugcuacccccgcuaccccggcguccgcugcgucugccgcgacaacuggaagggcuccaaccgccccaucgucgacaucaacgucaaggacuacuccaucgucuccuccuacgucugcuccggccucgucggcgacaccccccgcaagaacgacuccuccuccuccucccacugccucaaccccaacaacgaggagggcggccacggcgucaagggcugggccuucgacgacggcaacgacgucuggaugggccgcaccaucuccgagaagcuccgcuccggcuacgagaccuucaaggucaucgagggcugguccaagcccaacuccaagcuccagaucaaccgccaggucaucgucgaccgcggcaacuccuccggcuacuccggcaucuucuccgucgagggcaaguccugcaucaaccgcugcuucuacgucgagcucauccgcggccgcaagcaggagaccgaggucugguggaccuccaacuccaucgucgucuucugcggcaccuccggcaccuacggcaccggcuccuggcccgacggcgccgacaucaaccucaugcccaucuga

SEQ ID NO: 110907 - RNA, 1413 nt, Artificial Sequence; identical to SEQ ID NO: 110864
  derived and/or modified CDS sequence (opt2) from neuraminidase__InfluenzaA__ABD77920

SEQ ID NO: 110908 - RNA, 1413 nt, Artificial Sequence; identical to SEQ ID NO: 110864
  derived and/or modified CDS sequence (opt2) from neuraminidase__InfluenzaA__ABD77931

SEQ ID NO: 110909 - RNA, 1413 nt, Artificial Sequence; identical to SEQ ID NO: 110864
  derived and/or modified CDS sequence (opt2) from neuraminidase__InfluenzaA__ABD77942

SEQ ID NO: 110910 - RNA, 1413 nt, Artificial Sequence
  derived and/or modified CDS sequence (opt2) from neuraminidase__InfluenzaA__ABD77953
augaaccccaaccagaagaucaucaccaucggcuccaucuccaucgccaucggcaucaucucccucaugcuccagaucggcaacaucaucuccaucugggccucccacuccauccagaccggcucccagaaccacaccggcaucugcaaccagcgcaucaucaccuacgagaacuccaccugggucaaccacaccuacgucaacaucaacaacaccaacgucgucgccggcaaggacaagaccuccgucacccucgccggcaacuccucccucugcuccaucuccggcugggccaucuacaccaaggacaacuccauccgcaucggcuccaagggcgacgucuucgucauccgcgagcccuucaucuccugcucccaccucgagugccgcaccuucuuccucacccagggcgcccuccucaacgacaagcacuccaacggcaccgucaaggaccgcucccccuaccgcgcccucauguccugcccccucggcgaggcccccucccccuacaacuccaaguucgaguccgucgccugguccgccuccgccugccacgacggcaugggcuggcucaccaucggcaucuccggccccgacaacggcgccgucgccguccucaaguacaacggcaucaucaccgagaccaucaaguccuggaagaagcgcauccuccgcacccaggaguccgagugcgucugcgucaacggcuccugcuucaccaucaugaccgacggccccuccaacggcgccgccuccuacaagaucuucaagaucgagaagggcaaggucaccaaguccaucgagcucaacgcccccaacuuccacuacgaggagugcuccugcuaccccgacaccggcaccgucaugugcgucugccgcgacaacuggcacggcuccaaccgccccugggucuccuucaaccagaaccucgacuaccagaucggcuacaucugcuccggcgucuucggcgacaacccccgccccaaggacggcgagggcuccugcaaccccgucaccgucgacggcgccgacggcgucaagggcuucuccuacaaguacggcaacggcgucuggaucggccgcaccaaguccaaccgccuccgcaagggcuucgagaugaucugggaccccaacggcuggaccgacaccgacuccaacuucuccgucaagcaggacgucgucgccaucaccgacugguccggcuacuccggcuccuucguccagcaccccgagcucaccggccucgacugcauccgccccugcuuccucgucgagcucguccgcggccucccccgcgagaacaccaccaucuggaccuccggcuccuccaucuccuucugcggcgucaacuccgacaccgccaacugguccuggcccgacggcgccgagcuccccuucaccaucgacaaguga

SEQ ID NO: 110911 - RNA, 1413 nt, Artificial Sequence
  derived and/or modified CDS sequence (opt2) from neuraminidase__InfluenzaA__ABD77964
augaaccccaaccagaagaucaucaccaucggcuccaucuccaucgccaucggcaucaucucccucaugcuccagaucggcaacaucaucuccaucugggccucccacuccauccagacccgcucccagaaccacaccggcaucugcaaccagcgcaucaucaccuacgagaacuccaccugggucaaccacaccuacgucaacaucaacaacaccaacgucgucgccggcaaggacaagaccuccgucacccucgccggcaacuccucccucugcuccaucuccggcugggccaucuacaccaaggacaacuccauccgcaucggcuccaagggcgacgucuucgucauccgcgagcccuucaucuccugcucccaccucgagugccgcaccuucuuccucacccagggcgcccuccucaacgacaagcacuccaacggcaccgucaaggaccgcucccccuaccgcgcccucauguccugcccccucggcgaggcccccucccccuacaacuccaaguucgaguccgucgccugguccgccuccgccugccacgacggcaugggcuggcucaccaucggcaucuccggccccgacaacggcgccgucgccguccucaaguacaacggcaucaucaccgagaccaucaaguccuggaagaagcgcauccuccgcacccaggaguccgagugcgucugcgucaacggcuccugcuucaccaucaugaccgacggccccuccaacggcgccgccuccuacaagaucuucaagaucgagaagggcaaggucaccaaguccaucgagcucaacgcccccaacuuccacuacgaggagugcuccugcuaccccgacaccggcaccgucaugugcgucugccgcgacaacuggcacggcuccaaccgccccugggucuccuucaaccagaaccucgacuaccagaucggcuacaucugcuccggcgucuucggcgacaacccccgccccaaggacggcgagggcuccugcaaccccgucaccgucgacggcgccgacggcgucaagggcuucuccuacaaguacggcaacggcgucuggaucggccgcaccaaguccaaccgccuccgcaagggcuucgagaugaucugggaccccaacggcuggaccgacaccgacuccaacuucuccgucaagcaggacgucgucgccaucaccgacugguccggcuacuccggcuccuucguccagcaccccgagcucaccggccucgacugcauccgccccugcuucugggucgagcucguccgcggccucccccgcgagaacaccaccaucuggaccuccggcuccuccaucuccuucugcggcgucaacuccgacaccgccaacugguccuggcccgacggcgccgagcuccccuucaccaucgacaaguga

SEQ ID NO: 110912 - RNA, 1413 nt, Artificial Sequence; identical to SEQ ID NO: 110864
  derived and/or modified CDS sequence (opt2) from neuraminidase__InfluenzaA__ABD77975

SEQ ID NO: 110913 - RNA, 1413 nt, Artificial Sequence; identical to SEQ ID NO: 110864
  derived and/or modified CDS sequence (opt2) from neuraminidase__InfluenzaA__ABD77986

SEQ ID NO: 110914 - RNA, 1413 nt, Artificial Sequence
  derived and/or modified CDS sequence (opt2) from neuraminidase__InfluenzaA__ABD77997
augaaccccaaccagaagaucaucaccaucggcuccaucuccaucgccaucggcauccucucccucaugcuccagaucggcaacaucaucuccaucugggccucccacuccauccagaccggcucccagaaccacaccggcaucugcaaccagcgcaucaucaccuacgagaacuccaccugggucaaccacaccuacgucaacaucaacaacaccaacgucgucgccggcaaggacaagaccuccgucacccucgccggcaacuccucccucugcuccaucuccggcugggccaucuacaccaaggacaacuccauccgcaucggcuccaagggcgacgucuucgucauccgcgagcccuucaucuccugcucccaccucgagugccgcaccuucuuccucacccagggcgcccuccucaacgacaagcacuccaacggcaccgucaaggaccgcucccccuaccgcgcccucauguccugcccccucggcgaggcccccucccccuacaacuccaaguucgaguccgucgccugguccgccuccgccugccacgacggcaugggcuggcucaccaucggcaucuccggccccgacaacggcgccgucgccguccucaaguacaacggcaucaucaccgagaccaucaaguccuggaagaagcgcauccuccgcacccaggaguccgagugcgucugcgucaacggcuccugcuucaccaucaugaccgacggccccuccaacggcgccgccuccuacaagaucuucaagaucgagaagggcaaggucaccaaguccaucgagcucaacgcccccaacuuccacuacgaggagugcuccugcuaccccgacaccggcaccgucaugugcgucugccgcgacaacuggcacggcuccaaccgccccugggucuccuucaaccagaaccucgacuaccagaucggcuacaucugcuccggcgucuucggcgacaacccccgccccaaggacggcgagggcuccugcaaccccgucaccgucgacggcgccgacggcgucaagggcuucuccuacaaguacggcaacggcgucuggaucggccgcaccaaguccaaccgccuccgcaagggcuucgagaugaucugggaccccaacggcuggaccgacaccgacaacaacuucuccgucaagcaggacgucgucgccaucaccgacugguccggcuacuccggcuccuucguccagcaccccgagcucaccggccucgacugcauccgccccugcuucugggucgagcucguccgcggccucccccgcgagaacaccaccaucuggaccuccggcuccuccaucuccuucugcggcgucaacuccgacaccgccaacugguccuggcccgacggcgccgagcuccccuucaccaucgacaaguga

SEQ ID NO: 110915 - RNA, 1413 nt, Artificial Sequence; identical to SEQ ID NO: 110864
  derived and/or modified CDS sequence (opt2) from neuraminidase__InfluenzaA__ABD78008

SEQ ID NO: 110916 - RNA, 1413 nt, Artificial Sequence; identical to SEQ ID NO: 110864
  derived and/or modified CDS sequence (opt2) from neuraminidase__InfluenzaA__ABD78019

SEQ ID NO: 110917 - RNA, 1413 nt, Artificial Sequence
  derived and/or modified CDS sequence (opt2) from neuraminidase__InfluenzaA__ABD78030
augaaccccaaccagaagaucaucaccaucggcuccaucuccaucgccaucggcaucaucucccucaugcuccagaucggcaacaucaucuccaucugggccucccacuccauccagaccggcucccagaaccacaccggcaucugcaaccagcgcaucaucaccuacgagaacuccaccugggucaaccacaccuacgucaacaucaacaacaccaacgucgucgccggcaaggacaagaccuccgucacccucgccggcaacuccucccucugcuccaucuccggcugggccaucuacaccaaggacaacuccauccgcaucggcuccaagggcgacgucuucgucauccgcgagcccuucaucuccugcucccaccucgagugccgcaccuucuuccucacccagggcgcccuccucaacgacaagcacuccaaccgcaccgucaaggaccgcucccccuaccgcgcccucauguccugcccccucggcgaggcccccucccccuacaacuccaaguucgaguccgucgccugguccgccuccgccugccacgacggcaugggcuggcucaccaucggcaucuccggccccgacaacggcgccgucgccguccucaaguacaacggcaucaucaccgagaccaucaaguccuggaagaagcgcauccuccgcacccaggaguccgagugcgucugcgucaacggcuccugcuucaccaucaugaccgacggccccaacaacggcgccgccuccuacaagaucuucaagaucgagaagggcaaggucaccaaguccaucgagcucaacgcccccaacuuccacuacgaggagugcuccugcuaccccgacaccggcaccgucaugugcgucugccgcgacaacuggcacggcuccaaccgccccugggucuccuucaaccagaaccucgacuaccagaucggcuacaucugcuccggcgucuucggcgacaacccccgccccaaggacggcgagggcuccugcaaccccgucaccgucgacggcgccgacggcgucaagggcuucuccuacaaguacggcaacggcgucuggaucggccgcaccaaguccaaccgccuccgcaagggcuucgagaugaucugggaccccaacggcuggaccgacaccgacuccaacuucuccgucaagcaggacgucgucgccaucaccgacugguccggcuacuccggcuccuucguccagcaccccgagcucaccggccucgacugcauccgccccugcuucugggucgagcucguccgcggccucccccgcgagaacaccaccaucuggaccuccggcuccuccaucuccuucugcggcgucaacuccgacaccgccaacugguccuggcccgacggcgccgagcuccccuucaccaucgacaaguga

SEQ ID NO: 110918 - RNA, 1413 nt, Artificial Sequence
  derived and/or modified CDS sequence (opt2) from neuraminidase__InfluenzaA__ABD78041
augaaccccaaccagaagaucaucaccaucggcuccaucuccaucgccaucggcaucaucucccucaugcuccagaucggcaacaucaucuccaucugggccucccacuccauccagaccggcucccagaaccacaccggcaucugcaaccagcgcaucaucaccuacgagaacuccaccugggucaaccacaccuacgucaacaucaacaacaccaacgucgucgccggcaaggacaagaccuccgucacccucgccggcaacuccucccucugcuccaucuccggcugggccaucuacaccaaggacaacuccauccgcaucggcuccaagggcgacgucuucgucauccgcgagcccuucaucuccugcucccaccucgagugccgcaccuucuuccucacccagggcgcccuccucaacgacaagcacuccaacggcaccgucaaggaccgcucccccuaccgcgcccucauguccugcccccucggcgaggcccccucccccuacaacuccaaguucgaguccgucgccugguccgccuccgccugccacgacggcaugggcuggcucaccaucggcaucuccggccccgacaacggcgccgucgccguccucaaguacaacggcaucaucaccgagaccaucaaguccuggaagaagcgcauccuccgcacccaggaguccgagugcgucugcgucaacggcuccugcuucaccaucaugaccgacggccccuccaacggcgccgccuccuacaagaucuucaagaucgagaagggcaaggucaccaaguccaucgagcucaacgcccccaacuuccacuacgaggagugcuccugcuaccccgacaccuccaccgucaugugcgucugccgcgacaacuggcacggcuccaaccgccccugggucuccuucaaccagaaccucgacuaccagaucggcuacaucugcuccggcgucuucggcgacaacccccgccccaaggacggcgagggcuccugcaaccccgucaccgucgacggcgccgacggcgucaagggcuucuccuacaaguacggcaacggcgucuggaucggccgcaccaaguccaaccgccuccgcaagggcuucgagaugaucugggaccccaacggcuggaccgacaccgacuccaacuucuccgucaagcaggacgucgucgccaucaccgacugguccggcuacuccggcuccuucguccagcaccccgagcucaccggccucgacugcauccgccccugcuucugggucgagcucguccgcggccucccccgcgagaacaccaccaucuggaccuccggcuccuccaucuccuucugcggcgucaacuccgacaccgccaacugguccuggcccgacggcgccgagcuccccuucaccaucgacaaguga

SEQ ID NO: 110919 - RNA, 1410 nt, Artificial Sequence; identical to SEQ ID NO: 110898
  derived and/or modified CDS sequence (opt2) from neuraminidase__InfluenzaA__ABD78052

SEQ ID NO: 110920 - RNA, 1413 nt, Artificial Sequence; identical to SEQ ID NO: 110432
  derived and/or modified CDS sequence (opt2) from neuraminidase__InfluenzaA__ABD78063

SEQ ID NO: 110921 - RNA, 1413 nt, Artificial Sequence; identical to SEQ ID NO: 110432
  derived and/or modified CDS sequence (opt2) from neuraminidase__InfluenzaA__ABD78074

SEQ ID NO: 110922 - RNA, 1413 nt, Artificial Sequence; identical to SEQ ID NO: 110432
  derived and/or modified CDS sequence (opt2) from neuraminidase__InfluenzaA__ABD78085

SEQ ID NO: 110923 - RNA, 1413 nt, Artificial Sequence; identical to SEQ ID NO: 110432
  derived and/or modified CDS sequence (opt2) from neuraminidase__InfluenzaA__ABD78096

SEQ ID NO: 110924 - RNA, 1410 nt, Artificial Sequence
  derived and/or modified CDS sequence (opt2) from neuraminidase__InfluenzaA__ABD78118
augaaccccaaccagaagaucaucaccaucggcuccgucucccucaccaucgccaccaucugcuuccucaugcagaucgccauccucgucaccaccgucacccuccacuucaagcaguacgagugcaacuccccccccaacaaccaggucaugcucugcgagcccaccaucaucgagcgcaacaucaccgagaucgucuaccucaccaacaccaccaucgagaaggagaugugccccaagcucgccgaguaccgcaacugguccaagccccagugcaagaucaccggcuucgcccccuucuccaaggacaacuccauccgccucuccgccggcggcgacaucugggucacccgcgagcccuacgucuccugcgaccccgacaagugcuaccaguucgcccucggccagggcaccacccucaacaaccgccacuccaacgacaccguccacgaccgcacccccuaccgcacccuccucaugaacgagcucggcguccccuuccaccucggcaccaagcaggucugcaucgccugguccuccuccuccugccacgacggcaaggccuggcuccacgucugcgucaccggccacgacgagaacgccaccgccuccuucaucuacgacggccgccucgucgacuccaucggcuccugguccaagaagauccuccgcacccaggaguccgagugcgucugcaucaacggcaccugcaccgucgucaugaccgacggcuccgccuccggccgcgccgacaccaagauccucuucaucgaggagggcaagaucguccacaucuccccccucuccggcuccgcccagcacgucgaggagugcuccugcuacccccgcuacuccggcguccgcugcgucugccgcgacaacuggaagggcuccaaccgccccaucgucgacaucaacgucaaggacuacuccaucgucuccuccuacgucugcuccggccucgucggcgacaccccccgcaagaacgacuccuccuccuccucccacugccucaaccccaacaacgaggagggcggccacggcgucaagggcugggccuucgacgacggcaacgacgucuggaugggccgcaccaucuccgagaaguuccgcuccggcuacgagaccuucaaggucaucggcggcugguccaagcccaacuccaagcuccagaucaaccgccaggucaucgucgaccgcggcaaccgcuccggcuacuccggcaucuucuccgucgagggcaaguccugcaucaaccgcugcuucuacgucgagcucauccgcggccgcaagcaggagaccgaggucugguggaccuccaacuccaucgucgucuucugcggcaccuccggcaccuacggcaccggcuccuggcccgacggcgccgacaucaaccucaugcccaucuga

SEQ ID NO: 110925 - RNA, 1410 nt, Artificial Sequence; identical to SEQ ID NO: 110924
  derived and/or modified CDS sequence (opt2) from neuraminidase__InfluenzaA__ABD78129

SEQ ID NO: 110926 - RNA, 1410 nt, Artificial Sequence; identical to SEQ ID NO: 110154
  derived and/or modified CDS sequence (opt2) from neuraminidase__InfluenzaA__ABD79035

SEQ ID NO: 110927 - RNA, 1353 nt, Artificial Sequence
  derived and/or modified CDS sequence (opt2) from neuraminidase__InfluenzaA__ABD79115
augaaccccaaccagaagaucaucaccaucggcuccaucugcauggucgucggcaucaucucccucaucuuccagaucggcaacaucgucuccaucuggaucucccacuccaucaccggcaccugcaaccgcuccaucuacgucaacaucuccaacaccaacgucgucgccggcaaggacaccaccuccgucauccucgccggcaacuccucccucugccccauccgcggcugggccaucuacuccaaggacaacggcguccgcaucggcuccaagggcgacgucuucgucauccgcgagcccuucaucuccugcucccaccucgagugccgcaccuucuuccucacccagggcgcccuccucaacgacaagcacuccaacggcaccgucaaggaccgcucccccuaccgcacccucauguccugccccgucggcgaggcccccucccccuacaacucccgcuucgaguccgucgccugguccgccuccgccugccacgacggcaugggcuggcucaccaucggcaucuccggccccgacgacggcgccgucgccguccucaaguacaacggcaucaucaccggcaccaucaaguccuggcgcaaggagauccuccgcacccaggaguccgagugcgucugcgucaacggcuccugcuucaccaucaugaccgacggccccuccggcggccccgccuccuacaagaucuucaagaucgagaagggcaaggucaccaaguccaucgagcucgacgcccccaacucccacuacgaggagugcuccugcuaccccgacaccuccaaggucaugugcgucugccgcgacaacuggcacggcuccaaccgccccugggucuccuucgaccagaaccucgacuaccagaugggcuacaucugcuccggcgucuucggcgacaacccccgccccaaggacggcaagggcuccugcggccccgucuacgucgacggcgccaacggcgucaagggcuucuccuaccgcuacggcaacggcgucuggaucggccgcaccaaguccuccuccucccgccagggcuucgagaugaucugggaccccaacggcuggaccgagaccgacuccaacuucuucaugaagcaggacgucgucgccgucaccgacugguccggcuacuccggcuccuucguccagcaccccgagcucaccggccucgacugcaugcgccccugcuucugggucgagcucauccgcggccgccccaaggagaacaccaucuggaccuccggcuccuccaucuccuucugcggcgucaacuccgacaccgucgacugguccuggcccgacggcgccgagcuccccuucaccaucgacaaguga

SEQ ID NO: 110928 - RNA, 1410 nt, Artificial Sequence
  derived and/or modified CDS sequence (opt2) from neuraminidase__InfluenzaA__ABD79126
augaaccccaaccagaagaucaucaccaucggcuccgucucccucaccaucaccaccaucugcuuccucaugcagaucgccauccucgucaucaccgucacccuccacuucaagcagugcgagugcaacuccccccccaacaaccaggucaugcucugcgagcccaccaucaucgagcgcaacaucaccgagaucgucuaccucaccaacaccaccaucgagaaggagaucugccccaagcucgccgaguaccgcaacugguccaagccccagugcaagaucaccggcuucgcccccuucuccaaggacaacuccauccgccucuccgccggcggcgacaucugggucacccgcgagcccuacgucuccugcgaccccggcaagugcuaccaguucgcccucggccagggcaccacccucaacaaccgccacuccaacgacaccguccacgaccgcacccccuaccgcacccuccucaugaacgagcucggcguccccuuccaccucggcaccaagcaggucugcaucgccugguccuccuccuccugccacgacggcaaggccuggcuccacgucugcgucaccggccacaacgagaacgccaccgccuccuucaucuacgacggccgccucgucgacuccaucggcuccugguccaagaacauccuccgcacccaggaguccgagugcgucugcaucaacggcaccugcaccgucgucaugaccgacggcuccgccuccggccgcgccgacaccaagauccucuucaucgaggagggcaagaucguccacaucuccccccucuccggcuccgcccagcacgucgaggagugcuccugcuacccccgcuaccccggcguccgcugcgucugccgcgacaacuggaagggcuccaaccgccccaucgucgacaucaacgucaaggacuacuccaucgucuccuccuacgucugcuccggccucgucggcgacaccccccgcaagaacgacuccuccuccuccuccuacugccucgaccccaacaacgaggagggcggccacggcgucaagggcugggccuucgacgacggcaacgacgucuggaugggccgcaccaucuccgagaagcuccgcuccggcuacgagaccuucaaggucaucggcggcugguccaagcccaacuccaagcuccagaucaaccgccaggucaucgucgacaagggcaaccgcuccggcuacuccggcaucuucuccgucgagggcaaguccugcaucaaccgcugcuucuacgucgagcucauccgcggccgcaagcaggagaccgaggucugguggaccuccaacuccaucgucgucuucugcggcaccuccggcaccuacggcaccggcuccuggcccgacggcgccgacaucaaccucaugcccaucuga

SEQ ID NO: 110929 - RNA, 1410 nt, Artificial Sequence; identical to SEQ ID NO: 110928
  derived and/or modified CDS sequence (opt2) from neuraminidase__InfluenzaA__ABD79137

SEQ ID NO: 110930 - RNA, 1410 nt, Artificial Sequence; identical to SEQ ID NO: 110928
  derived and/or modified CDS sequence (opt2) from neuraminidase__InfluenzaA__ABD79148

SEQ ID NO: 110931 - RNA, 1410 nt, Artificial Sequence; identical to SEQ ID NO: 110928
  derived and/or modified CDS sequence (opt2) from neuraminidase__InfluenzaA__ABD79159

SEQ ID NO: 110932 - RNA, 1410 nt, Artificial Sequence
  derived and/or modified CDS sequence (opt2) from neuraminidase__InfluenzaA__ABD79170
augaaccccaaccagaagaucaucaccaucggcuccgucucccucaccaucaccaccaucugcuuccucaugcagaucgccauccucgucaucaccgucacccuccacuucaagcagugcgagugcaacuccccccccaacaaccaggucaugcucugcgagcccaccaucaucgagcgcaacaucaccgagaucgucuaccucaccaacaccaccaucgagaaggagaucugccccaagcucgccgaguaccgcaacugguccaagccccagugcaagaucaccggcuucgcccccuucuccaaggacaacuccauccgccucuccgccggcggcgacaucugggucacccgcgagcccuacgucuccugcgaccccggcaagugcuaccaguucgcccucggccagggcaccacccucaacaaccgccacuccaacaacaccguccacgaccgcacccccuaccgcacccuccucaugaacgagcucggcguccccuuccaccucggcaccaagcaggucugcaucgccugguccuccuccuccugccacgacggcaaggccuggcuccacgucugcgucaccggccacaacgagaacgccaccgccuccuucaucuacgacggccgccucgucgacuccaucggcuccugguccaagaacauccuccgcacccaggaguccgagugcgucugcaucaacggcaccugcaccgucgucaugaccgacggcuccgccuccggccgcgccgacaccaagauccucuucaucaaggagggcaagaucguccacgucuccccccucuccggcuccgcccagcacgucgaggagugcuccugcuacccccgcuaccccggcguccgcugcgucugccgcgacaacuggaagggcuccaaccgccccaucgucgacaucaacgucaaggacuacuccaucgucuccuccuacgucugcuccggccucgucggcgacaccccccgcaagaacgacuccuccuccuccuccuacugccucgaccccaacaacgaggagggcggccacggcgucaagggcugggccuucgacgacggcaacgacgucuggaugggccgcaccaucuccgagaagcuccgcuccggcuacgagaccuucaaggucaucggcggcugguccaagcccaacuccaagcuccagaucaaccgccaggucaucgucgacaagggcaaccgcuccggcuacuccggcaucuucuccgucgagggcaaguccugcaucaaccgcugcuucuacgucgagcucauccgcggccgcaagcaggagaccgaggucugguggaccuccaacuccaucgucgucuucugcggcaccuccggcaccuacggcaccggcuccuggcccgacggcgccgacaucaaccucaugcccaucuga

SEQ ID NO: 110933 - RNA, 1410 nt, Artificial Sequence; identical to SEQ ID NO: 110928
  derived and/or modified CDS sequence (opt2) from neuraminidase__InfluenzaA__ABD79181

SEQ ID NO: 110934 - RNA, 1410 nt, Artificial Sequence; identical to SEQ ID NO: 110928
  derived and/or modified CDS sequence (opt2) from neuraminidase__InfluenzaA__ABD79192

SEQ ID NO: 110935 - RNA, 1410 nt, Artificial Sequence
  derived and/or modified CDS sequence (opt2) from neuraminidase__InfluenzaA__ABD79203
augaaccccaaccagaagaucaucaccaucggcuccgucucccucaccaucaccaccaucugcuuccucaugcagaucgccauccucgucaucaccgucacccuccacuucaagcagugcgagugcaacuccccccccaacaaccaggucaugcucugcgagcccaccaucaucgagcgcaacaucaccgagaucgucuaccucaccaacaccaccaucgagaaggagaagugccccaagcucgccgaguaccgcaacugguccaagccccagugcaagaucaccggcuucgcccccuucuccaaggacaacuccauccgccucuccgccggcggcgacaucugggucacccgcgagcccuacgucuccugcgaccccggcaagugcuaccaguucgcccucggccagggcaccacccucaacaaccgccacuccaacgacaccguccacgaccgcacccccuaccgcacccuccucaugaacgagcucggcguccccuuccaccucggcaccaagcaggucugcaucgccugguccuccuccuccugccacgacggcaaggccuggcuccacgucugcgucaccggccacaacgagaacgccaccgccuccuucaucuacgacggccgccucgucgacuccaucggcuccugguccaagaacauccuccgcacccaggaguccgagugcgucugcaucaacggcaccugcaccgucgucaugaccgacggcuccgccuccggccgcgccgacaccaagauccucuucaucgaggagggcaagaucguccacaucuccccccucuccggcuccgcccagcacgucgaggagugcuccugcuacccccgcuaccccggcguccgcugcgucugccgcgacaacuggaagggcuccaaccgccccaucgucgacaucaacaugaaggacuacuccaucgucuccuccuacgucugcuccggccucgucggcgacaccccccgcaagaacgacuccuccuccuccuccuacugccucgaccccaacaacgaggagggcggccacggcgucaagggcugggccuucgacgacggcaacgacgucuggaugggccgcaccaucuccgagaagcuccgcuccggcuacgagaccuucaaggucaucggcggcugguccaagcccaacuccaagcuccagaucaaccgccaggucaucgucgacaagggcaaccgcuccggcuacuccggcaucuucuccgucgagggcaaguccugcaucaaccgcugcuucuacgucgagcucauccgcggccgcaagcaggagaccgaggucugguggaccuccaacuccaucgucgucuucugcggcaccuccggcaccuacggcaccggcuccuggcccgacggcgccgacaucaaccucaugcccaucuga

SEQ ID NO: 110936 - RNA, 1410 nt, Artificial Sequence; identical to SEQ ID NO: 110928
  derived and/or modified CDS sequence (opt2) from neuraminidase__InfluenzaA__ABD79214

SEQ ID NO: 110937 - RNA, 1410 nt, Artificial Sequence
  derived and/or modified CDS sequence (opt2) from neuraminidase__InfluenzaA__ABD79236
augaaccccaaccagaagaucaucaccaucggcuccgucucccucaccaucaccaccaucugcuuccucaugcagaucgccauccucgucaucaccgucacccuccacuucaagcagugcgagugcaacuccccccccaacaaccaggucaugcucugcgagcccaccaucaucgagcgcaacaucaccgagaucgucuaccucaccaacaccaccaucgagaaggagaucugccccaagcucgccgaguaccgcaacugguccaagccccagugcaagaucaccggcuucgcccccuucuccaaggacaacuccauccgccucuccgccggcggcgacaucugggucacccgcgagcccuacgucuccugcgaccccggcaagugcuaccaguucgcccucggccagggcaccacccucaacaaccgccacuccaacaacaccgcccacgaccgcacccccuaccgcacccuccucaugaacgagcucggcguccccuuccaccucggcaccaagcaggucugcaucgccugguccuccuccuccugccacgacggcaaggccuggcuccacgucugcgucaccggccacaacgagaacgccaccgccuccuucaucuacgacggccgccucgucgacuccaucggcuccugguccaagaacauccuccgcacccaggaguccgagugcgucugcaucaacggcaccugcaccgucgucaugaccgacggcuccgccuccggccgcgccgacaccaagauccucuucaucaaggagggcaagaucguccacaucuccccccucuccggcuccgcccagcacgucgaggagugcuccugcuacccccgcuaccccggcguccgcugcgucugccgcgacaacuggaagggcuccaaccgccccaucgucgacaucaacgucaaggacuacuccaucgucuccuccuacgucugcuccggccucgucggcgacaccccccgcaagaacgacuccuccuccuccuccuacugccucgaccccaacaacgaggagggcggccacggcgucaagggcugggccuucgacgacggcaacgacgucuggaugggccgcaccaucuccgagaagcuccgcuccggcuacgagaccuucaaggucaucggcggcugguccaagcccaacuccaagcuccagaucaaccgccaggucaucgucgacaagggcaaccgcuccggcuacuccggcaucuucuccgucgagggcaaguccugcaucaaccgcugcuucuacgucgagcucauccgcggccgcaagcaggagaccgaggucugguggaccuccaacuccaucgucgucuucugcggcaccuccggcaccuacggcaccggcuccuggcccgacggcgccgacaucaaccucaugcccaucuga

SEQ ID NO: 110938 - RNA, 1410 nt, Artificial Sequence
  derived and/or modified CDS sequence (opt2) from neuraminidase__InfluenzaA__ABD79247
augaaccccaaccagaagaucaucaccaucggcuccgucucccucaccaucaccaccaucugcuuccucaugcagaucgccauccucgucaucaccgucacccuccacuucaagcagugcgagugcaaccccccccccaacaaccaggucaugcucugcgagcccaccaucaucgagcgcaacaucaccgagaucgucuaccucaccaacaccaccaucgagaaggagaucugccccaagcucgccgaguaccgcaacugguccaagccccagugcaagaucaccggcuucgcccccuucuccaaggacaacuccauccgccucuccgccggcggcgacaucugggucacccgcgagcccuacgucuccugcgaccccggcaagugcuaccaguucgcccucggccagggcaccacccucaacaaccgccacuccaacgacaccguccacgaccgcacccccuaccgcacccuccucaugaacgagcucggcguccccuuccaccucggcaccaagcaggucugcaucgccugguccuccuccuccugccacgacggcaaggccuggcuccacgucugcgucaccggccacaacgagaacgccaccgccuccuucaucuacgacggccgccucgucgacuccaucggcuccugguccaagaacauccuccgcacccaggaguccgagugcgucugcaucaacggcaccugcaccgucgucaugaccgacggcuccgccuccggccgcgccgacaccaagauccucuucaucgaggagggcaagaucguccacaucuccccccucuccggcuccgcccagcacgucgaggagugcuccugcuacccccgcuaccccggcguccgcugcgucugccgcgacaacuggaagggcuccaaccgccccaucgucgacaucaacgucaaggacuacuccaucgucuccuccuacgucugcuccggccucgucggcgacaccccccgcaagaacgacuccuccuccuccuccuacugccucgaccccaacaacgaggagggcggccacggcgucaagggcugggccuucgacgacggcaacgacgucuggaugggccgcaccaucuccgagaagcuccgcuccggcuacgagaccuucaaggucaugggcggcugguccaagcccaacuccaagcuccagaucaaccgccaggucaucgucgaccgcggcaaccgcuccggcuacuccggcaucuucuccgucgagggcaaguccugcaucaaccgcugcuucuacgucgagcucauccgcggccgcaagcaggagaccgaggucugguggaccuccaacuccaucgucgucuucugcggcaccuccggcaccuacggcaccggcuccuggcccgacggcgccgacaucaaccucaugcccaucuga

SEQ ID NO: 110939 - RNA, 1410 nt, Artificial Sequence; identical to SEQ ID NO: 110363
  derived and/or modified CDS sequence (opt2) from neuraminidase__InfluenzaA__ABD94737

SEQ ID NO: 110940 - RNA, 1410 nt, Artificial Sequence; identical to SEQ ID NO: 110748
  derived and/or modified CDS sequence (opt2) from neuraminidase__InfluenzaA__ABD94748

SEQ ID NO: 110941 - RNA, 1413 nt, Artificial Sequence; identical to SEQ ID NO: 110864
  derived and/or modified CDS sequence (opt2) from neuraminidase__InfluenzaA__ABD94759

SEQ ID NO: 110942 - RNA, 1410 nt, Artificial Sequence; identical to SEQ ID NO: 110097
  derived and/or modified CDS sequence (opt2) from neuraminidase__InfluenzaA__ABD94770

SEQ ID NO: 110943 - RNA, 1413 nt, Artificial Sequence; identical to SEQ ID NO: 110432
  derived and/or modified CDS sequence (opt2) from neuraminidase__InfluenzaA__ABD94792

SEQ ID NO: 110944 - RNA, 1413 nt, Artificial Sequence; identical to SEQ ID NO: 110432
  derived and/or modified CDS sequence (opt2) from neuraminidase__InfluenzaA__ABD94803

SEQ ID NO: 110945 - RNA, 1413 nt, Artificial Sequence; identical to SEQ ID NO: 110432
  derived and/or modified CDS sequence (opt2) from neuraminidase__InfluenzaA__ABD94814

SEQ ID NO: 110946 - RNA, 1410 nt, Artificial Sequence; identical to SEQ ID NO: 110609
  derived and/or modified CDS sequence (opt2) from neuraminidase__InfluenzaA__ABD94825

SEQ ID NO: 110947 - RNA, 1410 nt, Artificial Sequence
  derived and/or modified CDS sequence (opt2) from neuraminidase__InfluenzaA__ABD94847
augaaccccaaccagaagaucaucaccaucggcuccgucucccucaccaucgccaccaucugcuuccucaugcagaucgccauccucgucaccaccgucacccuccacuucaagcaguacgagugcaacuccccccccaacaaccaggucaugcucugcgagcccaagaucaucgagcgcaacaucaccgagaucgucuaccucaccaacaccaccaucgagaaggagaucugccccaagcucgccgaguaccgcaacugguccaagccccagugcaagaucaccggcuucgcccccuucuccaaggacaacuccauccgccucuccgccggcggcgacaucugggucacccgcgagcccuacgucuccugcgaccccgacaagugcuaccaguucgcccucggccagggcaccacccucaacaaccgccacuccaacgacaccguccacgaccgcacccccuaccgcacccuccucaugaacgagcucggcguccccuuccaccucggcaccaagcaggucugcaucgccugguccuccuccuccugccacgacggcaaggccuggcuccacgucugcgucaccggccacgacgagaacgccaccgccuccuucaucuacgacggccgccucgucgacuccaucggcuccugguccaagaagauccuccgcacccaggaguccgagugcgucugcaucaacggcaccugcaccgucgucaugaccgacggcuccgccuccggccgcgccgucaccaagauccucuucaucgaggagggcaagaucguccacaucuccccccuccucggcuccgcccagcacgucgaggagugcuccugcuacccccgcuaccccggcguccgcugcgucugccgcgacaacuggaagggcuccaaccgccccaucgucgacaucaacgucaaggacuacuccaucgucuccuccuacgucugcuccggccucgucggcgacaccccccgcaagaacgacuccuccuccuccucccacugccucaaccccaacaacgaggagggcggccacggcgucaagggcugggccuucgacgacggcaacgacgucuggaugggccgcaccaucuccgagaagcuccgcuccggcuacgagaccuucaaggucaucgagggcugguccaagcccaacuccaagcuccagaucaaccgccaggucaucgucgaccgcggcaaccgcuccggcuacuccggcaucuucuccgucgagggcaaguccugcaucaaccgcugcuucuacgucgagcucauccgcggccgcaagcaggagaccgaggucugguggaccuccaacuccaucgucgucuucugcggcaccuccggcaccuacggcaccggcuccuggcccgacggcgccgacaucaaccucaugcccaucuga

SEQ ID NO: 110948 - RNA, 1410 nt, Artificial Sequence; identical to SEQ ID NO: 110162
  derived and/or modified CDS sequence (opt2) from neuraminidase__InfluenzaA__ABD94858

SEQ ID NO: 110949 - RNA, 1410 nt, Artificial Sequence; identical to SEQ ID NO: 110162
  derived and/or modified CDS sequence (opt2) from neuraminidase__InfluenzaA__ABD94880

SEQ ID NO: 110950 - RNA, 1410 nt, Artificial Sequence
  derived and/or modified CDS sequence (opt2) from neuraminidase__InfluenzaA__ABD94891
augaaccccaaccagaagaucaucaccaucggcuccgucucccucaccaucaccaccaucugcuuccucaugcagaucgccauccucgucaucaccgucacccuccacuucaagcagugcgagugcaacuccccccccaacaaccaggucaugcucugcgagcccaccaucaucgagcgcaacaucaccgagaucgucuaccucaccaacaccaccaucgagaaggagaucugccccaagcucgccgaguaccgcaacugguccaagccccagugcaagaucaccggcuucgcccccuucuccaaggacaacuccauccgccucuccgccggcggcgacaucugggucacccgcgagcccuacgucuccugcgaccccggcaagugcuaccaguucgcccucggccagggcaccacccucaacaaccgccacuccaacgacaccguccacgaccgcacccccuaccgcacccuccucaugaacgagcucggcguccccuuccaccucggcaccaagcaggucugcaucgccugguccuccuccuccugccacgacggcaaggccuggcuccacgucugcgucaccggccacaacgagaacgccaccgccuccuucaucuacgacggccgccucgucgacuccaucggcuccugguccaagaacauccuccgcacccaggaguccgagugcgucugcaucaacggcaccugcaccgucgucaugaccgacggcuccgccuccggccgcgccgacaccaagguccucuucaucgaggagggcaagaucguccacaucucccagcucuccggcuccgcccagcacgucgaggagugcuccugcuacccccgcuaccccggcguccgcugcgucugccgcgacaacuggaagggcuccaaccgccccaucgucgacaucaacgucaaggacuacuccaucgucuccuccuacgucugcuccggccucgucggcgacaccccccgcaagaacgacuccuccuccuccuccuacugccucgaccccaacaacgaggagggcggccacggcgucaagggcugggccuucgacgacggcaacgacgucuggaugggccgcaccaucuccgagaagcuccgcuccggcuacgagaccuucaaggucaucggcggcugguccaagcccaacuccaagcuccagaucaaccgccaggucaucgucgaccgcggcaaccgcuccggcuacuccggcaucuucuccgucgagggcaaguccugcaucaaccgcugcuucuacgucgagcucauccgcggccgcaagcaggagaccgaggucugguggaccuccaacuccaucgucgucuucugcggcaccuccggcaccuacggcaccggcuccuggcccgacggcgccgacaucaaccucaugcccaucuga

SEQ ID NO: 110951 - RNA, 1410 nt, Artificial Sequence; identical to SEQ ID NO: 110928
  derived and/or modified CDS sequence (opt2) from neuraminidase__InfluenzaA__ABD94902

SEQ ID NO: 110952 - RNA, 1410 nt, Artificial Sequence
  derived and/or modified CDS sequence (opt2) from neuraminidase__InfluenzaA__ABD94924
augaaccccaaccagaagaucaucaccaucggcuccgucucccucaccaucgccaccaucugccuccucaugcagaucgccauccucgucaccaccgucacccuccacuucaagcaguacgagugcaacuccccccccaacaaccaggucaugcucugcgagcccaccaucaucgagcgcaacaucaccgagaucgucuaccucaccaacaccaccaucgagaaggagaucugccccaagcucgccgaguaccgcaacugguccaagccccagugcaagaucaccggcuucgcccccuucuccaaggacaacuccauccgccucuccgccggcggcgacaucugggucacccgcgagcccuacgucuccugcgaccccgacaagugcuaccaguucgcccucggccagggcaccacccucaacaaccgccacuccaacgacaccguccacgaccgcacccccuaccgcacccuccucaugaacgagcucggcguccccuuccaccucggcaccaagcaggucugcaucgccugguccuccuccuccugccacgacggcaaggccuggcuccacgucugcgucaccggccacgacgagaacgccaccgccuccuucaucuacgacggccgccucgucgacuccaucggcuccugguccaagaagauccuccgcacccaggaguccgagugcgucugcaucaacggcaccugcaccgucgucaugaccgacggcuccgccuccggccgcgccgacaccaagauccucuucaucgaggagggcaagaucguccacaucucccagcuccucggcuccgcccagcacgucgaggagugcuccugcuacccccgcuaccccggcguccgcugcgucugccgcgacaacuggaagggcuccaaccgccccaucgucgacaucaacgucaaggacuacuccaucgucuccuccuacgucugcuccggccucgucggcgacaccccccgcaagaacgacuccuccuccuccucccacugccucaaccccaacaacgaggagggcggccacggcgucaagggcugggccuucgacgacggcaacgacgucuggaugggccgcaccaucuccgagaagcuccgcuccggcuacgagaccuucaaggucaucgagggcugguccaagcccaacuccaagcuccagaucaaccgccaggucaucgucgaccgcggcaaccgcuccggcuacuccggcaucuucuccgucgagggcaaguccugcaucaaccgcugcuucuacgucgagcucauccgcggccgcaagcaggagaccgaggucugguggaccuccaacuccaucgucgucuucugcggcaccuccggcaccuacggcaccggcuccuggcccgacggcgccgacaucaaccucaugcccaucuga

SEQ ID NO: 110953 - RNA, 1410 nt, Artificial Sequence
  derived and/or modified CDS sequence (opt2) from neuraminidase__InfluenzaA__ABD94946
augaaccccaaccagaagaucaucaccaucggcuccgucucccucaccaucgccaccaucugcuuccucacccagaucgccauccucgucaccaccgucacccuccacuucaagcaguacgagugcaacuccccccccaacaaccaggucaugcucugcgagcccaccaucaucgagcgcaacaucaccgagaucgucuaccucaccaacaccaccaucgagaaggagaucugccccaagcucgccgaguaccgcaacugguccaagccccagugcaacaucaccggcuucgcccccuucuccaaggacaacuccauccgccucuccgccggcggcgacaucugggucacccgcgagcccuacgucuccugcgaccccgacaagugcuaccaguucgcccucggccagggcaccacccucaacaacggccacuccaacgacaccguccacgaccgcacccccuaccgcacccuccucaugaacgagcucggcguccccuuccaccucggcaccaagcaggucugcaucgccugguccuccuccuccugccacgacggcaaggccuggcuccacgucugcgucaccggcgacgacaagaacgccaccgccuccuucaucuacaacggccgccucgucgacuccaucggcuccugguccaagaagauccuccgcacccaggaguccgagugcgucugcaucaacggcaccugcaccgucgucaugaccgacggcuccgccuccggcaaggccgacaccaagauccucuucaucgaggagggcaagaucguccacaccucccuccucuccggcuccgcccagcacgucgaggagugcuccugcuacccccgcuaccccggcguccgcugcgucugccgcgacaacuggaagggcuccaaccgccccaucgucgacaucaacgucaaggacuacuccaucgucuccuccuacgucugcuccggccucgucggcgacaccccccgcaagaacgaccgcuccuccuccucccacugccucgaccccaacaacgaggagggcggccacggcgucaagggcugggccuucgacgacggcaacgacgucuggaugggccgcaccaucuccgagaagcuccgcuccggcuacgagaccuucaaggucaucgagggcugguccaagcccaacuccaagcuccagaucaaccgccaggucaucgucgaccgcgacaaccgcuccggcuacuccggcaucuucuccgucgagggcaaguccugcaucaaccgcugcuucuacgucgagcucauccgcggccgcaaccaggagaccgagguccucuggaccuccaacuccaucgucgucuucugcggcaccuccggcaccuacggcaccggcuccuggcccgacggcgccgacaucaaccucaugcccaucuga

SEQ ID NO: 110954 - RNA, 1410 nt, Artificial Sequence
  derived and/or modified CDS sequence (opt2) from neuraminidase__InfluenzaA__ABD94957
augaaccccaaccagaagaucaucaccaucggcuccgucucccucaccaucuccaccaucugcuucuucaugcagaucgccauccucaucaccaccgucacccuccacuucaagcaguacgaguucaacuccccccccaacaaccaggucaugcucugcgagcccaccaucaucgagcgcaacaucaccgagaucgucuaccucaccaacaccaccaucgagaaggagaucugccccaagcucgccgaguaccgcaacugguccaagccccagugcgacaucaccggcuucgcccccuucuccaaggacaacuccauccgccucuccgccggcggcgacaucugggucacccgcgagcccuacgucuccugcgaccccgacaagugcuaccaguucgcccucggccagggcaccacccucaacaacguccacuccaacgacaccguccacgaccgcacccccuaccgcacccuccucaugaacgagcucggcguccccuuccaccucggcaccaagcaggucugcaucgccugguccuccuccuccugccacgacggcaaggccuggcuccacgucugcgucaccggcgacgacaagaacgccaccgccuccuucaucuacaacggccgccucgucgacuccaucgucuccugguccaagaagauccuccgcacccaggaguccgagugcgucugcaucaacggcaccugcaccgucgucaugaccgacggcuccgccuccggcaaggccgacaccaagauccucuucaucgaggagggcaagaucguccacaccuccacccucuccggcuccgcccagcacgucgaggagugcuccugcuacccccgcuaccccggcguccgcugcgucugccgcgacaacuggaagggcuccaaccgccccaucgucgacaucaacaucaaggacuacuccaucgucuccuccuacgucugcuccggccucgucggcgacaccccccgcaagaacgacuccuccuccuccucccacugccucgaccccaacaacgaggagggcggccacggcgucaagggcugggccuucgacgacggcaacgacgucuggaugggccgcaccaucuccgagaagcuccgcuccggcuacgagaccuucaaggucaucgagggcugguccaaccccaacuccaagcuccagaucaaccgccaggucaucgucgaccgcggcaaccgcuccggcuacuccggcaucuucuccgucgaguccaaguccugcaucaaccgcugcuucuacgucgagcucauccgcggccgcaaggaggagaccgagguccucuggaccuccaacuccaucgucgucuucugcggcaccuccggcaccuacggcaccggcuccuggcccgacggcgccgacaucaaccucaugcccaucuga

SEQ ID NO: 110955 - RNA, 1413 nt, Artificial Sequence; identical to SEQ ID NO: 110864
  derived and/or modified CDS sequence (opt2) from neuraminidase__InfluenzaA__ABD94968

SEQ ID NO: 110956 - RNA, 1413 nt, Artificial Sequence; identical to SEQ ID NO: 110864
  derived and/or modified CDS sequence (opt2) from neuraminidase__InfluenzaA__ABD94990

SEQ ID NO: 110957 - RNA, 1413 nt, Artificial Sequence
  derived and/or modified CDS sequence (opt2) from neuraminidase__InfluenzaA__ABD95001
augaaccccaaccagaagaucaucaccaucggcuccaucuccaucgccaucggcaucaucucccucaugcuccagaucggcaacaucaucuccaucugggccucccacuccauccagaccggcucccagaaccacaccggcaucugcaaccagcgcaucaucaccuacgagaacuccaccugggucaaccacaccuacgucaacauccacaacaccaacgucgucgccggcaaggacaagaccuccgucacccucgccggcaacuccucccucugcuccaucuccggcugggccaucuacaccaaggacaacuccauccgcaucggcuccaagggcgacgucuucgucauccgcgagcccuucaucuccugcucccaccucgagugccgcaccuucuuccucacccagggcgcccuccucaacgacaagcacuccaacggcaccgucaaggaccgcucccccuaccgcgcccucauguccugcccccucggcgaggcccccucccccuacaacuccaaguucgaguccgucgccugguccgccuccgccugccacgacggcaugggcuggcucaccaucggcaucuccggccccgacaacggcgccgucgccguccucaaguacaacggcaucaucaccgagaccaucaaguccuggaagaagcgcauccuccgcacccaggaguccgagugcgucugcgucaacggcuccugcuucaccaucaugaccgacggccccuccaacggcgccgccuccuacaagaucuucaagaucgagaagggcaaggucaccaaguccaucgagcucaacgcccccaacuuccacuacgaggagugcuccugcuaccccgacaccggcaccgucaugugcgucugccgcgacaacuggcacggcuccaaccgccccugggucuccuucaaccagaaccucgacuaccagaucggcuacaucugcuccggcgucuucggcgacaacccccgccccaaggacggcgagggcuccugcaaccccgucaccgucgacggcgccgacggcgucaagggcuucuccuacaaguacggcaacggcgucuggaucggccgcaccaaguccaaccgccuccgcaagggcuucgagaugaucugggaccccaacggcuggaccgacaccgacuccaacuucuccaugaagcaggacgucgucgccaucaccgacugguccggcuacuccggcuccuucguccagcaccccgagcucaccggccucgacugcauccgccccugcuucugggucgagcucguccgcggccucccccgcgagaacaccaccaucuggaccuccggcuccuccaucuccuucugcggcgucaacuccgacaccgccaacugguccuggcccgacggcgccgagcuccccuucaccaucgacaaguga

SEQ ID NO: 110958 - RNA, 1413 nt, Artificial Sequence
  derived and/or modified CDS sequence (opt2) from neuraminidase__InfluenzaA__ABD95012
augaaccccaaccagaagaucaucaccaucggcuccaucuccaucgccaucggcaucaucucccucaugcuccagaucggcaacaucaucuccaucugggccucccacuccauccagaccggcucccagaaccacaccggcaucugcaaccagcgcaucaucaccuacgagaacuccaccugggucaaccacaccuacgucaacaucaacaacaccaacgucgucgccggcaaggacaagaccuccgucacccucgccggcaacuccucccucugcuccaucuccggcugggccaucuacaccaaggacaacuccauccgcaucggcuccaagggcgacgucuucgucauccgcgagcccuucaucuccugcucccaccucgagugccgcaccuucuuccucacccagggcgcccuccucaacgacaagcacuccaacggcaccgucaaggaccgcucccccuaccgcgcccucauguccugcccccucggcgaggcccccucccccuacaacuccaaguucgaguccgucgccugguccgccuccgccugccacgacggcaugggcuggcucaccaucggcaucuccggccccgacaacggcgccgucgccguccucaaguacaacggcaucaucaccgagaccaucaaguccuggaagaagcgcauccuccgcacccaggaguccgagugcgucugcgucaacggcuccugcuucaccaucaugaccgacggccccuccaacggcgccgccuccuacaagaucuucaagaucgagaagggcaaggucaccaaguccaucgagcucaacgcccccaacuuccacuacgaggagugcuccugcuaccccgacaccggcaccgucaugugcgucugccgcgacaacuggcacggcuccaaccgccccugggucuccuucaaccagaaccucgacuaccagaucggcuacaucugcuccggcgucuucggcgacaacccccgccccaaggacggcgagggcuccugcaaccccgucaccgucgacggcgccgacggcgucaagggcuucuccuacaaguacggcaacggcgucuggaucggccgcaccaaguccaaccgccuccgcaagggcuucgagaugaucugggaccccaacggcuggaccaacaccgacuccaacuucuccgucaagcaggacgucgucgccaucaccgacugguccggcuacuccggcuccuucguccagcaccccgagcucaccggccucgacugcauccgccccugcuucugggucgagcucguccgcggccucccccgcgagaacaccaccaucuggaccuccggcuccuccaucuccuucugcggcgucaacuccgacaccgccaacugguccuggcccgacggcgccgagcuccccuucaccaucgacaaguga

SEQ ID NO: 110959 - RNA, 1413 nt, Artificial Sequence; identical to SEQ ID NO: 110864
  derived and/or modified CDS sequence (opt2) from neuraminidase__InfluenzaA__ABD95023

SEQ ID NO: 110960 - RNA, 1413 nt, Artificial Sequence
  derived and/or modified CDS sequence (opt2) from neuraminidase__InfluenzaA__ABD95034
augaaccccaaccagaagaucaucaccaucggcuccaucuccaucgccaucggcaucaucucccucaugcuccagaucggcaacaucaucuccaucugggccucccacuccauccagaccggcucccagaaccacaccggcaucugcaaccagcgcaucaucaccuacgagaacuccaccugggucaaccacaccuacgucaacaucaacaacaccaacgucgucgccggcaaggacaagaccuccgucacccucgccggcaacuccucccucugcuccaucuccggcugggccaucuacaccaaggacaacuccauccgcaucggcuccaagggcgacgucuucgucauccgcgagcccuucaucuccugcucccaccucgagugccgcaccuucuuccucacccagggcgcccuccucaacgacaagcacuccaacggcaccgucaaggaccgcucccccuaccgcgcccucauguccugcccccucggcgaggcccccucccccuacaacuccaaguucgaguccgucgccugguccgccuccgccugccacgacggcaugggcuggcucaccaucggcaucuccggccccgacaacggcgccgucgccguccucaaguacaacggcaucaucaccgagaccaucaaguccuggaagaagcgcauccuccgcacccaggaguccgagugcgucugcgucaacggcuccugcuucaccaucaugaccgacggccccuccaacggcgccgccuccuacaagaucuucaagaucgagaagggcaaggucaccaaguccaucgagcucaacgcccccaacuuccacuacgaggagugcuccugcuaccccgacaccggcaccgucaugugcgucugccgcgacaacuggcacggcuccaaccgccccugggucuccuucaaccagaaccucgacuaccagaucggcuacaucugcuccggcgucuucggcgacaacccccgccccaaggacggcgagggcuccugcaaccccgucaccgucgacggcgccgacggcgucaagggcuucuccuacaaguacggcaacggcgucuggaucggccgcaccaaguccaaccgccuccgcaagggcuucgagaugaucugggaccccaacggcuggaccgacaccgacuccaacuucuccgucaagcaggacgucgucgccaucaccgacugguccggcuacuccggcuccuucauccagcaccccgagcucaccggccucgacugcauccgccccugcuucugggucgagcucguccgcggccucccccgcgagaacaccaccaucuggaccuccggcuccuccaucuccuucugcggcgucaacuccgacaccgccaacugguccuggcccgacggcgccgagcuccccuucaccaucgacaaguga

SEQ ID NO: 110961 - RNA, 1413 nt, Artificial Sequence
  derived and/or modified CDS sequence (opt2) from neuraminidase__InfluenzaA__ABD95056
augaaccccaaccagaagaucaucaccaucggcuccaucuccaucgccaucggcaucaucucccucaugcuccagaucggcaacaucaucuccaucugggccucccacuccauccagaccggcucccagaaccacaccggcgucugcaaccagcgcaucaucaccuacgagaacuccaccugggucaaccacaccuacgucaacaucaacaacaccaacgucaucgccggcaaggacaagaccuccgucacccucgccggcaacuccucccucugcuccaucuccggcugggccaucuacaccaaggacaacuccauccgcaucggcuccaagggcgacgucuucgucauccgcgagcccuucaucuccugcucccaccucgagugccgcaccuucuuccucacccagggcgcccuccucaacgacaagcacuccaacggcaccgucaaggaccgcucccccuaccgcgcccucauguccugcccccucggcgaggcccccucccccuacaacuccaaguucgaguccgucgccugguccgccuccgccugccacgacggcaugggcuggcucaccaucggcaucuccggccccgacaacggcgccgucgccguccucaaguacaacggcaucaucaccgagaccaucaaguccuggaagaagcagauccuccgcacccaggaguccgagugcgucugcgucaacggcuccugcuucaccaucaugaccgacggccccuccaacggcgccgccuccuacaagaucuucaagaucgagaagggcaagaucaccaaguccaucgagcucaacgcccccaacuuccacuacgaggagugcuccugcuaccccgacaccggcaccgucaugugcgucugccgcgacaacuggcacggcuccaaccgccccugggucuccuucaaccagaaccucgacuaccagaucggcuacaucugcuccggcgucuucggcgacaacccccgccccaaggacggcgagggcuccugcaaccccgucaccgucgacggcgccaacggcgucaagggcuucuccuacaaguacggcaacggcgucuggaucggccgcaccaaguccaaccgccuccgcaagggcuucgagaugaucugggaccccaacggcuggaccgacaccgacuccgacuucuccgucaagcaggacgucgucgccaucaccgacugguccggcuacuccggcuccuucguccagcaccccgagcucaccggccucaacugcauccgccccugcuucugggucgagcucguccgcggccuccccaaggagaacaccaccaucuggaccuccggcuccuccaucuccuucugcggcgucaacuccgacaccgccaacugguccuggcccgacggcgccgagcuccccuucaccaucgacaaguga

SEQ ID NO: 110962 - RNA, 1413 nt, Artificial Sequence; identical to SEQ ID NO: 110432
  derived and/or modified CDS sequence (opt2) from neuraminidase__InfluenzaA__ABD95067

SEQ ID NO: 110963 - RNA, 1413 nt, Artificial Sequence; identical to SEQ ID NO: 110432
  derived and/or modified CDS sequence (opt2) from neuraminidase__InfluenzaA__ABD95078

SEQ ID NO: 110964 - RNA, 1413 nt, Artificial Sequence; identical to SEQ ID NO: 110961
  derived and/or modified CDS sequence (opt2) from neuraminidase__InfluenzaA__ABD95089

SEQ ID NO: 110965 - RNA, 1413 nt, Artificial Sequence; identical to SEQ ID NO: 110432
  derived and/or modified CDS sequence (opt2) from neuraminidase__InfluenzaA__ABD95100

SEQ ID NO: 110966 - RNA, 1413 nt, Artificial Sequence
  derived and/or modified CDS sequence (opt2) from neuraminidase__InfluenzaA__ABD95111
augaaccccaaccagaagaucaucaccaucggcuccaucuccaucgccaucggcaugaucucccucaugcuccagaucggcaacaucaucuccaucugggccucccacuccauccagaccggcucccagaaccacaccggcgucugcaaccagcgcaucaucaccuacgagaacuccaccugggucaaccacaccuacgucaacaucaacaacaccaacgucaucgccggcaaggacaagaccuccgucacccucgccggcaacuccucccucugcuccaucuccggcugggccaucuacaccaaggacaacuccauccgcaucggcuccaagggcgacgucuucgucauccgcgagcccuucaucuccugcucccaccucgagugccgcaccuucuuccucacccagggcgcccuccucaacgacaagcacuccaacggcaccgucaaggaccgcucccccuaccgcgcccucauguccugcccccucggcgaggcccccucccccuacaacuccaaguucgaguccgucgccugguccgccuccgccugccacgacggcaugggcuggcucaccaucggcaucuccggccccgacaacggcgccgucgccguccucaaguacaacggcaucaucaccgagaccaucaaguccuggaagaagcagauccuccgcacccaggaguccgagugcgucugcgucaacggcuccugcuucaccaucaugaccgacggccccuccaacggcgccgccuccuacaagaucuucaagaucgagaagggcaaggucaccaaguccaucgagcucaacgcccccaacuuccacuacgaggagugcuccugcuaccccgacaccggcaccgucaugugcgucugccgcgacaacuggcacggcuccaaccgccccugggucuccuucaaccagaaccucgacuaccagaucggcuacaucugcuccggcgucuucggcgacaacccccgccccaaggacggcgagggcuccugcaaccccgucaccgucgacggcgccaacggcgucaagggcuucuccuacaaguacggcaacggcgucuggaucggccgcaccaaguccaaccgccuccgcaagggcuucgagaugaucugggaccccaacggcuggaccgacaccgacuccgacuucuccgucaagcaggacgucgucgccaucaccgacugguccggcuacuccggcuccuucguccagcaccccgagcucaccggccucgacugcauccgccccugcuucugggucgagcucguccgcggccuccccaaggagaacaccaccaucuggaccuccggcuccuccaucuccuucugcggcgucaacuccgacaccgccaacugguccuggcccgacggcgccgagcuccccuucaccaucgacaaguga

SEQ ID NO: 110967 - RNA, 1413 nt, Artificial Sequence; identical to SEQ ID NO: 110966
  derived and/or modified CDS sequence (opt2) from neuraminidase__InfluenzaA__ABD95122

SEQ ID NO: 110968 - RNA, 1413 nt, Artificial Sequence; identical to SEQ ID NO: 110432
  derived and/or modified CDS sequence (opt2) from neuraminidase__InfluenzaA__ABD95144

SEQ ID NO: 110969 - RNA, 1413 nt, Artificial Sequence; identical to SEQ ID NO: 110432
  derived and/or modified CDS sequence (opt2) from neuraminidase__InfluenzaA__ABD95155

SEQ ID NO: 110970 - RNA, 1413 nt, Artificial Sequence
  derived and/or modified CDS sequence (opt2) from neuraminidase__InfluenzaA__ABD95166
augaaccccaaccagaagaucaucaccaucggcuccaucuccaucgccaucggcaugaucucccucaugcuccagaucggcaacaucaucuccaucugggccucccacuccauccagaccggcucccagaaccacaccggcgucugcaaccagcgcaucaucaccuacgagaacuccaccugggucaaccacaccuacgucaacaucaacaacaccaacgucaucgccgagaaggacaagaccuccgucacccucgccggcaacuccucccucugcuccaucuccggcugggccaucuacaccaaggacaacuccauccgcaucggcuccaagggcgacgucuucgucauccgcgagcccuucaucuccugcucccaccucgagugccgcaccuucuuccucacccagggcgcccuccucaacgacaagcacuccaacggcaccgucaaggaccgcucccccuaccgcgcccucauguccugcccccucggcgaggcccccucccccuacaacuccaaguucgaguccgucgccugguccgccuccgccugccacgacggcaugggcuggcucaccaucggcaucuccggccccgacaacggcgccgucgccguccucaaguacaacggcaucaucaccgagaccaucaaguccuggaagaagcagauccuccgcacccaggaguccgagugcgucugcgucaacggcuccugcuucaccaucaugaccgacggccccuccaacggcgccgccuccuacaagaucuucaagaucgagaagggcaaggucaccaaguccaucgagcucaacgcccccaacuuccacuacgaggagugcuccugcuaccccgacaccggcaccgucaugugcgucugccgcgacaacuggcacggcuccaaccgccccugggucuccuucaaccagaaccucgacuaccagaucggcuacaucugcuccggcgucuucggcgacaacccccgccccaaggacggcgagggcuccugcaaccccgucaccgucgacggcgccaacggcgucaagggcuucuccuacaaguacggcaacggcgucuggaucggccgcaccaaguccaaccgccuccgcaagggcuucgagaugaucugggaccccaacggcuggaccgacaccgacuccgacuucuccgucaagcaggacgucgucgccaucaccgacugguccggcuacuccggcuccuucguccagcaccccgagcucaccggccucgacugcauccgccccugcuucugggucgagcucguccgcggccuccccaaggagaacaccaccaucuggaccuccggcuccuccaucuccuucugcggcgucaacuccgacaccgccaacugguccuggcccgacggcgccgagcuccccuucaccaucgacaaguga

SEQ ID NO: 110971 - RNA, 1413 nt, Artificial Sequence; identical to SEQ ID NO: 110961
  derived and/or modified CDS sequence (opt2) from neuraminidase__InfluenzaA__ABD95177

SEQ ID NO: 110972 - RNA, 1413 nt, Artificial Sequence
  derived and/or modified CDS sequence (opt2) from neuraminidase__InfluenzaA__ABD95188
augaaccccaaccagaagaucaucaccaucggcuccaucuccaccaccaucggcaucaucucccucaugcuccagaucggcaacaucaucuccaucugggccucccacuccauccagaccggcucccagaaccacaccggcgucugcaaccagcgcaucaucaccuacgagaacuccaccugggucaaccacaccuacgucaacaucaacaacaccaacgucaucgccggcaaggacaagaccuccgucacccucgccggcaacuccucccucugcuccaucuccggcugggccaucuacaccaaggacaacuccauccgcaucggcuccaagggcgacgucuucgucauccgcgagcccuucaucuccugcucccaccucgagugccgcaccuucuuccucacccagggcgcccuccucaacgacaagcacuccaacggcaccgucaaggaccgcucccccuaccgcgcccucauguccugcccccucggcgaggcccccucccccuacaacuccaaguucgaguccgucgccugguccgccuccgccugccacgacggcaugggcuggcucaccaucggcaucuccggccccgacaacggcgccgucgccguccucaaguacaacggcaucaucaccgagaccaucaaguccuggaagaagcagauccuccgcacccaggaguccgagugcgucugcgucaacggcuccugcuucaccaucaugaccgacggccccuccaacggcgccgccuccuacaagaucuucaagaucgagaagggcaaggucaccaaguccaucgagcucaacgcccccaacuuccacuacgaggagugcuccugcuaccccgacaccggcaccgucaugugcgucugccgcgacaacuggcacggcuccaaccgccccugggucuccuucaaccagaaccucgacuaccagaucggcuacaucugcuccggcgucuucggcgacaacccccgccccaaggacggcgagggcuccugcaaccccgucaccgucgacggcgccaacggcgucaagggcuucuccuacaaguacggcaacggcgucuggaucggccgcaccaaguccaaccgccuccgcaagggcuucgagaugaucugggaccccaacggcuggaccgacaccgacuccgacuucuccgucaagcaggacgucgucgccaucaccgacugguccggcuacuccggcuccuucguccagcaccccgagcucaccggccucgacugcauccgccccugcuucugggucgagcucguccgcggccuccccaaggagaacaccaccaucuggaccuccggcuccuccaucuccuucugcggcgucaacuccgacaccgccaacugguccuggcccgacggcgccgagcuccccuucaccaucgacaaguga

SEQ ID NO: 110973 - RNA, 1413 nt, Artificial Sequence; identical to SEQ ID NO: 110961
  derived and/or modified CDS sequence (opt2) from neuraminidase__InfluenzaA__ABD95199

SEQ ID NO: 110974 - RNA, 1413 nt, Artificial Sequence; identical to SEQ ID NO: 110451
  derived and/or modified CDS sequence (opt2) from neuraminidase__InfluenzaA__ABD95210

SEQ ID NO: 110975 - RNA, 1413 nt, Artificial Sequence
  derived and/or modified CDS sequence (opt2) from neuraminidase__InfluenzaA__ABD95221
augaaccccaaccagaagaucaucaccaucggcuccaucuccaucgccaucggcaugaucucccucaugcuccagaucggcaacaucaucuccaucugggccucccacuccauccagaccggcucccagaaccacaccggcgucugcaaccagcgcaucaucaccuacgagaacuccaccugggucaaccacaccuacgucaacaucaacaacaccaacgucaucgccggcaaggacaagaccuccgucacccucgccggcaacuccucccucugcuccaucuccggcugggccaucuacaccaaggacaacuccauccgcaucggcuccaagggcgacgucuucgucauccgcgagcccuucaucuccugcucccaccucgagugccgcaccuucuuccucacccagggcgcccuccucaacgacaagcacuccaacggcaccgucaaggaccgcucccccuaccgcgcccucauguccugcccccucggcgaggcccccucccccuacaacuccaaguucgaguccgucgccugguccgccuccgccugccacgacggcaugggcuggcucaccaucggcaucuccggccccgacaacggcgccgucgccguccucaaguacaacggcaucaucaccgagaccaucaaguccuggaagaagcagauccuccgcacccaggaguccgagugcgucugcgucaacggcuccugcuucaccaucaugaccgacggccccuccaacggcgccgccuccuacaagaucuucaagaucgagaagggcaaggucaccaaguccaucgagcucaacgcccccaacucccacuacgaggagugcuccugcuaccccgacaccggcaccgucaugugcgucugccgcgacaacuggcacggcuccaaccgccccugggucuccuucaaccagaaccucgacuaccagaucggcuacaucugcuccggcgucuucggcgacaacccccgccccaaggacggcgagggcuccugcaaccccgucaccgucgacggcgccaacggcgucaagggcuucuccuacaaguacggcaacggcgucuggaucggccgcaccaaguccaaccgccuccgcaagggcuucgagaugaucugggaccccaacggcuggaccgacaccgacuccgacuucuccgucaagcaggacgucgucgccaucaccgacugguccggcuacuccggcuccuucguccagcaccccgagcucaccggccucgacugcauccgccccugcuucugggucgagcucguccgcggccuccccaaggagaacaccaccaucuggaccuccggcuccuccaucuccuucugcggcgucaacuccgacaccgccaacugguccuggcccgacggcgccgagcuccccuucaccaucgacaaguga

SEQ ID NO: 110976 - RNA, 1413 nt, Artificial Sequence; identical to SEQ ID NO: 110966
  derived and/or modified CDS sequence (opt2) from neuraminidase__InfluenzaA__ABD95232

SEQ ID NO: 110977 - RNA, 1413 nt, Artificial Sequence; identical to SEQ ID NO: 110432
  derived and/or modified CDS sequence (opt2) from neuraminidase__InfluenzaA__ABD95243

SEQ ID NO: 110978 - RNA, 1413 nt, Artificial Sequence; identical to SEQ ID NO: 110966
  derived and/or modified CDS sequence (opt2) from neuraminidase__InfluenzaA__ABD95254

SEQ ID NO: 110979 - RNA, 1413 nt, Artificial Sequence; identical to SEQ ID NO: 110451
  derived and/or modified CDS sequence (opt2) from neuraminidase__InfluenzaA__ABD95265

SEQ ID NO: 110980 - RNA, 1413 nt, Artificial Sequence; identical to SEQ ID NO: 110432
  derived and/or modified CDS sequence (opt2) from neuraminidase__InfluenzaA__ABD95276

SEQ ID NO: 110981 - RNA, 1413 nt, Artificial Sequence
  derived and/or modified CDS sequence (opt2) from neuraminidase__InfluenzaA__ABD95287
augaaccccaaccagaagaucaucaccaucggcuccaucuccgucgccaucggcaucaucucccucaugcuccagaucggcaacaucaucuccaucugggccucccacuccauccagaccggcucccagaaccacaccggcgucugcaaccagcgcaucaucaccuacgagaacuccaccugggucaaccacaccuacgucaacaucaacaacaccaacgucaucgccggcaaggacaagaccuccgucacccucgccggcaacuccucccucugcuccaucuccggcugggccaucuacaccaaggacaacuccauccgcaucggcuccaagggcgacgucuucgucauccgcgagcccuucaucuccugcucccaccucgagugccgcaccuucuuccucacccagggcgcccuccucaacgacaagcacuccaacggcaccgucaaggaccgcucccccuaccgcgcccucauguccugcccccucggcgaggcccccucccccuacaacuccaaguucgaguccgucgccugguccgccuccgccugccacgacggcaugggcuggcucaccaucggcaucuccggccccgacaacggcgccgucgccguccucaaguacaacggcaucaucaccgagaccaucaaguccuggaagaagcagauccuccgcacccaggaguccgagugcgucugcgucaacggcuccugcuucaccaucaugaccgacggccccuccaacggcgccgccuccuacaagaucuucaagaucgagaagggcaaggucaccaaguccaucgagcucaacgcccccaacuuccacuacgaggagugcuccugcuaccccgacaccggcaccgucaugugcgucugccgcgacaacuggcacggcuccaaccgccccugggucuccuucaaccagaaccucgacuaccagaucggcuacaucugcuccggcgucuucggcgacaacccccgccccaaggacggcgagggcuccugcaaccccgucaccgucgacggcgccaacggcgucaagggcuucuccuacaaguacggcaacggcgucuggaucggccgcaccaaguccaaccgccuccgcaagggcuucgagaugaucugggaccccaacggcuggaccgacaccgacuccgacuucuccgucaagcaggacgucgucgccaucaccgacugguccggcuacuccggcuccuucguccagcaccccgagcucaccggccucgacugcauccgccccugcuucugggucgagcucguccgcggccuccccaaggagaacaccaccaucuggaccuccggcuccuccaucuccuucugcggcgucaacuccgacaccgccaacugguccuggcccgacggcgccgagcuccccuucaccaucgacaaguga

SEQ ID NO: 110982 - RNA, 1413 nt, Artificial Sequence; identical to SEQ ID NO: 110432
  derived and/or modified CDS sequence (opt2) from neuraminidase__InfluenzaA__ABD95298

SEQ ID NO: 110983 - RNA, 1413 nt, Artificial Sequence
  derived and/or modified CDS sequence (opt2) from neuraminidase__InfluenzaA__ABD95309
augaaccccaaccagaagaucaucaccaucggcuccaucuccaucgccaucggcaugaucucccucaugcuccagaucggcaacaucaucuccaucugggccucccacuccauccagaccggcucccagaaccacaccggcgucugcaaccagcgcaucaucaccuacgagaacuccaccugggucaaccacaccuacgucaacaucaacaacaccaacgucaucgccggcaaggacaagaccuccgucacccucgccggcaacuccucccucugcuccaucuccggcugggccaucuacaccaaggacaacuccauccgcaucggcuccaagggcgacgucuucgucauccgcgagcccuucaucuccugcucccaccucgagugccgcaccuucuuccucacccagggcgcccuccucaacgacaagcacuccaacggcaccgucaaggaccgcucccccuaccgcgcccucauguccugcccccucggcgaggcccccucccccuacaacuccaaguucgaguccgucgccugguccgccuccgccugccacgacggcaugggcuggcucaccaucggcaucuccggccccgacaacggcgccgucgccguccucaaguacaacggcaucaucaccgagaccaucaaguccuggaagaagcagauccuccgcacccaggaguccgagugcgucugcgucaacggcuccugcuucaccaucaugaccgacggccccuccaacggcgccgccuccuacaagaucuucaagaucgagaagggcaaggucaccaaguccaucgagcucaacgcccccaacuuccacuacgaggagugcuccugcuaccccgacaccggcaccgucaugugcgucugccgcgacaacuggcacggcuccaaccgccccugggucuccuucaaccagaaccucgacuaccagaucggcuacaucugcuccggcgucuucggcgacaacccccgccccaaggacggcgagggcuccugcaaccccgucaccgucgacggcgccaacggcgucaagggcuucuccuacaaguacggcaacggcgucuggaucggccgcaccaagugcaaccgccuccgcaagggcuucgagaugaucugggaccccaacggcuggaccgacaccgacuccgacuucuccgucaagcaggacgucgucgccaucaccgacugguccggcuacuccggcuccuucguccagcaccccgagcucaccggccucgacugcauccgccccugcuucugggucgagcucguccgcggccuccccaaggagaacaccaccaucuggaccuccggcuccuccaucuccuucugcggcgucaacuccgacaccgccaacugguccuggcccgacggcgccgagcuccccuucaccaucgacaaguga

SEQ ID NO: 110984 - RNA, 1413 nt, Artificial Sequence; identical to SEQ ID NO: 110432
  derived and/or modified CDS sequence (opt2) from neuraminidase__InfluenzaA__ABD95320

SEQ ID NO: 110985 - RNA, 1413 nt, Artificial Sequence; identical to SEQ ID NO: 110961
  derived and/or modified CDS sequence (opt2) from neuraminidase__InfluenzaA__ABD95331

SEQ ID NO: 110986 - RNA, 1413 nt, Artificial Sequence
  derived and/or modified CDS sequence (opt2) from neuraminidase__InfluenzaA__ABD95342
augaaccccaaccagaagaucaucaccaucggcuccaucugcauggccaucggcaucaucucccucauccuccagaucggcaacaucaucuccaucugggucucccacuccauccagaccggcucccagaaccacaccggcaucugcaaccagcgcaucaucaccuacgagaacuccaccugggucaaccagaccuacgucaacaucaacaacaccaacgucgucgccggcaaggacaccaccuccgucacccucgccggcaacuccucccucugccccguccgcggcugggccaucuacuccaaggacaacuccauccgcaucggcuccaagggcgacgucuucgucauccgcgagcccuucaucuccugcucccaccucgagugccgcaccuucuuccucacccagggcgcccuccucaacgacaagcacuccaacggcaccgucaaggaccgcucccccuaccgcgcccucauguccugccccaucggcgaggcccccucccccuacaacucccgcuucgaguccgucgccugguccgccuccgccugccacgacggcaugggcuggcucaccaucggcaucuccggccccgacgacggcgccgucgccguccucaaguacaacggcaucaucaccgagaccaucaaguccuggcgcaagcgcauccuccgcacccaggaguccgagugcgucugcaucaacggcuccugcuucaccaucaugaccgacggccccuccaacggccccgccuccuaccgcaucuucaagaucgagaagggcaagaucaccaaguccaucgagcucgacgcccccaacucccacuacgaggagugcuccugcuaccccgacaccggcaccgucaugugcgucugccgcgacaacuggcacggcuccaaccgccccugggucuccuucaaccagaaccucgacuaccagaucggcuacaucugcuccggcgucuucggcgacaacccccgccccaaggacggcaagggcuccugcggccccgucaccgucgacggcgccgacggcgucaagggcuucuccuaccgcuacggcaacggcgucuggaucggccgcaccaaguccaacuccucccgcaagggcuucgagaugaucugggaccccaacggcuggaccgacaccgacuccaacuuccucgucaagcaggacgucgucgccaugaccgacugguccggcuacuccggcuccuucguccagcaccccgagcucaccggccucgacugcaugcgccccugcuucugggucgagcucauccgcggccgcccccgcgagaagaccaccaucuggaccuccggcuccuccaucuccuucugcggcgucaacuccgacaccgucaacugguccuggcccgacggcgccgagcuccccuucaccaucgacaaguga

SEQ ID NO: 110987 - RNA, 1413 nt, Artificial Sequence
  derived and/or modified CDS sequence (opt2) from neuraminidase__InfluenzaA__ABD95353
augaaccccaaccagaagaucaucaccaucggcuccaucugcauggccaucggcaucaucucccucauccuccagaucggcaacaucaucuccaucugggucucccacuccauccagaccggcucccagaaccacaccggcaucugcaaccagcgcaucaucaccuacgagaacuccaccugggucaaccagaccuacgucaacaucuccaacaccaacgucgucgccggcaaggacaccaccuccaugacccucgccggcaacuccucccucugccccauccgcggcugggccaucuacuccaaggacaacuccauccgcaucggcuccaagggcgacgucuucgucauccgcgagcccuucaucuccugcucccaccucgagugccgcaccuucuuccucacccagggcgcccuccucaacgacaagcacuccaacggcaccgucaaggaccgcucccccuaccgcgcccucauguccugccccaucggcgaggcccccucccccuacaacucccgcuucgaguccgucgccugguccgccuccgccugccacgacggcaugggcuggcucaccaucggcaucuccggccccgacgacggcgccgucgccguccucaaguacaacggcaucaucaccgagaccaucaaguccuggcgcaagcagauccuccgcacccaggaguccgagugcgucugcgucaacggcuccugcuucaccaucaugaccgacggccccuccgacggccccgccuccuaccgcaucuucaagaucgagaagggcaagaucaccaaguccaucgagcucgacgcccccaacucccacuacgaggagugcuccugcuaccccgacaccggcaccgucaugugcgucugccgcgacaacuggcacggcuccaaccgccccugggucuccuucaaccagaaccucgacuaccagaucggcuacaucugcuccggcgucuucggcgacaacccccgccccaaggacggcaagggcuccugcgaccccgucaacgucgacggcgccgacggcgucaagggcuucuccuaccgcuacggcaacggcgucuggaucggccgcaccaaguccaacuccucccgcaagggcuucgagaugaucugggaccccaacggcuggaccgacaccgacuccaacuuccucgucaagcaggacgucgucgccaugaccgacugguccggcuacuccggcuccuucguccagcaccccgagcucaccggccucgacugcaugcgccccugcuucugggucgagcucauccgcggccgcccccgcgagaagaccaccaucuggaccuccggcuccuccaucuccuucugcggcgucaacuccgacaccgucaacugguccuggcccgacggcgccgagcuccccuucaccaucgacaaguga

SEQ ID NO: 110988 - RNA, 1413 nt, Artificial Sequence; identical to SEQ ID NO: 110864
  derived and/or modified CDS sequence (opt2) from neuraminidase__InfluenzaA__ABE11660

SEQ ID NO: 110989 - RNA, 1413 nt, Artificial Sequence
  derived and/or modified CDS sequence (opt2) from neuraminidase__InfluenzaA__ABE11671
augaaccccaaccagaagaucaucaccaucggcuccaucuccaucgccaucggcaucaucucccucaugcuccagaucggcaacaucaucuccaucugggccucccacuccauccagaccggcucccagaaccacaccggcgucugcaaccagcgcaucaucaccuacgagaacuccaccugggucaaccacaccuacgucaacaucaacaacaccaacgucgucgccggcaaggacaagaccuccgucacccucgccggcaacuccucccucugcuccaucuccggcugggccaucuacaccaaggacaacuccauccgcaucggcuccaagggcgacgucuucgucauccgcgagcccuucaucuccugcucccaccucgagugccgcaccuucuuccucacccagggcgcccuccucaacgacaagcacuccaacggcaccgucaaggaccgcucccccuaccgcgcccucauguccugcccccucggcgaggcccccucccccuacaacuccaaguucgaguccgucgccugguccgccuccgccugccacgacggcaugggcuggcucaccaucggcaucuccggccccgacaacggcgccgucgccguccucaaguacaacggcaucaucaccgagaccaucaaguccuggaagaagcagauccuccgcacccaggaguccgagugcgucugcgucaacggcuccugcuucaccaucaugaccgacggccccuccaacggcgccgccuccuacaagaucuucaagaucgagaagggcaaggucaacaaguccaucgagcucaacgcccccaacuuccacuacgaggagugcuccugcuaccccgacaccggcaccgucaugugcgucugccgcgacaacuggcacggcuccaaccgccccugggucuccuucaaccagaaccucgacuaccagaucggcuacaucugcuccggcgucuucggcgacaacccccgccccaaggacggcgagggcuccugcaaccccgucaccgucgacggcgccaacggcgucaagggcuucuccuacaaguacggcaacggcgucuggaucggccgcaccaaguccaaccgccuccgcaagggcuucgagaugaucugggaccccaacggcuggaccgacaccgacuccgacuucuccgucaagcaggacgucgucgccaucaccgacugguccggcuacuccggcuccuucguccagcaccccgagcucaccggccucgacugcauccgccccugcuucugggucgagcucguccgcggccucccccgcgagaacaccaccaucuggaccuccggcuccuccaucuccuucugcggcgucaacuccgacaccgccaacugguccuggcccgacggcgccgagcuccccuucaccaucgacaaguga

SEQ ID NO: 110990 - RNA, 1413 nt, Artificial Sequence
  derived and/or modified CDS sequence (opt2) from neuraminidase__InfluenzaA__ABE11682
augaaccccaaccagaagaucaucaccaucggcuccaucuccaucgccaucggcaucaucucccucaugcuccagaucggcaacaucaucuccaucugggccucccacuccauccagaccggcucccagaaccacaccggcaucugcaaccagcgcaucaucaccuacgagaacuccaccugggucaaccacaccuacgucaacaucaacaacaccaacgucgucgccggcgaggacaagaccuccgucacccucgccggcaacuccucccucugcuccaucuccggcugggccaucuacaccaaggacaacuccauccgcaucggcuccaagggcgacgucuucgucauccgcgagcccuucaucuccugcucccaccucgagugccgcaccuucuuccucacccagggcgcccuccucaacgacaagcacuccaacggcaccgucaaggaccgcucccccuaccgcgcccucauguccugcccccucggcgaggcccccucccccuacaacuccaaguucgaguccgucgccugguccgccuccgccugccacgacggcaugggcuggcucaccaucggcaucuccggccccgacaacggcgccgucgccguccucaaguacaacggcaucaucaccgagaccaucaaguccuggaagaagcgcauccuccgcacccaggaguccgagugcgucugcgucaacggcuccugcuucaccaucaugaccgacggccccuccaacggcgccgccuccuacaagaucuucaagaucgagaagggcaaggucaccaaguccaucgagcucaacgcccccaacuuccacuacgaggagugcuccugcuaccccgacaccggcaccgucaugugcgucugccgcgacaacuggcacggcuccaaccgccccugggucuccuucaaccagaaccucgacuaccagaucggcuacaucugcuccggcgucuucggcgacaacccccgccccaaggacggcgagggcuccugcaaccccgucaccgucgacggcgccgacggcgucaagggcuucuccuacaaguacggcaacggcgucuggaucggccgcaccaaguccaaccgccuccgcaagggcuucgagaugaucugggaccccaacggcuggaccgacaccgacuccgacuucuccgucaagcaggacgucgucgccaucaccgacugguccggcuacuccggcuccuucguccagcaccccgagcucaccggccucgacugcauccgccccugcuucugggucgagcucguccgcggccucccccgcgagaacaccaccaucuggaccuccggcuccuccaucuccuucugcggcgucaacuccgacaccgccaacugguccuggcccgacggcgccgagcuccccuucaccaucgacaaguga

SEQ ID NO: 110991 - RNA, 1413 nt, Artificial Sequence; identical to SEQ ID NO: 110432
  derived and/or modified CDS sequence (opt2) from neuraminidase__InfluenzaA__ABE11693

SEQ ID NO: 110992 - RNA, 1413 nt, Artificial Sequence; identical to SEQ ID NO: 110432
  derived and/or modified CDS sequence (opt2) from neuraminidase__InfluenzaA__ABE11704

SEQ ID NO: 110993 - RNA, 1413 nt, Artificial Sequence; identical to SEQ ID NO: 110432
  derived and/or modified CDS sequence (opt2) from neuraminidase__InfluenzaA__ABE11715

SEQ ID NO: 110994 - RNA, 1413 nt, Artificial Sequence; identical to SEQ ID NO: 110961
  derived and/or modified CDS sequence (opt2) from neuraminidase__InfluenzaA__ABE11726

SEQ ID NO: 110995 - RNA, 1413 nt, Artificial Sequence; identical to SEQ ID NO: 110966
  derived and/or modified CDS sequence (opt2) from neuraminidase__InfluenzaA__ABE11737

SEQ ID NO: 110996 - RNA, 1413 nt, Artificial Sequence; identical to SEQ ID NO: 110432
  derived and/or modified CDS sequence (opt2) from neuraminidase__InfluenzaA__ABE11815

SEQ ID NO: 110997 - RNA, 1413 nt, Artificial Sequence; identical to SEQ ID NO: 110961
  derived and/or modified CDS sequence (opt2) from neuraminidase__InfluenzaA__ABE11826

SEQ ID NO: 110998 - RNA, 1413 nt, Artificial Sequence; identical to SEQ ID NO: 110961
  derived and/or modified CDS sequence (opt2) from neuraminidase__InfluenzaA__ABE11837

SEQ ID NO: 110999 - RNA, 1413 nt, Artificial Sequence; identical to SEQ ID NO: 110961
  derived and/or modified CDS sequence (opt2) from neuraminidase__InfluenzaA__ABE11848

SEQ ID NO: 111000 - RNA, 1413 nt, Artificial Sequence; identical to SEQ ID NO: 110966
  derived and/or modified CDS sequence (opt2) from neuraminidase__InfluenzaA__ABE11859

SEQ ID NO: 111001 - RNA, 1413 nt, Artificial Sequence
  derived and/or modified CDS sequence (opt2) from neuraminidase__InfluenzaA__ABE11903
augaaccccaaccagaagaucaucaccaucggcuccaucuccauggccaucggcaucaucucccucauccuccagaucggcaacaucaucuccaucugggccucccacuccauccagaccggcucccagaacuacaccggcaucugcaaccagcgcaucaucaccuacgagaacuccaccugggucaaccagaccuacgucaacaucaacaacaccaacgucgucgccggcaaggacaagaccuccaugacccucgccggcaacuccucccucugccccauccgcggcugggccaucuacaccaaggacaacuccauccgcaucggcuccaagggcgacgucuucgucauccgcgagcccuucaucuccugcucccaccucgagugccgcaccuucuuccucacccagggcgcccuccucaacgacaagcacuccaacggcaccgucaaggaccgcucccccuaccgcgcccucauguccugcccccucggcgaggcccccucccccuacaacucccgcuucgaguccgucgccugguccgccuccgccugccacgacggccucggcuggcucaccaucggcaucuccggccccgacaacggcgccgucgccguccucaaguacaacggcaucaucaccgagaccaucaaguccuggaagaagcagauccuccgcacccaggaguccgagugcgucugcgucaacggcuccugcuucaccaucaugaccgacggccccuccaacggcgccgccuccuaccgcaucuucaagaucgagaagggccgcgucaccaaguccaucgagcucgacgcccccaacuaccacuacgaggagugcuccugcuaccccgacaccggcaccgucaugugcgucugccgcgacaacuggcacggcuccaaccgccccugggucuccuucaaccagaaccucgacuaccagaucggcuacaucugcuccggcgucuucggcgacaacccccgccccaaggacggcgagggcuccugcaaccccgucaccgucgacggcgccgacggcgucaagggcuucuccuaccgcuacggcaacggcgucuggaucggccgcaccaaguccaaccgccuccgcaagggcuucgagaugaucugggaccccaacggcuggaccgacaccgacuccgacuucuccaugaagcaggacgucgucgccaugaccgacugguccggcuacuccggcuccuucguccagcaccccgagcucaccggccucgacugcaugcgccccugcuucugggucgagcucguccgcggccucccccgcgagaacaccaccaucuggaccuccggcuccuccaucuccuucugcggcgucaacuccgagaccgccaacugguccuggcccgacggcgccgagcuccccuucaccaucgacaaguga

SEQ ID NO: 111002 - RNA, 1413 nt, Artificial Sequence
  derived and/or modified CDS sequence (opt2) from neuraminidase__InfluenzaA__ABE11925
augaaccccaaccagaagaucaucaccaucggcuccaucuccaucgccaucggcaucaucucccucauccuccagaucggcaacaucaucuccaucugggccucccacuccauccagaccggcucccagaaccacaccggcaucugcaaccagcgcaucaucaccuacgagaacuccaccugggucaaccagaccuacgucaacaucaacaacaccaacgucgucgccggcaaggacaagaccuccaugacccucgccggcaacuccucccucugccccauccgcggcugggccaucuacaccaaggacaacuccauccgcaucggcuccaagggcgacgucuucgucauccgcgagcccuucaucuccugcucccaccucgagugccgcaccuucuuccucacccagggcgcccuccucaacgacaagcacuccaacggcaccgucaaggaccgcucccccuaccgcgcccucauguccugcccccucggcgaggcccccucccccuacaacucccgcuucgaguccgucgccugguccgccuccgccugccacgacggccucggcuggcucaccaucggcaucuccggccccgacaacggcgccgucgccguccucaaguacaacggcaucaucaccgagaccaucaaguccuggaagaagcgcauccuccgcacccaggaguccgagugcgucugcaugaacggcuccugcuucaccaucaugaccgacggccccuccaacggcgccgccuccuaccgcaucuucaagaucgagaagggcaaggucaccaaguccaucgagcucgacgcccccaacuaccacuacgaggagugcuccugcuaccccgacaccggcaccgucaugugcgucugccgcgacaacuggcacggcuccaaccgccccugggucuccuucaaccagaaccucgacuaccagaucggcuacaucugcuccggcgucuucggcgacaacccccgccccaaggacggcgagggcuccugcaaccccgucaccgccgacggcgccgacggcgucaagggcuucuccuaccgcuacggcaacggcgucuggaucggccgcaccaaguccaaccgccuccgcaagggcuucgagaugaucugggaccccaacggcuggaccgacaccgacuccgacuucuccaugaagcaggacaucgucgccaugaccgacugguccggcuacuccggcuccuucguccagcaccccgagcucaccggccucgacugcaugcgccccugcuucugggucgagcucguccgcggccucccccgcgagaacaccaccaucuggaccuccggcuccuccaucuccuucugcggcgucaacuccgacaccgccaacugguccuggcccgacggcgccgagcuccccuucaccaucgacaaguga

SEQ ID NO: 111003 - RNA, 1413 nt, Artificial Sequence
  derived and/or modified CDS sequence (opt2) from neuraminidase__InfluenzaA__ABE11952
augaaccccaaccagaagaucaucaccaucggcuccaucuccauggccaucggcaucaucucccucauccuccagaucggcaacaucaucuccaucugggccucccacuccauccagaccggcucccagaacuacaccggcaucugcaaccagcgcaucaucaccuacgagaacuccaccugggucaaccagaccuacgucaacaucaacaacaccaacgucgucgccggcaaggacaagaccuccaugacccucgccggcaacuccucccucugccccauccgcggcugggccaucuacaccaaggacaacuccauccgcaucggcuccaagggcgacgucuucgucauccgcgagcccuucaucuccugcucccaccucgagugccgcaccuucuuccucacccagggcgcccuccucaacgacaagcacuccaacggcaccgucaaggaccgcucccccuaccgcgcccucauguccugcccccucggcgaggcccccucccccuacaacucccgcuucgaguccgucgccugguccgccuccgccugccacgacggccucggcuggcucaccaucggcaucuccggccccgacaacggcgccgucgccguccucaaguacaacggcaucaucaccgagaccaucaaguccuggaagaagcagauccuccgcacccaggaguccgagugcgucugcgucaacggcuccugcuucaccaucaugaccgacggccccuccaacggcgccgccuccuaccgcaucuucaagaucgagaagggccgcgucaccaaguccaucgagcucgacgcccccaacuaccacuacgaggagugcuccugcuaccccgacaccggcaccgucaugugcgucugccgcgacaacuggcacggcuccaaccgccccugggucuccuucaaccagaaccucgacuaccagaucggcuacaucugcuccggcgucuucggcgacaacccccgccccaaggacggcgagggcuccugcaaccccgucaccgucgacggcgccgacggcgucaagggcuucuccuaccgcuacggcaacggcgucuggaucggccgcaccaaguccaaccgccuccgcaagggcuucgagaugaucugggaccccaacggcuggaccgacaccgacuccgacuucuccaugaagcaggacgucgucgccaugaccgacugguccggcuacuccggcuccuucguccagcaccccgagcucaccggccucgacugcaugcgccccugcuucugggucgagcucguccgcggccucccccgcgagaacaccaccaucuggaccuccggcuccuccaucuccuucugcggcgucaacuccgagaccgccgacugguccuggcccgacggcgccgagcuccccuucaccaucgacaaguga

SEQ ID NO: 111004 - RNA, 1413 nt, Artificial Sequence
  derived and/or modified CDS sequence (opt2) from neuraminidase__InfluenzaA__ABE12035
augaaccccaaccagaagaucaucaccaucggcuccaucuccaucgccaucggcaucaucucccucauccuccagaucggcaacaucaucuccaucugggccucccacuccauccagaccggcucccagaaccacaccggcaucugcaaccagcgcaucaucaccuacgagaacuccaccugggucaaccagaccuacgucaacaucaacaacaccaacgucgucgccggcaaggacaagaccuccaugacccucgccggcaacuccucccucugccccauccgcggcugggccaucuacaccaaggacaacuccauccgcaucggcuccaagggcgacgucuucgucauccgcgagcccuucaucuccugcucccaccucgagugccgcaccuucuuccucacccagggcgcccuccucaacgacaagcacuccaacggcaccgucaaggaccgcucccccuaccgcgcccucauguccugcccccucggcgaggcccccucccccuacaacucccgcuucgaguccgucgccugguccgccuccgccugccacgacggccucggcuggcucaccaucggcaucuccggccccgacaacggcgccgucgccguccucaaguacaacggcaucaucaccgagaccaucaaguccuggaagaagcgcauccuccgcacccaggaguccgagugcgucugcaugaacggcuccugcuucaccaucaugaccgacggccccuccaacggcgccgccuccuaccgcaucuucaagaucgagaagggccgcgucaccaaguccaucgagcucgacgcccccaacuaccacuacgaggagugcuccugcuaccccgacaccggcaccgucaugugcgucugccgcgacaacuggcacggcuccaaccgccccugggucuccuucaaccagaaccucgacuaccagaucggcuacaucugcuccggcgucuucggcgacaacccccgccccaaggacggcgagggcuccugcaaccccgucaccgucgacggcgccgacggcgucaagggcuucuccuaccgcuacggcaacggcgucuggaucggccgcaccaaguccaaccgccuccgcaagggcuucgagaugaucugggaccccaacggcuggaccgacaccgacuccgacuucuccaugaagcaggacaucgucgccaugaccgacugguccggcuacuccggcuccuucguccagcaccccgagcucaccggccucgacugcaugcgccccugcuucugggucgagcucguccgcggccucccccgcgagaacaccaccaucuggaccuccggcuccuccaucuccuucugcggcgucaacuccgacaccgccaacugguccuggcccgacggcgccgagcuccccuucaccaucgacaaguga

SEQ ID NO: 111005 - RNA, 1410 nt, Artificial Sequence; identical to SEQ ID NO: 110766
  derived and/or modified CDS sequence (opt2) from neuraminidase__InfluenzaA__ABE12094

SEQ ID NO: 111006 - RNA, 1410 nt, Artificial Sequence; identical to SEQ ID NO: 110898
  derived and/or modified CDS sequence (opt2) from neuraminidase__InfluenzaA__ABE12126

SEQ ID NO: 111007 - RNA, 1413 nt, Artificial Sequence; identical to SEQ ID NO: 110432
  derived and/or modified CDS sequence (opt2) from neuraminidase__InfluenzaA__ABE12263

SEQ ID NO: 111008 - RNA, 1410 nt, Artificial Sequence
  derived and/or modified CDS sequence (opt2) from neuraminidase__InfluenzaA__ABE12626
augaaccccaaccagaagaucaucaccaucggcuccgucucccucaccaucgccaccaucugcuuccucaugcagaucgccauccucgucaccaccgucacccuccacuucaagcaguacgagugcgacucccccgccaacaaccaggucaugcccugcgagcccaucaucaucgagcgcaacaucaccgagaucgucuaccucaccaacaccaccaucgagaaggagaucugccccaagcucgucgaguaccgcaagugguccaagccccagugcaagaucaccggcuucgcccccuucuccaaggacaacuccauccgccucuccgccggcggcgacaucugggucacccgcgagcccuacgucuccugcgaccccggcaagugcuaccaguucgcccucggccagggcaccacccucgacaacaagcacuccaacgacaccauccacgaccgcaucccccaccgcacccuccucaugaacgagcucggcguccccuuccaccucggcacccgccaggucugcaucgccugguccuccuccuccugccacgacggcaaggccuggcuccacgucugcgucaccggcgacgacaagaacgccaccgccuccuucaucuacgacggccgccucgucgacuccaucggcuccuggucccagaacauccuccgcacccaggaguccgagugcgucugcaucaacggcaccugcaccgucgucaugaccgacggcuccgccuccggccgcgccgacacccgcauccucuucaucgaggagggcaagaucguccacaucuccccccucuccggcuccgcccagcacgucgaggagugcuccugcuacccccgcuaccccggcguccgcugcaucugccgcgacaacuggaagggcuccaaccgccccgucgucgacaucaacgucaaggacuacuccaucgacuccuccuacgucugcuccggccucgucggcgacaccccccgcaacaacgaccgcuccuccaacuccuacugccgcaaccccaacaacgagcgcggcaaccacggcgucaagggcugggccuucgacgacggcaacgacgucuggaugggccgcaccaucuccaaggacucccgcuccggcuacgagaccuucaaggucaucggcggcugguccacccccaacuccaagucccagaucaaccgccaggucaucgucgacuccgacaaccgcuccggcuacuccggcaucuucuccgucgagggcaaguccugcaucaaccgcugcuucuacgucgagcucauccgcggccgcgagcaggagacccgcgucugguggaccuccaacuccaucgucgucuucugcggcaccuccggcaccuacggcaccggcuccuggcccgacggcgccgacaucaaccucaugcccaucuga

SEQ ID NO: 111009 - RNA, 1410 nt, Artificial Sequence
  derived and/or modified CDS sequence (opt2) from neuraminidase__InfluenzaA__ABE12650
augaaccccaaccagaagaucaucaccaucggcuccgucucccucaccaucgccaccaucugcuuccucaugcagaucgccauccucgucaccaccgucacccuccacuucaagcaguacgagugcaacuccccccccaacaaccaggucaugcucugcgagcccaccaucaucgagcgcaacaucaccgagaucgucuaccucaccaacaccaccaucgagaaggagaucugccccaagcucgccgaguaccgcaacugguccaagccccagugcaagaucaccggcuucgcccccuucuccaaggacaacuccauccgccucuccgccggcggcgacaucugggucacccgcgagcccuacgucuccugcgaccccgacaagugcuaccaguucgcccucggccagggcaccacccucaacaaccgccacuccaacgacaccguccacgaccgcacccccuaccgcacccuccucaugaacgagcucggcguccccuuccaccucggcaccaagcaggucugcaucgccugguccuccuccuccugccacgacggcaaggccuggcuccacgucugcgucaccggccacgacgagaacgccaccgccuccuucaucuacgacggccgccucgucgacuccaucggcuccugguccaagaagauccuccgcacccaggaguccgagugcgucugcaucaacggcaccugcaccgucgucaugaccgacggcuccgccuccggccgcgccgacaccaagauccucuucaucaaggagggcaagaucguccacaucuccccccuccucggcuccgcccagcacgucgaggagugcuccugcuacccccgcuaccccggcguccgcugcgucugccgcgacaacuggaagggcuccaaccgccccaucgucgacaucaacgucaaggacuacuccaucgucuccuccuacgucugcuccggccucgucggcgacaccccccgcaagaacgacuccuccuccuccucccacugccucaaccccaacaacgaggagggcggccacggcgucaagggcugggccuucgacgacggcaacgacgucuggaugggccgcaccaucuccgagaagcuccgcuccggcuacgagaccuucaaggucaucgagggcugguccaagcccaacuccaagcuccagaucaaccgccaggucaucgucgaccgcggcaaccgcuccggcuacuccggcaucuucuccgucgagggcaaguccugcaucaaccgcugcuucuacgucgagcucauccgcggccgcaagcaggagaccgaggucugguggaccuccaacuccaucgucgucuucugcggcaccuccggcaccuacggcaccggcuccuggcccgacggcgccgacaucaaccucaugcccaucuga

SEQ ID NO: 111010 - RNA, 1410 nt, Artificial Sequence
  derived and/or modified CDS sequence (opt2) from neuraminidase__InfluenzaA__ABE13095
augaaccccaaccagaagaucaucaccaucggcuccgucucccucaccaucaccaccaucugcuuccucaugcagaucgccauccucgucaucaccgucacccuccacuucaagcagugcgagugcaacuccccccccaacaaccaggucaugcucugcgagcccaccaucaucgagcgcaacaucaccgagaucgucuaccucaccaacaccaccaucgagaaggagaucugccccaagcucgccgaguaccgcaacugguccaagccccagugcaagaucaccggcuucgcccccuucuccaaggacaacuccauccgccucuccgccggcggcgacaucugggucacccgcgagcccuacgucuccugcgaccccggcaagugcuaccaguucgcccucggccagggcaccacccucaacaaccgccacuccaacgacaccguccacgaccgcacccccuaccgcacccuccucaugaacgagcucggcguccccuuccaccucggcaccaagcaggucugcaucgccugguccuccuccuccugccacgacggcaaggccuggcuccacgucugcgucaccggccacaacgagaacgccaccgccuccuucaucuacgacggccgccucgucgacuccaucggcuccugguccaagaacauccuccgcacccaggaguccgagugcgucugcaucaacggcaccugcaccgucgucaugaccgacggcuccgccuccggccgcgccgacaccaagauccucuucaucgaggagggcaagaucguccacaucuccccccucuccggcuccgcccagcacgucgaggagugcuccugcuacccccgcuaccccggcguccgcugcgucugccgcgacaacuggaagggcuccaaccgccccaucgucgacaucaacgucaaggacuacuccaucgucuccuccuacgucugcuccggccucgucggcgacaccccccgcaagaacgacggcuccuccuccuccuacugccucgaccccaacaacgaggagggcggccacggcgucaagggcugggccuucgacgacggcaacgacgucuggaugggccgcaccaucuccgagaagcuccgcuccggcuacgagaccuucaaggucaucggcggcugguccaagcccaacuccaagcuccagaucaaccgccaggucaucgucgacaagggcaaccgcuccggcuacuccggcaucuucuccgucgagggcaaguccugcaucaaccgcugcuucuacgucgagcucauccgcggccgcaagcaggagaccgaggucugguggaccuccaacuccaucgucgucuucugcggcaccuccggcaccuacggcaccggcuccuggcccgacggcgccgacaucaaccucaugcccaucuga

SEQ ID NO: 111011 - RNA, 1410 nt, Artificial Sequence; identical to SEQ ID NO: 110162
  derived and/or modified CDS sequence (opt2) from neuraminidase__InfluenzaA__ABE13332

SEQ ID NO: 111012 - RNA, 1410 nt, Artificial Sequence; identical to SEQ ID NO: 110162
  derived and/or modified CDS sequence (opt2) from neuraminidase__InfluenzaA__ABE13558

SEQ ID NO: 111013 - RNA, 1410 nt, Artificial Sequence
  derived and/or modified CDS sequence (opt2) from neuraminidase__InfluenzaA__ABE13642
augaaccccaaccagaagaucaucaccaucggcuccgucucccucaccaucgccaccaucugcuuccucaugcagaucgccauccucgucaccaccgucacccuccacuucaagcaguacgagugcaacuccccccccaacaaccaggucaugcucugcgagcccaccaucaucgagcgcaacaucaccgagaucgucuaccucaccaacaccaccaucgagaaggagaucugccccaagcucgccgaguaccgcaacugguccaagccccagugcaagaucaccggcuucgcccccuucuccaaggacaacuccauccgccucuccgccggcggcgacaucugggucacccgcgagcccuacgucuccugcgaccccggcaagugcuaccaguucgcccucggccagggcaccacccucaacaaccgccacuccaacgacaccguccacgagcgcacccccuaccgcacccuccucaugaacgagcucggcguccccuuccaccucggcaccaagcaggucugcaucgccugguccuccuccuccugccacgacggcaaggccuggcuccacgucugcgucaccggccacgacgagaacgccaccgccuccuucaucuacaacggccgccucgucgacuccaucggcuccugguccaagaacauccuccgcacccaggaguccgagugcgucugcaucaacggcaccugcaccgucgucaugaccgacggcuccgccuccggccgcgccgacaccaagauccucuucaucgaggagggcaagaucguccacaucuccccccucuccggcuccgcccagcacgucgaggagugcuccugcuacccccgcuaccccggcguccgcugcgucugccgcgacaacuggaagggcuccaaccgccccaucgucgacaucaacgucaaggacuacuccaucgucuccuccuacgucugcuccggccucgucggcgacaccccccgcaagaacgacuccuccuccuccucccacugccucaaccccaacaacgaggagggcggccacggcgucaagggcugggccuucgacgacggcaacgacgucuggaugggccgcaccaucuccgagaagcuccgcuccggcuacgagaccuucaaggucaucggcggcugguccaagcccaacuccaagcuccagaucaaccgccaggucaucgucgaccgcggcaaccgcuccggcuacuccggcaucuucuccgucgagggcaaguccugcaucaaccgcugcuucuacgucgagcucauccgcggccgcaagcaggagaccgaggucugguggaccuccaacuccaucgucgucuucugcggcaccuccggcaccuacggcaccggcuccuggcccgacggcgccgacaucaaccucaugcccaucuga

SEQ ID NO: 111014 - RNA, 1410 nt, Artificial Sequence
  derived and/or modified CDS sequence (opt2) from neuraminidase__InfluenzaA__ABE13668
augaaccccaaccagaagaucaucaccaucggcuccgucucccucaccaucgccaccaucugcuuccucaugcagaucgccauccucgucaccaccgucacccuccacuucaagcaguacgagugcaacuccccccccaacaaccaggucaugcucugcgagcccaccaucaucgagcgcaacaucaccgagaucgucuaccucaccaacaccaccaucgagaaggagaucugccccaagcucgccgaguaccgcaacugguccaagccccagugcaagaucaccggcuucgcccccuucuccaaggacaacuccauccgccucuccgccggcggcgacaucugggucacccgcgagcccuacgucuccugcgaccccggcaagugcuaccaguucgcccucggccagggcaccacccucaacaaccgccacuccaacgacaccguccacgaccgcacccccuaccgcacccuccucaugaacgagcucggcguccccuuccaccucggcaccaagcaggucugcaucgccugguccuccuccuccugccacgacggcaaggccuggcuccacgucugcgucaccggccacgacgagaacgccaccgccuccuucaucuacgacggccgccucgucgacuccaucggcuccugguccaagaacauccuccgcacccaggaguccgagugcgucugcaucaacggcaccugcaccgucgucaugaccgacggcuccgccuccggccgcgccgacaccaagauccucuucaucgaggagggcaagaucguccacaucuccccccucuccggcuccgcccagcacgucgaggagugcuccugcuacccccgcuaccccggcguccgcugcgucugccgcgacaacuggaagggcuccaaccgccccaucgucgacaucaacgucaaggacuacuccaucgucuccuccuacgucugcuccggccucgucggcgacaccccccgcaagaacgacuccuccuccuccucccacugccucaaccccaacaacgaggagggcggccacggcgucaagggcugggccuucgacgacggcaacgacgucuggaugggccgcaccaucuccgagaagcuccgcuccggcuacgagaccuucaaggucaucggcggcugguccaagcccaacuccaagcuccagaucaaccgccaggucaucgucgaccgcggcaaccgcuccggcuacuccggcaucuucuccgucgagggcaaguccugcaucaaccgcugcuucuacgucgagcucauccgcggccgcaagcaggagaccgaggucugguggaccuccaacuccaucgucgucuucugcggcaccuccggcaccuacggcaccggcuccuggcccgacggcgccgacaucaaccucaugcccaucuga

SEQ ID NO: 111015 - RNA, 1410 nt, Artificial Sequence
  derived and/or modified CDS sequence (opt2) from neuraminidase__InfluenzaA__ABE13836
augaaccccaaccagaagaucaucaccaucggcuccgucucccucaccaucgccaccaucugcuuccucaugcagaucgccauccucgucaccaccgucacccuccacuucaagcaguacgagugcaacucccuccccaacaaccaggucaugcucugcgagcccaccaucaucgagcgcaacaucaccgagaucgucuaccucaccaacaccaccaucgagaaggagaucugccccaagcucgccgaguaccgcaacugguccaagccccagugcaagaucaccggcuucgcccccuucuccaaggacaacuccauccgccucuccgccggcggcgacaucugggucacccgcgagcccuacgucuccugcgaccccggcaagugcuaccaguucgcccucggccagggcaccacccucaacaaccgccacuccaacgacaccguccacgaccgcacccccuaccgcacccuccucaugaacgagcucggcguccccuuccaccucggcaccaagcaggucugcaucgccugguccuccuccuccugccacgacggcaaggccuggcuccacgucugcgucaccggccacgacgagaacgccaccgccuccuucaucuacgacggccgccucgucgacuccaucggcuccugguccaagaacauccuccgcacccaggaguccgagugcgucugcaucaacggcaccugcaccgucgucaugaccgacggcuccgccuccggccgcgccgacaccaagauccucuucaucgaggagggcaagaucguccacaucuccccccucuccggcuccgcccagcacgucgaggagugcuccugcuacccccgcuaccccggcguccgcugcgucugccgcgacaacuggaagggcuccaaccgccccaucgucgacaucaacgucaaggacuacuccaucgucuccuccuacgucugcuccggccucgucggcgacaccccccgcaagaacgacuccuccuccuccucccacugccucaaccccaacaacgaggagggcggccacggcgucaagggcugggccuucgacgacggcaacgacgucuggaugggccgcaccaucuccgagaagcuccgcuccggcuacgagaccuucaaggucaucggcggcugguccaagcccaacuccaagcuccagaucaaccgccaggucaucgucgaccgcggcaaccgcuccggcuacuccggcaucuucuccgucgagggcaaguccugcaucaaccgcugcuucuacgucgagcucauccgcggccgcaagcaggagaccgaggucugguggaccuccaacuccaucgucgucuucugcggcaccuccggcaccuacggcaccggcuccuggcccgacggcgccgacaucaaccucaugcccaucuga

SEQ ID NO: 111016 - RNA, 1410 nt, Artificial Sequence
  derived and/or modified CDS sequence (opt2) from neuraminidase__InfluenzaA__ABE14033
augaaccccaaccagaagaucaucaccaucggcuccgucucccucaccaucgccaccaucugcuuccucaugcagaucgccauccucgucaccaccgucacccuccacuucaagcaguacgagugcaacuccccccccaacaaccaggucaugcucugcgagcccaccaucaucgagcgcaacaucaccgagaucgucuaccucaccaacaccaccaucgagaaggagaucugccccaagcucgccgaguaccgcaacugguccaagccccagugcaagaucaccggcuucgcccccuucuccaaggacaacuccauccgccucuccgccggcggcgacaucugggucacccgcgagcccuacgucuccugcgaccccggcaagugcuaccaguucgcccucggccagggcaccacccucaacaaccgccacuccaacgacaccguccacgaccgcacccccuaccgcacccuccucaugaacgagcucggcguccccuuccaccucggcaccaagcaggucugcaucgccugguccuccuccuccugccacgacggcaaggccuggcuccacgucugcgucaccggccacgacgagaacgccaccgccuccuucaucuacgacggccgccucgucgacuccaucggcuccugguccaagaacauccuccgcacccaggaguccgagugcgucugcaucaacggcaccugcaccgucgucaugaccgacggcuccgccuccggccgcgccgacaccaagauccucuucaucgaggagggcaagaucguccacaucuccccccucuccggcuccgcccagcacgucgaggagugcuccugcuacccccgcuaccccggcguccgcugcgucugccgcgacaacuggaagggcuccaaccgccccaucgucgacaucaacgucaaggacuacuccaucgucuccuccuacgucugcuccggccucgucggcgacaccccccgcaagaacgacuccuccuccuccuccuacugccucaaccccaacaacgaggagggcggccacggcgucaagggcugggccuucgacgacggcaacgacgucuggaugggccgcaccaucuccgagaagcuccgcuccggcuacgagaccuucaaggucaucggcggcugguccaagcccaacuccaagcuccagaucaaccgccaggucaucgucgaccgcggcaaccgcuccggcuacuccggcaucuucuccgucgagggcaaguccugcaucaaccgcugcuucuacgucgagcucauccgcggccgcaagcaggagaccgaggucugguggaccuccaacuccaucgucgucuucugcggcaccuccggcaccuacggcaccggcuccuggcccgacggcgccgacaucaaccucaugcccaucuga

SEQ ID NO: 111017 - RNA, 1410 nt, Artificial Sequence
  derived and/or modified CDS sequence (opt2) from neuraminidase__InfluenzaA__ABE14055
augaaccccaaccagaagaucaucaccaucggcuccgucucccucaccaucgccaccaucugcuuccucaugcagaucgccauccucgucaccaccgucacccuccacuucaagcaguacgagugcaacuccccccccaacaaccaggucaugcucugcgagcccaccaucaucgagcgcaacaucaccgagaucgucuaccucaccaacaccaccaucgagaaggagaucugccccaagcucgccgaguaccgcaacugguccaagccccagugcaagaucaccggcuucgcccccuucuccaaggacaacuccauccgccucuccgccggcggcgacaucugggucacccgcgagcccuacgucuccugcgaccccgacaagugcuaccaguucgcccucggccagggcaccacccucaacaaccgccacuccaacgacaccguccacgaccgcacccccuaccgcacccuccucaugaacgagcucggcguccccuuccaccucggcaccaagcaggucugcaucgccugguccuccuccuccugccacgacggcaaggccuggcuccacgucugcgucaccggccacgacgagaacgccaccgccuccuucaucuacgacggccgccucgucgacuccaucuccuccugguccaagaacauccuccgcacccaggaguccgagugcgucugcaucaacggcaccugcaccgucgucaugaccgacggcuccuccuccggccgcgccgacaccaagauccucuucaucgaggagggcaagaucguccacaucuccccccucuccggcuccgcccagcacgucgaggagugcuccugcuacccccgcuaccccggcguccgcugcgucugccgcgacaacuggaagggcuccaaccgccccaucgucgacaucaacgucaaggacuacuccaucgucuccuccuacgucugcuccggccucgucggcgacaccccccgcaagaacgacuccuccuccuccuccuacugccucaaccccaacaacgaggagggcggccacggcgucaagggcugggccuucgacgacggcaacgacgucuggaugggccgcaccaucuccgagaagcuccgcuccggcuacgagaccuucaaggucaucggcggcugguccaagcccaacuccaagcuccagaucaaccgccaggucaucgucgaccgcggcaaccgcuccggcuacuccggcaucuucuccgucgagggcaaguccugcgucaaccgcugcuucuacgucgagcucauccgcggccgcaagcaggagaccgaggucugguggaccuccaacuccaucgucgucuucugcggcaccuccggcaccuacggcaccggcuccuggcccgacggcgccgacaucaaccucaugcccaucuga

SEQ ID NO: 111018 - RNA, 1410 nt, Artificial Sequence
  derived and/or modified CDS sequence (opt2) from neuraminidase__InfluenzaA__ABE14857
augaaccccaaccagaagaucaucaccaucggcuccgucucccucaccaucgccaccaucugcuuccucaugcagaucgccauccucgucaccaccgucacccuccacuucaagcaguacgagugcaacuccccccccaacaaccaggucaugcucugcgagcccaccaucaucgagcgcaacaccaccgagaucgucuaccucaccaacaccaccaucgagaaggagaucugccccaagcucgccgaguaccgcaacugguccaagccccagugcaagaucaccggcuucgcccccuucuccaaggacaacuccauccgccucuccgccggcggcgacaucugggucacccgcgagcccuacgucuccugcgaccccggcaagugcuaccaguucgcccucggccagggcaccacccucaacaaccgccacuccaacgacaccguccacgaccgcacccccuaccgcacccuccucaugaacgagcucggcguccccuuccaccucggcaccaagcaggucugcaucgccugguccuccuccuccugccacgacggcaaggccuggcuccacgucugcgucaccggccacgacgagaacgccaccgccuccuucaucuacgacggccgccucgucgacuccaucggcuccugguccaagaacauccuccgcacccaggaguccgagugcgucugcaucaacggcaccugcaccgucgucaugaccgacggcuccgccuccggccgcgccgacaccaagauccucuucaucgaggagggcaagaucguccacaucuccccccucuccggcuccgcccagcacgucgaggagugcuccugcuacccccgcuaccccggcguccgcugcgucugccgcgacaacuggaagggcuccaaccgccccaucgucgacaucaacgucaaggacuacuccaucgucuccuccuacgucugcuccggccucgucggcgacaccccccgcaagaacgacuccuccuccuccuccuacugccucaaccccaacaacgaggagggcggccacggcgucaagggcugggccuucgacgacggcaacgacgucuggaugggccgcaccaucuccgagaagcuccgcuccggcuacgagaccuucaaggucaucggcggcugguccaagcccaacuccaagcuccagaucaaccgccaggucaucgucgaccgcggcaaccgcuccggcuacuccggcaucuucuccgucgagggcaaguccugcaucaaccgcugcuucuacgucgagcucauccgcggccgcaagcaggagaccgaggucugguggaccuccaacuccaucgucgucuucugcggcaccuccggcaccuacggcaccggcuccuggcccgacggcgccgacaucaaccucaugcccaucuga

SEQ ID NO: 111019 - RNA, 1410 nt, Artificial Sequence; identical to SEQ ID NO: 111016
  derived and/or modified CDS sequence (opt2) from neuraminidase__InfluenzaA__ABE15594

SEQ ID NO: 111020 - RNA, 1413 nt, Artificial Sequence
  derived and/or modified CDS sequence (opt2) from neuraminidase__InfluenzaA__ABE26994
augaaccccaaccagaagaucaucaccaucggcuccaucuccaucgccaucggcaucaucucccucauccuccagaucggcaacaucaucuccaucugggccucccacuccauccagaccggcucccagaaccacaccggcaucugcaaccagcgcaucaucaccuacgagaacuccaccugggucaaccagaccuacgucaacaucaacaacaccaacgucgucgccggcaaggacaagaccuccaugacccucgccggcaacuccucccucugccccauccgcggcugggccaucuacaccaaggacaacuccauccgcaucggcuccaagggcgacgucuucgucauccgcgagcccuucaucuccugcucccaccucgagugccgcaccuucuuccucacccagggcgcccuccucaacgacaagcacuccaacggcaccgucaaggaccgcucccccuaccgcgcccucauguccugcccccucggcgaggcccccucccccuacaacucccgcuucgaguccgucgccugguccgccuccgccugccacgacggccucggcuggcucaccaucggcaucuccggccccgacaacggcgccgucgccguccucaaguacaacggcaucaucaccgagaccaucaaguccuggaagaagcgcauccuccgcacccaggaguccgagugcgucugcaugaacggcuccugcuucaccaucaugaccgacggccccuccaacggcgccgccuccuaccgcaucuucaagaucgagaagggccgcgucaccaaguccaucgagcucgacgcccccaacuaccacuacgaggagugcuccugcuaccccgacaccggcaccgucaugugcgucugccgcgacaacuggcacuccuccaaccgccccugggucuccuucaaccagaaccucgacuaccagaucggcuacaucugcuccggcgucuucggcgacaacccccgccccaaggacggcgagggcuccugcaaccccgucaccgucgacggcgccgacggcgucaagggcuucuccuaccgcuacggcaacggcgucuggaucggccgcaccaaguccaaccgccuccgcaagggcuucgagaugaucugggaccccaacggcuggaccgacaccgacuccgacuucuccaugaagcaggacaucgucgccaugaccgacugguccggcuacuccggcuccuucguccagcaccccgagcucaccggccucgacugcaugcgccccugcuucugggucgagcucguccgcggccucccccgcgagaacaccaccaucuggaccuccggcuccuccaucuccuucugcggcgucaacuccgacaccgccaacugguccuggcccgacggcgccgagcuccccuucaccaucgacaaguga

SEQ ID NO: 111021 - RNA, 1350 nt, Artificial Sequence
  derived and/or modified CDS sequence (opt2) from neuraminidase__InfluenzaA__ABE97641
augaaccccaaccagaagaucaucaccaucggcuccaucugcauggucaucggcaucaucucccucaugcuccagaucggcaacaugaucuccaucugggucucccacuccauccagaccuggaaccagcaccaggccgaguccaucuccaacaccaacccccucaccgagaaggccgucgccuccgucacccucgccggcaacuccucccucugccccauccgcggcugggccguccacuccaaggacaacuccauccgcaucggcuccaagggcgacgucuucgucauccgcgagcccuucaucuccugcucccaccucgagugccgcaccuucuuccucacccagggcgcccuccucaacgacaagcacuccaacggcaccgucaaggaccgcuccccccaccgcacccucauguccugccccgucggcgaggcccccucccccuacaacucccgcuucgaguccgucgccugguccgccuccgccugccacgacggcaccuccuggcucaccaucggcaucuccggccccgacaacggcgccgucgccguccucaaguacaacggcaucaucaccgacaccaucaaguccuggcgcaacaacauccuccgcacccaggaguccgagugcgccugcgucaacggcuccugcuucaccgucaugaccgacggccccuccaacggccaggccuccuacaagaucuucaagauggagaagggcaaggucgucaaguccgucgagcucgacgcccccaacuaccacuacgaggagugcuccugcuaccccgacgccggcgagaucaccugcgucugccgcgacaacuggcacggcuccaaccgccccuggaucuccuucaaccagaaccucgaguaccagaucggcuacaucugcuccggcgucuucggcgacaacccccgccccaacgacggcaccggcuccugcggccccaugucccccaacggcgccuacggcgucaagggcuucuccuucaaguacggcaacggcgucuggaucggccgcaccaaguccaccaacucccgcuccggcuucgagaugaucugggaccccaacggcuggaucggcaccgacuccuccuucuccgucaagcaggacaucgucgccaucaccgacugguccggcuacuccggcuccuucguccagcaccccgagcucaccggccucgacugcauccgccccugcuucugggucgagcucauccgcggccgccccaaggaguccaccaucuggaccuccggcuccuccaucuccuucugcggcgucaacuccgacaucgucuccugguccuggcccgacggcgccgagcuccccuucaccaucgacaaguga

SEQ ID NO: 111022 - RNA, 1350 nt, Artificial Sequence
  derived and/or modified CDS sequence (opt2) from neuraminidase__InfluenzaA__ABE97642
augaaccccaaccagaagaucaucaccaucggcuccaucugcauggucaucggcauggucucccucaugcuccagaucggcaacaugaucuccaucuggcucucccacuccauccagaccggcaaccagcaccaggccgaguccaucuccaacaacaaccuccucaccgagaacgccgucgccuccgucacccucgccggcaacuccucccucugccccauccgcggcugggccguccacuccaaggacaacuccauccgcaucggcuccaagggcgacgucuucgucauccgcgagcccuucaucuccugcucccaccucgagugccgcaccuucuuccucacccagggcgcccuccucaacgacaagcacuccaacggcaccgucaaggaccgcuccccccaccgcacccucauguccugccccgucggcgaggcccccucccccuacaacucccgcuucgaguccgucgccugguccgccuccgccugccacgacggcaucuccuggcucaccaucggcaucuccggccccgacaacggcgccgucgccguccucaaguacaacggcaucaucaccgacaccaucaaguccuggcgcaacaacauccuccgcacccaggaguccgagugcgccugcgucaacggcuccugcuucaccgucaugaccgacggccccuccaacggccaggccuccuacaagaucuucaagauggagaagggcaaggucgucaaguccgucgagcucgacgcccccaacuaccacuacgaggagugcuccugcuaccccgacgccggcgagaucaccugcgucugccgcgacaacuggcacggcuccaaccgccccugggucuccuucaaccagaaccucgaguaccagaucggcuacaucugcuccggcgucuucggcgacaacccccgccccaacgacggcaccggcuccugcggccccaugucccccaacggcgccuacggcgucaagggcuucuccuucaaguacggcaacggcgucuggaucggccgcaccaaguccaccaacucccgcuccggcuucgagaugaucugggaccccaacggcuggaccggcaccgacuccuccuucuccgucaagcaggacaucgucgccaucaccgacugguccggcuacuccggcuccuucguccagcaccccgagcucaccggccucgacugcauccgccccugcuucugggucgagcucauccgcggccgccccaaggaguccaccaucuggaccuccggcuccuccaucuccuucugcggcgucaacggcgacaccgucuccugguccuggcccgacggcgccgagcuccccuucaucaucgacaaguga

SEQ ID NO: 111023 - RNA, 1350 nt, Artificial Sequence
  derived and/or modified CDS sequence (opt2) from neuraminidase__InfluenzaA__ABE97644
augaaccccaaccagaagaucaucaccaucggcuccaucugcauggucaucggcaucgucucccucaugcuccagaucggcaacaugaucuccaucugggucucccacuccauccagaccggcaaccagcaccaggccgaguccaucuccaacaccaacccccucaccgagaaggccgucgccuccgucacccucgccggcaacuccucccucugccccauccgcggcugggccguccacuccaaggacaacaacauccgcaucggcuccaagggcgacgucuucgucauccgcgagcccuucaucuccugcucccaccucgagugccgcaccuucuuccucacccagggcgcccuccucaacgacaagcacuccaacggcaccgucaaggaccgcuccccccaccgcacccucauguccugccccgucggcgaggcccccucccccuacaacucccgcuucgaguccgucgccugguccgccuccgccugccacgacggcaccuccuggcucaccaucggcaucuccggccccgacaacggcgccgucgccguccucaaguacaacggcaucaucaccgacaccaucaaguccuggcgcaacaacauccuccgcacccaggaguccgagugcgccugcgucaacggcuccugcuucaccgucaugaccgacggccccuccaacggccaggccuccuacaagaucuucaagauggagaagggcaaggucgucaaguccgucgagcucgacgcccccaacuaccacuacgaggagugcuccugcuaccccgacgccggcgagaucaccugcgucugccgcgacaacuggcacggcuccaaccgccccugggucuccuucaaccagaaccucgaguaccagaucggcuacaucugcuccggcgucuucggcgacaacccccgccccaacgacggcaccggcuccugcggccccaugucccccaacggcgccuacggcgucaagggcuucuccuucaaguacggcaacggcgucuggaucggccgcaccaaguccaccaacucccgcuccggcuucgagaugaucugggaccccaacggcuggaccggcaccgacuccuccuucuccgucaagcaggacaucgucgcccucaccgacugguccggcuacuccggcuccuucguccagcaccccgagcucaccggccucgacugcauccgccccugcuucugggucgagcucauccgcggccgccccaaggaguccaccaucuggaccuccggcuccuccaucuccuucugcggcgucaacuccgacaccgucuccugguccuggcccgacggcgccgagcuccccuucaccaucgacaaguga

SEQ ID NO: 111024 - RNA, 1350 nt, Artificial Sequence
  derived and/or modified CDS sequence (opt2) from neuraminidase__InfluenzaA__ABE97645
augaaccccaaccagaagaucaucaccaucggcuccaucugcauggucaucggcaccgucucccucaugcuccagaucggcaacaugaucuccaucugggucucccacuccauccagaccggcaaccagcaccaggccgagcccaccuccuccaccaacccccucaccgagaaggccgucgccuccgucacccucgccggcaacuccucccucugccccauccgcggcugggccauccacuccaaggacaacuccauccgcaucggcuccaagggcgacgucuucgucauccgcgagcccuucaucuccugcucccaccucgagugccgcaccuucuuccucacccagggcgcccuccucaacgacaagcacuccaacggcaccgucaaggaccgcuccccccaccgcacccucauguccugccccgucggcgaggcccccucccccuacaacucccgcuucgaguccgucgccugguccgccuccgccugccacgacggcaccuccuggcucaccaucggcaucuccggccccgacaacggcgccgucgccguccucaaguacaacggcaucaucaccgacaccaucaaguccuggcgcaacaacauccuccgcacccaggaguccgagugcgccugcgucaacggcuccugcuucaccgucaugaccgacggccccuccaacggccaggccuccuacaagaucuucaagauggagaagggcaaggucgucaaguccgucgagcucgacgcccccaacuaccacuacgaggagugcuccugcuaccccgacgccggcgagaucaccugcgucugccgcgacaacuggcacggcuccaaccgccccugggucuccuucaaccagaaccucgaguaccagaucggcuacaucugcuccggcgucuucggcgacaacccccgccccaacgacggcaccggcuccugcggccccaugucccccaacggcgccuacggcgucaagggcuucgccuucaaguacggcaacggcgucuggaucggccgcaccaaguccaccaacucccgcuccggcuucgagaugaucugggaccccaacggcuggaccggccccgacuccuccuucuccgucaagcaggacaucgucgccaucaccgacugguccggcuacuccggcuccuucguccagcaccccgagcucaccggccucgacugcauccgccccugcuucugggucgagcucauccgcggccgccccaaggaguccaccaucuggaccuccggcuccuccaucuccuucugcggcgucaacuccgacaccgucuccugguccuggcccgacggcgccgagcuccccuucaccaucgacaaguga

SEQ ID NO: 111025 - RNA, 1350 nt, Artificial Sequence
  derived and/or modified CDS sequence (opt2) from neuraminidase__InfluenzaA__ABE97646
augaaccccaaccagaagaucaucaccaucggcuccaucugcauggucaucggcaucgucucccucaugcuccagaucggcaacaugaucuccaucugggucucccacuccauccagaccgagaaccagcaccaggccgaguccaucuccaacaccaacccccccaccgagaaggccgucgccuccgucacccucgccggcaacuccucccucugccccauccgcggcugggccguccacuccaaggacaacuccauccgcaucggcuccaagggcgacgucuucgucauccgcgagcccuucaucuccugcucccaccucgagugccgcaccuucuuccucacccagggcgcccuccucaacgacaagcacuccaacggcaccgucaaggaccgcuccccccaccgcacccucauguccugccccgucggcgaggcccccucccccuacaacucccgcuucgaguccgucgccugguccgccuccgccugccacgacggcaccuccuggcucaccaucggcaucuccggccccgacaacggcgccgucgccguccucaaguacaacggcaucaucaccgacaccaucaaguccuggcgcaacaacacccuccgcacccaggaguccgagugcgccugcgucaacggcuccugcuucaccgucaugaccgacggccccuccaacggccaggccuccuacaagaucuucaagauggagaagggcaaggucgucaaguccgucgagcucgacgcccccaacuaccacuacgaggagugcuccugcuaccccgacgccggcgagaucaccugcgucugccgcgacaacuggcacggcuccaaccgccccugggucuccuucaaccagaaccucgaguaccagaucggcuacaucugcuccggcgucuucggcgacaacccccgccccaacgacggcaccggcuccugcggccccaugucccccaacggcgccuacggcgucaagggcuucuccuucaaguacggcaacggcgucuggaucggccgcaccaaguccaccaacucccgcuccggcuucgagaugaucugggaccccaacggcuggaccggcaccgacuccuccuucuccgucaagcaggacaucgucuccaucaccgacugguccggcuacuccggcuccuucguccagcaccccgagcucaccggccucgacugcauccgccccugcuucugggucgagcucauccgcggccgccccaaggaguccaccaucuggaccuccggcuccuccaucuccuucugcggcgucaacuccgacaccgucuccugguccuggcccgacggcgccgagcuccccuucaccaucgacaaguga

SEQ ID NO: 111026 - RNA, 1350 nt, Artificial Sequence
  derived and/or modified CDS sequence (opt2) from neuraminidase__InfluenzaA__ABE97647
augaaccccaaccagaagaucaucaccaucggcuccaucugcauggucaucggcaucgucucccucaugcuccagaucggcaacaugaucuccaucugggucucccacuccauccagaccggcaaccagcaccgcgccgaguccaucuccaacaccaacccccucaccgagaaggccgucgccuccgucacccucgccggcaacuccucccucugccccauccgcggcugggccguccacuccaaggacaacaacauccgcaucggcuccaagggcgacgucuucgucauccgcgagcccuucaucuccugcucccaccucgagugccgcaccuucuuccucacccagggcgcccuccucaacgacaagcacuccaacggcaccgucaaggaccgcuccccccaccgcacccucauguccugccccgucggcgaggcccccucccccuacaacucccgcuucgaguccgucgccugguccgccuccgccugccacgacggcaccuccuggcucaccaucggcaucuccggccccgacaacggcgccgucgccguccucaaguacaacggcaucaucaccgacaccaucaaguccuggcgcaacaacauccuccgcacccaggaguccgagugcgccugcgucaacggcuccugcuucaccgucaugaccgacggccccuccaacggccaggccuccuacaagaucuucaagauggagaagggcaaggucgucaaguccgucgagcucgacgcccccaacuaccacuacgaggagugcuccugcuaccccgacgccggcgagaucaccugcgucugccgcgacaacuggcacggcuccaaccgccccugggucuccuucaaccagaaccucgaguaccagaucggcuacaucugcuccggcgucuucggcgacaacccccgccccaacgacggcaccggcuccugcggccccaugucccccaacggcgccuacggcgucaagggcuucuccuucaaguacggcaacggcgucuggaucggccgcaccaaguccaccaacucccgcuccggcuucgagaugaucugggaccccaacggcuggaccggcaccgacuccuccuucuccgucaagcaggacaucgucgccaucaccgacugguccggcuacuccggcuccuucguccagcaccccgagcucaccggccucgacugcauccgccccugcuucugggucgagcucauccgcggccgccccaaggaguccaccaucuggaccuccggcuccuccaucuccuucugcggcgucaacuccgacaccgucuccugguccuggcccgacggcgccgagcuccccuucaccaucgacaaguga

SEQ ID NO: 111027 - RNA, 1350 nt, Artificial Sequence
  derived and/or modified CDS sequence (opt2) from neuraminidase__InfluenzaA__ABE97649
augaaccccaaccagaagaucaucaccaucggcuccaucugcauggucaucggcaucgucucccucaugcuccagaucggcaacaugaucuccaucugggucucccacuccauccagaccggcaaccagcaccaggccgaguccaucuccaacaccaacccccucaccgagaaggccgucgccuccgucacccucgccggcaacuccucccucugccccauccgcggcugggccguccacuccaaggacaacuccauccgcaucggcuccaagggcgacgucuucgucauccgcgagcccuucaucuccugcucccaccucgagugccgcaccuucuuccucacccagggcgcccuccucaacgacaagcacuccaacggcaccgucaaggaccgcuccccccaccgcacccucauguccugccccgucggcgaggcccccucccccuacaacucccgcuucgaguccgucgccugguccgccuccgccugccacgacggcaccuccuggcucaccaucggcaucuccggccccgacaacggcgccgucgccguccucaaguacaacggcaucaucaccgacaccaucaaguccuggcgcaacaacauccuccgcacccaggaguccgagugcgccugcgucaacggcuccugcuucaccgucaugaccgacggccccuccaacggccaggccuccuacaagaucuucaagauggagaagggcaaggucgucaaguccgucgagcucgacgcccccaacuaccacuacgaggagugcuccugcuaccccgacgccggcgagaucaccugcgucugccgcgacaacuggcacggcuccaaccgccccugggucuccuucaaccagaaccucgaguaccagaucggcuacaucugcuccggcgucuucggcgacaacccccgccccaacgacggcaccggcuccugcggccccaugucccccaacggcgccuacggcgucaagggcuucuccuucaaguacggcaacggcgucuggaucggccgcaccaaguccaccaacucccgcuccggcuucgagaugaucugggaccccaacggcuggaccggcaccgacuccuccuucuccgucaagcaggacaucgucgccaucaccgacugguccggcuacuccggcuccuucguccagcaccccgagcucaccggccucgacugcauccgccccugcuucugggucgagcucauccgcggccgccccaaggaguccaccaucuggaccuccggcuccuccaucuccuucugcggcgucaacuccgacaccgucuccugguccuggcccgacggcgccgagcuccccuucaccaucgacaaguga

SEQ ID NO: 111028 - RNA, 1350 nt, Artificial Sequence; identical to SEQ ID NO: 111027
  derived and/or modified CDS sequence (opt2) from neuraminidase__InfluenzaA__ABE97651

SEQ ID NO: 111029 - RNA, 1350 nt, Artificial Sequence; identical to SEQ ID NO: 111027
  derived and/or modified CDS sequence (opt2) from neuraminidase__InfluenzaA__ABE97653

SEQ ID NO: 111030 - RNA, 1350 nt, Artificial Sequence; identical to SEQ ID NO: 111027
  derived and/or modified CDS sequence (opt2) from neuraminidase__InfluenzaA__ABE97654

SEQ ID NO: 111031 - RNA, 1350 nt, Artificial Sequence
  derived and/or modified CDS sequence (opt2) from neuraminidase__InfluenzaA__ABE97655
augaaccccaaccagaagaucaucaccaucggcuccaucugcauggccaucggcaucgucucccucaugcuccagaucggcaacaugaucuccaucugggucucccacuccauccagaccggcaaccagcaccaggccgaguccaccuccaacaccaacccccucaccgagaaggccgucgccuccgucacccucgccggcaacuccucccucugccccauccgcggcugggccauccacuccaaggacaacuccauccgcaucggcuccaagggcgacgucuucgucauccgcgagcccuucaucuccugcucccaccucgagugccgcaccuucuuccucacccagggcgcccuccucaacgacaagcacuccaacggcaccgucaaggaccgcuccccccaccgcacccucauguccugccccgucggcgaggcccccucccccuacaacucccgcuucgaguccgucgccugguccgccuccgccugccacgacggcaccuccuggcucaccaucggcaucuccggccccgacaacggcgccgucgccguccucaaguacaacggcaucaucaccgacaccaucaaguccuggcgcaacaacauccuccgcacccaggaguccgagugcgccugcgucaacggcuccugcuucaccgucaugaccgacggccccuccaacggccaggccuccuacaagaucuucaagauggagaagggcaaggucgucaaguccgucgagcucgacgcccccaacuaccacuacgaggagugcuccugcuaccccgacgccggcgagaucaccugcgucugccgcgacaacuggcacggcuccaaccgccccugggucuccuucaaccagaaccucgaguaccagaucggcuacaucugcuccggcgucuucggcgacaacccccgccccaacgacggcaccggcuccugcggccccaugucccccaacggcgccuacggcgucaagggcuucgccuucaaguacggcaacggcgucuggaucggccgcaccaaguccaccaacucccgcuccggcuucgagaugaucugggaccccaacggcuggaccggccccgacuccuccuucuccgucaagcaggacaucgucgccaucaccgacugguccggcuacuccggcuccuucguccagcaccccgagcucaccggccucgacugcauccgccccugcuucugggucgagcucauccgcggccgccccaaggaguccaccaucuggaccuccggcuccuccaucuccuucugcggcgucaacuccgacaccgucuccugguccuggcccgacggcgccgagcuccccuucaccaucgacaaguga

SEQ ID NO: 111032 - RNA, 1350 nt, Artificial Sequence
  derived and/or modified CDS sequence (opt2) from neuraminidase__InfluenzaA__ABE97657
augaaccccaaccagaagaucaucaccaucggcuccaucugcauggucaucggcaccgucucccucguccuccagaucggcaacaugaucuccaucugggucucccacuccauccagaccggcaaccagcaccaggccgaguccaucuccaacaccaacccccucaccgagaaggccgucgccuccgucacccucgccggcaacuccucccucugccccauccgcggcugggccguccacuccaaggacaacuccauccgcaucggcuccaagggcgacgucuucgucauccgcgagcccuucaucuccugcucccaccucgagugccgcaccuucuuccucacccagggcgcccuccucaacgacaagcacuccaacggcaccgucaaggaccgcuccccccaccgcacccucauguccugccccgucggcgaggcccccucccccuacaacucccgcuucgaguccgucgccugguccgccuccgccugccacgacggcaccuccuggcucaccaucggcaucuccggccccgacaacggcgccgucgccguccucaaguacaacggcaucaucaccgacaccaucaaguccuggcgcgacaacauccuccgcacccaggaguccgagugcgccugcgucaacggcuccugcuucaccgucaugaccgacggccccuccaacggccaggccuccuacaagaucuucaagauggagaagggcaaggucgucaaguccgucgagcucgacgcccccaacuaccacuacgaggagugcuccugcuaccccgacgccggcgagaucaccugcgucugccgcgacaacuggcacggcuccaaccgccccugggucuccuucaaccagaaccucgaguaccagaucggcuacaucugcuccggcgucuucggcgacaacccccgccccaacgacggcaccggcuccugcggccccauguccuccaacggcgccuacggcgucaagggcuucuccuucaaguacggcaacggcgucuggaucggccgcaccaaguccaccaacucccgcuccggcuucgagaugaucugggaccccaacggcuggaccggcaccgacuccuccuucuccgucaagcaggacaucgucgccaucaccgacugguccggcuacuccggcuccuucguccagcaccccgagcucaccggccucgacugcauccgccccugcuucugggucgagcucauccgcggccgccccaaggaguccaccaucuggaccuccggcuccuccaucuccuucugcggcgucaacuccgacaccgucuccugguccuggcccgacggcgccgagcuccccuucaccaucgacaaguga

SEQ ID NO: 111033 - RNA, 1350 nt, Artificial Sequence
  derived and/or modified CDS sequence (opt2) from neuraminidase__InfluenzaA__ABE97658
augaaccccaaccagaagaucaucaccaucggcuccaucugcauggucaucggcaccaucucccucaugcuccagaucggcaacaugaucuccaucugggucucccacuccauccagaccggcaaccagcaccagaccgaguccaucuccaacaccaacccccucaccgagaaggccgucgccuccgucacccucgccggcaacuccucccucugcuccauccgcggcugggccguccacuccaaggacaacuccauccgcaucggcuccaagggcgacgucuucgucauccgcgagcccuucaucuccugcucccaccucgagugccgcaccuucuuccucacccagggcgcccuccucaacgacaagcacuccaacggcaccgucaaggaccgcuccccccaccgcacccucauguccugccccgucggcgaggcccccucccccuacaacucccgcuucgaguccgucgccugguccgccuccgccugccacgacggcaccuccuggcucaccaucggcaucuccggccccgacaacggcgccgucgccguccucaaguacaacggcaucaucaccgacaccaucaaguccuggcgcgacaacauccuccgcacccaggaguccgagugcgccugcgucaacggcuccugcuucaccgucaugaccgacggccccuccaacggccaggccuccuacaagaucuucaagauggagaagggcaaggucgucaaguccgucgagcucgacgcccccaacuaccacuacgaggagugcuccugcuaccccgacgccggcgagaucaccugcgucugccgcgacaacuggcacggcuccaaccgccccugggucuccuucaaccagaaccucgaguaccagaucggcuacaucugcuccggcgucuucggcgacaacccccgccccaacgacggcaccggcuccugcggccccauguccuccaacggcgcccacggcgucaagggcuucuccuucaaguacggcaacggcgucuggaucggccgcaccaaguccaccaacucccgcuccggcuucgagaugaucugggaccccaacggcuggaccggcaccgacuccuccuucuccgucaagcaggacaucgucgccaucaccgacugguccggcuacuccggcuccuucguccagcaccccgagcucaccggccucgacugcauccgccccugcuucugggucgagcucauccgcggccgccccaaggaguccaccaucuggaccuccggcuccuccaucuccuucugcggcgucaacuccgacaccgucuccugguccuggcccgacggcgccgagcuccccuucaccaucgacaaguga

SEQ ID NO: 111034 - RNA, 1350 nt, Artificial Sequence
  derived and/or modified CDS sequence (opt2) from neuraminidase__InfluenzaA__ABE97659
augaaccccaaccagaagaucaucaccaucggcuccaucugcauggucaucggcaucgucucccucaugcuccagaucggcaacaugaucuccaucugggucucccacuccauccagaccggcaaccagcaccaggccgaguccaucuccaacaccaacccccucaccgagaaggccgucgccuccgucacccucgccggcaacuccucccucugccccauccgcggcugggccguccacuccaaggacaacuccauccgcaucggcuccaagggcgacgucuucgucauccgcgagcccuucaucuccugcucccaccucgagugccgcaccuucuuccucacccagggcgcccuccucaacgacaagcacuccaacgagaccgucaaggaccgcuccccccaccgcacccucauguccugccccgucggcgaggcccccucccccuacaacucccgcuucgaguccgucgccugguccgccuccgccugccacgacggcaccuccuggcucaccaucggcaucuccggccccgacaacggcgccgucgccguccucaaguacaacggcaucaucaccgacaccaucaaguccuggcgcgacaacauccuccgcacccaggaguccgagugcgccugcgucaacggcuccugcuucaccgucaugaccgacggccccuccaacggccaggccuccuacaagaucuucaagauggagaagggcaaggucgucaaguccgucgagcucgacgcccccaacuaccacuacgaggagugcuccugcuaccccgacgccggcgagaucaccugcgucugccgcgacaacuggcacggcuccaaccgccccugggucuccuucaaccagaaccucgaguaccagaucggcuacaucugcuccggcgucuucggcgacaacccccgccccaacgacggcaccggcuccugcggccccauguccuccaacggcgccuacggcgucaagggcuucuccuucaaguacggcaacggcgucuggaucggccgcaccaaguccaccaacucccgcuccggcuucgagaugaucugggaccccaacggcuggaccggcaccgacuccuccuucuccgucaagcaggacaucgucgccaucaccgacugguccggcuacuccggcuccuucguccagcaccccgagcucaccggccucgacugcauccgccccugcuucugggucgagcucauccgcggccgccccaaggaguccaccaucuggaccuccggcuccuccaucuccuucugcggcgucaacuccgacaccgucuccugguccuggcccgacggcgccgagcuccccuucaccaucgacaaguga

SEQ ID NO: 111035 - RNA, 1350 nt, Artificial Sequence
  derived and/or modified CDS sequence (opt2) from neuraminidase__InfluenzaA__ABE97660
augaaccccaaccagaagaucaucaccaucggcuccaucugcauggucaucggcaccaucucccucaugcuccagaucggcaacaugaucuccaucugggucucccacuccauccagaccggcaaccagcaccaggccgaguccaucuccaacaccaacccccucaccgagaaggccgucgccuccgucacccucgccggcaacuccucccucugccccauccgcggcugggccguccacuccaaggacaacuccauccgcaucggcuccaagggcgacgucuucgucauccgcgagcccuucaucuccugcucccaccucgagugccgcaccuucuuccucacccagggcgcccuccucaacgacaagcacuccaacggcaccgucaaggaccgcuccccccaccgcacccucauguccugccccgucggcgaggcccccucccccuacaacucccgcuucgaguccgucgccugguccgccuccgccugccacgacggcaccuccuggcucaccaucggcaucuccggccccgacaacggcgccgucgccguccucaaguacaacggcaucaucaccgacaccaucaaguccuggcgcgacaacauccuccgcacccaggaguccgagugcgccugcgucaacggcuccugcuucaccgucaugaccgacggccccuccaacggccaggccuccuacaagaucuucaagauggagaagggcaaggucgucaaguccgucgagcucgacgcccccaacuaccacuacgaggagugcuccugcuaccccgacgccggcgagaucaccugcgucugccgcgacaacuggcacggcuccaaccgccccugggucuccuucaaccagaaccucgaguaccagaucggcuacaucugcuccggcgucuucggcgacaacccccgccccaacgacggcaccggcuccugcggccccauguccuccaacggcgcccacggcgucaagggcuucuccuucaaguacggcaacggcgucuggaucggccgcaccaaguccaccaacucccgcuccggcuucgagaugaucugggaccccaacggcuggaccggcaccgacuccuccuucuccgucaagcaggacaucgucgccaucaccgacugguccggcuacuccggcuccuucguccagcaccccgagcucaccggccucgacugcauccgccccugcuucugggucgagcucauccgcggccgccccaaggaguccaccaucuggaccuccggcuccuccaucuccuucugcggcgucaacuccgacaccgucuccugguccuggcccgacggcgccgagcuccccuucaccaucgacaaguga

SEQ ID NO: 111036 - RNA, 1350 nt, Artificial Sequence
  derived and/or modified CDS sequence (opt2) from neuraminidase__InfluenzaA__ABE97661
augaaccccaaccagaagaucaucaccaucggcuccaucugcauggucaucggcaccaucucccucaugcuccagaucggcaacaugaucuccaucugggucucccacuccauccagaccggcaaccagcaccagaccgaguccaucuccaacaccaacccccucaccgagaaggccgucgccuccgucacccucgccggcaacuccucccucugccccauccgcggcugggccguccacuccaaggacaacuccauccgcaucggcuccaagggcgacgucuucgucauccgcgagcccuucaucuccugcucccaccucgagugccgcaccuucuuccucacccagggcgcccuccucaacgacaagcacuccaacggcaccgucaaggaccgcuccccccaccgcacccucauguccugccccgucggcgaggcccccucccccuacaacucccgcuucgaguccgucgccugguccgccuccgccugccacgacggcaccuccuggcucaccaucggcaucuccggccccgacaacggcgccgucgccguccucaaguacaacggcaucaucaccgacaccaucaaguccuggcgcgacaacauccuccgcacccaggaguccgagugcgccugcgucaacggcuccugcuucaccgucaugaccgacggccccuccaacggccaggccuccuacaagaucuucaagauggagaagggcaaggucgucaaguccgucgagcucgacgcccccaacuaccacuacgaggagugcuccugcuaccccgacgccggcgagaucaccugcgucugccgcgacaacuggcacggcuccaaccgccccugggucuccuucaaccagaaccucgaguaccagaucggcuacaucugcuccggcgucuucggcgacaacccccgccccaacgacggcaccggcuccugcggccccauguccuccaacggcgcccacggcgucaagggcuucuccuucaaguacggcaacggcgucuggaucggccgcaccaaguccaccaacucccgcuccggcuucgagaugaucugggaccccaacggcuggaccggcaccgacuccuccuucuccgucaagcaggacaucgucgccaccaccgacugguccggcuacuccggcuccuucguccagcaccccgagcucaccggccucgacugcauccgccccugcuucugggucgagcucauccgcggccgccccaaggaguccaccgucuggaccuccggcuccuccaucuccuucugcggcgucaacuccgacaccgucuccugguccuggcccgacggcgccgagcuccccuucaccaucgacaaguga

SEQ ID NO: 111037 - RNA, 1350 nt, Artificial Sequence
  derived and/or modified CDS sequence (opt2) from neuraminidase__InfluenzaA__ABE97662
augaaccccaaccagaagaucaucaccaucggcuccaucugcauggucaucggcaucgucucccucaugcuccagaucggcaacaugaucuccaucugggucucccacuccauccagaccggcaaccagcaccaggccgaguccaucuccaacaccaacccccucaccgagaaggccgucgccuccgucacccucgccggcaacuccucccucugccccauccgcggcugggccguccacuccaaggacaacuccauccgcaucggcuccaagggcgacgucuucgucauccgcgagcccuucaucuccugcucccaccucgagugccgcaccuucuuccucacccagggcgcccuccucaacgacaagcacuccaacggcaccgucaaggaccgcuccccccaccgcacccucauguccugccccgucggcgaggcccccucccccuacaacucccgcuucgaguccgucgccugguccgccuccgccugccacgacggcaccuccuggcucaccaucggcaucuccggccccgacaacggcgccgucgccguccucaaguacaacggcaucaucaccgacaccaucaaguccuggcgcaacaacauccuccgcacccaggaguccgagugcgccugcgucaacggcuccugcuucaccgucaugaccgacggccccuccaacggccaggccuccuacaagaucuucaagaugcgcaagggcaaggucgucaaguccgucgagcucgacgcccccaacuaccacuacgaggagugcuccugcuaccccgacgccggcgagaucaccugcgucugccgcgacaacuggcacggcuccaaccgccccugggucuccuucaaccagaaccucgaguaccagaucggcuacaucugcuccggcgucuucggcgacaacccccgccccaacgacggcaccggcuccugcggccccaugucccccaacggcgccuacggcgucaagggcuucuccuucaaguacggcaacggcgucuggaucggccgcaccaaguccaccaacucccgcuccggcuucgagaugaucugggaccccaacggcuggaccggcaccgacuccuccuucuccgucaagcaggacaucgucgccaucaccgacugguccggcuacuccggcuccuucguccagcaccccgagcucaccggccucgacugcauccgccccugcuucugggucgagcucauccgcggccgccccaaggaguccaccaucuggaccuccggcuccuccaucuccuucugcggcgucaacuccgacaccgucuccugguccuggcccgacggcgccgagcuccccuucaccaucgacaaguga

SEQ ID NO: 111038 - RNA, 1350 nt, Artificial Sequence
  derived and/or modified CDS sequence (opt2) from neuraminidase__InfluenzaA__ABE97663
augaaccccaaccagaagaucaucaccaucggcuccaucugcauggucaccggcaucgucucccucaugcuccagaucggcaacaugaucuccaucugggucucccacuccauccacaccggcaaccagcaccaggccgagcccaucuccaacaccaacuuccucaccgagaaggccgucgccuccgucaagcucgccggcaacuccucccucugccccaucaacggcugggccgucuacuccaaggacaacuccauccgcaucggcuccaagggcgacgucuucgucauccgcgagcccuucaucuccugcucccaccucgagugccgcaccuucuuccucacccagggcgcccuccucaacgacaagcacuccaacggcaccgucaaggaccgcuccccccaccgcacccucauguccugccccgucggcgaggcccccucccccuacaacucccgcuucgaguccgucgccugguccgccuccgccugccacgacggcaccuccuggcucaccaucggcaucuccggccccgacaacggcgccgucgccguccucaaguacaacggcaucaucaccgacaccaucaaguccuggcgcaacaacauccuccgcacccaggaguccgagugcgccugcgucaacggcuccugcuucaccgucaugaccgacggccccuccaacggccaggccucccacaagaucuucaagauggagaagggcaaggucgucaaguccgucgagcucgacgcccccaacuaccacuacgaggagugcuccugcuaccccgacgccggcgagaucaccugcgucugccgcgacaacuggcacggcuccaaccgccccugggucuccuucaaccagaaccucgaguaccagaucggcuacaucugcuccggcgucuucggcgacaacccccgccccaacgacggcaccggcuccugcggccccgucuccuccaacggcgccuacggcgucaagggcuucuccuuccgcuacggcaacggcgucuggaucggccgcaccaaguccaccaacucccgcuccggcuucgagaugaucugggaccccaacggcuggaccgagaccgacuccuccuucuccgucaagcaggacaucgucgccaucaccgacugguccggcuacuccggcuccuucguccagcaccccgagcucaccggccucgacugcauccgccccugcuucugggucgagcucauccgcggccgccccaaggaguccaccaucuggaccuccggcuccuccaucuccuucugcggcgucaacuccgacaccgucggcugguccuggcccgacggcgccgagcuccccuucaccaucgacaaguga

SEQ ID NO: 111039 - RNA, 1350 nt, Artificial Sequence
  derived and/or modified CDS sequence (opt2) from neuraminidase__InfluenzaA__ABE97665
augaaccccaaccagaagaucaucaccaucggcuccaucugcauggucaccggcaucgucucccucaugcuccaggucggcaacaugaucuccaucugggucucccacuccauccacaccggcaaccagcaccaggccgagcccaucuccaacaccaacuuccucaccgagaaggccgucgccuccgucaagcucgccggcaacuccucccucugccccaucaacggcugggccgucuacuccaaggacaacuccauccgcaucggcuccaagggcgacgucuucgucauccgcgagcccuucaucuccugcucccaccucgagugccgcaccuucuuccucacccacggcgcccuccucaacgacaagcacuccaacggcaccgucaaggaccgcuccccccaccgcacccucauguccugccccgucggcgaggcccccucccccuacaacucccgcuucgaguccgucgccugguccgccuccgccugccacgacggcaccuccuggcucaccaucggcaucuccggccccgacaacggcgccgucgccguccucaaguacaacggcaucaucaccgacaccaucaaguccuggcgcaacaacauccuccgcacccaggaguccgagugcgccugcgucaacggcuccugcuucaccgucaugaccgacggccccuccaacggccaggccucccacaagaucuucaagauggagaagggcaaggucgucaaguccgucgagcucgacgcccccaacuaccacuacgaggagugcuccugcuaccccgacgccggcgagaucaccugcgucugccgcgacaacuggcacggcuccaaccgccccugggucuccuucaaccagaaccucgaguaccagaucggcuacaucugcuccggcgucuucggcgacaacccccgccccaacgacggcaccggcuccugcggccccgucuccuccaacggcgccuacggcgucaagggcuucuccuucaaguacggcaacggcgucuggaucggccgcaccaaguccaccaacucccgcuccggcuucgagaugaucugggaccccaacggcuggaccgagaccgacuccuccuucuccgucaagcaggacaucgucgccaucaccgacugguccggcuacuccggcuccuucguccagcaccccgagcucaccggccucgacugcauccgccccugcuucugggucgagcucauccgcggccgccccaaggaguccaccaucuggaccuccggcuccuccaucuccuucugcggcgucaacuccgacaccgucggcugguccuggcccgacggcgccgagcuccccuucaccaucgacaaguga

SEQ ID NO: 111040 - RNA, 1350 nt, Artificial Sequence
  derived and/or modified CDS sequence (opt2) from neuraminidase__InfluenzaA__ABE97666
augaaccccaaccagaagaucaucaccaucggcuccaucugcauggucaccggcaucgucucccucaugcuccagaucggcaacaugaucuccaucugggucucccacuccauccacaccggcaaccagcaccaguccgagcccaucuccaacaccaacuuccucaccgagaaggccgucgccuccgucaagcucgccggcaacuccccccucugccccaucaacggcugggccgucuacuccaaggacaacuccauccgcaucggcuccaagggcgacgucuucgucauccgcgagcccuucaucuccugcucccaccucgagugccgcaccuucuuccucacccagggcgcccuccucaacgacaagcacuccaacggcaccgucaaggaccgcuccccccaccgcacccucauguccugccccgucggcgaggcccccucccccuacaacucccgcuucgaguccgucgccugguccgccuccgccugccacgacggcaccuccuggcucaccaucggcaucuccggccccgacaacggcgccgucgccguccucaaguacaacggcaucaucaccgacaccaucaaguccuggcgcaacaacauccuccgcacccaggaguccgagugcgccugcgucaacggcuccugcuucaccgucaugaccgacggccccuccaacggccaggccucccacaagaucuucaagauggagaagggcaaggucgucaaguccgucgagcucgacgcccccaacuaccacuacgaggagugcuccugcuaccccgacgccggcgagaucaccugcgucugccgcgacaacuggcacggcuccaaccgccccugggucuccuucaaccagaaccucgaguaccagaucggcuacaucugcuccggcgucuucggcgacuccccccgccccaacgacggcaccggcuccugcggccccgucuccuccaacggcgccuacggcgucaagggcuucuccuucaaguacggcaacggcgucuggaucggccgcaccaaguccaccaacucccgcuccggcuucgagaugaucugggaccccaacggcuggaccgagaccgacuccuccuucuccgucaagcaggacaucgucgccaucaccgacugguccggcuacuccggcuccuucguccagcaccccgagcucaccggccucgacugcauccgccccugcuucugggucgagcucauccgcggccgccccaaggaguccaccaucuggaccuccggcuccuccaucuccuucugcggcgucaacuccgacaccgucggcugguccuggcccgacggcgccgagcuccccuucaccaucgacaaguga

SEQ ID NO: 111041 - RNA, 1350 nt, Artificial Sequence
  derived and/or modified CDS sequence (opt2) from neuraminidase__InfluenzaA__ABE97667
augaaccccaaccagaagaucaucaccaucggcuccaucugcauggucaccggcaucgucucccucaugcuccagaucggcaacaugaucuccaucuggggcucccacuccauccacaccggcaaccagcaccaguccgagcccaucuccaacaccaacuuccucaccgagaaggccgucgccuccgucaagcucgccggcaacuccucccucugccccaucaacggcugggccgucuacuccaaggacaacuccauccgcaucggcuccaagggcgacgucuucgucauccgcgagcccuucaucuccugcucccaccucgagugccgcaccuucuuccucacccagggcgcccuccucaacgacaagcacuccaacggcaccgucaaggaccgcuccccccaccgcacccucauguccugccccgucggcgaggcccccucccccuacaacucccgcuucgaguccgucgccugguccgccuccgccugccacgacggcaccuccuggcucaccaucggcaucuccggccccgacaacggcgccgucgccgucgucaaguacaacggcaucaucaccgacaccaucaaguccuggcgcaacaacauccuccgcacccaggaguccgagugcgccugcgucaacggcuccugcuucaccgucaugaccgacggccccuccaacggccaggccucccacaagaucuucaagauggagaagggcaaggucgucaaguccgucgagcucgacgcccccaacuaccacuacgaggagugcuccugcuaccccgacgccggcaagaucaccugcgucugccgcgacaacuggcacggcuccaaccgccccugggucuccuucaaccagaaccucgaguaccagaucggcuacaucugcuccggcgucuucggcgacaacccccgccccaacgacggcaccggcuccugcggccccgucuccuccaacggcgccuacggcgucaagggcuucuccuucaaguacggcaacggcgucuggaucggccgcaccaaguccaccaacucccgcuccggcuucgagaugaucugggaccccaacggcuggaccgagaccgacuccuccuucuccgucaagcaggacaucgucgccaucaccgacugguccggcuacuccggcuccuucguccagcaccccgagcucaccggccucgacugcauccgccccugcuucugggucgagcucauccgcggccgccccaaggaguccaccaucuggaccuccggcuccuccaucuccuucugcggcgucaacuccgacaucgucggcugguccuggcccgacggcgccgagcuccccuucaccaucgacaaguga

SEQ ID NO: 111042 - RNA, 1350 nt, Artificial Sequence
  derived and/or modified CDS sequence (opt2) from neuraminidase__InfluenzaA__ABE97669
augaaccccaaccagaagaucaucaccaucggcuccaucugcauggucaccggcaucgucucccucaugcuccagaucggcaacaugaucuccaucugggucucccacuccauccacaccggcaaccagcaccaguccgagcccaucuccaacaccaacuuccucaccgagaaggccgucgccuccgucaagcucgccggcaacuccucccucugccccaucaacggcugggccgucuacuccaaggacaacuccauccgcaucggcuccaagggcgacgucuucgucauccgcgagcccuucaucuccugcucccaccucgagugccgcaccuucuuccucacccagggcgcccuccucaacgacaagcacuccaacggcaccgucaaggaccgcuccccccaccgcacccucauguccugccccgucggcgaggcccccucccccuacaacucccgcuucgaguccgucgccugguccgccuccgccugccacgacggcaccuccuggcucaccaucggcaucuccggccccgacaacggcgccgucgccgucgucaaguacaacggcaucaucaccgacaccaucaaguccuggcgcaacaacauccuccgcacccaggaguccgagugcgccugcgucaacggcuccugcuucaccgucaugaccgacggccccuccaacggccaggccucccacaagaucuucaagauggagaagggcaaggucgucaaguccgucgagcucgacgcccccaacuaccacuacgaggagugcuccugcuaccccgacgccggcgagaucaccugcgucugccgcgacaacuggcacggcuccaaccgccccugggucuccuucaaccagaaccucgaguaccagaucggcuacaucugcuccggcgucuucggcgacaacccccgccccaacgacggcaccggcuccugcggccccgucuccuccaacggcgccuacggcgucaagggcuucuccuucaaguacggcaacggcgucuggaucggccgcaccaaguccaccaacucccgcuccggcuucgagaugaucugggaccccaacggcuggaccgagaccgacuccuccuucuccgucaagcaggacaucgucgccaucaccgacugguccggcuacuccggcuccuucguccagcaccccgagcucaccggccucgacugcauccgccccugcuucugggucgagcucauccgcggccgccccaaggaguccaccaucuggaccuccggcuccuccaucuccuucugcggcgucaacuccgacaccgucggcugguccuggcccgacggcgccgagcuccccuucaccaucgacaaguga

SEQ ID NO: 111043 - RNA, 1350 nt, Artificial Sequence
  derived and/or modified CDS sequence (opt2) from neuraminidase__InfluenzaA__ABE97670
augaaccccaaccagaagaucaucaccaucggcuccaucugcauggucaccggcaucgucucccucaugcuccagaucggcaacaugaucuccaucugggucucccacuccauccacaccggcaaccagcaccaguccgagcccaucuccaacaccaacuuccucaccgagaaggccgucgccuccgucaagcucgccggcaacuccucccucugccccaucaacggcugggccgucuacuccaaggacaacuccauccgcaucggcuccaagggcgacgucuucgucauccgcgagcccuucaucuccugcucccaccucgagugccgcaccuucuuccucacccagggcgcccuccucaacgacaagcacuccaacggcaccgucaaggaccgcuccccccaccgcacccucauguccugccccgucggcgaggcccccucccccuacaacucccgcuucgaguccgucgccugguccgccuccgccugccacgacggcaccuccuggcucaccaucggcaucuccggccccgacaacggcgccgucgccgucgucaaguacaacggcaucaucaccgacaccaucaaguccuggcgcaacaacauccuccgcacccaggaguccgagugcgccugcgucaacggcuccugcuucaccgucaugaccgacggccccuccaacggccaggccucccacaagaucuucaagauggagaagggcaaggucgucaaguccgucgagcucgacacccccaacuaccacuacgaggagugcuccugcuaccccgacgccggcgagaucaccugcgucugccgcgacaacuggcacggcuccaaccgccccugggucuccuucaaccagaaccucgaguaccagaucggcuacaucugcuccggcgucuucggcgacaacccccgccccaacgacggcaccggcuccugcggccccgucuccuccaacggcgccuacggcgucaagggcuucuccuucaaguacggcaacggcgucuggaucggccgcaccaaguccaccaacucccgcuccggcuucgagaugaucugggaccccaacggcuggaccgagaccgacuccuccuucuccgucaagcaggacaucgucgccaucaccgacugguccggcuacuccggcuccuucguccagcaccccgagcucaccggccucgacugcauccgccccugcuucugggucgagcucauccgcggccgccccaaggaguccaccaucuggaccuccggcuccuccaucuccuucugcggcgucaacuccgacaccgucggcugguccuggcccgacggcgccgagcuccccuucaccaucgacaaguga

SEQ ID NO: 111044 - RNA, 1350 nt, Artificial Sequence
  derived and/or modified CDS sequence (opt2) from neuraminidase__InfluenzaA__ABE97671
augaaccccaaccagaagaucaucaccaucggcuccaucugcauggucaccggcaucgucucccucaugcuccagaucggcaacaugaucuccaucugggucucccacuccauccacaccggcaaccagcaccaggccgagcccaucuccaacaccaacuuccucaccgagaaggccgucgccuccgucaagcucgccggcaacuccucccucugccccaucaacggcugggccgucuacuccaaggacaacuccauccgcaucggcuccaagggcgacgucuucgucauccgcgagcccuucaucuccugcucccaccucgagugccgcaccuucuuccucacccagggcgcccuccucaacgacaagcacuccaacggcaccgucaaggaccgcuccccccaccgcacccucauguccugccccgucggcgaggcccccucccccuacaacucccgcuucgaguccgucgccugguccgccuccgccugccacgacggcaccuccuggcucaccaucggcaucuccggccccgacaacggcgccgucgccguccucaaguacaacggcaucaucaccgacaccaucaaguccuggcgcaacaacauccuccgcacccaggaguccgagugcgccugcgucaacggcuccugcuucaccgucaugaccgacggccccuccaacggccaggccucccacaagaucuucaagauggagaagggcaaggucgucaaguccgucgagcucgacgcccccaacuaccacuacgaggagugcuccugcuaccccgacgccggcgagaucaccugcgucugccgcgacaacuggcacggcuccaaccgccccugggucuccuucaaccagaaccucgaguaccagaucggcuacaucugcuccggcgucuucggcgacaacccccgccccaacgacggcaccggcuccugcggccccgucuccuccaacggcgccuacggcgucaagggcuucuccuucaaguacggcaacggcgucuggaucggccgcaccaaguccaccaacucccgcuccggcuucgagaugaucugggaccccaacggcuggaccgagaccgacuccuccuucuccgucaagcaggacaucgucgccaucaccgacugguccggcuacuccggcuccuucguccagcaccccgagcucaccggccucgacugcauccgccccugcuucugggucgagcucauccgcggccgccccaaggaguccaccaucuggaccuccggcuccuccaucuccuucugcggcgucaacuccgacaccgucggcugguccuggcccgacggcgccgagcuccccuucaccaucgacaaguga

SEQ ID NO: 111045 - RNA, 1350 nt, Artificial Sequence
  derived and/or modified CDS sequence (opt2) from neuraminidase__InfluenzaA__ABE97672
augaaccccaaccagaagaucaucaccaucggcuccaucugcauggucaccggcaucgucucccucaugcuccagaucggcaacaugaucuccaucugggucucccacuccauccacaccggcaaccagcaccaggccgagcccaucuccaacaccaacuuccucaccgagaaggcccucgccuccgucaagcucgccggcaacuccucccucugccccaucaacggcugggccgucuacuccaaggacaacuccauccgcaucggcuccaagggcgacgucuucgucauccgcgagcccuucaucuccugcucccaccucgagugccgcaccuucuuccucacccagggcgcccuccucaacgacaagcacuccaacggcaccgucaaggaccgcuccccccaccgcacccucauguccugccccgucggcgaggcccccucccccuacaacucccgcuucgaguccgucgccugguccgccuccgccugccacgacggcaccuccuggcucaccaucggcaucuccggccccgacaacggcgccgucgccguccucaaguacaacggcaucaucaccgacaccaucaaguccuggcgcaacaacauccuccgcacccaggaguccgagugcgccugcgucaacggcuccugcuucaccgucaugaccgacggccccuccaacggccaggccucccacaagaucuucaagauggagaagggcaaggucgucaaguccgucgagcucgacgcccccaacuaccacuacgaggagugcuccugcuaccccgacgccggcgagaucaccugcgucugccgcgacaacuggcacggcuccaaccgccccugggucuccuucaaccagaaccucgaguaccagaucggcuacaucugcuccggcgucuucggcgacaacccccgccccaacgacggcaccggcuccugcggccccgucuccuccaacggcgccuacggcgucaagggcuucuccuucaaguacggcaacggcgucuggaucggccgcaccaaguccaccaacucccgcuccggcuucgagaugaucugggaccccaacggcuggaccgagaccgacuccuccuucuccgucaagcaggacaucgucgccaucaccgacugguccggcuacuccggcuccuucguccagcaccccgagcucaccggccucgacugcauccgccccugcuucugggucgagcucauccgcggccgccccaaggaguccaccaucuggaccuccggcuccuccaucuccuucugcggcgucaacuccgacaccgucggcugguccuggcccgacggcgccgagcuccccuucaccaucgacaaguga

SEQ ID NO: 111046 - RNA, 1350 nt, Artificial Sequence
  derived and/or modified CDS sequence (opt2) from neuraminidase__InfluenzaA__ABE97675
augaaccccaaccagaagaucaucaccaucggcuccaucugcauggucaccggcaucgucucccucaugcuccaggucggcaacaugaucuccaucugggucucccacuccauccacaccggcaaccagcaccaggccgagcccaucuccaacaccaacuuccucaucgagaaggccgucgccuccgucaagcucgccggcaacuccucccucugccccaucaacggcugggccgucuacuccaaggacaacuccauccgcaucggcuccaagggcgacgucuucgucauccgcgagcccuucaucuccugcucccaccucgagugccgcaccuucuuccucacccagggcgcccuccucaacgacaagcacuccaacggcaccgucaaggaccgcuccccccaccgcacccucauguccugccccgucggcgaggcccccucccccuacaacucccgcuucgaguccgucgccugguccgccuccgccugccacgacggcaccuccuggcucaccaucggcaucuccggccccgacaacggcgccgucgccguccucaaguacaacggcaucaucaccgacaccaucaaguccuggcgcaacaacauccuccgcacccaggaguccgagugcgccugcgucaacggcuccugcuucaccgucaugaccgacggccccuccaacggccaggccucccacaagaucuucaagaucgagaagggcaaggucgucaaguccgucgagcucgacgcccccaacuaccacuacgaggagugcuccugcuaccccgacgccggcgagaucaccugcgucugccgcgacaacuggcacggcuccaaccgccccugggucuccuucaaccagaaccucgaguaccagaucggcuacaucugcuccggcgucuucggcgacaacccccgccccaacgacggcaccggcuccugcggccccgucuccuccaacggcgccuacggcgucaagggcuucuccuucaaguacggcaacggcgucuggaucggccgcaccaaguccaccaacucccgcuccggcuucgagaugaucugggaccccaacggcugguccgagaccgacuccuccuucuccgucaagcaggacaucgucgccaucaccgacugguccggcuacuccggcuccuucguccagcaccccgagcucaccggccucgacugcauccgccccugcuucugggucgagcucauccgcggccgccccaaggaguccaccaucuggaccuccggcuccuccaucuccuucugcggcgucaacuccgacaccgucggcugguccuggcccgacggcgccgagcuccccuucaccaucgacaaguga

SEQ ID NO: 111047 - RNA, 1350 nt, Artificial Sequence
  derived and/or modified CDS sequence (opt2) from neuraminidase__InfluenzaA__ABE97676
augaaccccaaccagaagaucaucaccaucggcuccaucugcauggucaccggcaucgucucccucaugcuccagaucggcaacaugaucuccaucugggucucccacuccauccacaccggcaaccagcaccaggccgagcccaucuccaacaccaacuuccucaccgagaaggccgucgccuccgucaagcucgccggcaacuccucccucugccccaucaacggcugggccgucuacuccaaggacaacuccauccgcaucggcuccaagggcgacgucuucgucauccgcgagcccuucaucuccugcucccaccucgagugccgcaccuucuuccucacccagggcgcccuccucaacgacaagcacuccaacggcaccgucaaggaccgcuccccccaccgcacccucauguccugccccgucggcgaggcccccucccccuacaacucccgcuucgaguccgucgccugguccgccuccgccugccacgacggcaccuccuggcucaccaucggcaucuccggccccgacaacggcgccgucgccguccucaaguacaacggcaucaucaccgacaccaucaaguccuggcgcaacaacauccuccgcacccaggaguccgagugcgccugcgucaacggcuccugcuucaccgucaugaccgacggccccuccaacggccaggccucccacaagaucuucaagauggagaagggcaaggucgucaaguccgucgagcucgacgcccccaacuaccacuacgaggagugcuccugcuaccccgacgccggcgagaucaccugcgucugccgcgacaacuggcacggcuccaaccgccccugggucuccuucaaccagaaccucgaguaccagaucggcuacaucugcuccggcgucuucggcgacaacccccgccccaacgacggcaccggcuccugcggccccgucuccuccaacggcgccuacggcgucaagggcuucuccuucaaguacggcaacggcgucuggaucggccgcaccaaguccaccaacucccgcuccggcuucgagaugaucugggaccccaacggcuggaccgagaccgacuccuccuucuccgucaagcaggacaucgucgccaucaacgacugguccggcuacuccggcuccuucguccagcaccccgagcucaccggccucgacugcauccgccccugcuucugggucgagcucauccgcggccgccccaaggaguccaccaucuggaccuccggcuccuccaucuccuucugcggcgucaacuccgacaccgucggcugguccuggcccgacggcgccgagcuccccuucaccaucgacaaguga

SEQ ID NO: 111048 - RNA, 1350 nt, Artificial Sequence
  derived and/or modified CDS sequence (opt2) from neuraminidase__InfluenzaA__ABE97677
augaaccccaaccagaagaucaucaccaucggcuccaucugcauggucaccggcaucgucucccucaugcuccagaucggcaacaucaucuccaucuggguccgccacuccauccacaccggcaaccagcaccaguccgagcccaucuccaacaccaacuuccucaccgagaaggccgucgccuccgucaagcucgccggcaacuccucccucugccccaucaacggcugggccgucuacuccaaggacaacuccauccgcaucggcuccaagggcgacgucuucgucauccgcgagcccuucaucuccugcucccaccucgagugccgcaccuucuuccucacccagggcgcccuccucaacgacaagcacuccaacggcaccgucaaggaccgcuccccccaccgcacccucauguccugccccgucggcgaggcccccucccccuacaacucccgcuucgaguccgucgccugguccgccuccgccugccacgacggcaccuccuggcucaccaucggcaucuccggccccgacaacggcgccgucgccgucgucaaguacaacggcaucaucaccgacaccaucaaguccuggcgcaacaacauccuccgcacccaggaguccgagugcgccugcgucaacggcuccugcuucaccgucaugaccgacggccccuccaacggccaggccucccacaagaucuucaagauggagaagggcaaggucgucaaguccgucgagcucgacgcccccaacuaccacuacgaggagugcuccugcuaccccgacgccggcgagaucaccugcgucugccgcgacaacuggcacggcuccaaccgccccugggucuccuucaaccagaaccucgaguaccagaucggcuacaucugcuccggcgucuucggcgacaacccccgccccaacgacggcaccggcuccugcggccccgucuccuccaacggcgccuacggcgucaagggcuucuccuucaaguacggcaacggcgucuggaucggccgcaccaaguccaccaacucccgcuccggcuucgagaugaucugggaccccaacggcuggaccgagaccgacuccuccuucuccgucaagcaggacaucgucgccaucaccgacugguccggcuacuccggcuccuucguccagcaccccgagcucaccggccucgacugcauccgccccugcuucugggucgagcucauccgcggccgccccaaggaguccaccaucuggaccuccggcuccuccaucuccuucugcggcgucaacuccgacaccgucggcugguccuggcccgacggcgccgagcuccccuucaccaucgacaaguga

SEQ ID NO: 111049 - RNA, 1350 nt, Artificial Sequence
  derived and/or modified CDS sequence (opt2) from neuraminidase__InfluenzaA__ABE97679
augaaccccaaccagaagaucaucaccaucggcuccaucugcauggucaccggcaucgucucccucaugcuccagaucggcaacaugaucuccaucuggguccgccacuccauccacaccggcaaccagcaccaguccgagcccaucuccaacaccaacuuccucaccgagaaggccgucgccuccgucaagcucgccggcaacuccucccucugccccaucaacggcugggccgucuacuccaaggacaacuccauccgcaucggcuccaagggcgacgucuucgucauccgcgagcccuucaucuccugcucccaccucgagugccgcaccuucuuccucacccagggcgcccuccucaacgacaagcacuccaacggcaccgucaaggaccgcuccccccaccgcacccucauguccugccccgucggcgaggcccccucccccuacaacucccgcuucgaguccgucgccugguccgccuccgccugccacgacggcaccuccuggcucaccaucggcaucuccggccccgacaacggcgccgucgccgucgucaaguacaacggcaucaucaccgacaccaucaaguccuggcgcaacaacauccuccgcacccaggaguccgagugcgccugcgucaacggcuccugcuucaccgucaugaccgacggccccuccaacggccaggccucccacaagaucuucaagauggagaagggcaaggucgucaaguccgucgagcucgacgcccccaacuaccacuacgaggagugcuccugcuaccccgacgccggcgagaucaccugcgucugccgcgacaacuggcacggcuccaaccgccccugggucuccuucaaccagaaccucgaguaccagaucggcuacaucugcuccggcgucuucggcgacaacccccgccccaacgacggcaccggcuccugcggccccgucuccuccaacggcgccuacggcgucaagggcuucuccuucaaguacggcaacggcgucuggaucggccgcaccaaguccaccaacucccgcuccggcuucgagaugaucugggaccccaacggcuggaccgagaccgacuccuccuucuccgucaagcaggacaucgucgccaucaccgacugguccggcuacuccggcuccuucguccagcaccccgagcucaccggccucgacugcauccgccccugcuucugggucgagcucauccgcggccgccccaaggaguccaccaucuggaccuccggcuccuccaucuccuucugcggcgucaacuccgacaccgucggcugguccuggcccgacggcgccgagcuccccuucaccaucgacaaguga

SEQ ID NO: 111050 - RNA, 1350 nt, Artificial Sequence; identical to SEQ ID NO: 111042
  derived and/or modified CDS sequence (opt2) from neuraminidase__InfluenzaA__ABE97680

SEQ ID NO: 111051 - RNA, 1350 nt, Artificial Sequence; identical to SEQ ID NO: 111042
  derived and/or modified CDS sequence (opt2) from neuraminidase__InfluenzaA__ABE97681

SEQ ID NO: 111052 - RNA, 1350 nt, Artificial Sequence; identical to SEQ ID NO: 111042
  derived and/or modified CDS sequence (opt2) from neuraminidase__InfluenzaA__ABE97682

SEQ ID NO: 111053 - RNA, 1350 nt, Artificial Sequence
  derived and/or modified CDS sequence (opt2) from neuraminidase__InfluenzaA__ABE97684
augaaccccaaccagaagaucaucaccaucggcuccaucugcauggucaccggcaucgucucccucaugcuccagaucggcaacaugaucuccaucugggucucccacuccauccacaccggcaaccagcaccaggccgagcccaucuccaacaccaacuuccucaccgagaaggccgucgccuccgucaagcucgccggcaacuccucccucugccccaucaacggcugggccgucuacuccaaggacaacuccauccgcaucggcuccaagggcgacgucuucgucauccgcgagcccuucaucuccugcucccaccucgagugccgcaccuucuuccucacccagggcgcccuccucaacgacaagcacuccaacggcaccgucaaggaccgcuccccccaccgcacccucauguccugccccgucggcgaggcccccucccccuacaacucccgcuucgaguccgucgccugguccgccuccgccugccacgacggcaccuccuggcucaccaucggcaucuccggccccgacaacggcgccgucgccguccucaaguacaacggcaucaucaccgacaccaucaaguccuggcgcaacaacauccuccgcacccaggaguccgagugcgccugcgucaacggcuccugcuucaccgucaugaccgacggccccuccaacggccaggccucccacaagaucuucaagauggagaagggcaaggucgucaaguccgucgagcucgacgcccccaacuaccacuacgaggagugcuccugcuaccccgacgccggcgagaucaccugcgucugccgcgacaacuggcacggcuccaaccgccccugggucuccuucaaccagaaccucgaguaccagaucggcuacaucugcuccggcgucuucggcgacaacccccgccccaacgacggcaccggcuccugcggccccgucuccuccaacggcgccuacggcgucaagggcuucuccuucaaguacggcaacggcgucuggaucggccgcaccaaguccaccaacucccgcuccggcuucgagaugaucugggaccccaacggcuggaccgagaccgacuccuccuucuccgucaagcaggacaucgucgccaucaccgacugguccggcuacuccggcuccuucguccagcaccccgagcucaccggccucgacugcauccgccccugcuucugggucgagcucauccgcggccgccccaaggaguccaccaucuggaccuccggcuccuccaucuccuucugcggcgucaacuccggcaccgucggcugguccuggcccgacggcgccgagcuccccuucaccaucgacaaguga

SEQ ID NO: 111054 - RNA, 1350 nt, Artificial Sequence
  derived and/or modified CDS sequence (opt2) from neuraminidase__InfluenzaA__ABE97685
augaaccccaaccagaagaucaucaccaucggcuccaucugcauggucaccggcaucgucucccucaugcuccagaucggcaacaugaucuccaucugggucucccacuccauccacaccggcaaccagcaccaggccgagcccaucuccaacaccaacuuccucaccgagaaggccgucgccuccgucaagcucgccggcaacuccucccucugccccaucaacggcugggccgucuacuccaaggacaacuccauccgcaucggcuccaagggcgacgucuucgucauccgcgagcccuucaucuccugcucccaccucgagugccgcaccuucuuccucacccagggcgcccuccucaacgacaagcacuccaacggcaccgucaaggaccgcuccccccaccgcacccucauguccugccccgucggcgaggcccccucccccuacaacucccgcuucgaguccgucgccugguccgccuccgccugccacgacggcaccuccuggcucaccaucggcaucuccggccccgacaacggcgccgucgccguccucaaguacaacggcaucaucaccgacaccaucaaguccuggcgcaacaacauccuccgcacccaggaguccgagugcgccugcgucaacggcuccugcuucaccgucaugaccgacggccccuccaacggccaggccucccacaagaucuucaagauggagaagggcaaggucgucaaguccgucgagcucgacgcccccaacuaccacuacgaggagugcuccugcuaccccgacgccggcgagaucaccugcgucugccgcgacaacuggcacggcuccaaccgccccugggucuccuucaaccagaaccucgaguaccagaucggcuacaucugcuccggcgucuucggcgacaacccccgccccaacgacggcaccggcuccugcggccccgucuccuccaacggcgccuacggcgucaagggcuucuccuucaaguacggcaacggcgucuggaucggccgcaccaaguccaccaacucccgcuccggcuucgagaugaucugggaccccaacggcuggaccgagaccgacuccuccuucuccgucaagcaggacaucgucgccaucaccgacugguccggcuacuccggcuccuucguccagcaccccgagcucaccggccucgacugcauccgccccugcuucugggucgagcucauccgcggccgccccaaggaguccaccaucuggaccuccggcuccuccaucuccuucugcggcgucaacuccgacaccggcggcugguccuggcccgacggcgccgagcuccccuucaccaucgacaaguga

SEQ ID NO: 111055 - RNA, 1350 nt, Artificial Sequence; identical to SEQ ID NO: 111044
  derived and/or modified CDS sequence (opt2) from neuraminidase__InfluenzaA__ABE97686

SEQ ID NO: 111056 - RNA, 1350 nt, Artificial Sequence
  derived and/or modified CDS sequence (opt2) from neuraminidase__InfluenzaA__ABE97687
augaaccccaaccagaagaucaucaccaucggcuccaucugcauggucaccggcaucgucucccucaugcuccaggucggcaacaugaucuccaucugggucucccacuccauccacaccggcaaccagcaccaggccgagcccaucuccaacaccaacuuccucaccgagaaggccgucgccuccgucaagcucgccggcaacuccucccucugccccaucaacggcugggccgucuacuccaaggacaacuccauccgcaucggcuccaagggcgacgucuucgucauccgcgagcccuucaucuccugcucccaccucgagugccgcaccuucuuccucacccagggcgcccuccucaacgacaagcacuccaacggcaccgucaaggaccgcuccccccaccgcacccucauguccugccccgucggcgaggcccccucccccuacaacucccgcuucgaguccgucgccugguccgccuccgccugccacgacggcaccuccuggcucaccaucggcaucuccggccccgacaacggcgccgucgccguccucaaguacaacggcaucaucaccgacaccaucaaguccuggcgcaacaacauccuccgcacccaggaguccgagugcgccugcgucaacggcuccugcuucaccgucaugaccgacggccccuccaacggccaggccucccacaagaucuucaagauggagaagggcaaggucgucaaguccgucgagcucgacgcccccaacuaccacuacgaggagugcuccugcuaccccgacgccggcgagaucaccugcgucugccgcgacaacuggcacggcuccaaccgccccugggucuccuucaaccagaaccucgaguaccagaucggcuacaucugcuccggcgucuucggcgacaacccccgccccaacgacggcaccggcuccugcggccccgucuccuccaacggcgccuacggcgucaagggcuucuccuucaaguacggcaacggcgucuggaucggccgcaccaaguccaccaacucccgcuccggcuucgagaugaucugggaccccaacggcuggaccgagaccgacuccuccuucuccgucaagcaggacaucgucgccaucaccgacugguccggcuacuccggcuccuucguccagcaccccgagcucaccggccucgacugcauccgccccugcuucugggucgagcucauccgcggccgccccaaggaguccaccaucuggaccuccggcuccuccaucuccuucugcggcgucaacuccgacaccgucggcugguccuggcccgacggcgccgagcuccccuucaccaucgacaaguga

SEQ ID NO: 111057 - RNA, 1350 nt, Artificial Sequence
  derived and/or modified CDS sequence (opt2) from neuraminidase__InfluenzaA__ABE97688
augaaccccaaccagaagaucaucaccaucggcuccaucugcauggucaccggcaucgucucccucaugcuccaggucggcaacaugaucuccaucugggucucccacuccauccacaccggcaaccagcaccaggccgagcccaucuccaacaccaacuuccucaccgagaaggccgucgccuccgucaagcucgccggcaacuccucccucugccccaucaacggcugggccgucuacuccaaggacaacuccauccgcaucggcuccaagggcgacgucuucgucauccgcgagcccuucaucuccugcucccaccucgagugccgcaccuucuuccucacccagggcgcccuccucaacgacaagcacuccaacggcaccgucaaggaccgcuccccccaccgcacccucauguccugccccgucggcgaggcccccucccccuacaacucccgcuucgaguccgucgccugguccgccuccgccugccacgacggcaccuccuggcucaccaucggcaucuccggccccgacaacggcgccgucgccguccucaaguacaacggcaucaucaccgacaccaucaaguccuggcgcaacaacauccuccgcacccaggaguccgagugcgccugcgucaacggcuccugcuucaccgucaugaccgacggccccuccaacggccaggccucccacaagaucuucaagauggagaagggcaaggucaucaaguccgucgagcucgacgcccccaacuaccacuacgaggagugcuccugcuaccccgacgccggcgagaucaccugcgucugccgcgacaacuggcacggcuccaaccgccccugggucuccuucaaccagaaccucgaguaccagaucggcuacaucugcuccggcgucuucggcgacaacccccgccccaacgacggcaccggcuccugcggccccgucuccuccaacggcgccuacggcgucaagggcuucuccuucaaguacggcaacggcgucugggucggccgcaccaaguccaccaacucccgcuccggcuucgagaugaucugggaccccaacggcuggaccgagaccgacuccuccuucuccgucaagcaggacaucgucgccaucaccgacugguccggcuacuccggcuccuucguccagcaccccgagcucaccggccucgacugcauccgccccugcuucugggucgagcucauccgcggccgccccaaggaguccaccaucuggaccuccggcuccuccaucuccuucugcggcgucaacuccgacaccgucggcugguccuggcccgacggcgccgagcuccccuucaucaucgacaaguga

SEQ ID NO: 111058 - RNA, 1350 nt, Artificial Sequence
  derived and/or modified CDS sequence (opt2) from neuraminidase__InfluenzaA__ABE97690
augaaccccaaccagaagaucaucaccaucggcuccaucugcauggucaccggcaucgucucccucaugcuccaggucggcaacaugaucuccaucugggucucccacuccauccacaccggcaaccagcaccaggccgagcccaucuccaacaccaacuuccucaccgagaaggccgucgccuccgucaagcucgccggcaacuccucccucugccccaucaacggcugggccgucuacuccaaggacaacuccauccgcaucggcuccaagggcgacgucuucgucauccgcgagcccuucaucuccugcucccaccucgagugccgcaccuucuuccucacccagggcgcccuccucaacgacaagcacuccaacggcaccgucaaggaccgcuccccccaccgcucccucauguccugccccgucggcgaggcccccucccccuacaacucccgcuucgaguccgucgccugguccgccuccgccugccacgacggcaccuccuggcucaccaucggcaucuccggccccgacaacggcgccgucgccguccucaaguacaacggcaucaucaccgacaccaucaaguccuggcgcaacaacauccuccgcacccaggaguccgagugcgccugcgucaacggcuccugcuucaccgucaugaccgacggccccuccaacggccaggccucccacaagaucuucaagaugaagaagggcaaggucgucaaguccgucgagcucgacgcccccaacuaccacuacgaggagugcuccugcuaccccgacgccggcgagaucaccugcgucugccgcgacaacuggcacggcuccaaccgccccugggucuccuucaaccagaaccucgaguaccagaucggcuacaucugcuccggcgucuucggcgacaacccccgccccaacgacggcaccggcuccugcggccccgucuccuccaacggcgccuacggcgucaagggcuucuccuucaaguacggcaacggcgucuggaucggccgcaccaaguccaccaacucccgcuccggcuucgagaugaucugggaccccaacggcuggaccgagaccgacuccuccuucuccgucaagcaggacaucgucgccaucaccgacugguccggcuacuccggcuccuucguccagcaccccgagcucaccggccucgacugcauccgccccugcuucugggucgagcucauccgcggccgccccaaggaguccaccaucuggaccuccggcuccuccaucuccuucugcggcgucaacuccgacaccgucggcugguccuggcccgacggcgccgagcuccccuucaccaucgacaaguga

SEQ ID NO: 111059 - RNA, 1350 nt, Artificial Sequence
  derived and/or modified CDS sequence (opt2) from neuraminidase__InfluenzaA__ABE97691
augaaccccaaccagaagaucaucaccaucggcuccaucugcauggucaccggcaucgucucccucaugcuccaggucggcaacaugaucuccaucugggucucccacuccauccacaccggcaaccagcaccaggccgagcccaucuccaacaccaacuuccucaccgagaaggccgucgccuccgucaagcucgccggcaacuccucccucugccccaucaacggcugggccgucuacuccaaggacaacuccauccgcaucggcuccaagggcgacgucuucgucaagcgcgagcccugcaucuccugcucccaccucaagugccgcaccuucuuccucacccagggcgcccuccucaacgacaagcacuccaacggcaccgucaaggaccgcuccccccaccgcacccucauguccugccccgucggcgaggcccccucccccuacaacucccgcuucgaguccgucgccugguccgccuccgccugccacgacggcaccuccuggcucaccaucggcaucuccggccccgacaacggcgccgucgccguccucaaguacaacggcaucaucaccgacaccaucaaguccuggcgcaacaacauccuccgcacccaggaguccgagugcgccugcgucaacggcuccugcuucaccgucaugaccgacggccccuccaacggccaggccucccacaagaucuucaagauggagaagggcaaggucgucaaguccgucgagcucgacgcccccaacuaccacuacgaggagugcuccugcuaccccgacgccggcgagaucaccugcgucugccgcgacaacuggcacggcuccaaccgccccugggucuccuucaaccagaaccucgaguaccagaucggcuacaucugcuccggcgucuucggcgacaacccccgccccaacgacggcaccggcuccugcggccccgucuccuccaacggcgccuacggcgucaagggcuucuccuucaaguacggcaacggcgucuggaucggccgcaccaaguccaccaacucccgcuccggcuucgagaugaucugggaccccaacggcuggaccgagaccgacuccuccuucuccgucaagcaggacaucgucgccaucaccgacugguccggcuacuccggcuccuucguccagcaccccgagcucaccggccucgacugcauccgccccugcuucugggucgagcucauccgcggccgccccaaggaguccaccaucuggaccuccggcuccuccaucuccuucugcggcgucaacuccgacaccgucggcugguccuggcccgacggcgccgagcuccccuucaccaucgacaaguga

SEQ ID NO: 111060 - RNA, 1350 nt, Artificial Sequence
  derived and/or modified CDS sequence (opt2) from neuraminidase__InfluenzaA__ABE97694
augaaccccaaccagaagaucaugaccaucggcuccaucugcauggucaccggcaucgucucccucaugcuccaggucggcaacaugaucuccaucugggucucccacuccauccacaccggcaaccagcaccaggccgagcccaucuccaacaccaacuuccucaccgagaaggccgucgacuccgucaagcucgccggcaacuccucccucugccccaucaacggcugggccgucuacuccaaggacaacuccauccgcaucggcuccaagggcgacgucuucgucauccgcgagcccuccgucuccugcucccaccucgagugccgcaccuucuuccucacccagggcgcccuccucaacgacaagcacuccaacggcaccgucaaggaccgcuccccccaccgcacccucauguccugccccgucggcgaggcccccucccccuacaacucccgcuucgaguccgucgccugguccgccuccgccugccacgacggcaccuccuggcucaccaucggcaucuccggccccgacaacggcgccgucgccguccucaaguacaacggcaucaucaccgacaccaucaaguccuggcgcaacaacauccuccgcacccaggaguccgagugcgccugcgucaacggcuccugcuucaccgucaugaccgacggccccuccaacggccaggccucccacaagaucuucaagauggagaagggcaaggucgucaaguccgucgagcucgacgcccccaacuaccacuacgaggagugcuccugcuaccccgacgccggcgagaucaccugcgucugccgcgacaacuggcacggcuccaaccgccccugggucuccuucaaccagaaccucgaguaccagaucggcuacaucugcuccggcgucuucggcgacaacccccgccccaacgacggcaccggcuccugcggccccgucuccuccaacggcgccuacggcgucaagggcuucuccuucaaguacggcaacggcgucuggaucggccgcaccaaguccaccaacucccgcuccggcuucgagaugaucugggaccccaacggcuggaccgagaccgacuccuccuucuccgucaagcaggacgucgucgccaucaccgacugguccggcuacuccggcuccuucguccagcaccccgagcucaccggccucgacugcauccgccccugcuucugggucgagcucauccgcggccgccccaaggaguccaccaucuggaccuccggcuccuccaucuccuucugcggcgucaacuccgacaccgucggcugguccuggcccgacggcgccgagcuccccuucaccaucgacaaguga

SEQ ID NO: 111061 - RNA, 1350 nt, Artificial Sequence
  derived and/or modified CDS sequence (opt2) from neuraminidase__InfluenzaA__ABE97696
augaaccccaaccagaagaucaucaccaucggcuccaucugcauggucaccggcaucgucucccucaugcuccaggucggcaacaugaucuccaucugggucucccacuccauccacaccggcaaccagcaccaggccgagcccaucuccaacaccaacuuccucaccgagaaggccgucgccuccgucaagcucgccggcaacuccucccucugccccaucaacggcugggccgucuacuccaaggacaacuccauccgcaucggcuccaagggcgacgucuucgucauccgcgagcccuucaucuccugcucccaccucgagugccgcaccuucuuccucacccagggcgcccuccucaacgacaagcacuccaacggcuccgucaaggaccgcuccccccaccgcacccucauguccugcuccgucggcgaggcccccucccccuacaacucccgcuucgaguccgucgccugguccgccuccgccugccacgacggcaccuccuggcucaccaucggcaucuccggccccgacaacggcgccgucgccguccucaaguacaacggcaucaucaccgacaccaucaaguccuggcgcaacaacauccuccgcacccaggaguccgagugcgccugcgucaacggcuccugcuucaccgucaugaccgacggccccuccaacggccaggccucccacaagaucuucaagauggagaagggcaaggucgucaaguccgucgagcucgacgcccccaacuaccacuacgaggagugcuccugcuaccccgacgccggcgagaucaccugcgucugccgcgacaacuggcacggcuccaaccgccccugggucuccuucaaccagaaccucgaguaccagaucggcuacaucugcuccggcgucuucggcgacaacccccgccccaacgacggcaccggcuccugcggccccgucuccuccaacggcgccuacggcgucaagggcuucuccuucaaguacggcaacggcgucuggaucggccgcaccaaguccaccaacucccgcuccggcuucgagaugaucugggaccccaacggcuggaccgagaccgacuccuccuucuccgucaagcaggacaucgucgccaucaccgacugguccggcuacuccggcuccuucguccagcaccccgagcucaccggccucgacugcauccgccccugcuucugggucgagcucauccgcggccgccccaaggaguccaccaucuggaccuccggcuccuccaucuccuucugcggcgucaacuccgacaccgucggcugguccuggcccgacggcgccgagcuccccuucaccaucgacaaguga

SEQ ID NO: 111062 - RNA, 1350 nt, Artificial Sequence
  derived and/or modified CDS sequence (opt2) from neuraminidase__InfluenzaA__ABE97697
augaaccccaaccagaagaucaucaccaucggcuccaucugcauggucaccggcaucgucucccucaugcuccaggucggcaacaugaucuccaucugggucucccacuccauccacaccggcaaccagcaccaggccgagcccaucuccaacaccaacuuccucaacgagaaggccgucgccuccgucaagcucgccggcaacuccucccucugccccaucaacggcugggccgucuacuccaaggacaacuccauccgcaucggcuccaagggcgacgucuucgucauccgcgagcccuucaucuccugcucccaccucgagugccgcaccuucuuccucacccagggcgcccuccucaacgacaagcacuccaacggcaccgucaaggaccgcuccccccaccgcacccucauguccugccccgucggcgaggcccccucccccuacaacucccgcuucgaguccgucgccugguccgccuccgccugccacgacggcaccuccuggcucaccaucggcaucuccggccccgacaacggcgccgucgccguccucaaguacaacggcaucaucaccgacaccaucaaguccuggcgcaacaacauccuccgcacccaggaguccgagugcgccugcgucaacggcuccugcuucaccgucaugaccgacggccccuccaacggccaggccucccacaagaucuucaagauggagaagggcaaggucgucaaguccgucgagcucgacgcccccaacuaccacuacgaggagugcuccugcuaccccgacgccggcgagaucaccugcgucugccgcgacaacuggcacggcuccaaccgccccugggucuccuucaaccagaaccucgaguaccagaucggcuacaucugcuccggcgucuucggcgacaacccccgccccaacgacgagaccggcuccugcggccccgucuccuccaacggcgccuacggcgucaagggcuucuccuucaaguacggcaacggcgucuggaucggccgcaccaaguccaccaacucccgcuccggcuucgagaugaucugggaccccaacggcuggaccgagaccgacuccuccuucuccgucaagcaggacaucgucgccaucaccgacugguccggcuacuccggcuccuucguccagcaccccgagcucaccggccucgacugcauccgccccugcuucugggucgagcucauccgcggccgccccaaggaguccaccaucuggaccuccggcuccuccaucuccuucugcggcgucaacuccgacaccgucggcugguccuggcccgacggcgccgagcuccccuucaccaucgacaaguga

SEQ ID NO: 111063 - RNA, 1350 nt, Artificial Sequence
  derived and/or modified CDS sequence (opt2) from neuraminidase__InfluenzaA__ABE97702
augaaccccaaccagaagaucaucaccaucggcuccaucugcauggucaccggcaucgucucccucaugcuccaggucggcaacaugaucuccaucugggucucccacuccauccacaccggcaaccagcaccaggccgagcccaucuccaacaccaacuuccucaccgagaaggccgucgccuccgucaagcucgccggcaacuccucccucugccccaucaacggcugggccgucuacuccaaggacaacuccauccgcaucggcuccaagggcgacgucuucgucauccgcgagcccuucaucuccugcucccaccucgagugccgcaccuucuuccucacccagggcgcccuccucaacgacaagcacuccaacggcaccgucaaggaccgcuccccccaccgcacccucauguccugccccgucggcgaggcccccucccccuacaacucccgcuucgaguccgucgccugguccgccuccgccugccacgacggcaccuccuggcucaccaucggcaucuccggccccgacaacggcgccgucgccguccucaaguacaacggcaucaucaccgacaccaucaaguccuggcgcaacaacauccuccgcacccaggaguccgagugcgccugcgucaacggcuccugcuucaccgucaugaccgacggccccuccaacggccaggccucccacaagaucuucaagauggagaagggcaaggucgucaaguccgucgagcucgacgcccccuacuaccacuacgaggagugcuccugcuaccccgacgccggcgagaucaccugcgucugccgcgacaacuggcacggcuccaaccgccccugggucuccuucaaccagaaccucgaguaccagaucggcuacaucugcuccggcgucuucggcgacaacccccgccccaacgacggcaccggcuccugcggccccgucuccuccaacggcgccuacggcgucaagggcuucuccuucaaguacggcaacggcgucuggaucggccgcaccaaguccaccaacucccgcuccggcuucgagaugaucugggaccccaacggcuggaccgagaccgacuccuccuucuccgucaagcaggacaucgucuccaucaccgacugguccggcuacuccggcuccuucguccagcaccccgagcucaccggccucgacugcauccgccccugcuucugggucgagcucauccgcggccgccccaaggaguccaccaucuggaccuccggcuccuccaucuccuucugcggcgucaacuccgacaccgucggcugguccuggcccgacggcgccgagcuccccuucaccaccgacaaguga

SEQ ID NO: 111064 - RNA, 1350 nt, Artificial Sequence; identical to SEQ ID NO: 111056
  derived and/or modified CDS sequence (opt2) from neuraminidase__InfluenzaA__ABE97703

SEQ ID NO: 111065 - RNA, 1350 nt, Artificial Sequence; identical to SEQ ID NO: 111056
  derived and/or modified CDS sequence (opt2) from neuraminidase__InfluenzaA__ABE97705

SEQ ID NO: 111066 - RNA, 1350 nt, Artificial Sequence
  derived and/or modified CDS sequence (opt2) from neuraminidase__InfluenzaA__ABE97706
augaaccccaaccagaagaucaucaccaucggcuccaucugcauggucaccggcaucgucucccucaugcuccaggucggcaacaugaucucccucugggucucccacuccauccacaccggcaaccagcaccaggccgagcccaucuccaacaccaacuuccucaccgagcgcgccgucgccuccgucaagcucgccggcaacuccucccucugccccaucaacggcugggccgucuacuccaaggacaacuccauccgcaucggcuccaagggcgacgucuucgucauccgcgagcccuucaucuccugcucccaccucgagugccgcaccuucuuccucacccagggcgcccuccucaacgacaagcacuccaacggcaccgucaaggaccgcuccccccaccgcacccucauguccugccccgucggcgaggcccccucccccuacaacucccgcuucgaguccgucgccugguccgccuccgccugccacgacggcaccuccuggcucaccaucggcaucuccggccccgacaacggcgccgucgccguccucaaguacaacggcaucaucaccgacaccaucaaguccuggcgcaacaacauccuccgcacccaggaguccgagugcgccugcgucaacggcuccugcuucaccgucaugaccgacggccccuccaacggccaggccucccacaagaucuucaagauggagaagggcaaggucgucaaguccgucgagcucgacgcccccaacuaccacuacgaggagugcuccugcuaccccgacgccggcgagaucaccugcgucugccgcgacaacuggcacggcuccaaccgccccugggucuccuucaaccagaaccucgaguaccagaucggcuacaucugcuccggcgucuucggcgacaacccccgccccaacgacggcaccggcuccugcggccccgucuccuccaacggcgccuacggcgucaagggcuucuccuucaaguacggcaacggcgucuggaucggccgcaccaaguccaccuccucccgcuccggcuucgagaugaucugggaccccaacggcuggaccgagaccgacuccuccuucuccgucaagcaggacaucgucgccaucaccgacugguccggcuacuccggcuccuucguccagcaccccgagcucaccggccucgacugcauccgccccugcuucugggucgagcucauccgcggccgccccaaggaguccaccaucugggccuccggcuccuccaucuccuucugcggcgucaacuccgacaccgucggcugguccuggcccgacggcgccgagcuccccuucaccaucgacaaguga

SEQ ID NO: 111067 - RNA, 1350 nt, Artificial Sequence
  derived and/or modified CDS sequence (opt2) from neuraminidase__InfluenzaA__ABE97707
augaaccccaaccagaagaucaucaccaucggcuccaucugcauggucaccggcaucgucucccucaugcuccaggucggcaacaugaucuccaucugggucucccacuccauccacaccggcaaccagcaccaggccgagcccaucuccaacaccaacuuccucaccgagaaggccgucgccuccgucaagcucgccggcaacuccucccucugccccaucaagggcugggccgucuacuccaaggacaacuccauccgcaucggcuccaagggcgacgucuucgucauccgcgagcccuucaucuccugcucccaccucgagugccgcaccuucuuccucacccagggcgcccuccucaacgacaagcacuccaacggcaccgucaaggaccgcuccccccaccgcacccucauguccugccccgucggcgaggcccccucccccuacaacucccgcuucgaguccgucgccugguccgccuccgccugccacgacggcaccuccuggcucaccaucggcaucuccggccccgacaacggcgccgucgccguccucaaguacaacggcaucaucaccgacaccaucaaguccuggcgcaacaacauccuccgcacccaggaguccgagugcgccugcgucaacggcuccugcuucaccgucaugaccgacggccccuccaacggccaggccucccacaagaucuucaagauggagaagggcaaggucgucaaguccgucgagcucgacgcccccaacuaccacuacgaggagugcuccugcuaccccgacgccggcgagaucaccugcgucugccgcgacaacuggcacggcuccaaccgccccugggucuccuucaaccagaaccucgaguaccagaucggcuacaucugcuccggcgucuucggcgacaacccccgccccaacgacggcaccggcuccugcggccccgucuccuccaacggcgccuacggcgucaagggcuucuccuucaaguacggcaacggcgucuggaucggccgcaccaaguccaccaacucccgcuccggcuucgagaugaucugggaccccaacggcuggaccgagaccgacuccuccuucuccgucaagcaggacaucgucgccaucaccgacugguccggcuacuccggcuccuucguccagcaccccgagcucaccggccucgacugcauccgccccugcuucugggucgagcucauccgcggccgccccaaggaguccaccaucuggaccuccggcuccuccaucuccuucugcggcgucaacuccgacaccgucggcugguccuggcccgacggcgccgagcuccccuucaccaucgacaaguga

SEQ ID NO: 111068 - RNA, 1350 nt, Artificial Sequence
  derived and/or modified CDS sequence (opt2) from neuraminidase__InfluenzaA__ABE97708
augaaccccaaccagaagaucaucaccaucggcuccaucugcauggucaccggcaucgucucccucaugcuccaggucggcaacaugaucuccaucugggucucccacuccauccacaccggcaaccagcaccaggccgagcccaucuccaacaccaacuuccucaccgagaaggccgucgccuccgucaagcucgccggcaacuccucccucugccccaucaacggcugggccgucuacuccaaggacaacuccauccgcaucggcuccaagggcgacgucuucgucauccgcgagcccuucaucuccugcucccaccucgagugccgcaccuucuuccucacccacggcgcccuccucaacgacaagcacuccaacggcaccgucaaggaccgcuccccccaccgcacccucauguccugccccgucggcgaggcccccucccccuacaacucccgcuucgaguccgucgccugguccgccuccgccugccacgacggcaccuccuggcucaccaucggcaucuccggccccgacaacggcgccgucgccguccucaaguacaacggcaucaucaccgacaccaucaaguccuggcgcaacaacauccuccgcacccaggaguccgagugcgccugcgucaacggcuccugcuucaccgucaugaccgacggccccuccaacggccaggccucccacaagaucuucaagaugaagaagggcaaggucgucaaguccgucgagcucgacgcccccaacuaccacuacgaggagugcuccugcuaccccgacgccggcgagaucaccugcgucugccgcgacaacuggcacggcuccaaccgccccugggucuccuucaaccagaaccucgaguaccagaucggcuacaucugcuccggcgucuucggcgacaacccccgccccaacgacggcaccggcuccugcggccccgucuccuccaacggcgccuacggcgucaagggcuucuccuucaaguacggcaacggcgucuggaucggccgcaccaaguccaccaacucccgcuccggcuucgagaugaucugggaccccaacggcuggaccgagaccgacuccuccuucuccgucaagcaggacaucgucgccaucaccgacugguccggcuacuccggcuccuucguccagcaccccgagcucaccggccucgacugcauccgccccugcuucugggucgagcucauccgcggccgccccaaggaguccaccaucuggaccuccggcuccuccaucuccuucugcggcgucaacuccgacaccgucggcugguccuggcccgacggcgccgagcuccccuucaccaucgacaaguga

SEQ ID NO: 111069 - RNA, 1350 nt, Artificial Sequence
  derived and/or modified CDS sequence (opt2) from neuraminidase__InfluenzaA__ABE97710
augaaccccaaccagaagaucaucaccaucggcuccaucugcauggucaccggcaucgucucccucaugcuccaggucggcaacaugaucuccaucugggucucccacuccauccacaccggcaaccagcaccaggccgagcccaucuccaacaccaacuuccucaccgagaaggccgucgccuccgucaagcucgccggcaacuccucccucugccccaucaacggcugggccgucuacuccaaggacaacuccauccgcaucggcuccaagggcgacgucuucgucauccgcgagcccuucaucuccugcucccaccucgagugccgcaccuucuuccucacccagggcgcccuccucaacgacaagcacuccaacggcaccgucaaggaccgcuccccccaccgcacccucauguccugccccgucggcgaggcccccucccccuacaacucccgcuucgaguccgucgccugguccgccuccgccugccacgacggcaccuccuggcucaccaucggcaucuccggccccgacaacggcgccgucgccguccucaaguacaacggcaucaucaccgacaccaucaaguccuggcgcaacaacauccuccgcacccaggaguccgagugcgccugcgucaacggcuccugcuucaccgucaugaccgacggccccuccaacggccaggccucccacaagaucuucaagauggagaagggcaaggucgucaaguccgucgagcucaacgcccccaacuaccacuacgaggagugcuccugcuaccccgacgccggcgagaucaccugcgucugccgcgacaacuggcacggcuccaaccgccccugggucuccuucaaccagaaccucgaguaccagaucggcuacaucugcuccggcgucuucggcgacaacccccgccccaacgacggcaccggcuccugcggccccgucuccuccaacggcgccuacggcgucaagggcuucuccuucaaguacggcaacggcgucuggaucggccgcaccaaguccaccaacucccgcuccggcuucgagaugaucugggaccccaacggcuggaccgagaccgacuccuccuucucccucaagcaggacaucgucgccaucaccgacugguccggcuacuccggcuccuucguccagcaccccgagcucaccggccucgacugcauccgccccugcuucugggucgagcucauccgcggccgccccaaggaguccaccaucuggaccuccggcuccuccaucuccuucugcggcgucaacuccgacaccgucggcugguccuggcccgacggcgccgagcuccccuucaccaucgacaaguga

SEQ ID NO: 111070 - RNA, 1350 nt, Artificial Sequence
  derived and/or modified CDS sequence (opt2) from neuraminidase__InfluenzaA__ABE97711
augaaccccaaccagaagaucaucaccaucggcuccaucugcauggucaccggcaucgucucccucaugcuccaggucggcaacaugaucuccaucugggucucccacuccauccacaccggcaaccagcaccaggccgagcccaucuccaacaccaacuuccucaccgagaaggccgucgccuccgucaagcucgccggcaacuccucccucugccccaucaacggcugggccgucuacuccaaggacaacuccauccgcaucggcuccaagggcgacgucuucgucauccgcgagcccuucaucuccugcucccaccucgagugccgcaccuucuuccucacccagggcgcccuccucaacgacaagcacuccaacggcaccgucaaggaccgcuccccccaccgcacccucauguccugccccgucggcgaggcccccucccccuacaacucccgcuucgaguccgucgccugguccgccuccgccugccacgacggcaccuccuggcucaccaucggcaucuccggccccgacaacggcgccgucgccguccucaaguacaacggcaucaucaccgacaccaucaaguccuggcgcaacaacauccuccgcacccaggaguccgagugcgccugcgucaacggcuccugcuucaccgucaugaccgacggccccuccgacggccaggccucccacaagaucuucaagauggagaagggcaaggucgucaaguccgucgagcucgacgcccccaacuaccacuacgaggagugcuccugcuaccccgacgccggcgagaucaccugcgucugccgcgacaacuggcacggcuccaaccgccccugggucuccuucaaccagaaccucgaguaccagaucggcuacaucugcuccggcgucuucggcgacaacccccgccccaacgacggcaccggcuccugcggccccgucuccuccaacggcgccuacggcgucaagggcuucuccuucaaguacggcaacggcgucuggaucggccgcaccaaguccaccaacucccgcuccggcuucgagauggucugggaccccaacggcuggaccgagaccgacuccuccuucuccgucaagcaggacaucgucgccaucaccgacugguccggcuacuccggcuccuucguccagcaccccgagcucaccggccucgacugcauccgccccugcuucugggucgagcucauccgcggccgccccaaggaguccaccaucuggaccuccggcuccuccaucuccuucugcggcgucaacuccgacaccgucggcugguccuggcccgacggcgccgagcuccccuucaccaucgacaaguga

SEQ ID NO: 111071 - RNA, 1350 nt, Artificial Sequence; identical to SEQ ID NO: 111056
  derived and/or modified CDS sequence (opt2) from neuraminidase__InfluenzaA__ABE97712

SEQ ID NO: 111072 - RNA, 1350 nt, Artificial Sequence; identical to SEQ ID NO: 111056
  derived and/or modified CDS sequence (opt2) from neuraminidase__InfluenzaA__ABE97713

SEQ ID NO: 111073 - RNA, 1350 nt, Artificial Sequence; identical to SEQ ID NO: 111056
  derived and/or modified CDS sequence (opt2) from neuraminidase__InfluenzaA__ABE97715

SEQ ID NO: 111074 - RNA, 1350 nt, Artificial Sequence
  derived and/or modified CDS sequence (opt2) from neuraminidase__InfluenzaA__ABE97717
augaaccccaaccagaagaucaucaccaucggcuccaucugcauggucaccggcaucgucaaccucaugcuccaggucggcaacaugaucuccaucugggucucccacuccauccacaccggcaaccagcaccaggccgagcccaucuccaacaccaacuuccucaccgagaaggccgucgccuccgucaagcucgccggcaacuccucccucugccccaucaacggcugggccgucuacuccaaggacaacuccauccgcaucggcuccaagggcgacgucuucgucauccgcgagcccuucaucuccugcucccaccucgagugccgcaccuucuuccucacccagggcgcccuccucaacgacaagcacuccaacggcaccgucaaggaccgcuccccccaccgcacccucauguccugccccgucggcgaggcccccucccccuacaacucccgcuucgaguccgucgccugguccgccuccgccugccacgacggcaccuccuggcucaccaucggcaucuccggccccgacaacggcgccgucgccguccucaaguacaacggcaucaucaccgacaccaucaaguccuggcgcaacaacauccuccgcacccaggaguccgagugcgccugcgucaacggcuccugcuucaccgucaugaccgacggccccuccaacggccaggccucccacaagaucuucaagauggagaagggcaaggucgucaaguccgucgagcucgacgcccccaacuaccacuacgaggagugcuccugcuaccccgacgccggcgagaucaccugcgucugccgcgacaacuggcacggcuccaaccgccccugggucuccuucaaccagaaccucgaguaccagaucggcuacaucugcuccggcgucuucggcgacaacccccgccccaacgacggcaccggcuccugcggccccguccccuccaacggcgccuacggcgucaagggcuucuccuucaaguacggcaacggcgucuggaucggccgcaccaaguccaccaacucccgcuccggcuucgagaugaucugggaccccaacggcuggaccgagaccgacuccuccuucuccgucaagcaggacaucgucgccaucaccgacugguccggcuacuccggcuccuucguccagcaccccgagcucaccggccucgacugcauccgccccugcuucugggucgagcucauccgcggccgccccaaggaguccaccaucuggaccuccggcuccuccaucuccuucugcggcgucaacuccgacaccgucggcugguccuggcccgacggcgccgagcuccccuucaccaucgacaaguga

SEQ ID NO: 111075 - RNA, 1350 nt, Artificial Sequence
  derived and/or modified CDS sequence (opt2) from neuraminidase__InfluenzaA__ABE97718
augaaccccaaccagaagaucaucaccaucggcuccaucugcauggucaccggcaucgucucccucaugcuccaggucggcaacaugaucuccaucugggucucccacuccauccacaccggcaaccagcaccaggccgagcccaucuccaacaccaacuuccucaccgagaaggccgucgccuccgucaagcucgccggcaacuccucccucugccccaucaacggcugggccgucuacuccaaggacaacuccauccgcaucggcuccaagggcgacgucuucgucauccgcgagcccuucaucuccugcucccaccucgagugccgcaccuucuuccucacccagggcgcccuccucaacgacaagcacuccaacggcaccgucaaggaccgcuccccccaccgcacccucauguccugccccgucggcgaggcccccucccccuacaacucccgcuucgaguccgucgccugguccgccuccgccugccacgacggcaccuccuggcucaccaucggcaucuccggccccgacaacggcgccgucgccguccucaaguacaacggcaucaucaccgacaccaucaaguccuggcgcaacaacauccuccgcacccaggaguccgagugcgccugcgucaacggcuccugcuucaccgucaugaccgacggccccuccaacggccaggccucccacaagaucuucaagauggagaagggcaaggucgucaaguccgucgagcucgacgcccccaacuaccacuacgaggagugcuccugcuaccccgacgccggcgagaucaccugcgucugccgcgacaacuggcacggcuccaaccgccccugggucuccuucaaccagaaccucgaguaccagaucggcuacaucugcuccggcgucuucggcgacaacccccgccccaacgacggcaccggcuccugcggccccgucuccuccaacggcgccuacggcgucaagggcuucuccuucaaguacggcaacggcgucuggaucggccgcaccaaguccaccaacucccgcuccggcuucgagaugaucugggaccccaacggcuggaccgagaccgacuccuccuucuccgucaagcaggacaucgucgccaucaccgacugguccggcuacuccggcuccuucguccagcaccccgagcucaccggccucgacugcauccgccccugcuucugggucgagcucauccgcggccgccccaaggaguccaccaucuggaccuccggcuccuccaucuccuucugcggcgucgacuccgacaccgucggcugguccuggcccgacggcgccgagcuccccuucaccaucgacaaguga

SEQ ID NO: 111076 - RNA, 1350 nt, Artificial Sequence
  derived and/or modified CDS sequence (opt2) from neuraminidase__InfluenzaA__ABE97719
augaaccccaaccagaagaucaucaccaucggcuccaucugcauggucaccggcaucgucucccucaugcuccaggucggcaacaugaucuccaucugggucucccacuccauccacaccggcaaccagcaccaggccgagcccaucuccaacaccaacuuccucaccgagaaggccgucgccuccgucaagcucgccggcaacuccucccucugccccaucaacggcugggccgucuacuccaaggacaacuccauccgcaucggcuccaagggcgacgucuucgucauccgcgagcccuucaucuccugcucccaccucgagugccgcaccuucuuccucacccagggcgcccuccucaacgacaagcacuccaacggcaccgucaaggaccgcuccccccaccgcacccucauguccugccccgucggcgaggcccccucccccuacaacucccgcuucgaguccgucgccugguccgccuccgccugccacgacggcaccuccuggcucaccaucggcaucuccggccccgacaacggcgccgucgccguccucaaguacaacggcaucaucaccgacaccaucaaguccuggcgcaacaacauccuccgcacccaggaguccgagugcgccugcgucaacggcuccugcuucaccgucaugaccgacggccccuccaacggccaggccucccacaagaucuucaagaugaagaagggcaaggucgucaaguccgucgagcucgacgcccccaacuaccacuacgaggagugcuccugcuaccccgacgccggcgagaucaccugcgucugccgcgacaacuggcacggcuccaaccgccccugggucuccuucaaccagaaccucgaguaccagaucggcuacaucugcuccggcgucuucggcgacaacccccgccccaacgacggcaccggcuccugcggccccgucuccuccaacggcgccuacggcgucaagggcuucuccuucaaguacggcaacggcgucuggaucggccgcaccaaguccaccaacucccgcuccggcuucgagaugaucugggaccccaacggcuggaccgagaccgacuccuccuucuccgucaagcaggacaucgucgccaucaccgacugguccggcuacuccggcuccuucguccagcaccccgagcucaccggccucgacugcauccgccccugcuucugggucgagcucauccgcggccgccccaaggaguccaccaucuggaccuccggcuccuccaucuccuucugcggcgucaacuccgacaccgucggcugguccuggcccgacggcgccgagcuccccuucaccaucgacaaguga

SEQ ID NO: 111077 - RNA, 1350 nt, Artificial Sequence
  derived and/or modified CDS sequence (opt2) from neuraminidase__InfluenzaA__ABE97720
augaaccccaaccagaagaucaucaccaucggcuccaucugcauggucaccggcaucgucucccucaugcuccaggucggcaacaugaucuccaucugggucucccacuccauccacaccggcaaccagcaccaggccgagcccaucuccaacgccaacuuccucaccgagaaggccgucgccuccgucaagcucgccggcaacuccucccucugccccaucaacggcugggccgucuacuccaaggacaacuccauccgcaucggcuccaagggcgacgucuucgucauccgcgagcccuucaucuccugcucccaccucgagugccgcaccuucuuccucacccagggcgcccuccucaacgacaagcacuccaacggcaccgucaaggaccgcuccccccaccgcacccucauguccugccccgucggcgaggcccccucccccuacaacucccgcuucgaguccgucgccugguccgccuccgccugccacgacggcaccuccuggcucaccaucggcaucuccggccccgacaacggcgccgucgccguccucaaguacaacggcaucaucaccgacaccaucaaguccuggcgcaacaacauccuccgcacccaggaguccgagugcgccugcgucaacggcuccugcuucaccgucaugaccgacggccccuccaacggccaggccucccacaagaucuucaagauggagaagggcaaggucgucaaguccgucgagcucgacgcccccaacuaccacuacgaggagugcuccugcuaccccgacgccggcgagaucaccugcgucugccgcgacaacuggcacggcuccaaccgccccugggucuccuucaaccagaaccucgaguaccagaucggcuacaucugcuccggcgucuucggcgacaccccccgccccaacgacggcaccggcuccugcggccccgucuccuccaacggcgccuacggcgucaagggcuucuccuucaaguacggcaacggcgucuggaucggccgcaccaaguccaccaacucccgcuccggcuucgagaugaucugggaccccaacggcuggaccgagaccgacuccuccuucuccgucaagcaggacaucgucgccaucaccgacugguccggcuacuccggcuccuucguccagcaccccgagcucaccggccucgacugcauccgccccugcuucugggucgagcucauccgcggccgccccaaggaguccaccaucuggaccuccggcuccuccaucuccuucugcggcgucaacuccgacaccgucggcugguccuggcccgacggcgccgagcuccccuucaccaucgacaaguga

SEQ ID NO: 111078 - RNA, 1410 nt, Artificial Sequence; identical to SEQ ID NO: 110849
  derived and/or modified CDS sequence (opt2) from neuraminidase__InfluenzaA__ABF47553

SEQ ID NO: 111079 - RNA, 1413 nt, Artificial Sequence; identical to SEQ ID NO: 110432
  derived and/or modified CDS sequence (opt2) from neuraminidase__InfluenzaA__ABF47564

SEQ ID NO: 111080 - RNA, 1413 nt, Artificial Sequence
  derived and/or modified CDS sequence (opt2) from neuraminidase__InfluenzaA__ABF47575
augaaccccaaccagaagaucaucaccaucggcuccaucuccaucgccaucggcaucaucucccucaugcuccagaucggcaacaucaucuccaucugggccucccacuccauccagaccggcucccagaaccacaccggcgucugcaaccagcgcaucaucaccuacgagaacuccaccugggucaaccacaccuacgucaacaucaacaacaccaacgucaucgccggcaaggacaagaccuccgucgcccucgccggcaacuccucccucugcuccaucuccggcugggccaucuacaccaaggacaacuccauccgcaucggcuccaagggcgacgucuucgucauccgcgagcccuucaucuccugcucccacuucgagugccgcaccuucuuccucacccagggcgcccuccucaacgacaagcacuccaacggcaccgucaaggaccgcucccccuaccgcgcccucauguccugcccccucggcgaggcccccucccccuacaacuccaaguucgaguccgucgccugguccgccuccgccugccacgacggcaugggcuggcucaccaucggcaucuccggccccgacaacggcgccgucgccguccucaaguacaacggcaucaucaccgagaccaucaaguccuggaagaagcagauccuccgcacccaggaguccgagugcgucugcgucaacggcuccugcuucaccaucaugaccgacggccccuccaacggcgccgccuccuacaagaucuucaagaucgagaagggcaaggucaccaaguccaucgagcucaacgcccccaacuuccacuacgaggagugcuccugcuaccccgacaccggcaccgucaugugcgucugccgcgacaacuggcacggcuccaaccgccccugggucuccuucaaccagaaccucgacuaccagaucggcuacaucugcuccggcgucuucggcgacaacccccgccccaaggacggcgagggcuccugcaaccccgucaccgucgacggcgccaacggcgucaagggcuucuccuacaaguacggcaacggcgucuggaucggccgcaccaaguccaaccgccuccgcaagggcuucgagaugaucugggaccccaacggcuggaccgacaccgacuccgacuucuccgucaagcaggacgucgucgccaucaccgacugguccggcuacuccggcuccuucguccagcaccccgagcucaccggccucgacugcauccgccccugcuucugggucgagcucguccgcggccuccccaaggagaacaccaccaucuggaccuccggcuccuccaucuccuucugcggcgucaacuccgacaccgccaacugguccuggcccgacggcgccgagcuccccuucaccaucgacaaguga

SEQ ID NO: 111081 - RNA, 1413 nt, Artificial Sequence; identical to SEQ ID NO: 110432
  derived and/or modified CDS sequence (opt2) from neuraminidase__InfluenzaA__ABF47586

SEQ ID NO: 111082 - RNA, 1410 nt, Artificial Sequence; identical to SEQ ID NO: 110162
  derived and/or modified CDS sequence (opt2) from neuraminidase__InfluenzaA__ABF47597

SEQ ID NO: 111083 - RNA, 1413 nt, Artificial Sequence; identical to SEQ ID NO: 111004
  derived and/or modified CDS sequence (opt2) from neuraminidase__InfluenzaA__ABF47608

SEQ ID NO: 111084 - RNA, 1410 nt, Artificial Sequence
  derived and/or modified CDS sequence (opt2) from neuraminidase__InfluenzaA__ABF47619
augaaccccaaccagaagaucaucaccaucggcuccgucucccucaccaucgccaccaucugcuuccucaugcagaucgccauccucgucaccaccgucacccuccacuucaagcaguacgagugcaacuccccccccaacaaccaggucaugcucugcgagcccaccaucaucgagcgcaacaucaccgagaucgucuaccucaccaacaccaccaucgagaaggagaucugccccaagcucgccgaguaccgcaacugguccaagccccagugcaagaucaccggcuucgcccccuucuccaaggacaacuccauccgccucuccgccggcggcgacaucugggucacccgcgagcccuacgucuccugcgaccccggcaagugcuaccaguucgcccucggccagggcaccacccucaacaaccgccacuccaacgacaccguccacgaccgcacccccuaccgcacccuccucaugaacgagcucggcguccccuuccaccucggcaccaagcaggucugcaucgccugguccuccuccuccugccacgacggcaaggccuggcuccacgucugcgucaccggccacgacgagaacgccaccgccuccuucaucuacgacggccgccucgucgacuccaucggcuccugguccaagaacauccuccgcacccaggaguccgagugcgucugcaucaacggcaccugcaccgucgucaugaccgacggcuccgccuccggccgcgccgacaccaagauccucuucaucgaggagggcaagaucguccacaucuccccccucuccggcuccgcccagcacgucgaggagugcuccugcuacccccgcuaccccggcguccgcugcgucugccgcgacaacuggaagggcuccaaccgccccaucgucgacaucaacgucaaggacuacuccaucgucuccuccuacgucugcuccggccucgucggcgacaccccccgcaagaacgacuccgccuccuccucccacugccucaaccccaacaacgaggagggcggccacggcgucaagggcugggccuucgacgacggcaacgacgucuggaugggccgcaccaucuccgagaagcuccgcuccggcuacgagaccuucaaggucaucggcggcugguccaagcccaacuccaagcuccagaucaaccgccaggucaucgucgaccgcggcaaccgcuccggcuacuccggcaucuucuccgucgagggcaaguccugcaucaaccgcugcuucuacgucgagcucauccgcggccgcaagcaggagaccgaggucugguggaccuccaacuccaucgucgucuucugcggcaccuccggcaccuacggcaccggcuccuggcccgacggcgccgacaucaaccucaugcccaucuga

SEQ ID NO: 111085 - RNA, 1413 nt, Artificial Sequence
  derived and/or modified CDS sequence (opt2) from neuraminidase__InfluenzaA__ABF47630
augaaccccaaccagaagaucaucaccaucggcuccaucuccaucgccaucggcaucaucucccucauccuccagaucggcaacaucaucuccaucugggccucccacuccauccagaccggcucccagaaccacaccggcaucugcaaccagcgcaucaucaccuacgagaacuccaccugggucaaccagaccuacgucaacaucaacaacaccaacgucgucgccggcaaggacaagaccuccauggcccucgccggcaacuccucccucugccccauccgcggcugggccaucuacaccaaggacaacuccauccgcaucggcuccaagggcgacgucuucgucauccgcgagcccuucaucuccugcucccaccucgagugccgcaccuucuuccucacccagggcgcccuccucaacgacaagcacuccaacggcaccgucaaggaccgcucccccuaccgcgcccucauguccugcccccucggcgaggcccccucccccuacaacucccgcuucgaguccgucgccugguccgccuccgccugccacgacggccucggcuggcucaccaucggcaucuccggccccgacaacggcgccgucgccguccucaaguacaacggcaucaucaccgagaccaucaaguccuggaagaagcgcauccuccgcacccaggaguccgagugcgucugcaugaacggcuccugcuucaccaucaugaccgacggccccuccaacggcgccgccuccuaccgcaucuucaagaucgagaagggccgcgucaccaaguccaucgagcucgacgcccccaacuaccacuacgaggagugcuccugcuaccccgacaccggcaccgucaugugcgucugccgcgacaacuggcacggcuccaaccgccccugggucuccuucaaccagaaccucgacuaccagaucggcuacaucugcuccggcgucuucggcgacaacccccgccccaaggacggcgagggcuccugcaaccccgucaccgucgacggcgccgacggcgucaagggcuucuccuaccgcuacggcaacggcgucuggaucggccgcaccaaguccaaccgccuccgcaagggcuucgagaugaucugggaccccaacggcuggaccgacaccgacuccgacuucuccaugaagcaggacaucgucgccaugaccgacugguccggcuacuccggcuccuucguccagcaccccgagcucaccggccucgacugcaugcgccccugcuucugggucgagcucguccgcggccucccccgcgagaacaccaccaucuggaccuccggcuccuccaucuccuucugcggcgucaacuccgacaccgccaacugguccuggcccgacggcgccgagcuccccuucaccaucgacaaguga

SEQ ID NO: 111086 - RNA, 1413 nt, Artificial Sequence
  derived and/or modified CDS sequence (opt2) from neuraminidase__InfluenzaA__ABF47652
augaaccccaaccagaagaucaucaccaucggcuccaucuccaucgccaucggcaucaucucccucauccuccagaucggcaacaucaucuccaucugggccucccacuccauccagaccggcucccagaaccacaccggcaucugcaaccagcgcaucaucaccuacgagaacuccaccugggucaaccagaccuacgucaacaucaacaacaccaacgucgucgccggcaaggacaagaccuccaugacccucgccggcaacuccucccucugccccauccgcggcugggccaucuacaccaaggacaacuccauccgcaucggcuccaagggcgacgucuucgucauccgcgagcccuucaucuccugcucccaccucgagugccgcaccuucuuccucacccagggcgcccuccucaacgacaagcacuccaacggcaccgucaaggaccgcucccccuaccgcgcccucauguccugcccccucggcgaggcccccucccccuacaacucccgcuucgaguccgucgccugguccgccuccgccugccacgacggccucggcuggcucaccaucggcaucuccggccccgacaacggcgccgucgccguccucaaguacaacggcaucaucaccgagaccaucaaguccuggaagaagcgcauccuccgcacccaggaguccgagugcgucugcaugaacggcuccugcuucaccaucaugaccgacggccccuccaacggcgccgccuccuaccgcaucuucaagaucgagaagggccgcgucaccaaguccaucgagcucgacgcccccaacuaccacuacgaggagugcuccugcuaccccaacaccggcaccgucaugugcgucugccgcgacaacuggcacggcuccaaccgccccugggucuccuucaaccagaaccucgacuaccagaucggcuacaucugcuccggcgucuucggcgacaacccccgccccaaggacggcgagggcuccugcaaccccgucaccgucgacggcgccgacggcgucaagggcuucuccuaccgcuacggcaacggcgucuggaucggccgcaccaaguccaaccgccuccgcaagggcuucgagaugaucugggaccccaacggcuggaccgacaccgacuccgacuucuccaugaagcaggacaucgucgccaugaccgacugguccggcuacuccggcuccuucguccagcaccccgagcucaccggccucgacugcaugcgccccugcuucugggucgagcucguccgcggccucccccgcgagaacaccaccaucuggaccuccggcuccuccaucuccuucugcggcgucaacuccgacaccgccaacugguccuggcccgacggcgccgagcuccccuucaccaucgacaaguga

SEQ ID NO: 111087 - RNA, 1413 nt, Artificial Sequence; identical to SEQ ID NO: 111004
  derived and/or modified CDS sequence (opt2) from neuraminidase__InfluenzaA__ABF47663

SEQ ID NO: 111088 - RNA, 1413 nt, Artificial Sequence
  derived and/or modified CDS sequence (opt2) from neuraminidase__InfluenzaA__ABF47674
augaaccccaaccagaagaucaucaccaucggcuccaucuccaucgccaucggcaucaucucccucaugcuccagaucggcaacaucaucuccaucugggccucccacuccauccagaccggcucccagaaccacaccggcgucugcauccagcgcaucaucaccuacgagaacuccaccugggucaaccacaccuacgucaacaucaacaacaccaacgucaucgccggcaaggacaagaccuccgucacccucgccggcaacuccucccucugcuccaucuccggcugggccaucuacaccaaggacaacuccauccgcaucggcuccaagggcgacgucuucgucauccgcgagcccuucaucuccugcucccaccucgagugccgcaccuucuuccucacccagggcgcccuccucaacgacaagcacuccaacggcaccgucaaggaccgcucccccuaccgcgcccucauguccugcccccucggcgaggcccccucccccuacaacuccaaguucgaguccgucgccugguccgccuccgccugccacgacggcaugggcuggcucaccaucggcaucuccggccccgacaacggcgccgucgccguccucaaguacaacggcaucaucaccgagaccaucaaguccuggaagaagcagauccuccgcacccaggaguccgagugcgucugcgucaacggcuccugcuucaccaucaugaccgacggccccuccaacggcgccgccuccuacaagaucuucaagaucgagaagggcaaggucaccaaguccaucgagcucaacgcccccaacuuccacuacgaggagugcuccugcuaccccgacaccggcaccgucaugugcgucugccgcgacaacuggcacggcuccaaccgccccugggucuccuucaaccagaaccucgacuaccagaucggcuacaucugcuccggcgucuucggcgacaacccccgccccaaggacggcgagggcuccugcaaccccgucaccgucgacggcgccaacggcgucaagggcuucuccuacaaguacggcaacggcgucuggaucggccgcaccaaguccaaccgccuccgcaagggcuucgagaugaucugggaccccaacggcuggaccgacaccgacuccgacuucuccgucaagcaggacgucgucgccaucaccgacugguccggcuacuccggcuccuucguccagcaccccgagcucaccggccucgacugcauccgccccugcuucugggucgagcucguccgcggccuccccaaggagaacaccaccaucuggaccuccggcuccuccaucuccuucugcggcgucaacuccgacaccgccaacugguccuggcccgacggcgccgagcuccccuucaccaucgacaaguga

SEQ ID NO: 111089 - RNA, 1413 nt, Artificial Sequence; identical to SEQ ID NO: 110987
  derived and/or modified CDS sequence (opt2) from neuraminidase__InfluenzaA__ABF47696

SEQ ID NO: 111090 - RNA, 1413 nt, Artificial Sequence
  derived and/or modified CDS sequence (opt2) from neuraminidase__InfluenzaA__ABF47707
augaaccccaaccagaagaucaucaccaucggcuccaucugcauggccaucggcaucaucucccucauccuccagaucggcaacaucaucuccaucugggucucccacuccauccagaccggcucccagaaccacaccggcaucugcaaccagcgcaucaucaccuacgagaacuccaccugggucaaccagaccuacgucaacaucuccaacaccaacgucgucgccggcaagggcaccaccuccaugacccucgccggcaacuccucccucugccccauccgcggcugggccaucuacuccaaggacaacuccauccgcaucggcuccaagggcgacgucuucgucauccgcgagcccuucaucuccugcucccaccucgagugccgcaccuucuuccucacccagggcgcccuccucaacgacaagcacuccaacggcaccgucaaggaccgcucccccuaccgcgcccucauguccugccccaucggcgaggcccccucccccuacaacucccgcuucgaguccgucgccugguccgccuccgccugccacgacggcaugggcuggcucaccaucggcaucuccggccccgacgacggcgccgucgccguccucaaguacaacggcaucaucaccgagaccaucaaguccuggcgcaagcagauccuccgcacccaggaguccgagugcgucugcgucaacggcuccugcuucaccaucaugaccgacggccccuccgacggccccgccuccuaccgcaucuucaagaucgagaagggcaagaucaccaaguccaucgagcucgacgcccccaacucccacuacgaggagugcuccugcuaccccgacaccggcaccgucaugugcgucugccgcgacaacuggcacggcuccaaccgccccugggucuccuucaaccagaaccucgacuaccagaucggcuacaucugcuccggcgucuucggcgacaacccccgccccaaggacggcaagggcuccugcgaccccgucaacgucgacggcgccgacggcgucaagggcuucuccuaccgcuacggcaacggcgucuggaucggccgcaccaaguccaacuccucccgcaagggcuucgagaugaucugggaccccaacggcuggaccgacaccgacuccaacuuccucgucaagcaggacgucgucgccaugaccgacugguccggcuacuccggcuccuucguccagcaccccgagcucaccggccucgacugcaugcgccccugcuucugggucgagcucauccgcggccgcccccgcgagaagaccaccaucuggaccuccggcuccuccaucuccuucugcggcgucaacuccgacaccgucaacugguccuggcccgacggcgccgagcuccccuucaccaucgacaaguga

SEQ ID NO: 111091 - RNA, 1413 nt, Artificial Sequence; identical to SEQ ID NO: 110987
  derived and/or modified CDS sequence (opt2) from neuraminidase__InfluenzaA__ABF47718

SEQ ID NO: 111092 - RNA, 1413 nt, Artificial Sequence; identical to SEQ ID NO: 110987
  derived and/or modified CDS sequence (opt2) from neuraminidase__InfluenzaA__ABF47729

SEQ ID NO: 111093 - RNA, 1413 nt, Artificial Sequence; identical to SEQ ID NO: 110987
  derived and/or modified CDS sequence (opt2) from neuraminidase__InfluenzaA__ABF47740

SEQ ID NO: 111094 - RNA, 1413 nt, Artificial Sequence
  derived and/or modified CDS sequence (opt2) from neuraminidase__InfluenzaA__ABF47751
augaaccccaaccagaagaucaucaccaucggcuccaucugcauggccaucggcaucaucucccucauccuccagaucggcaacaucaucuccaucugggucucccacuccauccagaccggcucccagaaccacaccggcaucugcaaccagcgcaucaucaccuacgagaacuccaccugggucaaccagaccuacgucaacaucaacaacaccaacgucgucgccggcaaggacaccaccuccgucacccucgccggcaacuccucccucugccccauccgcggcugggccaucuacuccaaggacaacuccauccgcaucggcuccaagggcgacgucuucgucauccgcgagcccuucaucuccugcucccaccucgagugccgcaccuucuuccucacccagggcgcccuccucaacgacaagcacuccaacggcaccgucaaggaccgcucccccuaccgcgcccucauguccugccccaucggcgaggcccccucccccuacaacucccgcuucgaguccgucgccugguccgccuccgccugccacgacggcaugggcuggcucaccaucggcaucuccggccccgacgacggcgccgucgccguccucaaguacaacggcaucaucaccgagaccaucaaguccuggcgcaagcgcauccuccgcacccaggaguccgagugcgucugcgucaacggcuccugcuucaccaucaugaccgacggccccuccaacggccccgccuccuaccgcaucuucaagaucgagaagggcaagaucaccaaguccaucgagcucgacgcccccaacucccacuacgaggagugcuccugcuaccccgacaccggcaccgucaugugcgucugccgcgacaacuggcacggcuccaaccgccccugggucuccuucaaccagaaccucgacuaccagaucggcuacaucugcuccggcgucuucggcgacaacccccgccccaaggacggcaagggcuccugcgaccccgucaccgucgacggcgccgacggcgucaagggcuucuccuaccgcuacggcaacggcgucuggaucggccgcaccaaguccaacuccucccgcaagggcuucgagaugaucugggaccccaacggcuggaccgacaccgacuccaacuuccucgucaagcaggacgucgucgccaugaccgacugguccggcuacuccggcuccuucguccagcaccccgagcucaccggccucgacugcaugcgccccugcuucugggucgagcucauccgcggccgcccccgcgagaagaccaccaucuggaccuccggcuccuccaucuccuucugcggcgucaacuccgacaccgccaacugguccuggcccgacggcgccgagcuccccuucaccaucgacaaguga

SEQ ID NO: 111095 - RNA, 1413 nt, Artificial Sequence
  derived and/or modified CDS sequence (opt2) from neuraminidase__InfluenzaA__ABF47773
augaaccccaaccagaagaucaucaccaucggcuccaucugcaugaccaucggcaucaucucccucauccuccagaucggcaacaucaucuccaucugggucucccacuccauccagaccggcucccagaaccacaccggcaucugcaaccagcgcaucaucaccuacgagaacuccaccugggucaaccagaccuacgucaacaucaacaacaccaacgucgucgccggcaaggacaccaccuccgucacccucgccggcaacuccucccucugccccauccgcggcugggccaucuacuccaaggacaacuccauccgcaucggcuccaagggcgacgucuucgucauccgcgagcccuucaucuccugcucccaccucgagugccgcaccuucuuccucacccagggcgcccuccucaacgacaagcacuccaacggcaccgucaaggaccgcucccccuaccgcgcccucauguccugccccaucggcgaggcccccucccccuacaacucccgcuucgaguccgucgccugguccgccuccgccugccacgacggcaugggcuggcucaccaucggcaucuccggccccgacgacggcgccgucgccguccucaaguacaacggcaucaucaccgagaccaucaaguccuggcgcaagcgcauccuccgcacccaggaguccgagugcgucugcgucaacggcuccugcuucaccaucaugaccgacggccccuccaacggccccgccuccuaccgcaucuucaagaucgagaagggcaagaucaccaaguccaucgagcucgacgcccccaacucccacuacgaggagugcuccugcuaccccgacaccggcaccgucaugugcgucugccgcgacaacuggcacggcuccaaccgccccugggucuccuucaaccagaaccucgacuaccagaucggcuacaucugcuccggcgucuucggcgacaacccccgccccaaggacggcaagggcuccugcgaccccgucaccgucgacggcgccgacggcgucaagggcuucuccuaccgcuacggcaacggcgucuggaucggccgcaccaaguccaacuccucccgcaagggcuucgagaugaucugggaccccaacggcuggaccgacaccgacuccaacuuccucgucaagcaggacgucgucgccaugaccgacugguccggcuacuccggcuccuucguccagcaccccgagcucaccggccucgacugcaugcgccccugcuucugggucgagcucauccgcggccgcccccgcgagaagaccaccaucuggaccuccggcuccuccaucuccuucugcggcgucaacuccgacaccgccaacugguccuggcccgacggcgccgagcuccccuucaccaucgacaaguga

SEQ ID NO: 111096 - RNA, 1413 nt, Artificial Sequence; identical to SEQ ID NO: 111095
  derived and/or modified CDS sequence (opt2) from neuraminidase__InfluenzaA__ABF47784

SEQ ID NO: 111097 - RNA, 1413 nt, Artificial Sequence; identical to SEQ ID NO: 111095
  derived and/or modified CDS sequence (opt2) from neuraminidase__InfluenzaA__ABF47795

SEQ ID NO: 111098 - RNA, 1413 nt, Artificial Sequence; identical to SEQ ID NO: 111095
  derived and/or modified CDS sequence (opt2) from neuraminidase__InfluenzaA__ABF47806

SEQ ID NO: 111099 - RNA, 1413 nt, Artificial Sequence; identical to SEQ ID NO: 111095
  derived and/or modified CDS sequence (opt2) from neuraminidase__InfluenzaA__ABF47817

SEQ ID NO: 111100 - RNA, 1413 nt, Artificial Sequence; identical to SEQ ID NO: 111095
  derived and/or modified CDS sequence (opt2) from neuraminidase__InfluenzaA__ABF47839

SEQ ID NO: 111101 - RNA, 1413 nt, Artificial Sequence; identical to SEQ ID NO: 111095
  derived and/or modified CDS sequence (opt2) from neuraminidase__InfluenzaA__ABF47850

SEQ ID NO: 111102 - RNA, 1413 nt, Artificial Sequence; identical to SEQ ID NO: 110864
  derived and/or modified CDS sequence (opt2) from neuraminidase__InfluenzaA__ABF47872

SEQ ID NO: 111103 - RNA, 1413 nt, Artificial Sequence; identical to SEQ ID NO: 110864
  derived and/or modified CDS sequence (opt2) from neuraminidase__InfluenzaA__ABF47883

SEQ ID NO: 111104 - RNA, 1413 nt, Artificial Sequence; identical to SEQ ID NO: 110864
  derived and/or modified CDS sequence (opt2) from neuraminidase__InfluenzaA__ABF47894

SEQ ID NO: 111105 - RNA, 1410 nt, Artificial Sequence; identical to SEQ ID NO: 110880
  derived and/or modified CDS sequence (opt2) from neuraminidase__InfluenzaA__ABF47905

SEQ ID NO: 111106 - RNA, 1362 nt, Artificial Sequence
  derived and/or modified CDS sequence (opt2) from neuraminidase__InfluenzaA__ABF47958
augaaccccaaccagaagaucaucaccaucggcuccaucugcauggucgucggcaucaucucccucauccuccagaucggcaacaucaucuccaucuggaucucccacuccauccagaccggcaaccagaaccacaccggcaucugcaaccagggcuccaucaccuacaaggucgucgccggccaggacuccaccuccgucauccucaccggcaacuccucccucugccccauccgcggcugggccauccacuccaaggacaacggcauccgcaucggcuccaagggcgacgucuucgucauccgcgagcccuucaucuccugcucccaccucgagugccgcaccuucuuccucacccagggcgcccuccucaacgacaagcacucccgcggcaccuucaaggaccgcucccccuaccgcgcccucauguccugccccgucggcgaggcccccucccccuacaacucccgcuucgaguccgucgccugguccgccuccgccugccacgacggcaugggcuggcucaccaucggcaucuccggccccgacgacggcgccgucgccguccucaaguacaacggcaucaucaccgagaccaucaaguccuggcgcaagaacauccuccgcacccaggaguccgagugcaccugcgucaacggcuccugcuucaccaucaugaccgacggccccuccgacggccucgccuccuacaagaucuucaagaucgagaagggcaaggucaccaaguccaucgagcucaacgcccccaacucccacuacgaggagugcuccugcuaccccgacaccggcaaggucaugugcgucugccgcgacaacuggcacggcuccaaccgccccugggucuccuucgaccagaaccucgacuacaagaucggcuacaucugcuccggcgucuucggcgacaacccccgccccaaggacggcaccggcuccugcggccccgucuccgccgacggcgccaacggcgucaagggcuucuccuacaaguacggcaacggcgucuggaucggccgcaccaaguccgacuccucccgccacggcuucgagaugaucugggaccccaacggcuggaccgagaccgacucccgcuucuccaugcgccaggacgucgucgccaugaccgaccgcuccggcuacuccggcuccuucguccagcaccccgagcucaccggccucgacugcaugcgccccugcuucugggucgagcucauccgcggccuccccgaggaggacgccaucuggaccuccggcuccaucaucuccuucugcggcgucaacuccgacaccgucgacugguccuggcccgacggcgccgagcuccccuucaccaucgacaaguga

SEQ ID NO: 111107 - RNA, 1350 nt, Artificial Sequence
  derived and/or modified CDS sequence (opt2) from neuraminidase__InfluenzaA__ABF56651
augaaccccaaccagaagaucaucaccaucggcuccaucugcauggucaccggcaucgucucccucaugcuccaggucggcaacaugaucuccaucugggucucccacuccauccacaccggcucccagcaccaggccgagcccaucuccaacaccaacuuccucaccgagaaggccgucgccuccgucaagcucgccggcaacuccucccucugccccaucaacggcugggccgucuacuccaaggacaacuccauccgcaucggcuccaagggcgacgucuucgucauccgcgagcccuucaucuccugcucccaccucgagugccgcaccuucuuccucacccagggcgcccuccucaacgacaagcacuccaacggcaccgucaaggaccgcuccccccaccgcacccucauguccugccccgucggcgaggcccccucccccuacaacucccgcuucgaguccgucgccugguccgccuccgccugccacgacggcaccuccuggcucaccaucggcaucuccggccccgacaacggcgccgucgccguccucaaguacaacggcaucaucaccgacaccaucaaguccuggcgcaacaacauccuccgcacccaggaguccgagugcgccugcgucaacggcuccugcuucaccgucaugaccgacggccccuccaacggccaggccucccacaagaucuucaagauggagaagggcaaggucgucaaguccgucgagcucgacgcccccaacuaccacuacgaggagugcuccugcuaccccgacgccggcgagaucaccugcgucugccgcgacaacuggcacggcuccaaccgccccugggucuccuucaaccagaaccucgaguaccagaucggcuacaucugcuccggcgucuucggcgacaacccccgccccaacgacggcaccggcuccugcggccccgucuccuccaacggcgccuacggcgucaagggcuucuccuucaaguacggcaacggcgucuggaucggccgcaccaaguccaccaacucccgcuccggcuucgagaugaucugggaccccaacggcuggaccgagaccgacuccuccuucuccgucaagcaggacaucgucgccaucaccgacugguccggcuacuccggcuccuucguccagcaccccgagcucaccggccucgacugcauccgccccugcuucugggucgagcucauccgcggccgccccaaggaguccaccaucuggaccuccggcuccuccaucuccuucugcggcgucaacuccgacaccgucggcugguccuggcccgacggcgccgagcuccccuucaccaucgacaaguga

SEQ ID NO: 111108 - RNA, 1410 nt, Artificial Sequence; identical to SEQ ID NO: 110863
  derived and/or modified CDS sequence (opt2) from neuraminidase__InfluenzaA__ABF82654

SEQ ID NO: 111109 - RNA, 1413 nt, Artificial Sequence; identical to SEQ ID NO: 110432
  derived and/or modified CDS sequence (opt2) from neuraminidase__InfluenzaA__ABF82665

SEQ ID NO: 111110 - RNA, 1413 nt, Artificial Sequence; identical to SEQ ID NO: 110432
  derived and/or modified CDS sequence (opt2) from neuraminidase__InfluenzaA__ABF82676

SEQ ID NO: 111111 - RNA, 1413 nt, Artificial Sequence
  derived and/or modified CDS sequence (opt2) from neuraminidase__InfluenzaA__ABF82687
augaaccccaaccagaagaucaucaccaucggcuccaucuccaucgccaucggcaucaucucccucaugcuccagaucggcaacaucaucuccaucugggccucccacuccauccagaccggcucccagaaccacaccggcgucugcaaccagcgcaucaucaccuacgagaacuccaccugggucaaccacaccuacgucaacaucaacaacaccaacgucaucgccggcaaggacaagaccuccgucacccucgccggcaacuccucccucugcuccaucuccggcugggccaucuacaccaaggacaacuccauccgcaucggcuccaagggcgacgucuucgucauccgcgagcccuucaucuccugcucccaccucgagugccgcaccuucuuccucacccagggcgcccuccucaacgacaagcacuccaacggcaccgucaaggaccgcucccccuaccgcgcccucauguccugcccccucggcgaggcccccucccccuacaacuccaaguucgaguccgucgccugguccgccuccgccugccacgacggcaugggcuggcucaccaucggcaucuccggccccgacaacggcgccgucgccguccucaaguacaacggcaucaucaccgagaccaucaaguccuggaagaagcagauccuccgcacccaggaguccgagugcgucugcgucaacggcuccugcuucaccaucaugaccgacggccccuccaacggcgccgccuccuacaagaucuucaagaucgagaagggcaagaccaccaaguccaucgagcucaacgcccccaacuuccacuacgaggagugcuccugcuaccccgacaccggcaccgucaugugcgucugccgcgacaacuggcacggcuccaaccgccccugggucuccuucaaccagaaccucgacuaccagaucggcuacaucugcuccggcgucuucggcgacaacccccgccccaaggacggcgagggcuccugcaaccccgucaccgucgacggcgccaacggcgucaagggcuucuccuacaaguacggcaacggcgucuggaucggccgcaccaaguccaaccgccuccgcaagggcuucgagaugaucugggaccccaacggcuggaccgacaccgacuccgacuucuccgucaagcaggacgucgucgccaucaccgacugguccggcuacuccggcuccuucguccagcaccccgagcucaccggccucaacugcauccgccccugcuucugggucgagcucguccgcggccuccccaaggagaacaccaccaucuggaccuccggcuccuccaucuccuucugcggcgucaacuccgacaccgccaacugguccuggcccgacggcgccgagcuccccuucaccaucgacaaguga

SEQ ID NO: 111112 - RNA, 1410 nt, Artificial Sequence
  derived and/or modified CDS sequence (opt2) from neuraminidase__InfluenzaA__ABF82698
augaaccccaaccagaagaucaucaccaucggcuccgucucccucaccaucaccaccaucugcuuccucaugcagaucgccauccucgucaucaccgucacccuccacuucaagcagugcgagugcaacuccccccccaacaaccaggucaugcucugcgagcccaccaucaucgagcgcaacaucaccgagaucgucuaccucaccaacaccaccaucgagaaggagaucugccccaagcucgccgaguaccgcaacugguccaagccccagugcaagaucaccggcuucgcccccuucuccaaggacaacuccauccgccucuccgccggcggcgacaucugggucacccgcgagcccuacgucuccugcgaccccggcaagugcuaccaguucgcccucggccagggcaccacccucaacaaccgccacuccaacgacaccguccacgaccgcacccccuaccgcacccuccucaugaacgagcucggcguccccuuccaccucggcaccaagcaggucugcaucgccugguccuccuccuccugccacgacggcaaggccuggcuccacgucugcgucaccggccacaacgagaacgccaccgccuccuucaucuacgacggccgccucgucgacuccaucggcuccugguccaagaacauccuccgcacccaggaguccgagugcgucugcaucaacggcaccugcaccgucgucaugaccgacggcuccgccuccggccgcgccgacaccaagauccucuucaucgaggagggcaagaucguccacaucuccccccucuccggcuccgcccagcacgucgaggagugcuccugcuacccccgcuaccccggcguccgcugcgucugccgcgacaacuggaagggcuccaaccgccccaucgucgacaucaacgucaaggacuacuccaucgucuccuccuacgucugcuccggccucgucggcgacaccccccgcaagaacgacuccuccuccuccuccuacugccucgaccccaacaacgaggagggcggccacggcgucaagggcugggccuucgacgacggcaacgacgucuggaugggccgcaccaucuccgagaagcuccgcuccggcuacgagaccuucaaggucaucggcggcugguccaagcccaacuccaagcuccagaucaaccgccaggucaucgucgacaagggcaaccgcuccggcuacuccggcaucuucuccgucgagggcaaguccugcaccaaccgcugcuucuacgucgagcucauccgcggccgcaagcaggagaccgaggucugguggaccuccaacuccaucgucgucuucugcggcaccuccggcaccuacggcaccggcuccuggcccgacggcgccgacaucaaccucaugcccaucuga

SEQ ID NO: 111113 - RNA, 1410 nt, Artificial Sequence; identical to SEQ ID NO: 110162
  derived and/or modified CDS sequence (opt2) from neuraminidase__InfluenzaA__ABF82709

SEQ ID NO: 111114 - RNA, 1413 nt, Artificial Sequence; identical to SEQ ID NO: 110451
  derived and/or modified CDS sequence (opt2) from neuraminidase__InfluenzaA__ABF82822

SEQ ID NO: 111115 - RNA, 1413 nt, Artificial Sequence; identical to SEQ ID NO: 110432
  derived and/or modified CDS sequence (opt2) from neuraminidase__InfluenzaA__ABF82833

SEQ ID NO: 111116 - RNA, 1413 nt, Artificial Sequence; identical to SEQ ID NO: 110432
  derived and/or modified CDS sequence (opt2) from neuraminidase__InfluenzaA__ABF82844

SEQ ID NO: 111117 - RNA, 1413 nt, Artificial Sequence
  derived and/or modified CDS sequence (opt2) from neuraminidase__InfluenzaA__ABF82855
augaaccccaaccagaagaucaucaccaucggcuccaucuccaucgccaucggcaucaucucccucaugcuccagaucggcaacaucaucuccaucugggccucccacuccauccagaucggcucccagaaccacaccggcgucugcaaccagcgcaucaucaccuacgagaacuccaccugggucaaccacaccuacgucaacaucaacaacaccaacgucaucgccggcaaggacaagaccuccgucacccucgccggcaacuccucccucugcuccaucuccggcugggccaucuacaccaaggacaacuccauccgcaucggcuccaagggcgacgucuucgucauccgcgagcccuucaucuccugcucccaccucgagugccgcaccuucuuccucacccagggcgcccuccucaacgacaagcacuccaacggcaccgucaaggaccgcucccccuaccgcgcccucauguccugcccccucggcgaggcccccucccccuacaacuccaaguucgaguccgucgccugguccgccuccgccugccacgacggcaugggcuggcucaccaucggcaucuccggccccgacaacggcgccgucgccguccucaaguacaacggcaucaucaccgagaccaucaaguccuggaagaagcagauccuccgcacccaggaguccgagugcgucugcgucaacggcuccugcuucaccaucaugaccgacggccccuccaacggcgccgccuccuacaagaucuucaagaucgagaagggcaaggucaccaaguccaucgagcucaacgcccccaacuuccacuacgaggagugcuccugcuaccccgacaccggcaccgucaugugcgucugccgcgacaacuggcacggcuccaaccgccccugggucuccuucaaccagaaccucgacuaccagaucggcuacaucugcuccggcgucuucggcgacaacccccgccccaaggacggcgagggcuccugcaaccccgucaccgucgacggcgccaacggcgucaagggcuucuccuacaaguacggcaacggcgucuggaucggccgcaccaaguccaaccgccuccgcaagggcuucgagaugaucugggaccccaacggcuggaccgacaccgacuccgacuucuccgucaagcaggacgucgucgccaucaccgacugguccggcuacuccggcuccuucguccagcaccccgagcucaccggccucgacugcauccgccccugcuucugggucgagcucguccgcggccuccccaaggagaacaccaccaucuggaccuccggcuccuccaucuccuucugcggcgucaacuccgacaccgccaacugguccuggcccgacggcgccgagcuccccuucaccaucgacaaguga

SEQ ID NO: 111118 - RNA, 1413 nt, Artificial Sequence; identical to SEQ ID NO: 110432
  derived and/or modified CDS sequence (opt2) from neuraminidase__InfluenzaA__ABF82866

SEQ ID NO: 111119 - RNA, 1413 nt, Artificial Sequence; identical to SEQ ID NO: 110966
  derived and/or modified CDS sequence (opt2) from neuraminidase__InfluenzaA__ABF82888

SEQ ID NO: 111120 - RNA, 1413 nt, Artificial Sequence; identical to SEQ ID NO: 110432
  derived and/or modified CDS sequence (opt2) from neuraminidase__InfluenzaA__ABF82910

SEQ ID NO: 111121 - RNA, 1413 nt, Artificial Sequence; identical to SEQ ID NO: 110432
  derived and/or modified CDS sequence (opt2) from neuraminidase__InfluenzaA__ABF82921

SEQ ID NO: 111122 - RNA, 1413 nt, Artificial Sequence; identical to SEQ ID NO: 110432
  derived and/or modified CDS sequence (opt2) from neuraminidase__InfluenzaA__ABF82932

SEQ ID NO: 111123 - RNA, 1413 nt, Artificial Sequence; identical to SEQ ID NO: 110432
  derived and/or modified CDS sequence (opt2) from neuraminidase__InfluenzaA__ABF82943

SEQ ID NO: 111124 - RNA, 1350 nt, Artificial Sequence
  derived and/or modified CDS sequence (opt2) from neuraminidase__InfluenzaA__ABG20474
augaaccccaaccagaagaucaucaccaucggcuccaucugcauggucaucggcaucgucucccucaugcuccagaucggcaacaugaucuccaucugggucucccacuccauccagaccggcaaccagcgccaggccgagcccaucuccaacaccaaguuccucaccgagaaggccgucgccuccgucacccucgccggcaacuccucccucugccccaucuccggcugggccgucuacuccaaggacaacuccauccgcaucggcucccgcggcgacgucuucgucauccgcgagcccuucaucuccugcucccaccucgagugccgcaccuucuuccucacccagggcgcccuccucaacgacaagcacuccaacggcaccgucaaggaccgcucccccuaccgcacccucauguccugccccgucggcgaggcccccucccccuacaacucccgcuucgaguccgucgccugguccgccuccgccugccacgacggcaccuccuggcucaccaucggcaucuccggccccgacaacggcgccgucgccguccucaaguacaacggcaucaucaccgacaccaucaaguccuggcgcaacaacguccuccgcacccaggaguccgagugcgccugcgucaacggcuccugcuucaccgucaugaccgacggccccuccaacggccaggccuccuacaagaucuucaagauggagaagggcaaggucgucaaguccgucgagcucgacgcccccaacuaccacuacgaggagugcuccugcuaccccgacgccggcgagaucaccugcgucugccgcgacaacuggcacggcuccaaccgccccugggucuccuucaaccagaaccucgaguaccagaucggcuacaucugcuccggcgucuucggcgacaacccccgccccaacgacggcaccggcuccugcggccccgucucccccaacggcgccuacggcgucaagggcuucuccuucaaguacggcaacggcgucuggaucggccgcaccaaguccaccaacucccgcuccggcuucgagaugaucugggaccccaacggcuggaccggcaccgacuccaacuucuccgucaagcaggacaucgucgccaucaccgacugguccggcuacuccggcuccuucguccagcaccccgagcucaccggccucgacugcauccgccccugcuucugggucgagcucauccgcggccgccccaaggaguccaccaucuggaccuccggcuccuccaucuucuucugcggcgucaacuccgacaccgucuccugguccuggcccgacggcgccgagcuccccuucaccaucgacaaguga

SEQ ID NO: 111125 - RNA, 1410 nt, Artificial Sequence; identical to SEQ ID NO: 110162
  derived and/or modified CDS sequence (opt2) from neuraminidase__InfluenzaA__ABG26761

SEQ ID NO: 111126 - RNA, 1410 nt, Artificial Sequence
  derived and/or modified CDS sequence (opt2) from neuraminidase__InfluenzaA__ABG26772
augaaccccaaccagaagaucaucaccaucggcuccgucucccucaccaucgccaccaucugcuuccucaugcagaucgccauccucgucaccaccgucacccuccacuucaagcaguacgagugcaacuccccccccaacaaccaggucaugcucugcgagcccaccaucaucgagcgcaacaucaccgagaucgucuaccucaccaacaccaccaucgagaaggagaucugccccaagcucgccgaguaccgcaacugguccaagccccagugcaagaucaccggcuucgcccccuucuccaaggacaacuccauccgccucuccgccggcggcgacaucugggucacccgcgagcccuacgucuccugcgaccccgacaagugcuaccaguucgcccucggccagggcaccacccucaacaaccgccacuccaacgacaccguccacgaccgcacccccuaccgcacccuccucaugaacgagcucggcguccccuuccaccucggcaccaagcaggucugcaucgccugguccuccuccuccugccacgacggcaaggccuggcuccacgucugcgucaccggccacgacgagaacgccaccgccuccuucaucuacgacggccgccucgucgacuccaucggcuccugguccaagaagauccuccgcacccaggaguccgagugcgucugcaucaacggcaccugcaccgucgucaugaccgacggcuccgccuccggccgcgccgacaccaagauccucuucaucaaggagggcaagaucguccacaucuccccccucuccggcuccgcccagcacgucgaggagugcuccugcuacccccgcuaccccggcguccgcugcgucugccgcgacaacuggaagggcuccaaccgccccaucgucgacaucaacgucaaggacuacuccaucgucuccuccuacgucugcuccggccucgucggcgacaccccccgcaagaacgacuccuccuccuccucccacugccucaaccccaacaacgaggagggcggccacggcgucaagggcugggccuucgacgacggcaacgacgucuggaugggccgcaccaucuccgagaagcuccgcuccggcuacgagaccuucaaggucaucgagggcugguccaagcccaacuccaagcuccagaucaaccgccaggucaucgucgaccgcggcaaccgcuccggcuacuccggcaucuucuccgucgagggcaaguccugcaucaaccgcugcuucuacgucgagcucauccgcggccgcaagcaggagaccgaggucugguggaccuccaacuccaucgucgucuucugcggcaccuccggcaccuacggcaccggcuccuggcccgacggcgccgacaucaaccucaugcccaucuga

SEQ ID NO: 111127 - RNA, 1413 nt, Artificial Sequence
  derived and/or modified CDS sequence (opt2) from neuraminidase__InfluenzaA__ABG26783
augaaccccaaccagaagaucaucaccaucggcuccaucuccaucgccaucggcaucaucucccucauccuccagaucggcaacaucaucuccaucugggccucccacuccauccagaccggcucccagaaccacaccggcaucugcaaccagcgcaucaucaccuacgagaacuccaccugggucaaccagaccuacgucaacaucaacaacaccaacgucgucgccggcaaggacaagaccuccaugacccucgccggcaacuccucccucugccccauccgcggcugggccaucuacaccaaggacaacuccauccgcaucggcuccaagggcgacgucuucgucauccgcgagcccuucaucuccugcucccaccucgagugccgcaccuucuuccucacccagggcgcccuccucaacgacaagcacuccaacggcaccgucaaggaccgcucccccuaccgcgcccucauguccugcccccucggcgaggcccccucccccuacaacucccgcuucgaguccgucgccugguccgccuccgccugccacgacggccucggcuggcucaccaucggcaucuccggccccgacaacggcgccgucgccguccucaaguacaacggcaucaucaccgagaccaucaaguccuggaagaagcgcauccuccgcacccaggaguccgagugcgucugcaugaacggcuccugcuucaccaucaugaccgacggccccuccaacggcgccgccuccuaccgcaucuucaagaucgagaagggccgcgucaccaaguccaucgagcucgacgcccccaacuaccacuacgaggagugcuccugcuaccccaacaccggcaccgucaugugcgucugccgcgacaacuggcacggcuccaaccgccccugggucuccuucaaccagaaccucgacuaccagaucggcuacaucugcuccggcgucuucggcgacaacccccgccccaaggacggcgagggcuccugcaaccccgucaccgucgacggcgccgacggcgucaagggcuucuccuaccgcuacggcaacggcgucuggaucggccgcaccaaguccaaccgccuccgcaagggcuucgagaugaucugggaccccaacggcuggaccgacaccgacuccgacuucuccaugaagcaggacaucgucgccaugaccgacugguccggcuacuccggcuccuucguccagcaccccgagcucaccggccucgacugcauccgccccugcuucugggucgagcucguccgcggccucccccgcgagaacaccaccaucuggaccuccggcuccuccaucuccuucugcggcgucaacuccgacaccgccaacugguccuggcccgacggcgccgagcuccccuucaccaucgacaaguga

SEQ ID NO: 111128 - RNA, 1413 nt, Artificial Sequence; identical to SEQ ID NO: 111004
  derived and/or modified CDS sequence (opt2) from neuraminidase__InfluenzaA__ABG26794

SEQ ID NO: 111129 - RNA, 1410 nt, Artificial Sequence
  derived and/or modified CDS sequence (opt2) from neuraminidase__InfluenzaA__ABG26805
augaaccccaaccagaagaucaucaccaucggcuccgucucccucaccaucgccaccaucugcuuccucacccagaucgccauccucgucaccaccgucacccuccacuucaagcaguacgagugcuccuccccccccaacaaccaggucaugcccugcgagcccaucaucaucgagcgcaacaucaccgagaucgucuaccucaccaacaccaccaucgagaaggagaucugccccaagcucgucgaguaccgcaacugguccaagccccagugcaagaucaccggcuucgcccccuucuccaaggacaacuccauccgccucuccgccggcggcgacaucugggucacccgcgagcccuacgucuccugcgaccccggcaagugcuaccaguucgcccucggccagggcaccacccucaacaacaagcacuccaacgacaccauccacgaccgcacccccuaccgcacccuccucaugaacgagcucggcguccccuuccaccucggcaccaagcaggucugcaucgccugguccuccuccuccugccacgacggcaaggccuggcuccacgucugcaucaccggccacgacaagaacgccaccgccuccuucaucuacgacggccgccucgucgacuccaucggcuccugguccaagaacauccuccgcacccaggaguccgagugcgucugcaucaacggcaccugcaccgucgucaugaccgacggcuccgccuccgagcgcgccgacaccaagauccucuucaucgaggagggcaagaucguccacaucuccccccucuccggcuccgcccagcacgucgaggagugcuccugcuacccccgcuaccccggcguccgcugcgucugccgcgacaacuggaagggcuccaaccgccccaucgucgacaucaacgucaaggacuacuccaucgucuccuccuacgucugcuccggccucgucggcgacaccccccgcaagaacgaccgcuccuccuccuccuacugccgcaaccccaacaacgagaagggcaaccacggcgucaagggcugggccuucgacgacggcaacgacgucuggaugggccgcaccaucggcgaggagcuccgcuccggcuacgagaccuucaaggucaucggcggcugguccacccccaacuccaagcuccagaucaaccgccagaucaucgucgacuccggcaaccgcuccggcuacuccggcaucuucuccgucgagggcaaguccugcaucaaccgcugcuucuacgucgagcucauccgcggccgcgagcaggagacccgcgucugguggaccuccaacuccaucgucgucuucugcggcaccuccggcaccuacggcaccggcuccuggcccgacggcgccgacaucaaccucaugcccaucuga

SEQ ID NO: 111130 - RNA, 1413 nt, Artificial Sequence; identical to SEQ ID NO: 110987
  derived and/or modified CDS sequence (opt2) from neuraminidase__InfluenzaA__ABG26816

SEQ ID NO: 111131 - RNA, 1413 nt, Artificial Sequence; identical to SEQ ID NO: 111095
  derived and/or modified CDS sequence (opt2) from neuraminidase__InfluenzaA__ABG26827

SEQ ID NO: 111132 - RNA, 1413 nt, Artificial Sequence; identical to SEQ ID NO: 111095
  derived and/or modified CDS sequence (opt2) from neuraminidase__InfluenzaA__ABG26838

SEQ ID NO: 111133 - RNA, 1410 nt, Artificial Sequence
  derived and/or modified CDS sequence (opt2) from neuraminidase__InfluenzaA__ABG26860
augaaccccaaccagaagaucaucaccaucggcuccgucucccucaccaucgccaccaucugcuuccucaugcagaucgccauccucgucaccaccgucacccuccacuucaagcaguacgagugcaacuccccccccaacaaccaggucaugcucugcgagcccaccaucaucgagcgcaacaucaccgagaucgucuaccucaccaacaccaccaucgagaaggagaucugccccaagcucgccgaguaccgcaacugguccaagccccagugcaagaucaccggcuucgcccccuucuccaaggacaacuccauccgccucuccgccggcggcgacaucugggucacccgcgagcccuacgucuccugcgaccccggcaagugcuaccaguucgcccucggccagggcaccacccucaacaaccgccacuccaacgacaccguccacgaccgcacccccuaccgcacccuccucaugaacgagcucggcguccccuuccaccucggcaccaagcaggucugcaucgccugguccuccuccuccugccacgacggcaaggccuggcuccacgucugcgucaccggccacgacgagaacgccaccgccuccuucaucuacgacggccgccucgucgacuccaucggcuccugguccaagaacauccuccgcacccaggaguccgagugcgucugcaucaacggcaccugcaccgucgucaugaccgacggcuccgccuccgaccgcgccgacaccaagauccucuucaucgaggagggcaagaucguccacaucuccccccucuccggcuccgcccagcacgucgaggagugcuccugcuacccccgcuaccccggcguccgcugcgucugccgcgacaacuggaagggcuccaaccgccccaucaucgacaucaacgucaaggacuacuccaucgucuccuccuacgucugcuccggccucgucggcgacaccccccgcaagaacgacuccuccuccuccuccuacugcuggaaccccaacaacgagaagggcggccacggcgucaagggcugggccuucgacgacggcaacgacgucuggaugggccgcaccaucuccgaggagucccgcuccggcuacgagaccuucaaggucaucggcggcugguccaagcccaacuccaagcuccagaucaaccgccaggucaucgucgaccgcggcaaccgcuccggcuacuccggcaucuucuccgucgagggcaaguccugcaucaaccgcugcuucuacgucgagcucauccgcggccgcaagcaggagaccgaggucugguggaccuccaacuccaucgucgucuucugcggcaccuccggcaccuacggcaccggcuccuggcccgacggcgccgacaucaaccucaugcccaucuga

SEQ ID NO: 111134 - RNA, 1410 nt, Artificial Sequence
  derived and/or modified CDS sequence (opt2) from neuraminidase__InfluenzaA__ABG26871
augaaccccaaccagaagaucaucaccaucggcuccgucucccucaccaucgccaccaucugcuuccucaugcagaucgccauccucgucaccaccgucacccuccacuucaagcaguacgagugcaacuccccccccuacaaccagaucaugcucugcgagcccaccaucaucgagcgcaacaucaccgagaucgucuaccucaccaacaccaccaucgagaaggagaucugccccaagcucgccgaguaccgcaacugguccaagccccagugcaagaucaccggcuucgcccccuucuccaaggacaacuccauccgccucuccgccggcggcgacaucugggucacccgcgagcccuacgucuccugcgaccccggcaagugcuaccaguucgcccucggccagggcaccacccucaacaaccgccacuccaacgacaccguccacgaccgcacccccuaccgcacccuccucaugaacgagcucggcguccccuuccaccucggcaccaagcaggucugcaucgccugguccuccuccuccugccacgacggcaaggccuggcuccacgucugcgucaccggccacgacgagaacgccaccgccuccuucaucuacgacggccgccucgucgacuccaucggcuccugguccaagaacauccuccgcacccaggaguccgagugcgucugcaucaacggcaccugcaccgucgucaugaccgacggcuccgccuccgaccgcgccgacaccaagauccucuucaucgaggagggcaagaucguccacaucuccccccucuccggcuccgcccagcacgucgaggagugcuccugcuacccccgcuaccccggcguccgcugcgucugccgcgacaacuggaagggcuccaaccgccccaucgucgacaucaacgucaaggacuacuccaucgucuccuccuacgucugcuccggccucgucggcgacaccccccgcaagaacgacuccuccuccuccuccuacugcuggaaccccaacaacgagaagggcggccacggcgucaagggcugggccuucgacgacggcaacgacgucuggaugggccgcaccaucuccgaggagucccgcuccggcuacgagaccuucaaggucaucggcggcugguccaagcccaacuccaagcuccagaucaaccgccaggucaucgucgaccgcggcaaccgcuccggcuacuccggcaucuucuccgucgagggcaaguccugcaucaaccgcugcuucuacgucgagcucauccgcggccgcaagcaggagaccgaggucugguggaccuccaacuccaucgucgucuucugcggcaccuccggcaccuacggcaccggcuccuggcccgacggcgccgacaucaaccucaugcccaucuga

SEQ ID NO: 111135 - RNA, 1410 nt, Artificial Sequence
  derived and/or modified CDS sequence (opt2) from neuraminidase__InfluenzaA__ABG26893
augaaccccaaccagaagaucaucaccaucggcuccaucucccucaccaucgccaccaucugcuuccucaugcagaucgccauccucgucaccaccgucacccuccacuucaagcaguacgagugcaacuccccccccaacaaccaggucaugcucugcgagcccaccaucaucgagcgcaacaucaccgagaucgucuaccucaccaacaccaccaucgagaaggagaucugccccaagcucgccgaguaccgcaacugguccaagccccagugcaagaucaccggcuucgcccccuucuccaaggacaacuccauccgccucuccgccggcggcgacaucugggucacccgcgagcccuacgucuccugcgaccccggcaagugcuaccaguucgcccucggccagggcaccacccucaacaaccgccacuccaacgacaccguccacgaccgcacccccuaccgcacccuccucaugaacgagcucggcguccccuuccaccucggcaccaagcaggucugcaucgccugguccuccuccuccugccacgacggcaaggccuggcuccacgucugcgucaccggccacgacgagaacgccaccgccuccuucaucuacgacggccgccucgucgacuccaucggcuccugguccaagaacauccuccgcacccaggaguccgagugcgucugcaucaacggcaccugcaccgucgucaugaccgacggcuccgccuccgaccgcgccgacaccaagauccucuucaucgaggagggcaagaucguccacaucuccccccucuccggcuccgcccagcacgucgaggagugcuccugcuacccccgcuaccccggcguccgcugcgucugccgcgacaacuggaagggcuccaaccgccccaucgucgacaucaacgucaaggacuacuccaucgucuccuccuacgucugcuccggccucgucggcgacaccccccgcaagaacgacuccuccuccuccuccuacugcuggaaccccaacaacgagaagggcggccacggcgucaagggcugggccuucgacgacggcaacgacgucuggaugggccgcaccaucuccgaggagucccgcuccggcuacgagaccuucaaggucaucggcggcugguccaagcccaacuccaagcuccagaucaaccgccaggucaucgucgaccgcggcaaccgcuccggcuacuccggcaucuucuccgucgagggcaaguccugcaucaaccgcugcuucuacgucgagcucauccgcggccgcaagcaggagaccgaggucugguggaccuccaacuccaucgucgucuucugcggcaccuccggcaccuacggcaccggcuccuggcccgacggcgccgacaucaaccucaugcccaucuga

SEQ ID NO: 111136 - RNA, 1410 nt, Artificial Sequence
  derived and/or modified CDS sequence (opt2) from neuraminidase__InfluenzaA__ABG26915
augaaccccaaccagaagaucaucaccaucggcuccgucucccucaccaucgccaccaucugcuuccucaugcagaucgccauccucgucaccaccgucacccuccacuucaagcaguacgagugcaacuccccccccaacaaccaggucaugcucugcgagcccaccaucaucgagcgcaacaucaccgagaucgucuaccucaccaacaccaccaucgagaaggagaucugccccaagcucgccgaguaccgcaacugguccaagccccagugcaagaucaccggcuucgcccccuucuccaaggacaacuccauccgccucuccgccggcggcgacaucugggucacccgcgagcccuacgucuccugcgaccccggcaagugcuaccaguucgcccucggccagggcaccacccucaacaaccgccacuccaacgacaccguccacgaccgcacccccuaccgcacccuccucaugaacgagcucggcguccccuuccaccucggcaccaagcaggucugcaucgccugguccuccuccuccugccacgacggcaaggccuggcuccacgucugcgucaccggccacgacgagaacgccaccgccuccuucaucuacgacggccgccucgucgacuccaucuccuccugguccaagaacauccuccgcacccaggaguccgagugcgucugcaucaacggcaccugcaccgucgucaugaccgacggcuccgccuccgagcgcgccgacaccaagauccucuucaucgaggagggcaagaucguccacaucuccccccucuccggcuccgcccagcacgucgaggagugcuccugcuacccccgcuaccccggcguccgcugcgucugccgcgacaacuggaagggcuccaaccgccccaucgucgacaucaacgucaaggacuacuccaucgucuccuccuacgucugcuccggccucgucggcgacaccccccgcaagaacgacuccuccuccuccuccuacugccucaaccccaacaacgaggagggcggccacggcgucaagggcugggccuucgacgacggcaacgacgucuggaugggccgcaccaucuccgagaagcuccgcuccggcuacgagaccuucaaggucaucggcggcugguccaagcccaacuccaagcuccagaucaaccgccaggucaucgucgaccgcggcaaccgcuccggcuacuccggcaucuucuccgucgagggcaaguccugcgucaaccgcugcuucuacgucgagcucauccgcggccgcaagcaggagaccgaggucugguggaccuccaacuccaucgucgucuucugcggcaccuccggcaccuacggcaccggcuccuggcccgacggcgccgacaucaaccucaugcccaucuga

SEQ ID NO: 111137 - RNA, 1410 nt, Artificial Sequence
  derived and/or modified CDS sequence (opt2) from neuraminidase__InfluenzaA__ABG26937
augaaccccaaccagaagaucaucaccaucggcuccgucucccucaccaucgccaccaucugcuuccucaugcagaucgccauccucgucaccaccgucacccuccacuucaagcaguacgagugcaacuccccccccuccaaccaggucaugcucugcgagcccaccaucaucgagcgcaacaucaccgagaucgucuaccucaccaacaccaccaucgagaaggagaucugccccaagcucgccgaguaccgcaacugguccaagccccagugcaagaucaccggcuucgcccccuucuccaaggacaacuccauccgccucuccgccggcggcgacaucugggucacccgcgagcccuacgucuccugcgaccccggcaagugcuaccaguucgcccucggccagggcaccacccucaacaaccgccacuccaacgacaccguccacgaccgcacccccuaccgcacccuccucaugaacgagcucggcguccccuuccaccucggcaccaagcaggucugcaucgccugguccuccuccuccugccacgacggcaaggccuggcuccacgucugcgucaccggccacgacgagaacgccaccgccuccuucaucuacgacggccgccucgucgacuccaucggcuccugguccaagaacauccuccgcacccaggaguccgagugcgucugcaucaacggcaccugcaccgucgucaugaccgacggcuccgccuccgagcgcgccgacaccaagauccucuucaucgaggagggcaagaucguccacaucuccccccucuccggcuccgcccagcacgucgaggagugcuccugcuacccccgcuaccccggcguccgcugcgucugccgcgacaacuggaagggcuccaaccgccccaucgucgacaucaacgucaaggacuacuccaucgucuccuccuacgucugcuccggccucgucggcgacaccccccgcaagaacgacuccuccuccuccuccuacugccgcaaccccaacaacgagaagggcucccacggcgucaagggcugggccuucgacgacggcaacgacgucuggaugggccgcaccaucuccgaggagcuccgcuccggcuacgagaccuucaaggucaucggcggcugguccaagcccaacuccaagcuccagaucaaccgccaggucaucgucgaccgcggcaaccgcuccggcuacuccggcaucuucuccgucgagggcaaguccugcaucaaccgcugcuucuacgucgagcucauccgcggccgcaagcaggagaccgaggucugguggaccuccaacuccaucgucgucuucugcggcaccuccggcaccuacggcaccggcuccuggcccgacggcgccgacaucaaccucaugcccaucuga

SEQ ID NO: 111138 - RNA, 1413 nt, Artificial Sequence; identical to SEQ ID NO: 110432
  derived and/or modified CDS sequence (opt2) from neuraminidase__InfluenzaA__ABG26948

SEQ ID NO: 111139 - RNA, 1410 nt, Artificial Sequence; identical to SEQ ID NO: 110202
  derived and/or modified CDS sequence (opt2) from neuraminidase__InfluenzaA__ABG26959

SEQ ID NO: 111140 - RNA, 1413 nt, Artificial Sequence
  derived and/or modified CDS sequence (opt2) from neuraminidase__InfluenzaA__ABG37123
augaaccccaaccagaagaucaucaccaucggcuccaucuccaucaccaucggcaucaucucccucaugcuccagaucggcaacaucaucuccaucugggccucccacuccauccagaccggcucccagaaccacaccggcgucugcaaccagcgcaucaucaccuacgagaacuccaccugggucaaccacaccuacgucaacaucaacaacaccaacgucaucgccggcaaggacaagaccuccgucacccucgccggcaacuccucccucugcuccaucuccggcugggccaucuacaccaaggacaacuccauccgcaucggcuccaagggcgacgucuucgucauccgcgagcccuucaucuccugcucccaccucgagugccgcaccuucuuccucacccagggcgcccuccucaacgacaagcacuccaacggcaccgucaaggaccgcucccccuaccgcgcccucauguccugcccccucggcgaggcccccucccccuacaacuccaaguucgaguccgucgccugguccgccuccgccugccacgacggcaugggcuggcucaccaucggcaucuccggccccgacaacggcgccgucgccguccucaaguacaacggcaucaucaccgagaccaucaaguccuggaagaagcagauccuccgcacccaggaguccgagugcgucugcgucaacggcuccugcuucaccaucaugaccgacggccccuccaacggcgccgccuccuacaagaucuucaagaucgagaagggcaaggucaccaaguccaucgagcucaacgcccccaacuuccacuacgaggagugcuccugcuaccccgacaccggcaccgucaugugcgucugccgcgacaacuggcacggcuccaaccgccccugggucuccuucaaccagaaccucgacuaccagaucggcuacaucugcuccggcgucuucggcgacaacccccgccccaaggacggcgagggcuccugcaaccccgucaccgucgacggcgccaacggcgucaagggcuucuccuacaaguacggcaacggcgucuggaucggccgcaccaaguccaaccgccuccgcaagggcuucgagaugaucugggaccccaacggcuggaccgacaccgacuccgacuucuccgucaagcaggacgucgucgccaucaccgacugguccggcuacuccggcuccuucguccagcaccccgagcucaccggccucgacugcauccgccccugcuucugggucgagcucguccgcggccuccccaaggagaacaccaccaucuggaccuccggcuccuccaucuccuucugcggcgucaacuccgacaccgccaacugguccuggcccgacggcgccgagcuccccuucaccaucgacaaguga

SEQ ID NO: 111141 - RNA, 1410 nt, Artificial Sequence
  derived and/or modified CDS sequence (opt2) from neuraminidase__InfluenzaA__ABG37134
augaaccccaaccagaagaucaucaccaucggcuccgucucccucaccaucgccaccaucugcuuccucaugcagaucgccauccucgucaccaccgucacccuccacuucaagcaguacgagugcaacuccccccccaacaaccaggucaugcucugcgagcccaccaucaucgagcgcaacaucaccgagaucgucuaccucaccaacaccaccaucgagaaggagaucugccccaagcucgccgaguaccgcaacugguccaagccccagugcaagaucaccggcuucgcccccuucuccaaggacaacuccauccgccucuccgccggcggcgacaucugggucacccgcgagcccuacgucuccugcgaccccgacaagugcuaccaguucgcccucggccagggcaccacccucaacaaccgccacuccaacgacaccguccacgaccgcacccccuaccgcacccuccucaugaacgagcucggcguccccuuccaccucggcaccaagcaggucugcaucgccugguccuccuccuccugccacgacggcaaggccuggcuccacgucugcgucaccggccacgacgagaacgccaccgccuccuucaucuacgacggccgccucgucgacuccaucggcuccugguccaagaagauccuccgcacccaggaguccgagugcgucugcaucaacggcaccugcaccgucgucaugaccgacggcuccgccuccggccgcgccgacaccaagauccucuucaucgaggagggcaagaucguccacaucucccagcuccucggcuccgcccagcacgucgaggagugcuccugcuacccccgcuaccccggcguccgcugcgucugccgcgacaacuggaagggcuccaaccgccccaucgucgacaucaacgucaaggacuacuccaucgucuccuccuacgucugcuccggccucgucggcgacaccccccgcaagaacgacuccuccuccuccucccacugccucaaccccaacaacgaggagggcggccacggcgucaagggcugggccuucgacgacggcaacgacgucuggaugggccgcaccaucuccgagaagcuccgcuccggcuacgagaccuucaaggucaucgagggcugguccaagcccaacuccaagcuccagaucaaccgccaggucaucgucgaccgcggcaaccgcuccggcuacuccggcaucuucuccgucgagggcaaguccugcaucaaccgcugcuucuacgucgagcucauccgcggccgcaagcaggagaccgaggucugguggaccuccaacuccaucgucgucuucugcggcaccuccggcaccuacggcaccggcuccuggcccgacggcgccgacaucaaccucaugcccaucuga

SEQ ID NO: 111142 - RNA, 1410 nt, Artificial Sequence; identical to SEQ ID NO: 110162
  derived and/or modified CDS sequence (opt2) from neuraminidase__InfluenzaA__ABG37145

SEQ ID NO: 111143 - RNA, 1410 nt, Artificial Sequence
  derived and/or modified CDS sequence (opt2) from neuraminidase__InfluenzaA__ABG37156
augaaccccaaccagaagaucaucaccaucggcuccgucucccucaccaucgccaccaucugcuuccucaugcagaucgccauccucgucaccaccgucacccuccacuucaagcaguacgagugcaacuccccccccaacaaccaggucaugcucugcgagcccaccaucaucgagcgcaacaucaccgagaucgucuaccucaccaacaccaccaucgagaaggagaucugccccaagcucgccgaguaccgcaacugguccaagccccagugcaagaucaccggcuucgcccccuucuccaaggacaacuccauccgccucuccgccggcggcgacaucugggucacccgcgagcccuacgucuccugcgaccccggcaagugcuaccaguucgcccucggccagggcaccacccucaacaaccgccacuccaacgacaccguccacgaccgcacccccuaccgcacccuccucaugaacgagcucggcguccccuuccaccucggcaccaagcaggucugcaucgccugguccuccuccuccugccacgacggcaaggccuggcuccacgucugcgucaccggccacgacgagaacgccaccgccuccuucaucuacgacggccgccucgucgacuccaucggcuccugguccaagaacauccuccgcacccaggaguccgagugcgucugcaucaacggcaccugcaccgucgucaugaccgacggcuccgccuccggccgcgccgacaccaagauccucuucaucgaggagggcaagaucguccacaucuccccccucuccggcuccgcccagcacgucgaggagugcuccugcuacccccgcuaccccggcguccgcugcgucugccgcgacaacuggaagggcuccaaccgccccaucgucgacaucaacgucaaggacuacuccaucgucuccaacuacgucugcuccggccucgucggcgacaccccccgcaagaacgacuccuccuccuccucccacugccucaaccccaacaacgaggagggcggccacggcgucaagggcugggccuucgacgacggcaacgacgucuggaugggccgcaccaucuccgagaagcuccgcuccggcuacgagaccuucaaggucaucggcggcugguccaagcccaacuccaagcuccagaucaaccgccaggucaucgucgaccgcggcaaccgcuccggcuacuccggcaucuucuccgucgagggcaaguccugcaucaaccgcugcuucuacgucgagcucauccgcggccgcaagcaggagaccgaggucugguggaccuccaacuccaucgucgucuucugcggcaccuccggcaccuacggcaccggcuccuggcccgacggcgccgacaucaaccucaugcccaucuga

SEQ ID NO: 111144 - RNA, 1410 nt, Artificial Sequence
  derived and/or modified CDS sequence (opt2) from neuraminidase__InfluenzaA__ABG37167
augaaccccaaccagaagaucaucaccaucggcuccgucucccucaccaucgccaccaucugcuuccucaugcagaucgccauccucgucaccaccgucacccuccacuucaagcaguacgagugcaacuccccccccaacaaccaggucaugcucugcgagcccaccaucaucgagcgcaacaucaccgagaucgucuaccucaccaacaccaccaucgagaaggagaucugccccaagcucgccgaguaccgcaacugguccaagccccagugcaagaucaccggcuucgcccccuucuccaaggacaacuccauccgccucuccgccggcggcgacaucugggucacccgcgagcccuacgucuccugcgaccccgacaagugcuaccaguucgcccucggccagggcaccacccucaacaaccgccacuccaacgacaccguccacgaccgcacccccuaccgcacccuccucaugaacgagcucggcguccccuuccaccucggcaccaagcaggucugcaucgccugguccuccuccuccugccacgacggcaaggccuggcuccacgucugcgucaccggccacgacgagaacgccaccgccuccuucaucuacgacggccgccucgucgacuccaucuccuccugguccaagaacauccuccgcacccaggaguccgagugcgucugcaucaacggcaccugcaccgucgucaugaccgacggcuccgccuccggccgcgccgacaccaagauccucuucaucgaggagggcaagaucguccacaucuccccccucuccggcuccgcccagcacgucgaggagugcuccugcuacccccgcuaccccggcguccgcugcgucugccgcgacaacuggaagggcuccaaccgccccaucgucgacaucaacgucaaggacuacuccaucgucuccuccuacgucugcuccggccucgucggcgacaccccccgcaagaacgacuccuccuccuccuccuacugccucaaccccaacaacgaggagggcggccacggcgucaagggcugggccuucgacgacggcaacgacgucuggaugggccgcaccaucuccgagaagcuccgcuccggcuacgagaccuucaaggucaucggcggcugguccaagcccaacuccaagcuccagaucaaccgccaggucaucgucgaccgcggcaaccgcuccggcuacuccggcaucuucuccgucgagggcaaguccugcgucaaccgcugcuucuacgucgagcucauccgcggccgcaagcaggagaccgaggucugguggaccuccaacuccaucgucgucuucugcggcaccuccggcaccuacggcaccggcuccuggcccgacggcgccgacaucaaccucaugcccaucuga

SEQ ID NO: 111145 - RNA, 1410 nt, Artificial Sequence
  derived and/or modified CDS sequence (opt2) from neuraminidase__InfluenzaA__ABG37189
augaaccccaaccagaagaucaucaccaucggcuccgucucccucaccaucgccaccaucugcuuccucaugcagaucgccauccucgucaccaccgucacccuccacuucaagcaguacgagugcaacuccccccccaacaaccagguccuccucugcgagcccaccaucaucgagcgcaacaucaccgagaucgucuaccucaccaacaccaccaucgagaaggagaucugccccaagcucgccgaguaccgcaacugguccaagccccagugcaagaucaccggcuucgcccccuucuccaaggacaacuccauccgccucuccgccggcggcgacaucugggucacccgcgagcccuacgucuccugcgaccccggcaagugcuaccaguucgcccucggccagggcaccacccucaacaaccgccacuccaacgacaccguccacgaccgcacccccuaccgcacccuccucaugaacgagcucggcguccccuuccaccucggcaccaagcaggucugcaucgccugguccuccuccuccugccacgacggcaaggccuggcuccacgucugcgucaccggccacgacgagaacgccaccgccuccuucaucuacgacggccgccucgucgacuccaucggcuccugguccaagaacauccuccgcacccaggaguccgagugcgucugcaucaacggcaccugcaccgucgucaugaccgacggcuccgccuccggccgcgccgacaccaagauccucuucaucgaggagggcaagaucguccacaucuccucccucuccggcuccgcccagcacgucgaggagugcuccugcuacccccgcuaccccggcguccgcugcgucugccgcgacaacuggaagggcuccaaccgccccaucgucgacaucaacgucaaggacuacuccaucgucuccuccuacgucugcuccggccucgucggcgacaccccccgcaagaacgacuccuccuccuccucccacugccucaaccccaacaacgaggagggcggccacggcgucaagggcugggccuucgacgacggcaacgacgucuggaugggccgcaccaucuccgagaagcuccgcuccggcuacgagaccuucaaggucaucggcggcugguccaagcccaacuccaagcuccagaucaaccgccaggucaucgucgaccgcggcaaccgcuccggcuacuccggcaucuucuccgucgagggcaaguccugcaucaaccgcugcuucuacgucgagcucauccgcggccgcaagcaggagaccgaggucugguggaccuccaacuccaucgucgucuucugcggcaccuccggcaccuacggcaccggcuccuggcccgacggcgccgacaucaaccucaugcccaucuga

SEQ ID NO: 111146 - RNA, 1410 nt, Artificial Sequence
  derived and/or modified CDS sequence (opt2) from neuraminidase__InfluenzaA__ABG37200
augaaccccaaccagaagaucaucaccaucggcuccgucucccucaccaucgccaccaucugcuuccucaugcagaucgccauccucgucaccaccgucacccuccacuucaagcaguacgagugcaacuccccccccaacaaccaggucaugcucugcgagcccaccaucaucgagcgcaacaucaccgagaucgucuaccucaccaacaccaccaucgagaaggagaucugccccaagcucgccgaguaccgcaacugguccaagccccagugcaagaucaccggcuucgcccccuucuccaaggacaacuccauccgccucuccgccggcggcgacaucugggucacccgcgagcccuacgucuccugcgacuccggcaagugcuaccaguucgcccucggccagggcaccacccucaacaaccgccacuccaacgacaccguccacgaccgcacccccuaccgcacccuccucaugaacgagcucggcguccccuuccaccucggcaccaagcaggucugcaucgccugguccuccuccuccugccacgacggcaaggccuggcuccacgucugcgucaccggccacgacgagaacgccaccgccuccuucaucuacgacggccgccucgucgacuccaucggcuccugguccaagaacauccuccgcacccaggaguccgagugcgucugcaucaacggcaccugcaccgucgucaugaccgacggcuccgccuccggccgcgccgacaccaagauccucuucaucgaggagggcaagaucguccacaucuccacccucuccggcuccgcccagcacgucgaggagugcuccugcuacccccgcuaccccggcguccgcugcgucugccgcgacaacuggaagggcuccaaccgccccaucgucgacaucaacgucaaggacuacuccaucgucuccuccuacgucugcuccggccucgucggcgacaccccccgcaagaacgacuccuccuccuccucccacugccucaaccccaacaacgaggagggcggccacggcgucaagggcugggccuucgacgacggcaacgacgucuggaugggccgcaccaucuccgagaagcuccgcuccggcuacgagaccuucaaggucaucggcggcugguccaagcccaacuccaagcuccagaucaaccgccaggucaucgucgaccgcggcaaccgcuccggcuacuccggcaucuucuccgucgagggcaaguccugcaucaaccgcugcuucuacgucgagcucauccgcggccgcaagcaggagaccgaggucugguggaccuccaacuccaucgucgucuucugcggcaccuccggcaccuacggcaccggcuccuggcccgacggcgccgacaucaaccucaugcccaucuga

SEQ ID NO: 111147 - RNA, 1410 nt, Artificial Sequence
  derived and/or modified CDS sequence (opt2) from neuraminidase__InfluenzaA__ABG37211
augaaccccaaccagaagaucaucaccaucggcuccgucucccucaccaucgccaccaucugcuuccucacccagaucgccauccucgucaccaccgucacccuccacuucaagcaguacgagugcuccuccccccccaacaaccaggucaugcccugcgagcccaucaucaucgagcgcaacaucaccgagaucgucuaccucaccaacaccaccaucgagaaggagaucugccccaagcucgucgaguaccgcaacugguccaagccccagugcaagaucaccggcuucgcccccuucuccaaggacaacuccauccgccucuccgccggcggcgacaucugggucacccgcgagcccuacgucuccugcgaccccggcaagugcuaccaguucgcccucggccagggcaccacccucaacaacaagcacuccaacgacaccauccacgaccgcacccccuaccgcacccuccucaugaacgagcucggcguccccuuccaccucggcaccaagcaggucugcaucgccugguccuccuccuccugccacgacggcaaggccuggcuccacgucugcaucaccggccacgacaagaacgccaccgccuccuucaucuacgacggccgccucgucgacuccaucggcuccugguccaagaacauccuccgcacccaggaguccgagugcgucugcaucaacggcaccugcaccgucgucaugaccgacggcuccgccuccgagcgcgccgacaccaagauccucuucaucgaggagggcaagaucguccacaucuccccccucuccggcuccgcccagcacgucgaggagugcuccugcuacccccgcuaccccggcguccgcugcgucugccgcgacaacuggaagggcuccaaccgccccaucgucgacaucaacgucaaggacuacuccaucgucuccuccuacgucugcuccggccucgucggcgacaccccccgcaagaacgaccgcuccuccuccuccuacugccgcaaccccaacaacgagaagggcaaccacggcgucaagggcugggccuucgacgacggcaacgacgucuggaugggccgcaccaucggcgaggagcuccgcuccggcuacgagaccuucaaggucaucggcggcugguccacccccaacuccaagcuccagaucaaccgccaggucaucgucgacuccggcaaccgcuccggcuacuccggcaucuucuccgucgagggcaaguccugcaucaaccgcugcuucuacgucgagcucauccgcggccgcgagcaggagacccgcgucugguggaccuccaacuccaucgucgucuucugcggcaccuccggcaccuacggcaccggcuccuggcccgacggcgccgacaucaaccucaugcccaucuga

SEQ ID NO: 111148 - RNA, 1410 nt, Artificial Sequence
  derived and/or modified CDS sequence (opt2) from neuraminidase__InfluenzaA__ABG37233
augaaccccaaccagaagaucaucaccaucggcuccgucucccucaccaucgccaccaucugcuuccucaugcagaucgccauccucgucaccaccgucacccuccacuucaagcaguacgagugcaacuccccccccuccaaccaggccaugcucugcgagcccaccaucaucgagcgcaacaucaccgagaucgucuaccucaccaacaccaccaucgagaaggagaucugccccaagcucgccgaguaccgcaacugguccaagccccagugcaagaucaccggcuucgcccccuucuccaaggacaacuccauccgccucuccgccggcggcgacaucugggucacccgcgagcccuacgucuccugcgaccccggcaagugcuaccaguucgcccucggccagggcaccaccaucaacaaccgccacuccaacgacaccguccacgaccgcacccccuaccgcacccuccucaugaacgagcucggcguccccuuccaccucggcaccaagcaggucugcaucgccugguccuccuccuccugccacgacggcaaggccuggcuccacgucugcgucaccggccacgacgagaacgccaccgccuccuucaucuacgacggccgccucgucgacuccaucggcuccugguccaagaacauccuccgcacccaggaguccgagugcgucugcaucaacggcaccugcaccgucgucaugaccgacggcuccgccuccggccgcgccgacaccaagauccucuucaucgaggagggcaagaucguccacaucuccccccucuccggcuccgcccagcacgucgaggagugcuccugcuacccccgcuaccccggcguccgcugcgucugccgcgacaacuggaagggcuccaaccgccccaucgucgacaucaacgucaaggacuacuccaucgucuccuccuacgucugcuccggccucgucggcgacaccccccgcaagaacgacuccuccuccaacuccuacugccgcaaccccaacaacgagaagggcucccacggcgucaagggcugggccuucgacgacggcaacgacgucuggaugggccgcaccaucuccgccgagucccgcuccggcuacgagaccuucaaggucaucggcggcugguccaagcccaacuccaagcuccagaucaaccgccaggucaucgucgaccgcggcaaccgcuccggcuacuccggcaucuucuccgucgagggcaaguccugcaucaaccgcugcuucuacgucgagcucauccgcggccgcaagcaggagaccgaggucugguggaccuccaacuccaucgucgucuucugcggcaccuccggcaccuacggcaccggcuccuggcccgacggcgccgacaucaaccucaugcccaucuga

SEQ ID NO: 111149 - RNA, 1410 nt, Artificial Sequence
  derived and/or modified CDS sequence (opt2) from neuraminidase__InfluenzaA__ABG37244
augaaccccaaccagaagaucaucaccaucggcuccgucucccucaccaucgccaccaucugcuuccucaugcagaucgccauccucgucaccaccgucacccuccacuucaagcaguacgagugcaacuccccccccaacaaccaggucaugcucugcgagcccaccaucaucgagcgcaacaucaccgagaucgucuaccucaccaacaccaccaucgagaaggagaucugccccaagcucgccgaguaccgcaacugguccaagccccagugcaagaucaccggcuucgcccccuucuccaaggacaacuccauccgccucuccgccggcggcgacaucugggucacccgcgagcccuacgucuccugcgaccccggcaagugcuaccaguucgcccucggccagggcaccacccucaacaaccgccacuccaacgacaccguccacgaccgcacccccuaccgcacccuccucaugaacgagcucggcguccccuuccaccucggcaccaagcaggucugcaucgccugguccuccuccuccugccacgacggcaaggccuggcuccacgucugcgucaccggccacgacgagaacgccaccgccuccuucaucuacgacggccgccucgucgacuccaucggcuccugguccaagaacauccuccgcacccaggaguccgagugcgucugcaucaacggcaccugcaccgucgucaugaccgacggcuccgccuccgaccgcgccgacaccaagauccucuucaucgaggagggcaagaucguccacaucuccccccucuccggcuccgcccagcacgucgaggagugcuccugcuacccccgcuaccccggcguccgcugcgucugccgcgacaacuggaagggcuccaaccgccccaucgucgacaucaacgucaaggacuacuccaucgucuccuccuacgucugcuccggccucgucggcgacaccccccgcaagaacgacuccuccuccuccuccuacugcuggaaccccaacaacgagaagggcggccacggcgucaagggcugggccuucgacgacggcaacgacgucuggaugggccgcaccaucuccgaggagucccgcuccggcuacgagaccuucaaggucaucggcggcugguccaagcccaacuccaagcuccagaucaaccgccaggucaucgucgaccgcggcaaccgcuccggcuacuccggcaucuucuccgucgagggcaaguccugcaucaaccgcugcuucuacgucgagcucauccgcggccgcaagcaggagaccgaggucugguggaccuccaacuccaucgucgucuucugcggcaccuccggcaccuacggcaccggcuccuggcccgacggcgccgacaucaaccucaugcccaucuga

SEQ ID NO: 111150 - RNA, 1410 nt, Artificial Sequence; identical to SEQ ID NO: 111149
  derived and/or modified CDS sequence (opt2) from neuraminidase__InfluenzaA__ABG37255

SEQ ID NO: 111151 - RNA, 1410 nt, Artificial Sequence; identical to SEQ ID NO: 111136
  derived and/or modified CDS sequence (opt2) from neuraminidase__InfluenzaA__ABG37266

SEQ ID NO: 111152 - RNA, 1410 nt, Artificial Sequence; identical to SEQ ID NO: 111149
  derived and/or modified CDS sequence (opt2) from neuraminidase__InfluenzaA__ABG37277

SEQ ID NO: 111153 - RNA, 1410 nt, Artificial Sequence; identical to SEQ ID NO: 111149
  derived and/or modified CDS sequence (opt2) from neuraminidase__InfluenzaA__ABG37288

SEQ ID NO: 111154 - RNA, 1410 nt, Artificial Sequence; identical to SEQ ID NO: 111149
  derived and/or modified CDS sequence (opt2) from neuraminidase__InfluenzaA__ABG37310

SEQ ID NO: 111155 - RNA, 1410 nt, Artificial Sequence; identical to SEQ ID NO: 111136
  derived and/or modified CDS sequence (opt2) from neuraminidase__InfluenzaA__ABG37321

SEQ ID NO: 111156 - RNA, 1410 nt, Artificial Sequence
  derived and/or modified CDS sequence (opt2) from neuraminidase__InfluenzaA__ABG37332
augaaccccaaccagaagaucaucaccaucggcuccgucucccucaccaucgccaccaucugcuuccucaugcagaucgccauccucgucaccaccgucacccuccacuucaagcagcacgagugcaacuccccccccaacaaccaggucaugcucugcgagcccaccaucaucgagcgcaacaucaccgagaucguccaccucaccaacaccaccaucgagaaggagaucugccccaagcucgccgaguaccgcaacugguccaagccccagugcaagaucaccggcuucgcccccuucuccaaggacaacuccauccgccucuccgccggcggcgacaucugggucacccgcgagcccuacgucuccugcgaccccggcaagugcuaccaguucgcccucggccagggcaccacccucaacaaccgccacuccaacgacaccguccacgaccgcacccccuaccgcacccuccucaugaacgagcucggcguccccuuccaccucggcaccaagcaggucugcaucgccugguccuccuccuccugccacgacggcaaggccuggcuccacgucugcgucaccggccacgacgagaacgccaccgccuccuucaucuacgacggccgccucgucgacuccaucggcuccugguccaagaacauccuccgcacccaggaguccgagugcgucugcaucaacggcaccugcaccgucgucaugaccgacggcuccgccuccgaccgcgccgacaccaagauccucuucaucgaggagggcaagaucguccacaucuccccccucuccggcggcgcccagcacgucgaggagugcuccugcuacccccgcuaccccggcguccgcugcgucugccgcgacaacuggaagggcuccaaccgccccaucgucgacaucaacgucaaggacuacuccaucgucuccuccuacgucugcuccggccucgucggcgacaccccccgcaagaacgacuccuccuccuccuccuacugcuggaaccccaacaacgagaagggcggccacggcgucaagggcugggccuucgacgacggcaacgacgucuggaugggccgcaccaucuccgaggagucccgcuccggcuacgagaccuucaaggucaucggcggcugguccaagcccaacuccaagcuccagaucaaccgccaggucaucgucgaccgcggcaaccgcuccggcuacuccggcaucuucuccgucgagggcaaguccugcaucaaccgcugcuucuacgucgagcucauccgcggccgcaagcaggagaccgaggucugguggaccuccaacuccaucgucgucuucugcggcaccuccggcaccuacggcaccggcuccuggcccgacggcgccgacaucaaccucaugcccaucuga

SEQ ID NO: 111157 - RNA, 1410 nt, Artificial Sequence
  derived and/or modified CDS sequence (opt2) from neuraminidase__InfluenzaA__ABG37343
augaaccccaaccagaagaucaucaccaucggcuccgucucccucaccaucgccaccaucugcuuccucaugcagaucgccauccucgucaccaccgucacccuccacuucaagcaguacgagugcaacuccccccccaacaaccaggucaugcucugcgagcccaccaucaucgagcgcaacaucaccgagaucgucuaccucaccaacaccaccaucgagaaggagaucugccccaagcucgccgaguaccgcaacugguccaagccccagugcaagaucaccggcuucgcccccuucuccaaggacaacuccauccgccucuccgccggcggcgacaucugggucacccgcgagcccuacgucuccugcgaccccggcaagugcuaccaguucgcccucggccagggcaccacccucaacaaccgccacuccaacgacaccguccacgaccgcacccccuaccgcacccuccucaugaacgagcucggcguccccuuccaccucggcaccaagcaggucugcaucgccugguccuccuccuccugccacgacggcaaggccuggcuccacgucugcgucaccggccacgacgagaacgccaccgccuccuucaucuacgacggccgccucgucgacuccaucggcuccugguccaagaacauccuccgcacccaggaguccgagugcgucugcaucaacggcaccugcaccgucgucaugaccgacggcuccgccuccgaccgcgccgacaccaagauccucuucaucgaggagggcaagaucguccacaucuccccccucuccggcuccgcccagcacgucgaggagugcuccugcuacccccgcuaccccggcguccgcugcgucugccgcgacaacuggaagggcuccaaccgccccaucgucgacaucaacgucaagaacuacuccaucgucuccuccuacgucugcuccggccucgucggcgacaccccccgcaagaacgacuccuccuccuccuccuacugcuggaaccccaacaacgagaagggcggccacggcgucaagggcugggccuucgacgacggcaacgacgucuggaugggccgcaccaucuccgaggagucccgcuccggcuacgagaccuucaaggucaucggcggcugguccaagcccaacuccaagcuccagaucaaccgccaggucaucgucgaccgcggcaaccgcuccggcuacuccggcaucuucuccgucgagggcaaguccugcaucaaccgcugcuucuacgucgagcucauccgcggccgcaagcaggagaccgaggucugguggaccuccaacuccaucgucgucuucugcggcaccuccggcaccuacggcaccggcuccuggcccgacggcgccgacaucaaccucaugcccaucuga

SEQ ID NO: 111158 - RNA, 1410 nt, Artificial Sequence; identical to SEQ ID NO: 111137
  derived and/or modified CDS sequence (opt2) from neuraminidase__InfluenzaA__ABG37354

SEQ ID NO: 111159 - RNA, 1413 nt, Artificial Sequence; identical to SEQ ID NO: 110864
  derived and/or modified CDS sequence (opt2) from neuraminidase__InfluenzaA__ABG37365

SEQ ID NO: 111160 - RNA, 1413 nt, Artificial Sequence; identical to SEQ ID NO: 110966
  derived and/or modified CDS sequence (opt2) from neuraminidase__InfluenzaA__ABG37387

SEQ ID NO: 111161 - RNA, 1413 nt, Artificial Sequence
  derived and/or modified CDS sequence (opt2) from neuraminidase__InfluenzaA__ABG37398
augaaccccaaccagaagaucaucaccaucggcuccaucuccaucgccaucggcaucaucucccucaugcuccagaucggcaacaucaucuccaucugggccucccacuccauccagaccggcucccagaaccacaccggcgucugcaaccagcgcaucaucaccuacgagaacaacaccugggucaaccacaccuacgucaacaucaacaacaccaacgucaucgccggcaaggacaagaccuccgucacccucgccggcaacuccucccucugcuccaucuccggcugggccaucuacaccaaggacaacuccauccgcaucggcuccaagggcgacgucuucgucauccgcgagcccuucaucuccugcucccaccucgagugccgcaccuucuuccucacccagggcgcccuccucaacgacaagcacuccaacggcaccgucaaggaccgcucccccuaccgcgcccucauguccugcccccucggcgaggcccccucccccuacaacuccaaguucgaguccgucgccugguccgccuccgccugccacgacggcaugggcuggcucaccaucggcaucuccggccccgacaacggcgccgucgccguccucaaguacaacggcaucaucaccgagaccaucaaguccuggaagaagcagauccuccgcacccaggaguccgagugcgucugcgucaacggcuccugcuucaccaucaugaccgacggccccuccaacggcgccgccuccuacaagaucuucaagaucgagaagggcaaggucaccaaguccaucgagcucaacgcccccaacuuccacuacgaggagugcuccugcuaccccgacaccggcaccgucaugugcgucugccgcgacaacuggcacggcuccaaccgccccugggucuccuucaaccagaaccucgacuaccagaucggcuacaucugcuccggcgucuucggcgacaacccccgccccaaggacggcgagggcuccugcaaccccgucaccgucgacggcgccaacggcgucaagggcuucuccuacaaguacggcaacggcgucuggaucggccgcaccaaguccaaccgccuccgcaagggcuucgagaugaucugggaccccaacggcuggaccgacaccgacuccgacuucuccgucaagcaggacgucgucgccaucaccgacugguccggcuacuccggcuccuucguccagcaccccgagcucaccggccucgacugcauccgccccugcuucugggucgagcucguccgcggccuccccaaggagaacaccaccaucuggaccuccggcuccuccaucuccuucugcggcgucaacuccgacaccgccaacugguccuggcccgacggcgccgagcuccccuucaccaucgacaaguga

SEQ ID NO: 111162 - RNA, 1410 nt, Artificial Sequence
  derived and/or modified CDS sequence (opt2) from neuraminidase__InfluenzaA__ABG37409
augaaccccaaccagaagaucaucaccaucggcuccgucucccucaccaucgccaccaucugcuuccucaugcagaucgucauccucgucaccaccgucacccuccacuucaagcaguacgagugcaacuccccccccaacaaccaggucaugcccugcgagcccaccaucaucgagcgcaacaucaccgagaucgucuaccucaccaacaccaccaucgagaaggagaucugccccaagcucgccgaguaccgcaacugguccaagccccagugcaacaucaccggcuucgcccccuucuccaaggacaacuccauccgccucuccgccggcggcgacaucugggucacccgcgagcccuacgucuccugcgaccccgacaagugcuaccaguucgcccucggccagggcaccacccucaacaacggccacuccaacgacaccguccacgaccgcacccccuaccgcacccuccucaugaacgagcucggcguccccuuccaccucggcaccaagcaggucugcaucgccugguccuccuccuccugccacgacggcaaggccuggcuccacgucugcgucaccggcgacgacgagaacgccaccgccuccuucaucuacaacggccgccucgucgacuccaucggcuccugguccaagaagauccuccgcacccaggaguccgagugcgucugcaucaacggcaccugcaccgucgucaugaccgacggcuccgccuccggcaaggccgacaccaagauccucuucaucgaggagggcaagaucguccacaccucccuccucuccggcuccgcccagcacgucgaggagugcuccugcuacccccgcuaccccggcguccgcugcgucugccgcgacaacuggaagggcuccaaccgccccaucgucgacaucaacgucaaggacuacuccaucgucuccuccuacgucugcuccggccucgucggcgacaccccccgcaagaacgacuccuccuccuccucccacugccucgaccccaacaacgaggagggcggccacggcgucaagggcugggccuucgacgaccgcaacgacgucuggaugggccgcaccaucuccgagaagcuccgcuccggcuacgagaccuucaaggucaucgagggcugguccaagcccaacuccaagcuccagaucaaccgccaggucaucgucgaccgcggcaaccgcuccggcuacuccggcaucuucuccgucgagggcaaguccugcaucaaccgcugcuucuacgucgagcucauccgcggccgcaagcaggagaccgagguccucuggaccuccaacuccaucgucgucuucugcggcaccuccggcaccuacggcaccggcuccuggcccgacggcgccgacaucaaccucaugcccaucuga

SEQ ID NO: 111163 - RNA, 1410 nt, Artificial Sequence
  derived and/or modified CDS sequence (opt2) from neuraminidase__InfluenzaA__ABG37442
augaaccccaaccagaagaucaucaccaucggcuccgucucccucaccaucgccaccaucugcuuccucaugcagaucgccauccucgucaccaccgucacccuccacuucaagcaguucgagugcaacuccccccccaacaaccaggucaugcucugcgagcccaccaucaucgagggcaacaucaccgagaucgucuaccucaccaacaccaccaucgagaaggagaucugccccaagcucgccgaguaccgcaacugguccaagccccagugcaacaucaccggcuucgcccccuucuccaaggacaacuccauccgccucuccgccggcggcgacaucugggucacccgcgagcccuacgucuccugcgaccccgacaagugcuaccaguucgcccucggccagggcaccacccucaacaacggccacuccaacgacaccguccacgaccgcacccccuaccgcacccuccucaugaacgagcucggcguccccuuccaccucggcacccgccaggucugcaucgccugguccuccuccuccugccacgacggcaaggccuggcuccacgucugcgucaccggcgacgacgagaacgccaccgccuccuucaucuacaacggccgccucgucgacuccaucggcuccugguccaagaagauccuccgcacccaggaguccgagugcgucugcaucaacggcaccugcaccgucgucaugaccgacggcuccgccuccggcaaggccgacaccaagauccucuucaucgaggagggcaagaucguccacaucuccacccucuccggcuccgcccagcacgucgaggagugcuccugcuacccccgcuaccccggcguccgcugcgucugccgcgacaacuggaagggcuccaaccgccccaucgucgacaucaacgucaaggacuacuccaucgucuccuccuacgucugcuccggccucgucggcgacaccccccgcaagaacgacuccuucuccuccucccacugccucgaccccaacaacgaggagggcggccacggcgucaagggcugggccuucgacgacggcaacgacgucuggaugggccgcaccaucuccgagaagcuccgcuccggcuacgagaccuucaaggucaucgagggcugguccaagcccaacuccaagcuccagaccaaccgccaggucaucgucgagcgcggcaaccgcuccggcuacuccggcaucuucuccgucgagggcaaguccugcaucaaccgcugcuucuacgucgagcucauccgcggccgcaaggaggagaccgaggucugguggaccuccaacuccaucgucgucuucugcggcaccuccggcaccuacggcaccggcuccuggcccgacggcgccgacaucaaccucaugcccaucuga

SEQ ID NO: 111164 - RNA, 1410 nt, Artificial Sequence; identical to SEQ ID NO: 110190
  derived and/or modified CDS sequence (opt2) from neuraminidase__InfluenzaA__ABG37453

SEQ ID NO: 111165 - RNA, 1410 nt, Artificial Sequence; identical to SEQ ID NO: 110202
  derived and/or modified CDS sequence (opt2) from neuraminidase__InfluenzaA__ABG37464

SEQ ID NO: 111166 - RNA, 1410 nt, Artificial Sequence
  derived and/or modified CDS sequence (opt2) from neuraminidase__InfluenzaA__ABG37475
augaaccccaaccagaagaucaucaccaucggcuccgucucccucaccaucgccaccaucugcuuccucaugcagaucgccauccucgucaccaccgucacccuccacuucaagcaguacgagugcaacuccccccccaacaaccaggucaugcucugcgagcccaccaucaucgagcgcaacaucaccgagaucgucuaccucaccaacaccaccaucgagaaggagaucugccccaagcucgccgaguaccgcaacugguccaagccccagugcaacaucaccggcuucgcccccuucuccaaggacaacuccauccgccucuccgccggcggcgacaucugggucacccgcgagcccuacgucuccugcgaccccgacaagugcuaccaguucgcccucggccagggcaccacccucaacaacggccacuccaacgacaccguccacgaccgcacccccuaccgcacccuccucaugaacgagcucggcguccccuuccaccucggcacccgccaggucugcaucgccugguccuccuccuccugccacgacggcaaggccuggcuccacgucugcgucaccggcgacgacgagaacgccaccgccuccuucaucuacaacggccgccucgucgacuccaucggcuccugguccaagaagauccuccgcacccaggaguccgagugcgucugcaucaacggcaccugcaccgucgucaugaccgacggcuccgccuccggcaaggccgacaccaagauccucuucaucgaggagggcaagaucguccacaucuccacccucuccggcuccgcccagcacgucgaggagugcuccugcuacccccgcuaccccggcguccgcugcgucugccgcgacaacuggaagggcuccaaccgccccaucgucgacaucaacgucaaggacuacuccaucgucuccuccuacgucugcuccggccucgucggcgacaccccccgcaagaacgacuccuucuccuccucccacugccucgaccccaacaacgaggagggcggccacggcgucaagggcugggccuucgacgacggcaacgacgucuggaugggccgcaccaucuccgagaagcuccgcuccggcuacgagaccuucaaggucaucgagggcugguccaagcccaacuccaagcuccagaucaaccgccaggucaucgucgagcgcggcgaccgcuccggcuacuccggcaucuucuccgucgagggcaaguccugcaucaaccgcugcuucuacgucgagcucauccgcggccgcaaggaggagaccgagguccucuggaccuccaacuccaucgucgucuucugcggcaccuccggcaccuacggcaccggcuccuggcccgacggcgccgacaucaaccucaugcccaucuga

SEQ ID NO: 111167 - RNA, 1410 nt, Artificial Sequence
  derived and/or modified CDS sequence (opt2) from neuraminidase__InfluenzaA__ABG37486
augaaccccaaccagaagaucaucaccaucggcuccgucucccucaccaucgccaccaucugcuuccucaugcagaucgccauccucgucaccaccgucacccuccacuucaagcaguacgagugcaacuccccccccaacaaccaggucaugcucugcgagcccaccaucaucgagcgcaacaucaccgagaucgucuaccucaccaacaccaccaucgagaaggagaucugccccaagcucgccgaguaccgcaacugguccaagccccagugcaaccucaccggcuucgcccccuucuccaaggacaacuccauccgccucuccgccggcggcgacaucugggucacccgcgagcccuacgucuccugcgaccccgacaagugcuaccaguucgcccucggccagggcaccacccucaacaacggccacuccaacgacaccguccacgaccgcacccccuaccgcacccuccucaugaacgagcucggcguccccuuccaccucggcacccgccaggucugcaucgccugguccuccuccuccugccacgacggcaaggccuggcuccacgucugcgucaccggcgacgacgagaacgccaccgccuccuucaucuacaacggccgccucgucgacuccaucggcuccugguccaagaagauccuccgcacccaggaguccgagugcgucugcaucaacggcaccugcaccgucgucaugaccgacggcuccgccuccggcaaggccgacaccaagauccucuucaucgaggagggcaagaucguccacaucuccacccucuccggcuccgcccagcacgucgaggagugcuccugcuacccccgcuaccccggcguccgcugcgucugccgcgacaacuggaagggcuccaaccgccccaucgucgacaucaacgucaaggacuacuccaucgucuccuccuacgucugcuccggccucgucggcgacaccccccgcaagaacgacuccuucuccuccucccacugccucgaccccaacaacgaggagggcggccacggcgucaagggcugggccuucgacgacggcaacgacgucuggaugggccgcaccaucuccgagaagcuccgcuccggcuacgagaccuucaaggucaucgagggcugguccaagcccaacuccaagcuccagaccaaccgccaggucaucgucgagcgcggcaaccgcuccggcuacuccggcaucuucuccgucgagggcaaguccugcaucaaccgcugcuucuacgucgagcucauccgcggccgcaaggaggagaccgaggucugguggaccuccaacuccaucgucgucuucugcggcaccuccggcaccuacggcaccggcuccuggcccgacggcgccgacaucaaccucaugcccaucuga

SEQ ID NO: 111168 - RNA, 1410 nt, Artificial Sequence
  derived and/or modified CDS sequence (opt2) from neuraminidase__InfluenzaA__ABG37497
augaaccccaaccagaagaucaucaccaucggcuccgucucccucaccaucgccaccaucugcuuccucaugcagaucgccauccucgucaccaccgucacccuccacuucaagcaguacgagugcaacuccccccccaacaaccaggucaugcucugcgagcccaccaucaucgagcgcaacaucaccgagaucgucuaccucaccaacaccaccaucgagaaggagaucugccccaagcucgccgaguaccgcaacugguccaagccccagugcaacaucaccggcuucgcccccuucuccaaggacaacuccauccgccucuccgccggcggcgacaucugggucacccgcgagcccuacgucuccugcgaccccgacaagugcuaccaguucgcccucggccagggcaccacccucaacaacggccacuccaacgacaccguccacgaccgcacccccuaccgcacccuccucaugaacgagcucggcguccccuuccaccucggcacccgccaggucugcaucgccugguccuccuccuccugccacgacggcaaggccuggcuccacgucugcgucaccggcgacgacgagaacgccaccgccuccuucaucuacaacggccgccucgucgacuccaucggcuccugguccaagaagauccuccgcacccaggaguccgagugcgucugcaucaacggcaccugcaccgucgucaugaccgacggcuccgccuccggcaaggccgacaccaagaucaucuucaucgaggagggcaagaucguccacaucuccacccucuccggcuccgcccagcacgucgaggagugcuccugcuacccccgcuaccccggcguccgcugcgucugccgcgacaacuggaagggcuccaaccgccccaucgucgacaucaacgucaaggacuacuccaucgucuccuccuacgucugcuccggccucgucggcgacaccccccgcaagaacgacuccuucuccuccucccacugccucgaccccaacaacgaggagggcggccacggcgucaagggcugggccuucgacgacggcaacgacgucuggaugggccgcaccaucuccgagaagcuccgcuccggcuacgagaccuucaaggucaucgagggcugguccaagcccaacuccaagcuccagaccaaccgccaggucaucgucgagcgcggcaaccgcuccggcuacuccggcaucuucuccgucgagggcaaguccugcaucaaccgcugcuucuacgucgagcucauccgcggccgcaaggaggagaccgaggucugguggaccuccaacuccaucgucgucuucugcggcaccuccggcaccuacggcaccggcuccuggcccgacggcgccgacaucaaccucaugcccaucuga

SEQ ID NO: 111169 - RNA, 1410 nt, Artificial Sequence; identical to SEQ ID NO: 110216
  derived and/or modified CDS sequence (opt2) from neuraminidase__InfluenzaA__ABG37508

SEQ ID NO: 111170 - RNA, 1410 nt, Artificial Sequence; identical to SEQ ID NO: 110627
  derived and/or modified CDS sequence (opt2) from neuraminidase__InfluenzaA__ABG37519

SEQ ID NO: 111171 - RNA, 1410 nt, Artificial Sequence; identical to SEQ ID NO: 110627
  derived and/or modified CDS sequence (opt2) from neuraminidase__InfluenzaA__ABG37530

SEQ ID NO: 111172 - RNA, 1410 nt, Artificial Sequence; identical to SEQ ID NO: 110627
  derived and/or modified CDS sequence (opt2) from neuraminidase__InfluenzaA__ABG37541

SEQ ID NO: 111173 - RNA, 1410 nt, Artificial Sequence; identical to SEQ ID NO: 110627
  derived and/or modified CDS sequence (opt2) from neuraminidase__InfluenzaA__ABG37552

SEQ ID NO: 111174 - RNA, 1410 nt, Artificial Sequence; identical to SEQ ID NO: 110627
  derived and/or modified CDS sequence (opt2) from neuraminidase__InfluenzaA__ABG37563

SEQ ID NO: 111175 - RNA, 1410 nt, Artificial Sequence; identical to SEQ ID NO: 110627
  derived and/or modified CDS sequence (opt2) from neuraminidase__InfluenzaA__ABG37585

SEQ ID NO: 111176 - RNA, 1410 nt, Artificial Sequence; identical to SEQ ID NO: 110627
  derived and/or modified CDS sequence (opt2) from neuraminidase__InfluenzaA__ABG37596

SEQ ID NO: 111177 - RNA, 1410 nt, Artificial Sequence; identical to SEQ ID NO: 110627
  derived and/or modified CDS sequence (opt2) from neuraminidase__InfluenzaA__ABG37607

SEQ ID NO: 111178 - RNA, 1410 nt, Artificial Sequence; identical to SEQ ID NO: 110627
  derived and/or modified CDS sequence (opt2) from neuraminidase__InfluenzaA__ABG37618

SEQ ID NO: 111179 - RNA, 1413 nt, Artificial Sequence; identical to SEQ ID NO: 110864
  derived and/or modified CDS sequence (opt2) from neuraminidase__InfluenzaA__ABG47810

SEQ ID NO: 111180 - RNA, 1413 nt, Artificial Sequence
  derived and/or modified CDS sequence (opt2) from neuraminidase__InfluenzaA__ABG47832
augaaccccaaccagaagaucaucaccaucggcuccaucuccaucgccaucggcaucaucucccucauccuccaggucggcaacaucaucuccaucugggccucccacuccauccagaccggcucccagaaccacaccggcaucugcaaccagcgcaucaucaccuacgagaacuccaccugggucaaccagaccuacgucaacaucaacaacaccaacgucgucgccggcaaggacaagaccuccaugacccucgccggcaacuccucccucugccccauccgcggcugggccaucuacaccaaggacaacuccauccgcaucggcuccaagggcgacgucuucgucauccgcgagcccuucaucuccugcucccaccucgagugccgcaccuucuuccucacccagggcgcccuccucaacgacaagcacuccaacggcaccgucaaggaccgcucccccuaccgcgcccucauguccugcccccucggcgaggcccccucccccuacaacucccgcuucgaguccgucgccugguccgccuccgccugccacgacggccucggcuggcucaccaucggcaucuccggccccgacaacggcgccgucgccguccucaaguacaacggcaucaucaccgagaccaucaaguccuggaagaagcgcauccuccgcacccaggaguccgagugcgucugcaugaacggcuccugcuucaccaucaugaccgacggccccuccaacggcgccgccuccuaccgcaucuucaagaucgagaagggccgcgucaccaaguccaucgagcucgacgcccccaacuaccacuacgaggagugcuccugcuaccccaacaccggcaccgucaugugcgucugccgcgacaacuggcacggcuccaaccgccccugggucuccuucaaccagaaccucgacuaccagaucggcuacaucugcuccggcgucuucggcgacaacccccgccccaaggacggcgagggcuccugcaaccccgucaccgucgacggcgccgacggcgucaagggcuucuccuaccgcuacggcaacggcgucuggaucggccgcaccaaguccaaccgccuccgcaagggcuucgagaugaucugggaccccaacggcuggaccgacaccgacuccgacuucuccaugaagcaggacaucgucgccaugaccgacugguccggcuacuccggcuccuucguccagcaccccgagcucaccggccucgacugcaugcgccccugcuucugggucgagcucguccgcggccucccccgcgagaacaccaccaucuggaccuccggcuccuccaucuccuucugcggcgucaacuccgacaccgccaacugguccuggcccgacggcgccgagcuccccuucaccaucgacaaguga

SEQ ID NO: 111181 - RNA, 1413 nt, Artificial Sequence; identical to SEQ ID NO: 111004
  derived and/or modified CDS sequence (opt2) from neuraminidase__InfluenzaA__ABG47843

SEQ ID NO: 111182 - RNA, 1410 nt, Artificial Sequence
  derived and/or modified CDS sequence (opt2) from neuraminidase__InfluenzaA__ABG47865
augaaccccaaccagaagaucaucaccaucggcuccgucucccucaccaucgccaccaucugcuuccucaugcagaucgccauccucgucaucaccgucacccuccacuucaagcaguacgagugcaacuccccccccaacaaccaggucaugcucugcgagcccaccaucaucgagcgcaacaucaccgagaucgucuaccucaccaacaccaccaucgagaaggagaucugccccaagcucgccgaguaccgcaacugguccaagccccagugcaagaucaccggcuucgcccccuucuccaaggacaacuccauccgccucuccgccggcggcgacaucugggucacccgcgagcccuacgucuccugcgaccccgacaagugcuaccaguucgcccucggccagggcaccacccucaacaaccgccacuccaacgacaccguccacgaccgcacccccuaccgcacccuccucaugaacgagcucggcguccccuuccaccucggcaccaagcaggucugcaucgccugguccuccuccuccugccacgacggcaaggccuggcuccacgucugcgucaccggccacgacgagaacgccaccgccuccuucaucuacgacggccgccucgucgacuccaucggcuccugguccaagaagauccuccgcacccaggaguccgagugcgucugcaucaacggcaccugcaccgucgucaugaccgacggcuccgccuccggccgcgccgacaccaagauccucuucaucgaggagggcaagaucguccacaucuccccccucuccggcuccgcccagcacgucgaggagugcuccugcuacccccgcuacuccggcguccgcugcgucugccgcgacaacuggaagggcuccaaccgccccaucgucgacaucaacgucaaggacuacuccaucgucuccuccuacgucugcuccggccucgucggcgacaccccccgcaagaacgacuccuccuccuccucccacugccucaaccccaacaacgaggagggcggccacggcgucaagggcugggccuucgacgacggcaacgacgucuggaugggccgcaccaucuccgagaagcuccgcuccggcuacgagaccuucaaggucaucggcggcugguccaagcccaacuccaagcuccagaucaaccgccaggucaucgucgaccgcggcaaccgcuccggcuacuccggcaucuucuccgucgagggcaaguccugcaucaaccgcugcuucuacgucgagcucauccgcggccgcaagcaggagaccgaggucugguggaccuccaacuccaucgucgucuucugcggcaccuccggcaccuacggcaccggcuccuggcccgacggcgccgacaucaaccucaugcccaucuga

SEQ ID NO: 111183 - RNA, 1410 nt, Artificial Sequence; identical to SEQ ID NO: 111149
  derived and/or modified CDS sequence (opt2) from neuraminidase__InfluenzaA__ABG47876

SEQ ID NO: 111184 - RNA, 1410 nt, Artificial Sequence; identical to SEQ ID NO: 111149
  derived and/or modified CDS sequence (opt2) from neuraminidase__InfluenzaA__ABG47887

SEQ ID NO: 111185 - RNA, 1410 nt, Artificial Sequence; identical to SEQ ID NO: 111136
  derived and/or modified CDS sequence (opt2) from neuraminidase__InfluenzaA__ABG47898

SEQ ID NO: 111186 - RNA, 1410 nt, Artificial Sequence; identical to SEQ ID NO: 111149
  derived and/or modified CDS sequence (opt2) from neuraminidase__InfluenzaA__ABG47909

SEQ ID NO: 111187 - RNA, 1410 nt, Artificial Sequence; identical to SEQ ID NO: 111137
  derived and/or modified CDS sequence (opt2) from neuraminidase__InfluenzaA__ABG47920

SEQ ID NO: 111188 - RNA, 1410 nt, Artificial Sequence; identical to SEQ ID NO: 111137
  derived and/or modified CDS sequence (opt2) from neuraminidase__InfluenzaA__ABG47931

SEQ ID NO: 111189 - RNA, 1410 nt, Artificial Sequence; identical to SEQ ID NO: 111137
  derived and/or modified CDS sequence (opt2) from neuraminidase__InfluenzaA__ABG47942

SEQ ID NO: 111190 - RNA, 1410 nt, Artificial Sequence
  derived and/or modified CDS sequence (opt2) from neuraminidase__InfluenzaA__ABG47953
augaaccccaaccagaagaucaucaccaucggcuccgucucccucaccaucgccaccaucugcuuccucaugcagaucgccauccucgucaccaccgucacccuccacuucaagcaguacgagugcaacuccccccccuccaaccaggucaugcucugcgagcccaccaucaucgagcgcaacaucaccgagaucgucuaccucaccaacaccaccaucgagaaggagaucugccccaagcucgccgaguaccgcaacugguccaagccccagugcaagaucaccggcuucgcccccuucuccaaggacaacuccauccgccucuccgccggcggcgacaucugggucacccgcgagcccuacgucuccugcgaccccggcaagugcuaccaguucgcccucggccagggcaccacccucaacaaccgccacuccaacgacaccguccacgaccgcacccccuaccgcacccuccucaugaacgagcucggcguccccuuccaccucggcaccaagcaggucugcaucgccugguccuccuccuccugccacgacggcaaggccuggcuccacgucugcgucaccggccacgacgagaacgccaccgccuccuucaucuacgacggccgccucgucgacuccaucggcuccugguccaagaacauccuccgcacccaggaguccgagugcgucugcaucaacggcaccugcaccgucgucaugaccgacggcuccgccuccgagcgcgccgacaccaagauccucuucaucgaggagggcaagaucguccacaucuccccccucuccggcuccgcccagcacgucgaggagugcuccugcuacccccgcuaccccggcguccgcugcgucugccgcgacaacuggaagggcuccaaccgccccaucgucgacaucaacgucaaggacuacuccaucgucuccuccuacgucugcuccggccucgucggcgacaccccccgcaagaacgacuccuccuccuccuccuacugccgcaaccccaacaacgagaagggcucccacggcgucaagggcugggccuucgacgacggcaacgacgucuggaugggccgcaccaucuccgaggagcuccgcuccggcuacgagaccuucaaggucaucggcggcugguccaagcccaacuccaagcuccagaucaaccgccaggucaucgucgaccgcggcaaccgcuccggcuacuccggcaucuucuccgucgagggcaaguccugcaucaaccgcugcuucuacgucgagcucauccgcggccgcaagcaggagaccgaggucugguggaccuccaacuccaucgucgucuucugcggcaccuccggcaccuacggcaccggcuccuggcccgacggcgccaacaucaaccucaugcccaucuga

SEQ ID NO: 111191 - RNA, 1410 nt, Artificial Sequence
  derived and/or modified CDS sequence (opt2) from neuraminidase__InfluenzaA__ABG47964
augaaccccaaccagaagaucaucaccaucggcuccgucucccucaccaucgccaccaucugcuuccucaugcagaucgccauccucgucaccaccgucacccuccacuucaagcaguacgagugcaacuccccccccaacaaccaggucaugcucugcgagcccaccaucaucgagcgcaacaucaccgagaucgucuaccucaccaacaccaccaucgagaaggagaucugccccaagcucgccgaguaccgcaacugguccaagccccagugcaagaucaccggcuucgcccccuucuccaaggacaacuccauccgccucuccgccggcggcgacaucugggucacccgcgagcccuacgucuccugcgaccccggcaagugcuaccaguucgcccucggccagggcaccacccucaacaaccgccacuccaacgacaccguccacgaccgcacccccuaccgcacccuccucaugaacgagcucggcguccccuuccaccucggcaccaagcaggucugcaucgccugguccuccuccuccugccacgacggcaaggccuggcuccacgucugcgucaccggccacgacgagaacgccaccgccuccuucaucuacgacggccgccucgucgacuccaucggcuccugguccaagaacauccuccgcacccaggaguccgagugcgucugcaucaacggcaccugcaccgucgucaugaccgacggcuccgccuccgagcgcgccgacaccaagauccucuucaucgaggagggcaagaucguccacaucuccccccucuccggcuccgcccagcacgucgaggagugcuccugcuacccccgcuaccccggcguccgcugcgucugccgcgacaacuggaagggcuccaaccgccccaucgucgacaucaacgucaaggacuacuccaucgucuccuccuacgucugcuccggccucgucggcgacaccccccgcaagaacgacuccuccuccuccuccuacugccagaaccccaacaacgagaagggcucccacggcgucaagggcugggccuucgacgacggcaacgacgucuggaugggccgcaccaucuccgaggagcuccgcuccggcuacgagaccuucaaggucaucggcggcugguccaagcccaacuccaagcuccagaucaaccgccaggucaucgucgaccgcggcaaccgcuccggcuacuccggcaucuucuccgucgagggcaaguccugcaucaaccgcugcuucuacgucgagcucauccgcggccgcaagcaggagaccgaggucugguggaccuccaacuccaucgucgucuucugcggcaccuccggcaccuacggcaccggcuccuggcccgacggcgccgacaucaaccucaugcccaucuga

SEQ ID NO: 111192 - RNA, 1410 nt, Artificial Sequence
  derived and/or modified CDS sequence (opt2) from neuraminidase__InfluenzaA__ABG47975
augaaccccaaccagaagaucaucaccaucggcuccgucucccucaccaucgccaccaucugcuuccucaugcagaucgccauccucgucaccaccgucacccuccacuucaagcaguacgagugcaacuccccccccuccaaccaggucaugcucugcgagcccaccaucaucgagcgcaacaucaccgagaucgucuaccucaccaacaccaccaucgagaaggagaucugccccaagcucgccgaguaccgcaacugguccaagccccagugcaagaucaccggcuucgcccccuucuccaaggacaacuccauccgccucuccgccggcggcgacaucugggucacccgcgagcccuacgucuccugcgaccccggcaagugcuaccaguucgcccucggccagggcaccacccucaacaaccgccacuccaacgacaccguccacgaccgcacccccuaccgcacccuccucaugaacgagcucggcguccccuuccaccucggcaccaagcaggucugcaucgccugguccuccuccuccugccacgacggcaaggccuggcuccacgucugcgucaccggccacgacgagaacgccaccgccuccuucaucuacgacggccgccucgucgacuccaucggcuccugguccaagaacauccuccgcacccaggaguccgagugcgucugcaucaacggcaccugcaccgucgucaugaccgacggcuccgccuccgagcgcgccgacaccaagauccucuucaucgaggagggcaagaucguccacaucuccccccucuccggcuccgcccagcacgucgaggagugcuccugcuacccccgcuaccccggcguccgcugcgucugccgcgacaacuggaagggcuccaaccgccccaucgucgacaucaacgucaaggacuacuccaucgucuccuccuacgucugcuccggccucgucggcgacaccccccgcaagaacgacuccuccuccuccuccuacugccgcgaccccaacaacgagcgcggcucccacggcgucaagggcugggccuucgacgacggcaacgacgucuggaugggccgcaccaucuccgaggagcuccgcuccggcuacgagaccuucaaggucaucggcggcugguccaagcccaacuccaagcuccagaucaaccgccaggucaucgucgaccgcggcaaccgcuccggcuacuccggcaucuucuccgucgagggcaaguccugcaucaaccgcugcuucuacgucgagcucauccgcggccgcaagcaggagaccgaggucugguggaccuccaacuccaucgucgucuucugcggcaccuccggcaccuacggcaccggcuccuggcccgacggcgccgacaucaaccucaugcccaucuga

SEQ ID NO: 111193 - RNA, 1410 nt, Artificial Sequence
  derived and/or modified CDS sequence (opt2) from neuraminidase__InfluenzaA__ABG47986
augaaccccaaccagaagaucaucaccaucggcuccgucucccucaccaucgccaccaucugcuuccucaugcagaucgccauccucgucaccaccgucacccuccacuucaagcaguacgagugcaacuccccccccuccaaccaggucaugcucugcgagcccaccaucaucgagcgcaacaucaccgagaucgucuaccucaccaacaccaccaucgagaaggagaucugccccaagcucgccgaguaccgcaacugguccaagccccagugcaagaucaccggcuucgcccccuucuccaaggacaacuccauccgccucuccgccggcggcgacaucugggucacccgcgagcccuacgucuccugcgaccccggcaagugcuaccaguucgcccucggccagggcaccacccucaacaaccgccacuccaacgacaccguccacgaccgcacccccuaccgcacccuccucaugaacgagcucggcguccccuuccaccucggcaccaagcaggucugcaucgccugguccuccuccuccugccacgacggcaaggccuggcuccacgucugcgucaccggccacgacgagaacgccaccgccuccuucaucuacgacggccgccucgucgacuccaucggcuccugguccaagaacauccuccgcacccaggaguccgagugcgucugcaucaacggcaccugcaccgucgucaugaccgacggcuccgccuccgagcgcgccgacaccaagauccucuucaucgaggagggcaagaucguccacaucuccccccucuccggcuccgcccagcacgucgaggagugcuccugcuacccccgcuaccccggcguccgcugcgucugccgcgacaacuggaagggcuccaaccgccccaucgucgacaucaacgucaaggacuacuccaucgucuccuccuacgucugcuccggccucgucggcgacaccccccgcaagaacgacuccuccuccuccuccuacugccgcaagcccaacaacgagaagggcucccacggcgucaagggcugggccuucgacgacggcaacgacgucuggaugggccgcaccaucuccgaggagcuccgcuccggcuacgagaccuucaaggucaucggcggcugguccaagcccaacuccaagcuccagaucaaccgccaggucaucgucgaccgcggcaaccgcuccggcuacuccggcaucuucuccgucgagggcaaguccugcaucaaccgcugcuucuacgucgagcucauccgcggccgcaagcaggagaccgaggucugguggaccuccaacuccaucgucgucuucugcggcaccuccggcaccuacggcaccggcuccuggcccgacggcgccgacaucaaccucaugcccaucuga

SEQ ID NO: 111194 - RNA, 1410 nt, Artificial Sequence; identical to SEQ ID NO: 111137
  derived and/or modified CDS sequence (opt2) from neuraminidase__InfluenzaA__ABG47997

SEQ ID NO: 111195 - RNA, 1410 nt, Artificial Sequence
  derived and/or modified CDS sequence (opt2) from neuraminidase__InfluenzaA__ABG48008
augaaccccaaccagaagaucaucaccaucggcuccgucucccucaccaucgccaccaucugcuuccucaugcagaucgccauccucgucaccaccgucacccuccacuucaagcaguacgagugcaacuccccccccuccaaccaggucaugcucugcgagcccaccaucaucgagcgcaacaucaccgagaucgucuaccucaccaacaccaccaucgagaaggagaucugccccaagcucgccgaguaccgcaacugguccaagccccagugcaagaucaccggcuucgcccccuucuccaaggacaacuccauccgccucuccgccggcggcgacaucugggucacccgcgagcccuacgucuccugcgaccccggcaagugcuaccaguucgcccucggccagggcaccacccucaacaaccgccacuccaacgacaccguccacgaccgcacccccuaccgcacccuccucaugaacgagcucggcguccccuuccaccucggcaccaagcaggucugcaucgccugguccuccuccuccugccacgacggcaaggccuggcuccacgucugcgucaccggccacgacgagaacgccaccgccuccuucaucuacgacggccgccucgucgacuccaucggcuccugguccaagaacauccuccgcacccaggaguccgagugcgucugcaucaacggcaccugcaccgucgucaugaccgacggcuccgccuccgagcgcgccgacaccaagauccucuucaucgaggagggcaagaucguccacaucuccccccucuccggcuccgcccagcacgucgaggagugcuccugcuacccccgcuaccccggcguccgcugcgucugccgcgacaacuggaagggcuccaaccgccccaucgucgacaucaacgucaaggacuacuccaucgucuccuccuacgucugcuccggccucgucggcgacaccccccgccgcaacgacuccuccuccuccuccuacugccgcaagcccaacaacgagaagggcucccacggcgucaagggcugggccuucgacgacggcaacgacgucuggaugggccgcaccaucuccgaggagcuccgcuccggcuacgagaccuucaaggucaucggcggcugguccaagcccaacuccaagcuccagaucaaccgccaggucaucgucgaccgcggcaaccgcuccggcuacuccggcaucuucuccgucgagggcaaguccugcaucaaccgcugcuucuacgucgagcucauccgcggccgcaagcaggagaccgaggucugguggaccuccaacuccaucgucgucuucugcggcaccuccggcaccuacggcaccggcuccuggcccgacggcgccgacaucaaccucaugcccaucuga

SEQ ID NO: 111196 - RNA, 1410 nt, Artificial Sequence
  derived and/or modified CDS sequence (opt2) from neuraminidase__InfluenzaA__ABG48019
augaaccccaaccagaagaucaucaccaucggcuccgucucccucaccaucgccaccaucugcuuccucaugcagaucgccauccucgucaccaccgucacccuccacuucaagcaguacgagugcaacuccccccccuccaaccaggucaugcucugcgagcccaccaucaucgagcgcaacaucaccgagaucgucuaccucaccaacaccaccaucgagaaggagaucugccccaagcucgccgaguaccgcaacugguccaagccccagugcaagaucaccggcuucgcccccuucuccaaggacaacuccauccgccucuccgccggcggcgacaucugggucacccgcgagcccuacgucuccugcgaccccggcaagugcuaccaguucgcccucggccagggcaccacccucaacaaccgccacuccaacgacaccguccacgaccgcacccccuaccgcacccuccucaugaacgagcucggcguccccuuccaccucggcaccaagcaggucugcaucgccugguccuccuccuccugccacgacggcaaggccuggcuccacgucugcgucaccggccacgacgagaacgccaccgccuccuucaucuacgacggccgccucgucgacuccaucggcuccugguccaagaacauccuccgcacccaggaguccgagugcgucugcaucaacggcaccugcaccgucgucaugaccgacggcuccgccuccgagcgcgccgacaccaagauccucuucaucgaggagggcaagaucguccacaucuccccccucuccggcuccgcccagcacgucgaggagugcuccugcuacccccgcuaccccggcguccgcugcgccugccgcgacaacuggaagggcuccaaccgccccaucgucgacaucaacgucaaggacuacuccaucgucuccuccuacgucugcuccggccucgucggcgacaccccccgcaagaacgacuccuccuccuccuccuacugccgcaaccccaacaacgagaagggcucccacggcgucaagggcugggccuucgacgacggcaacgacgucuggaugggccgcaccaucuccgaggagcuccgcuccggcuacgagaccuucaaggucaucggcggcugguccaagcccaacuccaagcuccagaucaaccgccaggucaucgucgaccgcgacaaccgcuccggcuacuccggcaucuucuccgucgagggcaaguccugcaucaaccgcugcuucuacgucgagcucauccgcggccgcaagcaggagaccgaggucugguggaccuccaacuccaucgucgucuucugcggcaccuccggcaccuacggcaccggcuccuggcccgacggcgccgacaucaaccucaugcccaucuga

SEQ ID NO: 111197 - RNA, 1410 nt, Artificial Sequence; identical to SEQ ID NO: 111137
  derived and/or modified CDS sequence (opt2) from neuraminidase__InfluenzaA__ABG48030

SEQ ID NO: 111198 - RNA, 1410 nt, Artificial Sequence; identical to SEQ ID NO: 111137
  derived and/or modified CDS sequence (opt2) from neuraminidase__InfluenzaA__ABG48041

SEQ ID NO: 111199 - RNA, 1413 nt, Artificial Sequence; identical to SEQ ID NO: 110864
  derived and/or modified CDS sequence (opt2) from neuraminidase__InfluenzaA__ABG48052

SEQ ID NO: 111200 - RNA, 1410 nt, Artificial Sequence; identical to SEQ ID NO: 110766
  derived and/or modified CDS sequence (opt2) from neuraminidase__InfluenzaA__ABG48063

SEQ ID NO: 111201 - RNA, 1410 nt, Artificial Sequence; identical to SEQ ID NO: 110889
  derived and/or modified CDS sequence (opt2) from neuraminidase__InfluenzaA__ABG48074

SEQ ID NO: 111202 - RNA, 1410 nt, Artificial Sequence; identical to SEQ ID NO: 110190
  derived and/or modified CDS sequence (opt2) from neuraminidase__InfluenzaA__ABG48085

SEQ ID NO: 111203 - RNA, 1410 nt, Artificial Sequence
  derived and/or modified CDS sequence (opt2) from neuraminidase__InfluenzaA__ABG48107
augaaccccaaccagaagaucaucaccaucggcuccgucucccucaccaucgccaccaucugcuuccucaugcagaucgccauccucgucaccaccgucacccuccacuucaagcaguacgagugcaacuccccccccaacaaccaggucaugcucugcgagcccaccaucaucgagcgcaacaucaccgagaucgucuaccucaccaacaccaccaucgagaaggagaucugccccaagcucgccgaguaccgcaacugguccaagccccagugcaacaucaccggcuucgcccccuucuccaaggacaacuccauccgccucuccgccggcggcgacaucugggucacccgcgagcccuacgucuccugcgaccccgacaagugcuaccaguucgcccucggccagggcaccacccucaacaacggccacuccaacgacaccguccacgaccgcacccccuaccgcacccuccucaugaacgagcucggcguccccuuccaccucggcacccgccaggucugcaucgccugguccuccuccuccugccacgacggcaaggccuggcuccacgucugcgucaccggcgacgacgagaacgccaccgccuccuucaucuacaacggccgccucgucgacuccaucggcuccugguccaagaagacccuccgcacccaggaguccgagugcgucugcaucaacggcaccugcaccgucgucaugaccgacggcuccgccuccggcaaggccgacaccaagauccucuucaucgaggagggcaagaucguccacaucuccacccucuccggcuccgcccagcacgucgaggagugcuccugcuacccccgcuaccccggcguccgcugcgucugccgcgacaacuggaagggcuccaaccgccccaucgucgacaucaacgucaaggacuacuccaucgucuccuccuacgucugcuccggccucgucggcgacaccccccgcaagaacgacuccuucuccuccucccacugccucgaccccaacaacgaggagggcggccacggcgucaagggcugggccuucgacgacggcaacgacgucuggaugggccgcaccaucuccgagaagcuccgcuccggcuacgagaccuucaaggucaucgagggcugguccaagcccaacuccaagcuccagaucaaccgccaggucaucgucgagcgcggcaaccgcuccggcuacuccggcaucuucuccgucgagggcaaguccugcaucaaccgcugcuucuacgucgagcucauccgcggccgcaaggaggagaccgaggucugguggaccuccaacuccaucgucgucuucugcggcaccuccggcaccuacggcaccggcuccuggcccgacggcgccgacaucaaccucaugcccaucuga

SEQ ID NO: 111204 - RNA, 1410 nt, Artificial Sequence; identical to SEQ ID NO: 110202
  derived and/or modified CDS sequence (opt2) from neuraminidase__InfluenzaA__ABG48118

SEQ ID NO: 111205 - RNA, 1410 nt, Artificial Sequence; identical to SEQ ID NO: 110202
  derived and/or modified CDS sequence (opt2) from neuraminidase__InfluenzaA__ABG48129

SEQ ID NO: 111206 - RNA, 1410 nt, Artificial Sequence; identical to SEQ ID NO: 110190
  derived and/or modified CDS sequence (opt2) from neuraminidase__InfluenzaA__ABG48140

SEQ ID NO: 111207 - RNA, 1410 nt, Artificial Sequence; identical to SEQ ID NO: 110202
  derived and/or modified CDS sequence (opt2) from neuraminidase__InfluenzaA__ABG48151

SEQ ID NO: 111208 - RNA, 1410 nt, Artificial Sequence; identical to SEQ ID NO: 110190
  derived and/or modified CDS sequence (opt2) from neuraminidase__InfluenzaA__ABG48173

SEQ ID NO: 111209 - RNA, 1410 nt, Artificial Sequence; identical to SEQ ID NO: 110202
  derived and/or modified CDS sequence (opt2) from neuraminidase__InfluenzaA__ABG48184

SEQ ID NO: 111210 - RNA, 1410 nt, Artificial Sequence
  derived and/or modified CDS sequence (opt2) from neuraminidase__InfluenzaA__ABG48195
augaaccccaaccagaagaucaucaccaucggcuccgucucccucaccaucgccaccaucugcuuccucaugcagaucgccauccucgucaccaccgucacccuccacuucaagcaguacgagugcaacuccccccccaacaaccaggucaugcucugcgagcccaccaucaucgagcgcaacaucaccgagaucgucuaccucaccaacaccaccaucgagaaggagaucugccccaagcucgccgaguaccgcaacugguccaagccccagugcaacaucaccggcuucgcccccuucuccaaggacaacuccauccgccucuccgccggcggcgacaucugggucacccgcgagcccuacgucuccugcgaccccgacaagugcuaccaguucgcccucggccagggcaccacccucaacaacggccacuccaacgacaccguccacgaccgcacccccuaccgcacccuccucaugaacgagcucggcguccccuuccaccucggcacccgccaggucugcaucgccugguccuccuccuccugccacgacggcaaggccuggcuccacgucugcgucaccggcgacgacgagaacgccaccgccuccuucaucuacaacggccgccucgucgacuccaucggcuccugguccaagaagauccuccgcacccaggaguccgagugcgucugcaucaacggcaccugcaccgucgucaugaccgacggcuccgccuccggcaaggccgacaccaagauccucuucaucgaggagggcaagaucguccacaucuccacccucuccggcuccgcccagcacgucgaggagugcuccugcuacccccgcuaccccggcguccgcugcgucugccgcgacaacuggaagggcuccaaccgccccaucgucgacaucaacgucaaggacuacuccaucgucuccuccuacgucugcuccggccucgucggcgacaccccccgcaagaacgacuccuucuccuccucccacugcaucgaccccaacaacgaggagggcggccacggcgucaagggcugggccuucgacgacggcaacgacgucuggaugggccgcaccaucuccgagaagcuccgcuccggcuacgagaccuucaaggucaucgagggcugguccaagcccaacuccaagcuccagaccaaccgccaggucaucgucgagcgcggcaaccgcuccggcuacuccggcaucuucuccgucgagggcaaguccugcaucaaccgcugcuucuacgucgagcucauccgcggccgcaaggaggagaccgaggucugguggaccuccaacuccaucgucgucuucugcggcaccuccggcaccuacggcaccggcuccuggcccgacggcgccgacaucaaccucaugcccaucuga

SEQ ID NO: 111211 - RNA, 1410 nt, Artificial Sequence
  derived and/or modified CDS sequence (opt2) from neuraminidase__InfluenzaA__ABG48206
augaaccccaaccagaagaucaucaccaucggcuccgucucccucaccaucgccaccaucugcuuccucaugcagaucgccauccucgucaccaccgucacccuccacuucaagcagcacgagugcaacuccccccccaacaaccaggucaugcucugcgagcccaccaucaucgagcgcaacaucaccgagaucgucuaccucaccaacaccaccaucgagaaggagaucugccccaagcucgucgaguaccgcaacugguccaagccccagugcaacaucaccggcuucgcccccuucuccaaggacaacuccauccgccucuccgccggcggcgacaucugggucacccgcgagcccuacgucuccugcgaccccgacaagugcuaccaguucgcccucggccagggcaccacccucaacaacggccacuccaacgacaccguccacgaccgcacccccuaccgcacccuccucaugaacgagcucggcguccccuuccaccucggcacccgccaggucugcaucgccugguccuccuccuccugccacgacggcaaggccuggcuccacgucugcgucaccggcgacgacaagaacgccaccgccuccuucaucuacaacggccgccucgucgacuccaucggcuccugguccaagaagauccuccgcacccaggaguccgagugcgucugcaucaacggcaccugcaccgucgucaugaccgacggcuccgccuccggcaaggccgacaccaagauccucuucaucgaggagggcaagaucguccacaucuccacccucuccggcuccgcccagcacgucgaggagugcuccugcuacccccgcuaccccggcguccgcugcgucugccgcgacaacuggaagggcuccaaccgccccaucgucgacaucaacgucaaggacuacuccaucgucuccuccuacgucugcuccggccucgucggcgacaccccccgcaagaacgacuccuucuccuccucccacugccucgaccccaacaacgaggagggcggccacggcgucaagggcugggccuucgacgacggcaacgacgucuggaugggccgcaccaucaacgagaagcuccgcuccggcuacgagaccuucaaggucaucgagggcugguccaagcccaacuccaagcuccagaucaaccgccaggucaucgucgagcgcggcaaccgcuccggcuacuccggcaucuucuccgucgagggcaaguccugcaucaaccgcugcuucuacgucgagcucauccgcggccgcaaggaggagaccgaggucugguggaccuccaacuccaucgucgucuucugcggcaccuccggcaccuacggcaccggcuccuggcccgacggcgccgacaucaaccucaugcccaucuga

SEQ ID NO: 111212 - RNA, 1410 nt, Artificial Sequence; identical to SEQ ID NO: 110627
  derived and/or modified CDS sequence (opt2) from neuraminidase__InfluenzaA__ABG48217

SEQ ID NO: 111213 - RNA, 1410 nt, Artificial Sequence; identical to SEQ ID NO: 110627
  derived and/or modified CDS sequence (opt2) from neuraminidase__InfluenzaA__ABG48228

SEQ ID NO: 111214 - RNA, 1410 nt, Artificial Sequence; identical to SEQ ID NO: 111211
  derived and/or modified CDS sequence (opt2) from neuraminidase__InfluenzaA__ABG48239

SEQ ID NO: 111215 - RNA, 1410 nt, Artificial Sequence; identical to SEQ ID NO: 110627
  derived and/or modified CDS sequence (opt2) from neuraminidase__InfluenzaA__ABG48250

SEQ ID NO: 111216 - RNA, 1410 nt, Artificial Sequence
  derived and/or modified CDS sequence (opt2) from neuraminidase__InfluenzaA__ABG48272
augaaccccaaccagaagaucaucaccaucggcuccgucucccucaccaucuccaccaucugcuucuucaugcagaucgccauccucaucaccaccgucacccuccacuucaagcaguacgaguucaacuccccccccaacaaccaggucaugcucugcgagcccaccaucaucgagcgcaacaucaccgagaucgucuaccucaccaacaccaccaucgagaaggagaucugccccaagcucgccgaguaccgcaacugguccaagccccagugcgacaucaccggcuucgcccccuucuccaaggacaacuccauccgccucuccgccggcggcgacaucugggucacccgcgagcccuacgucuccugcgaccccgacaagugcuaccaguucgcccucggccagggcaccacccucaacaacguccacuccaacgacaccguccacgaccgcacccccuaccgcacccuccucaugaacgagcucggcguccccuuccaccucggcaccaagcaggucugcaucgccugguccuccuccuccugccacgacggcaaggccuggcuccacgucugcgucaccggcgacgacaagaacgccaccgccuccuucaucuacaacggccgccucgucgacuccaucgucuccugguccaagaagauccuccgcacccaggaguccgagugcgucugcaucaacggcaccugcaccgucgucaugaccgacggcuccgccuccggcaaggccgacaccaagauccucuucaucgaggagggcaagaucguccacaccuccacccucuccggcuccgcccagcacgucgaggagugcuccugcuacccccgcuaccccggcguccgcugcgucugccgcgacaacuggaagggcuccaaccgccccaucgucgacaucaacaucaaggacuacuccaucgucuccuccuacgucugcuccggccucgucggcgacaccccccgcaagaacgacuccuccuccuccucccacugccucgaccccaacaacgaggagggcggccacggcgucaagggcugggccuucgacgacggcaacgacgucuggaugggccgcaccaucuccgagaagucccgcuccggcuacgagaccuucaaggucaucgagggcugguccaaccccaacuccaagcuccagaucaaccgccaggucaucgucgaccgcggcaaccgcuccggcuacuccggcaucuucuccgucgagggcaaguccugcaucaaccgcugcuucuacgucgagcucauccgcggccgcaaggaggagaccgagguccucuggaccuccaacuccaucgucgucuucugcggcaccuccggcaccuacggcaccggcuccuggcccgacggcgccgacaucaaccucaugcccaucuga

SEQ ID NO: 111217 - RNA, 1410 nt, Artificial Sequence
  derived and/or modified CDS sequence (opt2) from neuraminidase__InfluenzaA__ABG48294
augaaccccaaccagaagaucaucaccaucggcuccgucucccucaccaucgccaccaucugcuuccucaugcagaucgccauccucgucaccaccgucacccuccacuucaagcaguacgagugcuccuccccccccaacaaccaggucauccccugccagcccaccaucaucgagcgcaacaucaccgagaucgucuaccucaccaacaccaccaucgagaaggagaucugccccaagcucgucgaguaccgcaacugguccaagccccagugcaagaucaccggcuucgcccccuucuccaaggacaacuccauccgccucuccgccggcggcgacaucugggucacccgcgagcccuacgucuccugcgaccccggcaagugcuaccaguucgcccucggccagggcaccacccucaacaaccgccacuccaacgacaccguccacgaccgcacccccuaccgcacccuccucaugaacgagcucggcguccccuuccaccucggcaccaagcaggucugcaucgccugguccuccuccuccugccacgacggcaaggccuggcuccacgucugcgucaccggccacgacgagaacgccaccgccuccuucaucuacgacggccgccucgucgacuccaucggcuccuggucccgcaacauccuccgcacccaggaguccgagugcgucugcaucaacggcaccugcaccgucgucaugaccgacggcuccgccuccgagcgcgccgacaccaagauccucuucaucgaggagggcaaggucguccacaucuccccccucuccggcuccgcccagcacgucgaggagugcuccugcuacccccgcuaccccggcguccgcugcgucugccgcgacaacuggaagggcuccaaccgccccaucgucgacaucaacgucaaggacuacuccaucaucuccuccuacgucugcuccggccucgucggcgacaccccccgccgcaacgacuccuccuccuccuccuacugccagaaccccaacaacgagaagggcucccacggcgucaagggcugggccuucgacgacggcaacgacgucuggaugggccgcaccaucuccgaggagcuccgcuccggcuacgagaccuucaaggucaucggcggcugguccacccccaacuccaagcuccagaucaaccgccaggucaucgucgacuccggcaaccgcuccggcuacuccggcaucuucuccgucgagggcaaguccugcaucaaccgcugcuucuacgucgagcucauccgcggccgcaagcaggagaccaaggucugguggaccuccaacuccaucgucgucuucugcggcaccuccggcaccuacggcaccggcuccuggcccgacggcgccgacaucgaccucaugcccaucuga

SEQ ID NO: 111218 - RNA, 1410 nt, Artificial Sequence
  derived and/or modified CDS sequence (opt2) from neuraminidase__InfluenzaA__ABG48305
augaaccccaaccagaagaucaucaucaucggcuccgucucccucaccaucgccaccaucugcuuccucaugcagaucgccauccucgucaccaccgucacccuccacuucaagcaguacgagugcaacuccccccccaacaaccaggucaugcucugcgagcccaccaucaucgagcgcaacaucaccgagaucgucuaccucaccaacaccaccaucgagaaggagaucugccccaagcucgccgaguaccgcaacugguccaagccccagugcaagaucaccggcuucgcccccuucuccaaggacaacuccauccgccucuccgccggcggcgacaucugggucacccgcgagcccuacgucuccugcgaccccggcaagugcuaccaguucgcccucggccagggcaccacccucaacaaccgccacuccaacgacaccguccacgaccgcacccccuaccgcacccuccucaugaacgagcucggcguccccuuccaccucggcaccaagcaggucugcaucgccugguccuccuccuccugccacgacggcaaggccuggcuccacgucugcgucaccggccacgacgagaacgccaccgccuccuucaucuacgacggccgccucgucgacuccaucggcuccugguccaagaacauccuccgcacccaggaguccgagugcgucugcaucaacggcaccugcaccgucgucaugaccgacggcuccgccuccgagcgcgccgacaccaagauccucuucaucgaggagggcaagaucguccacaucuccccccucuccggcuccgcccagcacgucgaggagugcuccugcuacccccgcuaccccggcguccgcugcgucugccgcgacaacuggaagggcuccaaccgccccaucgucgacaucaacgucaaggacuacuccaucgucuccuccuacgucugcuccggccucgucggcgacaccccccgcaagaacgacuccuccuccuccuccuacugccgcaaccccaacaacgagaagggcucccacggcgucaagggcugggccuucgacgacggcaacgacgucuggaugggccgcaccaucuccgaggagcuccgcuccggcuacgagaccuucaaggucaucggcggcugguccaagcccaacuccaagcuccagaucaaccgccaggucaucgucgaccgcggcaaccgcuccggcuacuccggcaucuucuccgucgagggcaaguccugcaucaaccgcugcuucuacgucgagcucauccgcggccgcaagcaggagaccgaggucugguggaccuccaacuccaucgucgucuucugcggcaccuccggcaccuacggcaccggcuccuggcccgacggcgccgacaucaaccucaugcccaucuga

SEQ ID NO: 111219 - RNA, 1410 nt, Artificial Sequence
  derived and/or modified CDS sequence (opt2) from neuraminidase__InfluenzaA__ABG48316
augaaccccaaccagaagaucaucaccaucggcuccgucucccucaccgucgccaccaucugcuuccucaugcagaucgccauccucgucaccaccgucacccuccacuucaagcaguacgagugcaacuccccccccaacaaccaggucaugcucugcgagcccaccaucaucgagcgcaacaucaccgagaucgucuaccucaccaacaccaccaucgagaaggagaucugccccaagcucgccgaguaccgcaacugguccaagccccagugcaagaucaccggcuucgcccccuucuccaaggacaacuccauccgccucuccgccggcggcgacaucugggucacccgcgagcccuacgucuccugcgaccccggcaagugcuaccaguucgcccucggccagggcaccacccucaacaaccgccacuccaacgacaccguccacgaccgcacccccuaccgcacccuccucaugaacgagcucggcguccccuuccaccucggcaccaagcaggucugcaucgccugguccuccuccuccugccacgacggcaaggccuggcuccacgucugcgucaccggccacgacgagaacgccaccgccuccuucaucuacgacggccgccucgucgacuccaucggcuccugguccaagaacauccuccgcacccaggaguccgagugcgucugcaucaacggcaccugcaccgucgucaugaccgacggcuccgccuccgagcgcgccgacaccaagauccucuucaucgaggagggcaagaucguccacaucuccccccucuccggcuccgcccagcacgucgaggagugcuccugcuacccccgcuaccccggcguccgcugcgucugccgcgacaacuggaagggcuccaaccgccccaucgucgacaucaacgucaaggacuacuccaucgucuccuccuacgucugcuccggccucgucggcgacaccccccgcaagaacgacuccuccuccuccuccuacugccgcaaccccaacaacgagaagggcucccacggcgucaagggcugggccuucgacgacggcaacgacgucuggaugggccgcaccaucuccgaggagcuccgcuccggcuacgagaccuucaaggucaucggcggcugguccaagcccaacuccaagcuccagaucaaccgccaggucaucgucgagcgcggcaaccgcuccggcuacuccggcaucuucuccgucgagggcaaguccugcaucaaccgcugcuucuacgucgagcucauccgcggccgcaagcaggagaccgaggucugguggaccuccaacuccaucgucgucuucugcggcaccuccggcaccuacggcaccggcuccuggcccgacggcgccgacaucaaccucaugcccaucuga

SEQ ID NO: 111220 - RNA, 1410 nt, Artificial Sequence
  derived and/or modified CDS sequence (opt2) from neuraminidase__InfluenzaA__ABG48327
augaaccccaaccagaagaucaucaccaucggcuccgucucccucaccaucgccaccaucugcuuccucaugcagaucgccauccucgucaccaccgucacccuccacuucaagcaguacgagugcaacuccccccccaacaaccaggucaugcucugcgagcccaccaucaucgagcgcaacaucaccgagaucgucuaccucaccaacaccaccaucgagaaggagaucugccccaagcucgccgaguaccgcaacugguccaagccccagugcaagaucaccggcuucgcccccuucuccaaggacaacuccauccgccucuccgccggcggcgacaucugggucacccgcgagcccuacgucuccugcgaccccggcaagugcuaccaguucgcccucggccagggcaccacccucaacaaccgccacuccaacgacaccguccacgaccgcacccccuaccgcacccuccucaugaacgagcucggcguccccuuccaccucggcaccaagcaggucugcaucgccugguccuccuccuccugccacgacggcaaggccuggcuccacgucugcgucaccggccacgacgagaacgccaccgccuccuucaucuacgacggccgccucgucgacuccaucggcuccugguccaagaacauccuccgcacccaggaguccgagugcgucugcaucaacggcaccugcaccgucgucaugaccgacggcuccgccuccgagcgcgccgacaccaagauccucuucaucgaggagggcaagaucguccacaucuccccccucuccggcuccgcccagcacgucgaggagugcuccugcuacccccgcuaccccggcguccgcugcgucugccgcgacaacuggaagggcuccaaccgccccaucgucgacaucaacgucaaggacuacuccaucgucuccuccuacgucugcuccggccucgucggcgacaccccccgcaagaacgacuccuccuccuccuccuacugccgcaaccccaacaacgagaagggcucccgcggcgucaagggcugggccuucgacgacggcaacgacgucuggaugggccgcaccaucuccgaggagcuccgcuccggcuacgagaccuucaaggucaucggcggcugguccaagcccaacuccaagcuccagaucaaccgccaggucaucgucgaccgcggcaaccgcuccggcuacuccggcaucuucuccgucgagggcaaguccugcaucaaccgcugcuucuacgucgagcucauccgcggccgcaagcaggagaccgaggucugguggaccuccaacuccaucgucgucuucugcggcaccuccggcaccuacggcaccggcuccuggcccgacggcgccgacaucaaccucaugcccaucuga

SEQ ID NO: 111221 - RNA, 1410 nt, Artificial Sequence
  derived and/or modified CDS sequence (opt2) from neuraminidase__InfluenzaA__ABG48338
augaaccccaaccagaagaucaucaccaucggcuccgucucccucaccaucgccaccaucugcuuccucaugcagaucgccauccucgucaccaccgucacccuccacuucaagcaguacgagugcaacuccccccccaacaaccaggucaugcucugcgagcccaccaucaucgagcgcaacaucaccgagaucgucuaccucaccaacaccaccaucgagaaggagaucugccccaagcucgccgaguaccgcaacugguccaagccccagugcaagaucaccggcuucgcccccuucuccaaggacaacuccauccgccucuccgccggcggcgacaucugggucacccgcgagcccuacgucuccugcgaccccggcaagugcuaccaguucgcccucggccagggcaccacccucaacaaccgccacuccaacgacaccguccacgaccgcacccccuaccgcacccuccucaugaacgagcucggcguccccuuccaccucggcaccaagcaggucugcaucgccugguccuccuccuccugccacgacggcaaggccuggcuccacgucugcgucaccggccacgacgagaacgccaccgccuccuucaucuacgacggccgccucgucgacuccaucggcuccugguccaagaacauccuccgcacccaggaguccgagugcgucugcaucaacggcaccugcaccgucgucaugaccgacggcuccgccuccgagcgcgccgacaccaagauccucuucaucgaggagggcaagaucguccacaucuccccccucuccggcuccgcccagcacgucgaggagugcuccugcuacccccgcuaccccggcguccgcugcgucugccgcgacaacuggaagggcuccaaccgccccaucgucgacaucaacgucaaggacuacuccaucgucuccuccuacgucugcuccggccucgucggcgacaccccccgcaagaacgacuccuccuccuccuccuacugccgcaaccccaacaacgagaagggcucccacggcgucaagggcugggccuucgacgacggcaacgacgucuggaugggccgcaccaucuccgaggagcuccgcuccggcuacgagaccuucaaggucaucggcggcugguccaagcccaacuccaagcuccagaucaaccgccaggucaucgucgaccgcggcaaccgcuccggcuacuccggcaucuucuccgucgagggcaaguccugcaucaaccgcugcuucuacgucgagcucauccgcggccgcaagcaggagaccgaggucugguggaccuccaacuccaucgucgucuucugcggcaccuccggcaccuacggcaccggcuccuggcccgacggcgccgacaucaaccucaugcccaucuga

SEQ ID NO: 111222 - RNA, 1410 nt, Artificial Sequence; identical to SEQ ID NO: 111221
  derived and/or modified CDS sequence (opt2) from neuraminidase__InfluenzaA__ABG48349

SEQ ID NO: 111223 - RNA, 1410 nt, Artificial Sequence
  derived and/or modified CDS sequence (opt2) from neuraminidase__InfluenzaA__ABG48360
augaaccccaaccagaagaucaucaccaucggcuccgucucccucaccaucgccaccaucugcuuccucaugcagaucgccauccucgucaccaccgucacccuccacuucaagcaguacgagugcaacuccccccccaacaaccaggucaugcucugcgagcccaccaucaucgagcgcaacaucaccgagaucgucuaccucaccaacaccaccaucgagaaggagaucugccccaagcucgccgaguaccgcaacugguccaagccccagugcaagaucaccggcuucgcccccuucuccaaggacaacuccauccgccucuccgccggcggcgacaucugggucacccgcgagcccuacgucuccugcgaccccggcaagugcuaccaguucgcccucggccagggcaccacccucaacaaccgccacuccaacgacaccguccacgaccgcacccccuaccgcacccuccucauguccgagcucggcguccccuuccaccucggcaccaagcaggucugcaucgccugguccuccuccuccugccacgacggcaaggccuggcuccacgucugcgucaccggccacgacgagaacgccaccgccuccuucaucuacgacggcaagcucgucgacuccaucggcuccugguccaagaacauccuccgcacccaggaguccgagugcgucugcaucaacggcaccugcaccgucgucaugaccgacggcuccgccuccgagcgcgccgacaccaagauccucuucaucgaggagggcaagaucguccacaucuccccccucuccggcuccgcccagcacgucgaggagugcuccugcuacccccgcuaccccggcguccgcugcgucugccgcgacaacuggaagggcuccaaccgccccaucgucgacaucaacgucaaggaccacuccaucgucuccuccuacgucugcuccggccucgucggcgacaccccccgcaagaacgacuccuccuccuccuccuacugccgcaaccccaacaacgagaagggcucccacggcgucaagggcugggccuucgacgacggcaacgacgucuggaugggccgcaccaucuccgaggagcuccgcuccggcuacgagaccuucaaggucaucggcggcugguccaagcccaacuccaagcuccagaucaaccgccaggucaucgucgaccgcggcaaccgcuccggcuacuccggcaucuucuccgucgagggcaaguccugcaucaaccgcugcuucuacgucgagcucauccgcggccgcaagcaggagaccgaggucugguggaccuccaacuccaucgucgucuucugcggcaccuccggcaccuacggcaccggcuccuggcccgacggcgccgacaucaaccucaugcccaucuga

SEQ ID NO: 111224 - RNA, 1410 nt, Artificial Sequence; identical to SEQ ID NO: 111221
  derived and/or modified CDS sequence (opt2) from neuraminidase__InfluenzaA__ABG48371

SEQ ID NO: 111225 - RNA, 1410 nt, Artificial Sequence
  derived and/or modified CDS sequence (opt2) from neuraminidase__InfluenzaA__ABG67138
augaaccccaaccagaagaucaucaccaucggcuccgucucccucaccaucgccaccaucugcuuccucacccagaucgccauccucgucaccaccgucacccuccacuucaagcaguacgagugcaacuccccccccuccaaccaggucaugcucugcgagcccaccaccaucgagcgcaacaucaccgagaucgucuaccucaccaacaccaccaucgagaaggagaucugccccaagcucgccgaguaccgcaacugguccaagccccagugcaagaucaccggcuucgcccccuucuccaaggacaacuccauccgccucuccgccggcggcgacaucugggucacccgcgagcccuacgucuccugcgaccccgacaagugcuaccaguucgcccucggccagggcaccacccucaacaaccgccacuccaacgacaccguccacgaccgcacccccuaccgcacccuccucaugaacgagcucggcguccccuuccaccucggcaccaagcaggucugcaucgccugguccuccuccuccugccacgacggcaaggccuggcuccacgucugcgucaccggccacgacgagaacgccaccgccuccuucaucuacgacggccgccucgucgacuccaucggcuccugguccaagaagauccuccgcacccaggaguccgagugcgucugcaucaacggcaccugcaccgucgucaugaccgacggcuccgccuccggccgcgccgacaccaagauccucuucaucgaggagggcaagaucguccacaucuccccccucuccggcuccgcccagcacgucgaggagugcuccugcuacccccgcuaccccggcguccgcugcgucugccgcgacaacuggaagggcuccaaccgccccaucgucgacaucaacgucaaggacuacuccaucgucuccuccuacgucugcuccggccucgucggcgacaccccccgcaagaacgacuccuccuccuccucccacugccucaaccccaacaacgaggagggcggccacggcgucaagggcugggccuucgacgacggcaacgacgucuggaugggccgcaccaucuccgagaagcuccgcuccggcuacgagaccuucaaggucaucgagggcugguccaagcccaacuccaagcuccagaucaaccgccaggucaucgucgaccgcggcaaccgcuccggcuacuccggcaucuucuccgucgagggcaaguccugcaucaaccgcugcuucuacgucgagcucauccgcggccgcaagcaggagaccgaggucugguggaccuccaacuccaucgucgucuucugcggcaccuccggcaccuacggcaccggcuccuggcccgacggcgccgacaucaaccucaugcccaucuga

SEQ ID NO: 111226 - RNA, 1410 nt, Artificial Sequence; identical to SEQ ID NO: 110162
  derived and/or modified CDS sequence (opt2) from neuraminidase__InfluenzaA__ABG67149

SEQ ID NO: 111227 - RNA, 1410 nt, Artificial Sequence
  derived and/or modified CDS sequence (opt2) from neuraminidase__InfluenzaA__ABG67160
augaaccccaaccagaagaucaucaccaucggcuccgucucccucaccaucgccaccaucugcuuccucaugcagaucgccauccucgucaccaccgucacccuccacuucaagcaguacgagugcaacuccccccccaacaaccaggucaugcucugcgagcccaccaucaucgagcgcaacaucaccgagaucgucuaccucaccaacaccaccaucgagaaggagaucugccccaagcucgccgaguaccgcuccugguccaagccccagugcaagaucaccggcuucgcccccuucuccaaggacaacuccauccgccucuccgccggcggcgacaucugggucacccgcgagcccuacgucuccugcgaccccggcaagugcuaccaguucgcccucggccagggcaccacccucaacaaccgccacuccaacgacaccguccacgaccgcacccccuaccgcacccuccucaugaacgagcucggcguccccuuccaccucggcaccaagcaggucugcaucgccugguccuccuccuccugccacgacggcaaggccuggcuccacgucugcgucaccggccacgacgagaacgccaccgccuccuucaucuacgacggccgccucgucgacuccaucggcuccugguccaagaacauccuccgcacccaggaguccgagugcgucugcgucaacggcaccugcaccgucgucaugaccgacggcuccgccuccgagcgcgccgacaccaagauccucuucaucgaggagggcaagaucguccacaucuccccccucuccggcuccgcccagcacgucgaggagugcuccugcuacccccgcuaccccggcguccgcugcgucugccgcgacaacuggaagggcuccaaccgccccaucgucgacaucaacgucaaggacuacuccaucgucuccuccuacgucugcuccggccucgucggcgacaccccccgcaagaacgacuccuccuccuccuccuacugcuggaaccccaacaacgagaagggcggccacggcgucaagggcugggccuucgacgacggcaacgacgucuggaugggccgcaccaucuccgaggagcuccgcuccggcuacgagaccuucaaggucaucggcggcugguccaagcccaacuccaagcuccagaucaaccgccaggucaucgucgaccgcggcaaccgcuccggcuacuccggcaucuucuccgucgagggcaaguccugcaucaaccgcugcuucuacgucgagcucauccgcggccgcaagcaggagaccgaggucugguggaccuccaacuccaucgucgucuucugcggcaccuccggcaccuacggcaccggcuccuggcccgacggcgccgacaucaaccucaugcccaucuga

SEQ ID NO: 111228 - RNA, 1410 nt, Artificial Sequence
  derived and/or modified CDS sequence (opt2) from neuraminidase__InfluenzaA__ABG67171
augaaccccaaccagaagaucaucaccaucggcuccgucucccucaccaucgccaccaucugcuuccucaugcagaucgccauccucgucaccaccgucacccuccacuucaagcaguacgagugcaacuccccccccaacaaccaggucaugcucugcgagcccaccaucaucgagcgcaacaucaccgagaucgucuaccucaccaacaccaccaucgagaaggagaucugccccaagcucgccgaguaccgcaacugguccaagccccagugcaagaucaccggcuucgcccccuucuccaaggacaacuccauccgccucuccgccggcggcgacaucugggucacccgcgagcccuacgucuccugcgaccccggcaagugcuaccaguucgcccucggccagggcaccacccucaacaaccgccacuccaacgacaccguccacgaccgcacccccuaccgcacccuccucaugaacgagcucggcguccccuuccaccucggcaccaagcaggucugcaucgccugguccuccuccuccugccacgacggcaaggccuggcuccacgucugcgucaccggccacgacaagaacgccaccgccuccuucaucuacgacggccgccucgucgacuccaucggcuccugguccaagaacauccuccgcacccaggaguccgagugcgucugcaucaacggcaccugcaccgucgucaugaccgacggcuccgccuccgaccgcgccgacaccaagauccucuucaucgaggagggcaagaucguccacaucuccccccucuccggcuccgcccagcacgucgaggagugcuccugcuacccccgcuaccccggcguccgcugcgucugccgcgacaacuggaagggcuccaaccgccccaucgucgacaucaacgucaaggacuacuccaucgucuccuccuacgucugcuccggccucgucggcgacaccccccgcaagaacgacuccuccuccuccuccuacugcuggaaccccaacaacgagaagggcggccacggcgucaagggcugggccuucgacgacggcaacgacgucuggaugggccgcaccaucuccgaggagucccgcuccggcuacgagaccuucaaggucaucggcggcugguccaagcccaacuccaagcuccagaucaaccgccaggucaucgucgaccgcggcaaccgcuccggcuacuccggcaucuucuccgucgagggcaaguccugcaucaaccgcugcuucuacgucgagcucauccgcggccgcaagcaggagaccgaggucugguggaccuccaacuccaucgucgucuucugcggcaccuccggcaccuacggcaccggcuccuggcccgacggcgccgacaucaaccucaugcccaucuga

SEQ ID NO: 111229 - RNA, 1410 nt, Artificial Sequence; identical to SEQ ID NO: 111149
  derived and/or modified CDS sequence (opt2) from neuraminidase__InfluenzaA__ABG67182

SEQ ID NO: 111230 - RNA, 1410 nt, Artificial Sequence
  derived and/or modified CDS sequence (opt2) from neuraminidase__InfluenzaA__ABG67193
augaaccccaaccagaagaucaucaccaucggcuccgucucccucaccaucgccaccaucugcuuccucaugcagaucgccauccucgucaccaccgucacccuccacuucaagcaguacgagugcaacuccccccccaacaaccaggucaugcucugcgagcccaccaccaucgagcgcaacaucaccgagaucgucuaccucaccaacaccaccaucgagaaggagaucugccccaagcucgccgaguaccgcaacugguccaagccccagugcaagaucaccggcuucgcccccuucuccaaggacaacuccauccgccucuccgccggcggcgacaucugggucacccgcgagcccuacgucuccugcgaccccggcaagugcuaccaguucgcccucggccagggcaccacccucaacaaccgccacuccaacgacaccguccacgaccgcacccccuaccgcacccuccucaugaacgagcucggcguccccuuccaccucggcaccaagcaggucugcaucgccugguccuccuccuccugccacgacggcaaggccuggcuccacgucugcgucaccggccacgacgagaacgccaccgccuccuucaucuacgacggccgccucgucgacuccaucggcuccugguccaagaacauccuccgcacccaggaguccgagugcgucugcaucaacggcaccugcaccgucgucaugaccgacggcuccgccuccgaccgcgccgacaccaagauccucuucaucgaggagggcaagaucguccacaucuccccccucuccggcuccgcccagcacgucgaggagugcuccugcuacccccgcuaccccggcguccgcugcgucugccgcgacaacuggaagggcuccaaccgccccaucgucgacaucaacgucaagaacuacuccaucgucuccuccuacgucugcuccggccucgucggcgacaccccccgcaagaacgacuccuccuccuccuccuacugcuggaaccccaacaacgagaagggcggccacggcgucaagggcugggccuucgacgacggcaacgacgucuggaugggccgcaccaucuccgaggagucccgcuccggcuacgagaccuucaaggucaucggcggcugguccaagcccaacuccaagcuccagaucaaccgccaggucaucgucgaccgcggcaaccgcuccggcuacuccggcaucuucuccgucgagggcaaguccugcaucaaccgcugcuucuacgucgagcucauccgcggccgcaagcaggagaccgaggucugguggaccuccaacuccaucgucgucuucugcggcaccuccggcaccuacggcaccggcuccuggcccgacggcgccgacaucaaccucaugcccaucuga

SEQ ID NO: 111231 - RNA, 1410 nt, Artificial Sequence; identical to SEQ ID NO: 111149
  derived and/or modified CDS sequence (opt2) from neuraminidase__InfluenzaA__ABG67204

SEQ ID NO: 111232 - RNA, 1410 nt, Artificial Sequence
  derived and/or modified CDS sequence (opt2) from neuraminidase__InfluenzaA__ABG67215
augaaccccaaccagaagaucaucaccaucggcuccgucucccucaccaucgccaccaucugcuuccucaugcagaucgccauccucgucaccaccgucacccuccacuucaagcaguacgagugcaacuccccccccuccaaccaggucaugcucugcgagcccaccaucaucgagcgcaacaucaccgagaucgucuaccucaccaacaccaccaucgagaaggagaucugccccaagcucgccgaguaccgcaacugguccaagccccagugcaagaucaccggcuucgcccccuucuccaaggacaacuccauccgccucuccgccggcggcgacaucugggucacccgcgagcccuacgucuccugcggccccggcaagugcuaccaguucgcccucggccagggcaccacccucaacaaccgccacuccaacgacaccguccacgaccgcacccccuaccgcacccuccucaugaacgagcucggcguccccuuccaccucggcaccaagcaggucugcaucgccugguccuccuccuccugccacgacggcaaggccuggcuccacgucugcgucaccggccacgacgagaacgccaccgccuccuucaucuacgacggccgccucgucgacuccaucggcuccugguccaagaacauccuccgcacccaggaguccgagugcgucugcaucaacggcaccugcaccgucgucaugaccgacggcuccgccuccgagcgcgccgacaccaagauccucuucaucgaggagggcaagaucguccacaucuccccccucuccggcuccgcccagcacgucgaggagugcuccugcuacccccgcuaccccggcguccgcugcgucugccgcgacaacuggaagggcuccaaccgccccaucgucgacaucaacgucaaggacuacuccaucgucuccuccuacgucugcuccggccucgucggcgacaccccccgcaagaacgacuccuccuccuccuccuacugccgcaaccccaacaacgagaagggcucccacggcgucaagggcugggccuucgacgacggcaacgacgucuggaugggccgcaccaucuccgaggagcuccgcuccggcuacgagaccuucaaggucaucggcggcugguccaagcccaacuccaagcuccagaucaaccgccaggucaucgucgaccgcggcaaccgcuccggcuacuccggcaucuucuccgucgagggcaaguccugcaucaaccgcugcuucuacgucgagcucauccgcggccgcaagcaggagaccgaggucugguggaccuccaacuccaucgucgucuucugcggcaccuccggcaccuacggcaccggcuccuggcccgacggcgccgacaucaaccucaugcccaucuga

SEQ ID NO: 111233 - RNA, 1410 nt, Artificial Sequence; identical to SEQ ID NO: 111137
  derived and/or modified CDS sequence (opt2) from neuraminidase__InfluenzaA__ABG67226

SEQ ID NO: 111234 - RNA, 1410 nt, Artificial Sequence; identical to SEQ ID NO: 111137
  derived and/or modified CDS sequence (opt2) from neuraminidase__InfluenzaA__ABG67248

SEQ ID NO: 111235 - RNA, 1413 nt, Artificial Sequence; identical to SEQ ID NO: 110864
  derived and/or modified CDS sequence (opt2) from neuraminidase__InfluenzaA__ABG67480

SEQ ID NO: 111236 - RNA, 1413 nt, Artificial Sequence; identical to SEQ ID NO: 110432
  derived and/or modified CDS sequence (opt2) from neuraminidase__InfluenzaA__ABG67494

SEQ ID NO: 111237 - RNA, 1410 nt, Artificial Sequence; identical to SEQ ID NO: 110190
  derived and/or modified CDS sequence (opt2) from neuraminidase__InfluenzaA__ABG67505

SEQ ID NO: 111238 - RNA, 1410 nt, Artificial Sequence; identical to SEQ ID NO: 110190
  derived and/or modified CDS sequence (opt2) from neuraminidase__InfluenzaA__ABG67516

SEQ ID NO: 111239 - RNA, 1410 nt, Artificial Sequence; identical to SEQ ID NO: 111203
  derived and/or modified CDS sequence (opt2) from neuraminidase__InfluenzaA__ABG67527

SEQ ID NO: 111240 - RNA, 1410 nt, Artificial Sequence
  derived and/or modified CDS sequence (opt2) from neuraminidase__InfluenzaA__ABG67538
augaaccccaaccagaagaucaucaccaucggcuccgucucccucaccaucgccaccaucugcuuccucaugcagaucgccauccucgucaccaccgucacccuccacuucaagcaguacgagugcaacuccccccccaacaaccaggucaugcucugcgagcccaccaccaucgagcgcaacaccaccgagaucgucuaccucaccaacaccaccaucgagaaggagaucugccccaagcucgccgaguaccgcaacugguccaagccccagugcaacaucaccggcuucgcccccuucuccaaggacaacuccauccgccucuccgccggcggcgacaucugggucacccgcgagcccuacgucuccugcgaccccgacaagugcuaccaguucgcccucggccagggcaccacccucaacaacggccacuccaacgacaccguccacgaccgcacccccuaccgcacccuccucaugaacgagcucggcguccccuuccaccucggcacccgccaggucugcaucgccugguccuccuccuccugccacgacggcaaggccuggcuccacgucugcgucaccggcgacgacgagaacgccaccgccuccuucaucuacaacggccgccucgucgacuccaucggcuccugguccaagaagauccuccgcacccaggaguccgagugcgucugcaucaacggcaccugcaccgucgucaugaccgacggcuccgccuccggcaaggccgacaccaagauccucuucaucgaggagggcaagaucguccacaucuccacccucuccggcuccgcccagcacgucgaggagugcuccugcuacccccgcuaccccggcguccgcugcgucugccgcgacaacuggaagggcuccaaccgccccaucaucgacaucaacgucaaggacuacuccaucgucuccuccuacgucugcuccggccucgucggcgacaccccccgcaagaacgacuccuucuccuccucccacugccucgaccccaacaacgaggagggcggccacggcgucaagggcugggccuucgacgacggcaacgacgucuggaugggccgcaccaucuccgagaagcuccgcuccggcuacgagaccuucaaggucaucgagggcugguccaagcccaacuccaagcuccagaccaaccgccaggucaucgucgagcgcggcaaccgcuccggcuacuccggcaucuucuccgucgagggcaaguccugcaucaaccgcugcuucuacgucgagcucauccgcggccgcaaggaggagaccgaggucugguggaccuccaacuccaucgucgucuucugcggcaccuccggcaccuacggcaccggcuccuggcccgacggcgccgacaucaaccucaugcccaucuga

SEQ ID NO: 111241 - RNA, 1410 nt, Artificial Sequence
  derived and/or modified CDS sequence (opt2) from neuraminidase__InfluenzaA__ABG67549
augaaccccaaccagaagaucaucaccaucggcuccgucucccucaccaucgccaccaucugcuuccucaugcagaucgccauccucgucaccaccgucacccuccacuucaagcagcacgagugcaacuccccccccaacaaccaggucaugcucugcgagcccaccaucaucgagcgcaacaucaccgagaucgucuaccucaccaacaccaccaucgagaaggagaucugccccaagcucgucgaguaccgcaacugguccaagccccagugcaacaucaccggcuucgcccccuucuccaaggacaacuccauccgccucuccgccggcggcgacaucugggucacccgcgagcccuacgucuccugcgaccccgacaagugcuaccaguucgcccucggccagggcaccacccucaacaacggccacuccaacgacaccguccacgaccgcacccccuaccgcacccuccucaugaacgagcucggcguccccuuccaccucggcacccgccaggucugcaucgccugguccuccuccuccugccacgacggcaaggccuggcuccacgucugcgucaccggcgacgacaagaacgccaccgccuccuucaucuacaacggccgccucgucgacuccaucggcuccugguccaagaagauccuccgcacccaggaguccgagugcgucugcaucaacggcaccugcaccgucgucaugaccgacggcuccgccuccggcaaggccgacaccaagauccucuucaucgaggagggcaagaucguccacaucuccacccucuccggcuccgcccagcacgucgaggagugcuccugcuacccccgcuaccccggcguccgcugcgucugccgcgacaacuggaagggcuccaaccgccccaucgucgacaucaacgucaaggacuacuccaucgucuccuccuacgucugcuccggccucgucggcgacaccccccgcaagaacgacuccuucuccuccucccacugccucgaccccaacaacgaggagggcggccacggcgucaagggcugggccuucgacgacggcaacgacgucuggaugggccgcaccaucuccgagaagcuccgcuccggcuacgagaccuucaaggucaucgagggcugguccaagcccaacuccaagcuccagaucaaccgccaggucaucgucgagcgcggcaaccgcuccggcuacuccggcaucuucuccgucgagggcaaguccugcaucaaccgcugcuucuacgucgagcucauccgcggccgcaaggaggagaacgaggucugguggaccuccaacuccaucgucgucuucugcggcaccuccggcaccuacggcaccggcuccuggcccgacggcgccgacaucaaccucaugcccaucuga

SEQ ID NO: 111242 - RNA, 1410 nt, Artificial Sequence; identical to SEQ ID NO: 110627
  derived and/or modified CDS sequence (opt2) from neuraminidase__InfluenzaA__ABG67560

SEQ ID NO: 111243 - RNA, 1410 nt, Artificial Sequence; identical to SEQ ID NO: 110627
  derived and/or modified CDS sequence (opt2) from neuraminidase__InfluenzaA__ABG67571

SEQ ID NO: 111244 - RNA, 1410 nt, Artificial Sequence
  derived and/or modified CDS sequence (opt2) from neuraminidase__InfluenzaA__ABG67582
augaaccccaaccagaagaucaucaccaucggcuccgucucccucaccaucgccaccaucugcuuccucaugcagaucgccauccucgucaccaccgucacccuccacuucaagcagcacgagugcaacuccccccccaacaaccaggucaugcucugcgagcccaccaucaucgagcgcaacaucaccgagaucgucuaccucaccaacaccaccaucgagaaggagaucugccccaagcucgucgaguaccgcaacugguccaagccccagugcaacaucaccggcuucgcccccuucuccaaggacaacuccauccgccucuccgccggcggcgacaucugggucacccgcgagcccuacgucuccugcgaccccgacaagugcuaccaguucgcccucggccagggcaccacccucaacaacggccacuccaacgacaccguccacgaccgcacccccuaccgcacccuccucaugaacgagcucggcguccccuuccaccucggcacccgccaggucugcaucgccugguccuccuccuccugccacgacggcaaggccuggcuccacgucugcgucaccggcgacgacaagaacgccaccgccuccuucaucuacaacggccgccucgucgacuccaucggcuccugguccaagaagauccuccgcacccaggaguccgagugcgucugcaucaacggcaccugcaccgucgucaugaccgacggcuccgccuccggcaaggccgacaccaagauccucuucaucgaggagggcaagaucguccacaucuccacccucuccggcuccgccaagcacgucgaggagugcuccugcuacccccgcuaccccggcguccgcugcgucugccgcgacaacuggaagggcuccaaccgccccaucgucgacaucaacgucaaggacuacuccaucgucuccuccuacgucugcuccggccucgucggcgacaccccccgcaagaacgacuccuucuccuccucccacugccucgaccccaacaacgaggagggcggccacggcgucaagggcugggccuucgacgacggcaacgacgucuggaugggccgcaccaucuccgagaagcuccgcuccggcuacgagaccuucaaggucaucgagggcugguccaagcccaacuccaagcuccagaucaaccgccaggucaucgucgagcgcggcaaccgcuccggcuacuccggcaucuucuccgucgagggcaaguccugcaucaaccgcugcuucuacgucgagcucauccgcggccgcaaggaggagaccgaggucugguggaccuccaacuccaucgucgucuucugcggcaccuccggcaccuacggcaccggcuccuggcccgacggcgccgacaucaaccucaugcccaucuga

SEQ ID NO: 111245 - RNA, 1410 nt, Artificial Sequence; identical to SEQ ID NO: 111211
  derived and/or modified CDS sequence (opt2) from neuraminidase__InfluenzaA__ABG67593

SEQ ID NO: 111246 - RNA, 1410 nt, Artificial Sequence; identical to SEQ ID NO: 110627
  derived and/or modified CDS sequence (opt2) from neuraminidase__InfluenzaA__ABG67604

SEQ ID NO: 111247 - RNA, 1410 nt, Artificial Sequence; identical to SEQ ID NO: 110627
  derived and/or modified CDS sequence (opt2) from neuraminidase__InfluenzaA__ABG67615

SEQ ID NO: 111248 - RNA, 1410 nt, Artificial Sequence; identical to SEQ ID NO: 110627
  derived and/or modified CDS sequence (opt2) from neuraminidase__InfluenzaA__ABG67626

SEQ ID NO: 111249 - RNA, 1410 nt, Artificial Sequence; identical to SEQ ID NO: 110627
  derived and/or modified CDS sequence (opt2) from neuraminidase__InfluenzaA__ABG67637

SEQ ID NO: 111250 - RNA, 1410 nt, Artificial Sequence; identical to SEQ ID NO: 110627
  derived and/or modified CDS sequence (opt2) from neuraminidase__InfluenzaA__ABG67648

SEQ ID NO: 111251 - RNA, 1410 nt, Artificial Sequence
  derived and/or modified CDS sequence (opt2) from neuraminidase__InfluenzaA__ABG67659
augaaccccaaccagaagaucaucaccaucggcuccgucucccucaccaucgccaccaucugcuuccucaugcagaucgccauccucgucaccaccgucacccuccacuucaagcagcacgagugcaacuccccccccaacaaccaggucaugcucugcgagcccaccaucaucgagcgcaacaucaccgagaucgucuaccucaccaacaccaccaucgagaaggagaucugccccaagcucgucgaguaccgcaacugguccaagccccagugcaacaucaccggcuucgcccccuucucccgcgacaacuccauccgccucuccgccggcggcgacaucugggucacccgcgagcccuacgucuccugcgaccccgacaagugcuaccaguucgcccucggccagggcaccacccucaacaacggccacuccaacgacaccguccacgaccgcacccccuaccgcacccuccucaugaacgagcucggcguccccuuccaccucggcacccgccaggucugcaucgccugguccuccuccuccugccacgacggcaaggccuggcuccacgucugcgucaccggcgacgacaagaacgccaccgccuccuucaucuacaacggccgccucgucgacuccaucggcuccugguccaagaagauccuccgcacccaggaguccgagugcgucugcaucaacggcaccugcaccgucgucaugaccgacggcuccgccuccggcaaggccgacaccaagauccucuucaucgaggagggcaagaucguccacaucuccacccucuccggcuccgcccagcacgucgaggagugcuccugcuacccccgcuaccccggcguccgcugcgucugccgcgacaacuggaagggcuccaaccgccccaucgucgacaucaacgucaaggacuacuccaucgucuccuccuacgucugcuccggccucgucggcgacaccccccgcaagaacgacuccuucuccuccucccacugccucgaccccaacaacgaggagggcggccacggcgucaagggcugggccuucgacgacggcaacgacgucuggaugggccgcaccaucuccgagaagcuccgcuccggcuacgagaccuucaaggucaucgagggcugguccaagcccaacuccaagcuccagaucaaccgccaggucaucgucgagcgcggcaaccgcuccggcuacuccggcaucuucuccgucgagggcaaguccugcaucaaccgcugcuucuacgucgagcucauccgcggccgcaaggaggagaccgaggucugguggaccuccaacuccaucgucgucuucugcggcaccuccggcaccuacggcaccggcuccuggcccgacggcgccgacaucaaccucaugcccaucuga

SEQ ID NO: 111252 - RNA, 1410 nt, Artificial Sequence
  derived and/or modified CDS sequence (opt2) from neuraminidase__InfluenzaA__ABG67670
augaaccccaaccagaagaucaucaccaucggcuccgucucccucaccaucgccaccaucugcuuccucaugcagaucgccauccucaucaccaccgucacccuccacuucaagcaguacgagugcaacuccccccccaacaaccaggucaugcucugcgagcccaccaucaucgagcgcaacaucaccgagaucgucuaccucaccaacaccaccaucgagaaggagaucugccccaagcucgccgaguaccgcaacugguccaagccccagugcaagaucaccggcuucgcccccuucuccaaggacaacuccauccgccucuccgccggcggcgacaucugggucacccgcgagcccuacgucuccugcgaccccggcaagugcuaccaguucgcccucggccagggcaccacccucaacaaccgccacuccaacgacaccguccacgaccgcacccccuaccgcacccuccucaugaacgagcucggcguccccuuccaccucggcaccaagcaggucugcaucgccugguccuccuccuccugccacgacggcaaggccuggcuccacgucugcgucaccggccacgacgagaacgccaccgccuccuucaucuacgacggccgccucgucgacuccaucggcuccugguccaagaacauccuccgcacccaggaguccgagugcgucugcaucaacggcaccugcaccgucgucaugaccgacggcuccgccuccggccgcgccgacaccaagauccucuucaucgaggagggcaagaucguccacaucuccccccucuccggcuccgcccagcacgucgaggagugcuccugcuacccccgcuaccccggcguccgcugcgucugccgcgacaacuggaagggcuccaaccgccccaucgucgacaucaacgucaaggacuacuccaucgucuccuccuacgucugcuccggccucgucggcgacaccccccgcaagaacgacuccuccuccuccucccacugccucaaccccaacaacgaggagggcggccacggcgucaagggcugggccuucgacgacggcaacgacgucuggaugggccgcaccaucuccgagaagcuccgcuccggcuacgagaccuucaaggucaucggcggcugguccaagcccaacuccaagcuccagaucaaccgccaggucaucgucgaccgcggcaaccgcuccggcuacuccggcaucuucuccgucgagggcaaguccugcaucaaccgcugcuucuacgucgagcucauccgcggccgcaagcaggagaccgaggucugguggaccuccaacuccaucgucgucuucugcggcaccuccggcaccuacggcaccggcuccuggcccgacggcgccgacaucaaccucaugcccaucuga

SEQ ID NO: 111253 - RNA, 1410 nt, Artificial Sequence; identical to SEQ ID NO: 110766
  derived and/or modified CDS sequence (opt2) from neuraminidase__InfluenzaA__ABG79944

SEQ ID NO: 111254 - RNA, 1413 nt, Artificial Sequence; identical to SEQ ID NO: 111095
  derived and/or modified CDS sequence (opt2) from neuraminidase__InfluenzaA__ABG79955

SEQ ID NO: 111255 - RNA, 1410 nt, Artificial Sequence
  derived and/or modified CDS sequence (opt2) from neuraminidase__InfluenzaA__ABG79966
augaaccccaaccagaagaucaucaccaucggcuccgucucccucaccaucgccaccaucugcuuccucaugcagaucgccauccucgucaccaccgucacccuccacuucaagcaguacgagugcaacuccccccccuccaaccaggucaugcucugcgagcccaccaucaucgagcgcaacaucaccgagaucgucuaccucaccaacaccaccaucgagaaggagaucugccccaagcucgccgaguaccgcaacugguccaagccccagugcaagaucaccggcuucgcccccuucuccaaggacaacuccauccgccucuccgccggcggcgacaucugggucacccgcgagcccuacgucuccugcgaccccggcaagugcuaccaguucgcccucggccagggcaccacccucaacaaccgccacuccaacgacaccguccacgaccgcacccccuaccgcacccuccucaugaacgagcucggcguccccuuccaccucggcaccaagcaggucugcaucgccugguccuccuccuccugccacgacggcaaggccuggcuccacgucugcgucaccggccacgacgagaacgccaccgccuccuucaucuacgacggccgccucgucgacuccaucggcuccugguccaagaacauccuccgcacccaggaguccgagugcgucugcaucaacggcaccugcaccgucgucaugaccgacggcuccgccuccgagcgcgccgacaccaagauccucuucaucgaggagggcaagaucguccacaucuccccccucuccggcuccgcccagcacgucgaggagugcuccugcuacccccgcuaccccggcguccgcugcgucugccgcgacaacuggaagggcuccaaccgccccaucgucgacaucaacgucaaggacuacuccaucgucuccuccuacgucugcuccggccucgucggcgacaccccccgcaagaacgacuccuccuccuccuccuacugccagaaccccaacaacgagaagggcucccacggcgucaagggcugggccuucgacgacggcaacgacgucuggaugggccgcaccaucuccgaggagcuccgcuccggcuacgagaccuucaaggucaucggcggcugguccaagcccaacuccaagcuccagaucaaccgccaggucaucgucgaccgcggcaaccgcuccggcuacuccggcaucuucuccgucgagggcaaguccugcaucaaccgcugcuucuacgucgagcucauccgcggccgcaagcaggagaccgaggucugguggaccuccaacuccaucgucgucuucugcggcaccuccggcaccuacggcaccggcuccuggcccgacggcgccgacaucaaccucaugcccaucuga

SEQ ID NO: 111256 - RNA, 1410 nt, Artificial Sequence
  derived and/or modified CDS sequence (opt2) from neuraminidase__InfluenzaA__ABG79977
augaaccccaaccagaagaucaucaccaucggcuccgucucccucaccaucgccaccaucugcuuccucaugcagaucgccauccucgucaccaccgucacccuccacuucaagcaguacgagugcaacuccccccccaacaaccaggccaugcucugcgagcccaccaucaucgagcgcaacaucaccgagaucgucuaccucaccaacaccaccaucgagaaggagaucugccccaagcucgccgaguaccgcaacugguccaagccccagugcaagaucaccggcuucgcccccuucuccaaggacaacuccauccgccucuccgccggcggcgacaucugggucacccgcgagcccuacgucuccugcgaccccggcaagugcuaccaguucgcccucggccagggcaccacccucaacaaccgccacuccaacgacaccguccacgaccgcacccccuaccgcacccuccucaugaacgagcucggcguccccuuccaccucggcaccaagcaggucugcaucgccugguccuccuccuccugccacgacggcaaggccuggcuccacgucugcgucaccggccacgacgagaacgccaccgccuccuucaucuacgacggccgccucgucgacuccaucggcuccugguccaagaacauccuccgcacccaggaguccgagugcgucugcaucaacggcaccugcaccgucgucaugaccgacggcuccgccuccgaccgcgccgacaccaagauccucuucaucgaggagggcaagaucguccacaucuccccccucuccggcuccgcccagcacgucgaggagugcuccugcuacccccgcuaccccggcguccgcugcgucugccgcgacaacuggaagggcuccaaccgccccaucgucgacaucaacgucaaggacuacuccaucgucuccuccuacgucugcuccggccucgucggcgacaccccccgcaagaacgacuccuccuccuccuccuacugcuggaaccccaacaacgagaagggcggccacggcgucaagggcugggccuucgacgacggcaacgacgucuggaugggccgcaccaucuccgaggagucccgcuccggcuacgagaccuucaaggucaucggcggcugguccaagcccaacuccaagcuccagaucaaccgccaggucaucgucgaccgcggcaaccgcuccggcuacuccggcaucuucuccgucgagggcaaguccugcaucaaccgcugcuucuacgucgagcucauccgcggccgcaagcaggagaccgaggucugguggaccuccaacuccaucgucgucuucugcggcaccuccggcaccuacggcaccggcuccuggcccgacggcgccgacaucaaccucaugcccaucuga

SEQ ID NO: 111257 - RNA, 1410 nt, Artificial Sequence; identical to SEQ ID NO: 111149
  derived and/or modified CDS sequence (opt2) from neuraminidase__InfluenzaA__ABG79988

SEQ ID NO: 111258 - RNA, 1410 nt, Artificial Sequence; identical to SEQ ID NO: 111149
  derived and/or modified CDS sequence (opt2) from neuraminidase__InfluenzaA__ABG79999

SEQ ID NO: 111259 - RNA, 1410 nt, Artificial Sequence
  derived and/or modified CDS sequence (opt2) from neuraminidase__InfluenzaA__ABG80010
augaaccccaaccagaagaucaucaccaucggcuccgucucccucaccaucgccaccaucugcuuccucaugcagaucgccauccucgucaccaccgucacccuccacuucaagcaguacgagugcaacuccccccccaacaaccaggucaugcucugcgagcccaccaucaucgagcgcaacaucaccgagaucgucuaccucaccaacaccaccaucgagaaggagaucugccccaagcucgccgaguaccgcaacugguccaagccccagugcaagaucaccggcuucgcccccuucuccaaggacaacuccauccgccucuccgccggcggcgacaucugggucacccgcgagcccuacgucuccugcgaccccggcaagugcuaccaguucgcccucggcaagggcaccacccucaacaaccgccacuccaacgacaccguccacgaccgcacccccuaccgcacccuccucaugaacgagcucggcguccccuuccaccucggcaccaagcaggucugcaucgccugguccuccuccuccugccacgacggcaaggccuggcuccacgucugcgucaccggccacgacgagaacgccaccgccuccuucaucuacgacggccgccucgucgacuccaucggcuccugguccaagaacauccuccgcacccaggaguccgagugcgucugcaucaacggcaccugcaccgucgucaugaccgacggcuccgccuccgaccgcgccgacaccaagauccucuucaucgaggagggcaagaucguccacaucuccccccucuccggcuccgcccagcacgucgaggagugcuccugcuacccccgcuaccccggcguccgcugcgucugccgcgacaacuggaagggcuccaaccgccccaucgucgacaucaacgucaaggacuacuccaucgucuccuccuacgucugcuccggccucgucggcgacaccccccgcaagaacgacuccuccuccuccuccuacugcuggaaccccaacaacgagaagggcggccacggcgucaagggcugggccuucgacgacggcaacgacgucuggaugggccgcaccaucuccgaggagucccgcuccggcuacgagaccuucaaggucaucggcggcugguccaagcccaacuccaagcuccagaucaaccgccaggucaucgucgaccgcggcaaccgcuccggcuacuccggcaucuucuccgucgagggcaaguccugcaucaaccgcugcuucuacgucgagcucauccgcggccgcaagcaggagaccgaggucugguggaccuccaacuccaucgucgucuucugcggcaccuccggcaccuacggcaccggcuccuggcccgacggcgccgacaucaaccucaugcccaucuga

SEQ ID NO: 111260 - RNA, 1410 nt, Artificial Sequence; identical to SEQ ID NO: 111149
  derived and/or modified CDS sequence (opt2) from neuraminidase__InfluenzaA__ABG80021

SEQ ID NO: 111261 - RNA, 1410 nt, Artificial Sequence
  derived and/or modified CDS sequence (opt2) from neuraminidase__InfluenzaA__ABG80032
augaaccccaaccagaagaucaucaccaucggcuccgucucccucaccaucgccaccaucugcuuccucaugcagaucgccauccucgucaccaccgucacccuccacuucaagcaguacgagugcaacuccccccccaacaaccaggucaugcucugcgagcccaccaucaucgagcgcaacaucaccgagaucgucuaccucaccaacaccaccaucgagaaggagaucugccccaagcucgccgaguaccgcaacugguccaagccccagugcaagaucaccggcuucgcccccuucuccaaggacaacuccauccgccucuccgccggcggcgacaucugggucacccgcgagcccuacgucuccugcgaccccggcaagugcuaccaguucgcccucggccagggcaccacccucaacaaccgccacuccaacgacaccguccacgaccgcacccccuaccgcacccuccucaugaacgagcucggcguccccuuccaccucggcaccaagcaggucugcaucgccugguccuccuccuccugccacgacggcaaggccuggcuccacgucugcgucaccggccacgacgagaacgccaccgccuccaucaucuacgacggccgccucgucgacuccaucuccuccugguccaagaacauccuccgcacccaggaguccgagugcgucugcaucaacggcaccugcaccgucgucaugaccgacggcuccgccuccgagcgcgccgacaccaagauccucuucaucgaggagggcaagaucguccacaucuccccccucuccggcuccgcccagcacgucgaggagugcuccugcuacccccgcuaccccggcguccgcugcgucugccgcgacaacuggaagggcuccaaccgccccaucgucgacaucaacgucaaggacuacuccaucgucuccuccuacgucugcuccggccucgucggcgacaccccccgcaagaacgacuccuccuccuccuccuacugccucaaccccaacaacgaggagggcggccacggcgucaagggcugggccuucgacgacggcaacgacgucuggaugggccgcaccaucuccgagaagcuccgcuccggcuacgagaccuucaaggucaucggcggcugguccaagcccaacuccaagcuccagaucaaccgccaggucaucgucgaccgcggcaaccgcuccggcuacuccggcaucuucuccgucgagggcaaguccugcgucaaccgcugcuucuacgucgagcucauccgcggccgcaagcaggagaccgaggucugguggaccuccaacuccaucgucgucuucugcggcaccuccggcaccuacggcaccggcuccuggcccgacggcgccgacaucaaccucaugcccaucuga

SEQ ID NO: 111262 - RNA, 1410 nt, Artificial Sequence; identical to SEQ ID NO: 111136
  derived and/or modified CDS sequence (opt2) from neuraminidase__InfluenzaA__ABG80043

SEQ ID NO: 111263 - RNA, 1410 nt, Artificial Sequence; identical to SEQ ID NO: 111149
  derived and/or modified CDS sequence (opt2) from neuraminidase__InfluenzaA__ABG80054

SEQ ID NO: 111264 - RNA, 1410 nt, Artificial Sequence; identical to SEQ ID NO: 111136
  derived and/or modified CDS sequence (opt2) from neuraminidase__InfluenzaA__ABG80065

SEQ ID NO: 111265 - RNA, 1410 nt, Artificial Sequence
  derived and/or modified CDS sequence (opt2) from neuraminidase__InfluenzaA__ABG80076
augaaccccaaccagaagaucaucaccaucggcuccgucucccucaccaucgccaccaucugcuuccucaugcagaucgccauccucgucaccaccgucacccuccacuucaagcaguacgagugcaacuccccccccaacaaccaggucaugcucugcgagcccaccaucaucgagcgcaacaucaccgagaucgucuaccucaccaacaccaccaucgagaaggagaucugccccaagcucgccgaguaccgcaacugguccaagccccagugcaagaucaccggcuucgcccccuucuccaaggacaacuccauccgccucuccgccggcggcgacaucugggucacccgcgagcccuacgucuccugcgaccccggcaagugcuaccaguucgcccucggccagggcaccacccucaacaaccgccacuccaacgacaccguccacgaccgcacccccuaccgcacccuccucaugaacgagcucggcguccccuuccaccucggcaccaagcaggucugcaucgccugguccuccuccuccugccacgacggcaaggccuggcuccacgucugcgucaccggccacgacgagaacgccaccgccuccuucaucuacgacggccgccucgucgacuccaucggcuccugguccaagaacauccuccgcacccaggaguccgagugcgucugcaucaacggcaccugcaccgucgucaugaccgacggcuccgccuccgagcgcgccgacaccaagauccucuucaucgaggagggcaagaucguccacaucuccccccucuccggcuccgcccagcacgucgaggagugcuccugcuacccccgcuaccccggcguccgcugcgucugccgcgacaacuggaagggcuccaaccgccccaucgucgacaucaacgucaaggacuacuccaucgucuccuccuacgucugcuccggccucgucggcgacaccccccgcaagaacgacuccuccuccuccuccuacugccgcaaccccaacaacgagaagggcucccacggcgucaagggcugggccuucgacgacggcaacgacgucuggaugggccgcaccaucuccgaggagcuccgcuccggcuacgagaccuucaaggucaucggcggcugguccaagcccaacuccaagcuccagaucaaccgccaggucaucgucgaccgcggcaaccgcuccggcuacuccggcaucuucuccgucgagggcaagaacugcaucaaccgcugcuucuacgucgagcucauccgcggccgcaagcaggagaccgaggucugguggaccuccaacuccaucgucgucuucugcggcaccuccggcaccuacggcaccggcuccuggcccgacggcgccgacaucaaccucaugcccaucuga

SEQ ID NO: 111266 - RNA, 1410 nt, Artificial Sequence
  derived and/or modified CDS sequence (opt2) from neuraminidase__InfluenzaA__ABG80087
augaaccccaaccagaagaucaucaccaucggcuccgucucccucaccaucgccaccaucugcuuccucaugcagaucgccguccucgucaccaccgucacccuccacuucaagcaguacgagugcaacuccccccccuccaaccaggucaugcucugcgagcccaccaucaucgagcgcaacaucaccgagaucgucuaccucaccaacaccaccaucgagaaggagaucugccccaagcucgccgaguaccgcaacugguccaagccccagugcaagaucaccggcuucgcccccuucuccaaggacaacuccauccgccucuccgccggcggcgacaucugggucacccgcgagcccuacgucuccugcgaccccggcaagugcuaccaguucgcccucggccagggcaccacccucaacaaccgccacuccaacgacaccguccacgaccgcacccccuaccgcacccuccucaugaacgagcucggcguccccuuccaccucggcaccaagcaggucugcauggccugguccuccuccuccugccacgacggcaaggccuggcuccacgucugcgucaccggccacgacgagaacgccaccgccuccuucaucuacgacggccgccucgucgacuccaucggcuccugguccaagaacauccuccgcacccaggaguccgagugcgucugcaucaacggcaccugcaccgucgucaugaccgacggcuccgccuccgagcgcgccgacaccaagauccucuucaucgaggagggcaagaucguccacaucuccccccucuccggcuccgcccagcacgucgaggagugcuccugcuacccccgcuaccccggcguccgcugcgucugccgcgacaacuggaagggcuccaaccgccccaucgucgacaucaacgucaaggacuacuccaucgucuccuccuacgucugcuccggccucgucggcgacaccccccgcaagaacgacuccuccuccuccuccuacugccgcaaccccaacaacgagaagggcucccacggcgucaagggcugggccuucgacgacggcaacgacgucuggaugggccgcaccaucuccgaggagcuccgcuccggcuacgagaccuucaaggucaucggcggcugguccaagcccaacuccaagcuccagaucaaccgccaggucaucgucgaccgcggcaaccgcuccggcuacuccggcaucuucuccgucgagggcaaguccugcaucaaccgcugcuucuacgucgagcucauccgcggccgcaagcaggagaccgaggucugguggaccuccaacuccaucgucgucuucugcggcaccuccggcaccuacggcaccggcuccuggcccgacggcgccgacaucaaccucaugcccaucuga

SEQ ID NO: 111267 - RNA, 1410 nt, Artificial Sequence; identical to SEQ ID NO: 111193
  derived and/or modified CDS sequence (opt2) from neuraminidase__InfluenzaA__ABG80098

SEQ ID NO: 111268 - RNA, 1410 nt, Artificial Sequence; identical to SEQ ID NO: 111137
  derived and/or modified CDS sequence (opt2) from neuraminidase__InfluenzaA__ABG80109

SEQ ID NO: 111269 - RNA, 1410 nt, Artificial Sequence
  derived and/or modified CDS sequence (opt2) from neuraminidase__InfluenzaA__ABG80120
augaaccccaaccagaagaucaucaccaucggcuccgucucccucaccaucgccaccaucugcuuccucaugcagaucgccauccucgucaccaccgucacccuccacuucaagcaguacgagugcaacuccccccccuccaaccaggucaugcucugcgagcccaccaucaucgagcgcaacaucaccgagaucgucuaccucaccaacaccaccaucgagaaggagaucugccccaagcucgccgaguaccgcaacugguccaagccccagugcaagaucaccggcuucgcccccuucuccaaggacaacuccauccgccucuccgccggcggcgacaucugggucacccgcgagcccuacgucuccugcgaccccggcaagugcuaccaguucgcccucggccagggcaccacccucaacaaccgccacuccaacgacaccguccacgaccgcacccccuaccgcacccuccucaugaacgagcucggcguccccuuccaccucggcaccaagcaggucugcaucgccugguccuccuccuccugccacgacggcaaggccuggcuccacgucugcgucaccggccacgacgagaacgccaccgccuccuucaucuacgacggccgccucgucgacuccaucggcuccugguccaagaacauccuccgcacccaggaguccgagugcaucugcaucaacggcaccugcaccgucgucaugaccgacggcuccgccuccgagcgcgccgacaccaagauccucuucaucgaggagggcaagaucguccacaucuccccccucuccggcuccgcccagcacgucgaggagugcuccugcuacccccgcuaccccggcguccgcugcgucugccgcgacaacuggaagggcuccaaccgccccaucgucgacaucaacgucaaggacuacuccaucgucuccuccuacgucugcuccggccucgucggcgacaccccccgcaagaacgacuccuccuccuccuccuacugccgcaaccccaacaacgagaagggcucccacggcgucaagggcugggccuucgacgacggcaacgacgucuggaugggccgcaccaucuccgaggagcuccgcuccggcuacgagaccuucaaggucaucggcggcugguccaagcccaacuccaagcuccagaucaaccgccaggucaucgucgaccgcggcaaccgcuccggcuacuccggcaucuucuccgucgagggcaaguccugcaucaaccgcugcuucuacgucgagcucauccgcggccgcaagcaggagaccgaggucugguggaccuccaacuccaucgucgucuucugcggcaccuccggcaccuacggcaccggcuccuggcccgacggcgccgacaucaaccucaugcccaucuga

SEQ ID NO: 111270 - RNA, 1410 nt, Artificial Sequence
  derived and/or modified CDS sequence (opt2) from neuraminidase__InfluenzaA__ABG80131
augaaccccaaccagaagaucaucaccaucggcuccgucucccucaccaucgccaccaucugcuuccucaugcagaucgccaucauggucaccaccgucacccuccacuucaagcaguacgagugcaacuccccccccuccaaccaggucaugcucugcgagcccaccaucaucgagcgcaacaucaccgagaucgucuaccucaccaacaccaccaucgagaaggagaucugccccaagcucgccgaguaccgcaacugguccaagccccagugcaagaucaccggcuucgcccccuucuccaaggacaacuccauccgccucuccgccggcggcgacaucugggucacccgcgagcccuacgucuccugcgaccccggcaagugcuaccaguucgcccucggccagggcaccacccucaacaaccgccacuccaacgacaccguccacgaccgcacccccuaccgcacccuccucaugaacgagcucggcguccccuuccaccucggcaccaagcaggucugcaucgccugguccuccuccuccugccacgacggcaaggccuggcuccacgucugcgucaccggccacgacgagaacgccaccgccuccuucaucuacgacggccgccucgucgacuccaucggcuccugguccaagaacauccuccgcacccaggaguccgagugcgucugcaucaacggcaccugcaccgucgucaugaccgacggcuccgccuccgagcgcgccgacaccaagauccucuucaucgaggagggcaagaucguccacaucuccccccucuccggcuccgcccagcacgucgaggagugcuccugcuacccccgcuaccccggcguccgcugcgucugccgcgacaacuggaagggcuccaaccgccccaucgucgacaucaacgucaaggacuacuccaucgucuccuccuacgucugcuccggccucgucggcgacaccccccgcaagaacgacuccuccuccuccuccuacugccgcaaccccaacaacgagaagggcucccacggcgucaagggcugggccuucgacgacggcaacgacgucuggaugggccgcaccaucuccgaggagcuccgcuccggcuacgagaccuucaaggucaucggcggcugguccaagcccaacuccaagcuccagaucaaccgccaggucaucgucgaccgcggcaaccgcuccggcuacuccggcaucuucuccgucgagggcaaguccugcaucaaccgcugcuucuacgucgagcucauccgcggccgcaagcaggagaccgaggucugguggaccuccaacuccaucgucgucuucugcggcaccuccggcaccuacggcaccggcuccuggcccgacggcgccgacaucaaccucaugcccaucuga

SEQ ID NO: 111271 - RNA, 1410 nt, Artificial Sequence; identical to SEQ ID NO: 111137
  derived and/or modified CDS sequence (opt2) from neuraminidase__InfluenzaA__ABG80142

SEQ ID NO: 111272 - RNA, 1410 nt, Artificial Sequence; identical to SEQ ID NO: 111193
  derived and/or modified CDS sequence (opt2) from neuraminidase__InfluenzaA__ABG80153

SEQ ID NO: 111273 - RNA, 1410 nt, Artificial Sequence; identical to SEQ ID NO: 111137
  derived and/or modified CDS sequence (opt2) from neuraminidase__InfluenzaA__ABG80164

SEQ ID NO: 111274 - RNA, 1413 nt, Artificial Sequence; identical to SEQ ID NO: 110864
  derived and/or modified CDS sequence (opt2) from neuraminidase__InfluenzaA__ABG80186

SEQ ID NO: 111275 - RNA, 1410 nt, Artificial Sequence; identical to SEQ ID NO: 110097
  derived and/or modified CDS sequence (opt2) from neuraminidase__InfluenzaA__ABG80197

SEQ ID NO: 111276 - RNA, 1410 nt, Artificial Sequence; identical to SEQ ID NO: 110289
  derived and/or modified CDS sequence (opt2) from neuraminidase__InfluenzaA__ABG80219

SEQ ID NO: 111277 - RNA, 1410 nt, Artificial Sequence
  derived and/or modified CDS sequence (opt2) from neuraminidase__InfluenzaA__ABG80230
augaaccccaaccagaagaucaucaccaucggcuccgucucccucaccaucgccaccaucugcuuccucaugcagaucgccauccucgucaccaccgucacccuccacuucaagcaguacgagugcaacuccccccccaacaaccaggucaugcucugcgagcccaccaucaucgagcgcaacaucaccgagaucgucuaccucaccaacaccaccaucgagaaggagaucugccccaagcucgccgaguaccgcaacugguccaagccccagugcaacaucaccggcuucgcccccuucuccaaggacaacuccauccgccucuccgccggcggcgacaucugggucacccgcgagcccuacgucuccugcgaccccgacaagugcuaccaguucgcccucggccagggcaccacccucaacaacggccacuccaacgacaccguccacgaccgcacccccuaccgcacccuccucaugaacgagcucggcguccccuuccaccucggcacccgccaggucugcaucgccugguccuccuccuccugccacgacggcaaggccuggcuccacgucugcgucaccggcgacgacgagaacgccaccgccuccuucaucuacaacggccgccucgucgacuccaucggcuccugguccaagaacauccuccgcacccaggaguccgagugcgucugcaucaacggcaccugcaccgucgucaugaccgacggcuccgccuccggcaaggccgacaccaagauccucuucaucgaggagggcaagaucguccacaucuccacccucuccgaguccgcccagcacgucgaggagugcuccugcuacccccgcuaccccggcguccgcugcgucugccgcgacaacuggaagggcuccaaccgccccaucgucgacaucaacgucaaggacuacuccaucgucuccuccuacgucugcuccggccucgucggcgacaccccccgcaagaacgacuccuucuccuccucccacugccucgaccccaacaacgaggagggcggccacggcgucaagggcugggccuucgacgacggcaacgacgucuggaugggccgcaccaucuccgagaagcuccgcuccggcuacgagaccuucaaggucaucgagggcugguccaagcccaacuccaagcuccagaccaaccgccaggucaucgucgagcgcggcaaccgcuccggcuacuccggcaucuucuccgucgagggcaaguccugcaucaaccgcugcuucuacgucgagcucauccgcggccgcaaggaggagaccgaggucugguggaccuccaacuccaucgucgucuucugcggcaccuccggcaccuacggcaccggcuccuggcccgacggcgccgacaucaaccucaugcccaucuga

SEQ ID NO: 111278 - RNA, 1410 nt, Artificial Sequence; identical to SEQ ID NO: 110627
  derived and/or modified CDS sequence (opt2) from neuraminidase__InfluenzaA__ABG80241

SEQ ID NO: 111279 - RNA, 1410 nt, Artificial Sequence; identical to SEQ ID NO: 110627
  derived and/or modified CDS sequence (opt2) from neuraminidase__InfluenzaA__ABG80252

SEQ ID NO: 111280 - RNA, 1410 nt, Artificial Sequence; identical to SEQ ID NO: 111211
  derived and/or modified CDS sequence (opt2) from neuraminidase__InfluenzaA__ABG80263

SEQ ID NO: 111281 - RNA, 1410 nt, Artificial Sequence; identical to SEQ ID NO: 110772
  derived and/or modified CDS sequence (opt2) from neuraminidase__InfluenzaA__ABG80274

SEQ ID NO: 111282 - RNA, 1410 nt, Artificial Sequence; identical to SEQ ID NO: 110363
  derived and/or modified CDS sequence (opt2) from neuraminidase__InfluenzaA__ABG80285

SEQ ID NO: 111283 - RNA, 1410 nt, Artificial Sequence; identical to SEQ ID NO: 110363
  derived and/or modified CDS sequence (opt2) from neuraminidase__InfluenzaA__ABG80296

SEQ ID NO: 111284 - RNA, 1410 nt, Artificial Sequence; identical to SEQ ID NO: 110363
  derived and/or modified CDS sequence (opt2) from neuraminidase__InfluenzaA__ABG80307

SEQ ID NO: 111285 - RNA, 1410 nt, Artificial Sequence; identical to SEQ ID NO: 110750
  derived and/or modified CDS sequence (opt2) from neuraminidase__InfluenzaA__ABG80318

SEQ ID NO: 111286 - RNA, 1410 nt, Artificial Sequence; identical to SEQ ID NO: 110363
  derived and/or modified CDS sequence (opt2) from neuraminidase__InfluenzaA__ABG80329

SEQ ID NO: 111287 - RNA, 1410 nt, Artificial Sequence; identical to SEQ ID NO: 110363
  derived and/or modified CDS sequence (opt2) from neuraminidase__InfluenzaA__ABG80340

SEQ ID NO: 111288 - RNA, 1410 nt, Artificial Sequence; identical to SEQ ID NO: 111221
  derived and/or modified CDS sequence (opt2) from neuraminidase__InfluenzaA__ABG80351

SEQ ID NO: 111289 - RNA, 1410 nt, Artificial Sequence
  derived and/or modified CDS sequence (opt2) from neuraminidase__InfluenzaA__ABG80373
augaaccccaaccagaagaucaucaccaucggcuccgucucccucaccaucgccaccaucugcuuccucaugcagaucgccauccucgucaccaccgucacccuccacuucaagcaguacgagugcaacuccccccccaacaaccaggucaugcucugcgagcccaccaucaucgagcgcaacaucaccgagaucgucuaccucaccaacaccaccaucgagaaggagaucugccccaagcucgccgaguaccgcaacugguccaagccccagugcaagaucaccggcuucgcccccuucuccaaggacaacuccauccgccucuccgccggcggcgacaucugggucacccgcgagcccuacgucuccugcgaccccggcaagugcuaccaguucgcccucggccagggcaccacccucaacaaccgccacuccaacgacaccguccacgaccgcacccccuaccgcacccuccucaugaacgagcucggcguccccuuccaccucggcaccaagcaggucugcaucgccugguccuccuccuccugccacgacggcaaggccuggcuccacgucugcgucaccggccacgacgagaacgccaccgccuccuucaucuacgacggccgccucgucgacuccaucggcuccugguccaagaacauccuccgcacccaggaguccgagugcgucugcaucaacggcaccugcaccgucgucaugaccgacggcuccgccuccgagcgcgccgacaccaagauccucuucaucgaggagggcaagaucguccacaucuccccccucuccggcuccgcccagcacgucgaggagugcuccugcuacccccgcuaccccggcguccgcugcgucugccgcgacaacuggaagggcuccaaccgccccaucgucgacaucaacgucaaggaccacuccaucgucuccuccuacgucugcuccggccucgucggcgacaccccccgcaagaacgacuccuccuccuccuccuacugccgcaaccccaacaacgagaagggcucccacggcgucaagggcugggccuucgacgacggcaacgacgucuggaugggccgcaccaucuccgaggagcuccgcuccggcuacgagaccuucaaggucaucggcggcugguccaagcccaacuccaagcuccagaucaaccgccaggucaucgucgaccgcggcaaccgcuccggcuacuccggcaucuucuccgucgagggcaaguccugcaucaaccgcugcuucuacgucgagcucauccgcggccgcaagcaggagaccgaggucugguggaccuccaacuccaucgucgucuucugcggcaccuccggcaccuacggcaccggcuccuggcccgacggcgccgacaucaaccucaugcccaucuga

SEQ ID NO: 111290 - RNA, 1410 nt, Artificial Sequence; identical to SEQ ID NO: 111289
  derived and/or modified CDS sequence (opt2) from neuraminidase__InfluenzaA__ABG80384

SEQ ID NO: 111291 - RNA, 1410 nt, Artificial Sequence
  derived and/or modified CDS sequence (opt2) from neuraminidase__InfluenzaA__ABG80395
augaaccccaaccagaagaucaucaccaucggcuccgucucccucaccaucgccaccaucugcuuccucaugcagaucgccauccucgucaccaccgucacccuccacuucaagcaguacgagugcaacuccccccccaacaaccaggucaugcucugcgagcccaccaucaucgagcgcaacaucaccgagaucgucuaccucaccaacaccaccaucgagaaggagaucugccccaagcucgccgaguaccgcaacugguccaagccccagugcaagaucaccggcuucgcccccuucuccaaggacaacuccauccgccucuccgccggcggcgacaucugggucacccgcgagcccuacgucuccugcgaccccggcaagugcuaccaguucgcccucggccagggcaccacccucaacaaccgccacuccaacgacaccguccacgaccgcacccccuaccgcacccuccucaugaacgagcucggcguccccuuccaccucggcaccaagcaggucugcaucgccugguccuccuccuccugccacgacggcaaggccuggcuccacgucugcgucaccggccacgacgagaacgccaccgccuccuucaucuacgacggccgccucgucgacuccaucggcuccugguccaagaacauccuccgcacccaggaguccgagugcgucugcaucaacggcaccugcaccgucgucaugaccgacggcuccgccuccaagcgcgccgacaccaagauccucuucaucgaggagggcaagaucguccacaucuccccccucuccggcuccgcccagcacgucgaggagugcuccugcuacccccgcuaccccggcguccgcugcgucugccgcgacaacuggaagggcuccaaccgccccaucgucgacaucaacgucaaggacuacuccaucgucuccuccuacgucugcuccggccucgucggcgacaccccccgcaagaacgacuccuccuccuccuccuacugccgcaaccccaacaacgagaagggcucccacggcgucaagggcugggccuucgacgacggcaacgacgucuggaugggccgcaccaucuccgaggagcuccgcuccggcuacgagaccuucaaggucaucggcggcugguccaagcccaacuccaagcuccagaucaaccgccaggucaucgucgaccgcggcaacauguccggcuacuccggcaucuucuccgucgagggcaaguccugcaucaaccgcugcuucuacgucgagcucauccgcggccgcaagcaggagaccgaggucugguggaccuccaacuccaucgucgucuucugcggcaccuccggcaccuacggcaccggcuccuggcccgacggcgccgacaucaaccucaugcccaucuga

SEQ ID NO: 111292 - RNA, 1410 nt, Artificial Sequence; identical to SEQ ID NO: 111221
  derived and/or modified CDS sequence (opt2) from neuraminidase__InfluenzaA__ABG80406

SEQ ID NO: 111293 - RNA, 1410 nt, Artificial Sequence; identical to SEQ ID NO: 111221
  derived and/or modified CDS sequence (opt2) from neuraminidase__InfluenzaA__ABG80417

SEQ ID NO: 111294 - RNA, 1410 nt, Artificial Sequence; identical to SEQ ID NO: 111221
  derived and/or modified CDS sequence (opt2) from neuraminidase__InfluenzaA__ABG80428

SEQ ID NO: 111295 - RNA, 1410 nt, Artificial Sequence; identical to SEQ ID NO: 110162
  derived and/or modified CDS sequence (opt2) from neuraminidase__InfluenzaA__ABG88292

SEQ ID NO: 111296 - RNA, 1413 nt, Artificial Sequence; identical to SEQ ID NO: 111086
  derived and/or modified CDS sequence (opt2) from neuraminidase__InfluenzaA__ABG88314

SEQ ID NO: 111297 - RNA, 1413 nt, Artificial Sequence
  derived and/or modified CDS sequence (opt2) from neuraminidase__InfluenzaA__ABG88325
augaaccccaaccagaagaucaucaccaucggcuccaccuccaucgccaucggcaucaucucccucauccuccagaucggcaacaucaucuccaucugggccucccacuccauccagaccggcucccagaaccacaccggcaucugcaaccagcgcaucaucaccuacgagaacuccaccugggucaaccagaccuacgucaacaucaacaacaccuccgucgucgccggcaaggacaagaccuccaugacccucgccggcaacuccucccucugccccauccgcggcugggccaucuacaccaaggacaacuccauccgcaucggcuccaagggcgacgucuucgucauccgcgagcccuucaucuccugcucccaccucgagugccgcaccuucuuccucacccagggcgcccuccucaacgacaagcacuccaacggcaccgucaaggaccgcucccccuaccgcgcccucauguccugcccccucggcgaggcccccucccccuacaacucccgcuucgaguccgucgccugguccgccuccgccugccacgacggccucggcuggcucaccaucggcaucuccggccccgacaacggcgccgucgccguccucaaguacaacggcaucaucaccgagaccaucaaguccuggaagaagcgcauccuccgcacccaggaguccgagugcgucugcaugaacggcuccugcuucaccaucaugaccgacggccccuccaacggcgccgccuccuaccgcaucuucaagaucgagaagggccgcgucaccaaguccaucgagcucgacgcccccaacuaccacuacgaggagugcuccugcuaccccgacaccggcaccgucaugugcgucugccgcgacaacuggcacggcuccaaccgccccugggucuccuucaaccagaaccucgacuaccagaccggcuacaucugcuccggcgucuucggcgacaacccccgccccaaggacggcgagggcuccugcaaccccgucaccgccgacggcgccgacggcgucaagggcuucuccuaccgcuacggcaacggcgucuggaucggccgcaccaaguccaaccgccuccgcaagggcuucgagaugaucugggaccccaacggcuggaccgacaccgacuccgacuucuccaugaagcaggacaucgucgccaugaccgacugguccggcuacuccggcuccuucguccagcaccccgagcucaccggccucgacugcaugcgccccugcuucugggucgagcucguccgcggccucccccgcgagaacaccaccaucuggaccuccggcuccuccaucuccuucugcggcgucaacuccgacaccgccaacugguccuggcccgacggcgccgagcuccccuucaccaucgacaaguga

SEQ ID NO: 111298 - RNA, 1413 nt, Artificial Sequence
  derived and/or modified CDS sequence (opt2) from neuraminidase__InfluenzaA__ABG88336
augaaccccaaccagaagaucaucaccaucggcuccaucugcauggccaucggcaucaucucccucauccuccagaucggcaacaucaucuccaucugggucucccacuccauccagaccggcaaccagaaccacaccggcaucugcaaccagcgcaucaucaccuacgagaacuccaccugggucaaccagaccuacgucaacaucaacaacaccaacgucgucgccggcaaggacaccaccuccgucacccucgccggcaacuccucccucugccccguccgcggcugggccaucuacuccaaggacaacuccauccgcaucggcuccaagggcgacgucuucgucauccgcgagcccuucaucuccugcucccaccucgagugccgcaccuucuuccucacccagggcgcccuccucaacgacaagcacuccaacggcaccgucaaggaccgcucccccuaccgcgcccucauguccugccccaucggcgaggcccccucccccuacaacucccgcuucgaguccgucgccugguccgccuccgccugccacgacggcaugggcuggcucaccaucggcaucuccggccccgacgacggcgccgucgccguccucaaguacaacggcaucaucaccgagaccaucaaguccuggcgcaagcgcauccuccgcacccaggaguccgagugcgucugcgucaacggcuccugcuucaccaucaugaccgacggccccuccaacggccccgccuccuacaagaucuucaagaucgagaagggcaagaucaccaaguccaucgagcucgacgcccccaacucccacuacgaggagugcuccugcuaccccgacaccggcaccgucaugugcgucugccgcgacaacuggcacggcuccaaccgccccugggucuccuucaaccagaaccucgacuaccagcucggcuacaucugcuccggcaucuucggcgacaacccccgccccaaggacggcaagggcuccugcggccccgucaccgucgacggcgccgacggcgucaagggcuucuccuaccgcuacggcaacggcgucuggaucggccgcaccaaguccaacuccucccgcaagggcuucgagaugaucugggaccccaacggcuggaccgacaccgacuccaacuuccucgucaagcaggacgucgucgccaugaccgacugguccggcuacuccggcuccuucguccagcaccccgagcucaccggccucgacugcaugcgccccugcuucugggucgagcucauccgcggccgcccccgcgagaccaccaccaucuggaccuccggcuccuccaucuccuucugcggcgucaacuccgacaccgucaacugguccuggcccgacggcgccgagcuccccuucaccaucgacaaguga

SEQ ID NO: 111299 - RNA, 1413 nt, Artificial Sequence
  derived and/or modified CDS sequence (opt2) from neuraminidase__InfluenzaA__ABG88347
augaaccccaaccagaagaucaucaccaucggcuccaucugcauggccaucggcaucaucggccucauccuccagaucggcaacaucaucuccaucugggucucccacuccauccagaccggcucccagaaccacaccggcaucugcaaccagcgcaucaucaccuacgagaacuccaccugggucaaccagaccuacgucaacaucaacaacaccaacgucgucgccggcaaggacaccaccuccgucacccucgccggcaacuccucccucugccccguccgcggcugggccaucuacuccaaggacaacuccauccgcaucggcuccaagggcgacgucuucgucauccgcgagcccuucaucuccugcucccaccucgagugccgcaccuucuuccucacccagggcgcccuccucaacgacaagcacuccaacggcaccgucaaggaccgcucccccuaccgcgcccucauguccugccccaucggcgaggcccccucccccuacaacucccgcuucgaguccgucgccugguccgccuccgccugccacgacggcaugggcuggcucaccaucggcaucuccggccccgacgacggcgccgucgccguccucaaguacaacggcaucaucaccgagaccaucaaguccuggcgcaagcgcauccuccgcacccaggaguccgagugcgucugcgucaacggcuccugcuucaccaucaugaccgacggccccuccaacggccccgccuccuacaagaucuucaagaucgagaagggcaagaucaccaaguccaucgagcucgacgcccccaacucccacuacgaggagugcuccugcuaccccgacaccggcaccgucaugugcgucugccgcgacaacuggcacggcuccaaccgccccugggucuccuucaaccagaaccucgacuaccagcucggcuacaucugcuccggcaucuucggcgacaacccccgccccaaggacggcaagggcuccugcggccccgucaccgucgacggcgccgacggcgucaagggcuucuccuaccgcuacggcaacggcgucuggaucggccgcaccaaguccaacuccucccgcaagggcuucgagaugaucugggaccccaacggcuggaccgacaccgacuccaacuuccucgucaagcaggacgucgucgccaugaccgacugguccggcuacuccggcuccuucguccagcaccccgagcucaccggccucgacugcaugcgccccugcuucugggucgagcucauccgcggccgcccccgcgagaccaccaccaucuggaccuccggcuccuccaucuccuucugcggcgucaacuccgacaccgucaacugguccuggcccgacggcgccgagcuccccuucaccaucgacaaguga

SEQ ID NO: 111300 - RNA, 1410 nt, Artificial Sequence
  derived and/or modified CDS sequence (opt2) from neuraminidase__InfluenzaA__ABG88358
augaaccccaaccagaagaucaucaccaucggcuccgucucccucaccaucgccaccaucugcuuccucaugcagaucgccauccucgucaccaccgucacccuccacuucaagcaguacgagugcaacuccccccccaacaaccaggucaugcucugcgagcccaccaucaucgagcgcaacaucaccgagaucgucuaccucaccaacaccaccaucgagaaggagaucugccccaagcucgccgaguaccgcaacugguccaagccccagugcaagaucaccggcuucgcccccuucuccaaggacaacuccauccgccucuccgccggcggcgacaucugggucacccgcgagcccuacgucuccugcgaccccggcaagugcuaccaguucgcccucggccagggcaccacccucaacaaccgccacuccaacgacaccguccacgaccgcacccccuaccgcacccuccucaugaacgagcucggcguccccuuccaccucggcaccaagcaggucugcaucgccugguccuccuccuccugccacgacggcaaggccuggcuccacgucugcgucaccggccacgacaagaacgccaccgccuccuucaucuacgacggccgccucgucgacuccaucggcuccugguccaagaacauccuccgcacccaggaguccgagugcgucugcaucaacggcaccugcaccgucgucaugaccgacggcuccgccuccgaccgcgccgacaccaagauccucuucaucgaggagggcaagaucguccacauccgcccccucuccggcuccgcccagcacgucgaggagugcuccugcuacccccgcuaccccggcguccgcugcgucugccgcgacaacuggaagggcuccaaccgccccaucgucgacaucaacgucaaggacuacuccaucgucuccuccuacgucugcuccggccucgucggcgacaccccccgcaagaacgacuccuccuccuccuccuacugcuggaaccccaacaacgagaagggcggccacggcgucaagggcugggccuucgacgacggcaacgacgucuggaugggccgcaccaucuccgaggagucccgcuccggcuacgagaccuucaaggucaucggcggcugguccaagcccaacuccaagcuccagaucaaccgccaggucaucgucgaccgcggcaaccgcuccggcuacuccggcaucuucuccgucgagggcaaguccugcaucaaccgcugcuucuacgucgagcucauccgcggccgcaagcaggagaccgaggucugguggaccuccaacuccaucgucgucuucugcggcaccuccggcaccuacggcaccggcuccuggcccgacggcgccgacaucaaccucaugcccaucuga

SEQ ID NO: 111301 - RNA, 1410 nt, Artificial Sequence; identical to SEQ ID NO: 111149
  derived and/or modified CDS sequence (opt2) from neuraminidase__InfluenzaA__ABG88369

SEQ ID NO: 111302 - RNA, 1410 nt, Artificial Sequence; identical to SEQ ID NO: 111149
  derived and/or modified CDS sequence (opt2) from neuraminidase__InfluenzaA__ABG88380

SEQ ID NO: 111303 - RNA, 1410 nt, Artificial Sequence; identical to SEQ ID NO: 111149
  derived and/or modified CDS sequence (opt2) from neuraminidase__InfluenzaA__ABG88391

SEQ ID NO: 111304 - RNA, 1410 nt, Artificial Sequence; identical to SEQ ID NO: 111136
  derived and/or modified CDS sequence (opt2) from neuraminidase__InfluenzaA__ABG88402

SEQ ID NO: 111305 - RNA, 1410 nt, Artificial Sequence; identical to SEQ ID NO: 111193
  derived and/or modified CDS sequence (opt2) from neuraminidase__InfluenzaA__ABG88413

SEQ ID NO: 111306 - RNA, 1410 nt, Artificial Sequence; identical to SEQ ID NO: 111137
  derived and/or modified CDS sequence (opt2) from neuraminidase__InfluenzaA__ABG88424

SEQ ID NO: 111307 - RNA, 1410 nt, Artificial Sequence; identical to SEQ ID NO: 111137
  derived and/or modified CDS sequence (opt2) from neuraminidase__InfluenzaA__ABG88435

SEQ ID NO: 111308 - RNA, 1410 nt, Artificial Sequence; identical to SEQ ID NO: 111137
  derived and/or modified CDS sequence (opt2) from neuraminidase__InfluenzaA__ABG88446

SEQ ID NO: 111309 - RNA, 1410 nt, Artificial Sequence
  derived and/or modified CDS sequence (opt2) from neuraminidase__InfluenzaA__ABG88457
augaaccccaaccagaagaucaucaccaucggcuccgucucccucaccaccgccaccaucugcuuccucaugcagaucgccauccucgucaccaccgucacccuccacuucaagcaguacgagugcaacuccccccccaacaaccaggucaugcucugcgagcccaccaucaucgagcgcaacaucaccgagaucgucuaccucaccaacaccaccaucgagaaggagaucugccccaagcucgccgaguaccgcaacugguccaagccccagugcaagaucaccggcuucgcccccuucuccaaggacaacuccauccgccucuccgccggcggcgacaucugggucacccgcgagcccuacgucuccugcgaccccggcaagugcuaccaguucgcccucggccagggcaccacccucaacaaccgccacuccaacgacaccguccacgaccgcacccccuaccgcacccuccucaugaacgagcucggcguccccuuccaccucggcaccaagcaggucugcaucgccugguccuccuccuccugccacgacggcaaggccuggcuccacgucugcgucaccggccacgacgagaacgccaccgccuccuucaucuacgacggccgccucgucgacuccaucggcuccugguccaagaacauccuccgcacccaggaguccgagugcgucugcaucaacggcaccugcaccgucgucaugaccgacggcuccgccuccgagcgcgccgacaccaagauccucuucaucaaggagggcaagaucguccacaucuccccccucuccggcuccgcccagcacgucgaggagugcuccugcuacccccgcuaccccggcguccgcugcgucugccgcgacaacuggaagggcuccaaccgccccaucgucgacaucaacgucaaggacuacuccaucgucuccuccuacgucugcuccggccucgucggcgacaccccccgcaagaacgacuccuccuccuccuccuacugccagaaccccaacaacgagaagggcucccacggcgucaagggcugggccuucgacgacggcaacgacgucuggaugggccgcaccaucuccgaggagcuccgcuccggcuacgagaccuucaaggucaucggcggcugguccaagcccaacuccaagcuccagaucaaccgccaggucaucgucgaccgcggcaaccgcuccggcuacuccggcaucuucuccgucgagggcaaguccugcaucaaccgcugcuucuacgucgagcucauccgcggccgcaagcaggagaccgaggucugguggaccuccaacuccaucgucgucuucugcggcaccuccggcaccuacggcaccggcuccuggcccgacggcgccgacaucaaccucaugcccaucuga

SEQ ID NO: 111310 - RNA, 1410 nt, Artificial Sequence; identical to SEQ ID NO: 111137
  derived and/or modified CDS sequence (opt2) from neuraminidase__InfluenzaA__ABG88468

SEQ ID NO: 111311 - RNA, 1410 nt, Artificial Sequence; identical to SEQ ID NO: 111137
  derived and/or modified CDS sequence (opt2) from neuraminidase__InfluenzaA__ABG88479

SEQ ID NO: 111312 - RNA, 1410 nt, Artificial Sequence; identical to SEQ ID NO: 111137
  derived and/or modified CDS sequence (opt2) from neuraminidase__InfluenzaA__ABG88490

SEQ ID NO: 111313 - RNA, 1410 nt, Artificial Sequence; identical to SEQ ID NO: 111137
  derived and/or modified CDS sequence (opt2) from neuraminidase__InfluenzaA__ABG88501

SEQ ID NO: 111314 - RNA, 1410 nt, Artificial Sequence; identical to SEQ ID NO: 111137
  derived and/or modified CDS sequence (opt2) from neuraminidase__InfluenzaA__ABG88512

SEQ ID NO: 111315 - RNA, 1410 nt, Artificial Sequence; identical to SEQ ID NO: 111137
  derived and/or modified CDS sequence (opt2) from neuraminidase__InfluenzaA__ABG88523

SEQ ID NO: 111316 - RNA, 1410 nt, Artificial Sequence
  derived and/or modified CDS sequence (opt2) from neuraminidase__InfluenzaA__ABG88534
augaaccccaaccagaagaucaucaccaucggcuccgucucccucaccaucgccaccaucugcuuccucaugcagaucgccauccucgucaccaccgucacccuccacuucaagcaguacgagugcaacuccccccccuccaaccaggucaugcucugcgagcccaccaucaucgagcgcaacaucaccgagaucgucuaccucaccaacaccaccaucgagaaggagaucugccccaagcucgccgaguaccgcaacugguccaagccccagugcaagaucaccggcuucgcccccuucuccaaggacaacuccauccgccucuccgccggcggcgacaucugggucacccgcgagcccuacgucuccugcgaccccggcaagugcuaccaguucgcccucggccagggcaccacccucaacaaccgccacuccaacgacaccguccacgaccgcacccccuaccgcacccuccucaugaacgagcucggcguccccuuccaccucggcaccaagcaggucugcaucgccugguccuccuccuccugccacgacggcaaggccuggcuccacgucugcgucaccggccacgacgagaacgccaccgccuccuucaucuacgacggccgccucgucgacuccaucggcuccugguccaagaacauccuccgcacccaggaguccgagugcgucugcaucaacggcaccugcaccgucgucaugaccgacggcuccgccuccgagcgcgccgacaccaagauccucuucaucgaggagggcaagaucguccacaucuccccccucuccggcuccgcccagcacgucgaggagugcuccugcuacccccgcuaccccggcguccgcugcgucugccgcgacaacuggaagggcuccaaccgccccaucgucgacaucaacgucaaggacuacuccaucgucuccuccuacgucugcuccggccucgucggcgacaccccccgcaagaacgacuccuccuccuccuccuacugccgcaaccccaacaacgagaagggcucccacggcgucaagggcugggccuucgacgacggcaacgacgucuggaugggccgcaccaucuccgaggagcuccgcuccggcuacgagaccuucaaggucaucggcggcugguccaagcccaacuccaagcuccagaucaaccgccaggucaucgucgaccgcggcaaccgcuccggcuacuccggcaucuucuccgucgagaacaaguccugcaucaaccgcugcuucuacgucgagcucauccgcggccgcaagcaggagaccgaggucugguggaccuccaacuccaucgucgucuucugcggcaccuccggcaccuacggcaccggcuccuggcccgacggcgccgacaucaaccucaugcccaucuga

SEQ ID NO: 111317 - RNA, 1410 nt, Artificial Sequence; identical to SEQ ID NO: 110829
  derived and/or modified CDS sequence (opt2) from neuraminidase__InfluenzaA__ABG88567

SEQ ID NO: 111318 - RNA, 1410 nt, Artificial Sequence
  derived and/or modified CDS sequence (opt2) from neuraminidase__InfluenzaA__ABG88600
augaaccccaaccagaagaucaucaccaucggcuccgucucccucaccaucgccaccaucugcuuccucaugcagaucgccauccucgucaccaccgucacccuccacuucaagcaguacgagugcaacuccccccccaacaaccaggucaugcucugcgagcccaccaucaucgagcgcaacaucaccgagaucgucuaccucaccaacaccaccaucgagaaggagaucugccccaagcccgccgaguaccgcaacugguccaagccccagugcaacaucaccggcuucgcccccuucuccaaggacaacuccauccgccucuccgccggcggcgacaucugggucacccgcgagcccuacgucuccugcgaccccgacaagugcuaccaguucgcccucggccagggcaccacccucaacaacggccacuccaacgacaccguccacgaccgcacccccuaccgcacccuccucaugaacgagcucggcguccccuuccaccucggcaccaagcaggucugcaucgccugguccuccuccuccugccacgacggcaaggccuggcuccacgucugcgucaccggcgacgacgagaacgccaccgccuccuucaucuacaacggccgccucgucgacuccaucggcuccugguccaagaagauccuccgcacccaggaguccgagugcgucugcaucaacggcaccugcaccgucgucaugaccgacggcuccgccuccggcaaggccgacaccaagauccucuucaucgaggagggcaagaucguccacaccucccuccucuccggcuccgcccagcacgucgaggagugcuccugcuacccccgcuaccccggcguccgcugcgucugccgcgacaacuggaagggcuccaaccgccccaucgucgacaucaacgucaaggacuacuccaucgucuccuccuacgucugcuccggccucgucggcgacaccccccgcaagaacgacuccuccuccuccucccacugccucgaccccaacaacgaggagggcggccacggcgucaagggcugggccuucgacgacggcaacgacgucuggaugggccgcaccaucuccgagaagcuccgcuccggcuacgagaccuucaaggucaucgagggcugguccaagcccaacuccaagcuccagaucaaccgccaggucaucgucgaccgcggcaaccgcuccggcuacuccggcaucuucuccgucgagggcaaguccugcaucaaccgcugcuucuacgucgagcucauccgcggccgcaagcaggagaccgagguccucuggaccuccaacuccaucgucgucuucugcggcaccuccggcaccuacggcaccggcuccuggcccgacggcgccgacaucaaccucaugcccaucuga

SEQ ID NO: 111319 - RNA, 1410 nt, Artificial Sequence; identical to SEQ ID NO: 110190
  derived and/or modified CDS sequence (opt2) from neuraminidase__InfluenzaA__ABG88611

SEQ ID NO: 111320 - RNA, 1410 nt, Artificial Sequence; identical to SEQ ID NO: 110202
  derived and/or modified CDS sequence (opt2) from neuraminidase__InfluenzaA__ABG88622

SEQ ID NO: 111321 - RNA, 1410 nt, Artificial Sequence; identical to SEQ ID NO: 110190
  derived and/or modified CDS sequence (opt2) from neuraminidase__InfluenzaA__ABG88633

SEQ ID NO: 111322 - RNA, 1410 nt, Artificial Sequence; identical to SEQ ID NO: 111241
  derived and/or modified CDS sequence (opt2) from neuraminidase__InfluenzaA__ABG88655

SEQ ID NO: 111323 - RNA, 1410 nt, Artificial Sequence; identical to SEQ ID NO: 111241
  derived and/or modified CDS sequence (opt2) from neuraminidase__InfluenzaA__ABG88666

SEQ ID NO: 111324 - RNA, 1410 nt, Artificial Sequence; identical to SEQ ID NO: 110627
  derived and/or modified CDS sequence (opt2) from neuraminidase__InfluenzaA__ABG88677

SEQ ID NO: 111325 - RNA, 1410 nt, Artificial Sequence; identical to SEQ ID NO: 111241
  derived and/or modified CDS sequence (opt2) from neuraminidase__InfluenzaA__ABG88688

SEQ ID NO: 111326 - RNA, 1410 nt, Artificial Sequence; identical to SEQ ID NO: 110627
  derived and/or modified CDS sequence (opt2) from neuraminidase__InfluenzaA__ABG88699

SEQ ID NO: 111327 - RNA, 1410 nt, Artificial Sequence; identical to SEQ ID NO: 110363
  derived and/or modified CDS sequence (opt2) from neuraminidase__InfluenzaA__ABG88710

SEQ ID NO: 111328 - RNA, 1410 nt, Artificial Sequence; identical to SEQ ID NO: 110363
  derived and/or modified CDS sequence (opt2) from neuraminidase__InfluenzaA__ABG88721

SEQ ID NO: 111329 - RNA, 1410 nt, Artificial Sequence
  derived and/or modified CDS sequence (opt2) from neuraminidase__InfluenzaA__ABG88732
augaaccccaaccagaagaucaucaccaucggcuccgucucccucaccaucgccaccaucugcuuccucaugcagaucgccauccucgucaccaccgucacccuccacuucaagcaguacgagugcaacuccccccccaacaaccaggucaugcucugcgagcccaccaucaucgagcgcaacaucaccgagaucgucuaccucaccaacaccaccaucgagaaggagaucugccccaagcucgccgaguaccgcaacugguccaagccccagugcaagaucaccggcuucgcccccuucuccaaggacaacuccauccgccucuccgccggcggcgacaucugggucacccgcgagcccuacgucuccugcgaccccggcaagugcuaccaguucgcccucggccagggcaccacccucaacaaccgccacuccaacgacaccguccacgaccgcacccccuaccgcacccuccucaugaacgagcucggcguccccuuccaccucggcaccaagcaggucugcaucgccugguccuccuccuccugccacgacggcaaggccuggcuccacgucugcgucaccggccacgacgagaacgccaccgccuccuucaucuacgacggccgccucgucgacuccaucggcuccugguccaagaacauccuccgcacccaggaguccgagugcgucugcaucaacggcaccugcaccgucgucaugaccgacggcuccgccuccgagcgcgccgacaccaagauccucuucaucgaggagggcaagaucguccacaucuccccccucuccggcuccgcccagcacgucgaggagugcuccugcuacccccgcuaccccggcguccgcugcgucugccgcgacaacuggaagggcuccaaccgccccaucgucgacaucaacgucaaggacuacuccaucgucuccuccuacgucugcuccggccucgucggcgacaccccccgcaagaacgacuccuccuccuccuccuacugccgcaaccccaacaacgagaagggcucccacggcgucaagggcugggccuucgacgacggcaacgacgucuggaugggccgcaccaucuccgaggagcuccgcuccggcuacgagaccuucaaggucaucggcggcugguccaagcccaacuccaagcuccagaucaaccgccaggucaucgucgagcgcggcaaccgcuccggcuacuccggcaucuucuccgucgagggcaaguccugcaucaaccgcugcuucuacgucgagcucauccgcggccgcaagcaggagaccgaggucugguggaccuccaacuccaucgucgucuucugcggcaccuccggcaccuacggcaccggcuccuggcccgacggcgccgacaucaaccucaugcccaucuga

SEQ ID NO: 111330 - RNA, 1410 nt, Artificial Sequence; identical to SEQ ID NO: 111289
  derived and/or modified CDS sequence (opt2) from neuraminidase__InfluenzaA__ABG88743

SEQ ID NO: 111331 - RNA, 1410 nt, Artificial Sequence; identical to SEQ ID NO: 111289
  derived and/or modified CDS sequence (opt2) from neuraminidase__InfluenzaA__ABG88754

SEQ ID NO: 111332 - RNA, 1410 nt, Artificial Sequence; identical to SEQ ID NO: 110555
  derived and/or modified CDS sequence (opt2) from neuraminidase__InfluenzaA__ABG88765

SEQ ID NO: 111333 - RNA, 1410 nt, Artificial Sequence; identical to SEQ ID NO: 111221
  derived and/or modified CDS sequence (opt2) from neuraminidase__InfluenzaA__ABG88776

SEQ ID NO: 111334 - RNA, 1410 nt, Artificial Sequence; identical to SEQ ID NO: 111221
  derived and/or modified CDS sequence (opt2) from neuraminidase__InfluenzaA__ABG88787

SEQ ID NO: 111335 - RNA, 1410 nt, Artificial Sequence
  derived and/or modified CDS sequence (opt2) from neuraminidase__InfluenzaA__ABG88820
augaaccccaaccagaagaucaucaccaucggcuccgucucccucaccaucuccaccaucugcuucuucaugcagaucgccauccucaucaccaccgucacccuccacuucaagcaguacgaguucaacuccccccccaacaaccaggucaugcucugcgagcccaccaucaucgagcgcaacaucaccgagaucgucuaccucaccaacaccaccaucgagaaggagaagugccccaagcucgccgaguaccgcaacugguccaagccccagugcaacaucaccggcuucgcccccuucuccaaggacaacuccauccgccucuccgccggcggcgacaucugggucacccgcgagcccuacgucuccugcgaccccgacaagugcuaccaguucgcccucggccagggcaccacccucaacaacguccacuccaacgacaccguccgcgaccgcacccccuaccgcacccuccucaugaacgagcucggcguccccuuccaccucggcaccaagcaggucugcaucgccugguccuccuccuccugccacgacggcaaggccuggcuccacgucugcgucaccggcgacgacaagaacgccaccgccuccuucaucuacaacggccgccucgucgacuccaucgucuccugguccaaggagauccuccgcacccaggaguccgagugcgucugcaucaacggcaccugcaccgucgucaugaccgacggcuccgccuccggcaaggccgacaccaagauccucuucaucgaggagggcaagaucguccacaccuccacccucuccggcuccgcccagcacgucgaggagugcuccugcuacccccgcuaccccggcguccgcugcgucugccgcgacaacuggaagggcuccaaccgccccaucgucgacaucaacaucaaggacuacuccaucgucuccuccuacgucugcuccggccucgucggcgacaccccccgcaagaacgacuccuccuccuccucccacugccucgaccccaacaacgaggagggcggccacggcgucaagggcugggccuucgacgacggcaacgacgucuggaugggccgcaccaucuccgagaagcuccgccucggcuacgagaccuucaaggucaucgagggcugguccaaccccaacuccaagcuccagaccaaccgccaggucaucgucgaccgcggcaaccgcuccggcuacuccggcaucuucuccgucgagggcaaguccugcaucaaccgcugcuucuacgucgagcucauccgcggccgcaaggaggagaccgagguccucuggaccuccaacuccaucgucgucuucugcggcaccuccggcaccuacggcaccggcuccuggcccgacggcgccgacaucaaccucaugcccaucuga

SEQ ID NO: 111336 - RNA, 1350 nt, Artificial Sequence
  derived and/or modified CDS sequence (opt2) from neuraminidase__InfluenzaA__ABI16506
augaaccccaaccagaagaucaucaccaucggcuccaucugcauggucaucggcaucgucucccucaugcuccagaucggcaacauggucucccucugggucucccacuccauccagaccggcaaccagcaccaggucgagcccaucuccaacaccaacuuccucaccgagaaggccgucgccuccgucacccucgccggcaacuccucccucugccccauccgcggcugggccguccacuccaaggacaacuccauccgcaucggcuccaagggcgacgucuucgucauccgcgagcccuucaucuccugcucccaccucgagugccgcaccuucuuccucacccagggcgcccuccucaacgacaagcacuccaacggcaccgucaaggaccgcuccccccaccgcacccucauguccugccccgucggcgaggcccccucccccuacaacucccgcuucgaguccgucgccugguccgccuccgccugccacgacggcaccuccuggcucaccaucggcaucuccggccccgacaacggcgccgucgccguccucaaguacaacggcaugaucaccgacaccaucaaguccuggcgcaacaacauccuccgcacccaggaguccgagugcgucugcgucaacggcuccugcuucaccgucaugaccgacggccccuccaacggccaggccuccuacaagaucuucaagauggagaagggcaaggucgucaaguccgucgagcucgacgcccccaacuaccacuacgaggagugcuccugcuaccccgacgccggcgagaucaccugcgucugccgcgacaacuggcacggcuccaaccgccccugggucuccuucaaccagaaccucgaguaccagaucggcuacaucugcuccggcgucuucggcgacaacccccgccccaacgacggcaccggcuccugcggccccgucucccccaacggcgccuacggcgucaagggcuucuccuucaaguacggcaacggcgucuggaucggccgcaccaagucccccuccucccgcuccggcuucgagaugaucugggaccccaacggcuggaccgagaccgacuccuccuucuccgucaagcaggacaucgucgccaucaccgacugguccggcuacuccggcuccuucguccagcaccccgagcucaccggccucgacugcauccgccccugcuucugggucgagcucauccgcggccgccccaaggaguccaccaucuggaccuccggcuccuccaucuccuucugcggcgucaacuccgacaccgucuccugguccuggcccgacggcgccgagcuccccuucaccaucgacaaguga

SEQ ID NO: 111337 - RNA, 1413 nt, Artificial Sequence; identical to SEQ ID NO: 111001
  derived and/or modified CDS sequence (opt2) from neuraminidase__InfluenzaA__ABI20840

SEQ ID NO: 111338 - RNA, 1413 nt, Artificial Sequence
  derived and/or modified CDS sequence (opt2) from neuraminidase__InfluenzaA__ABI20862
augaaccccaaccagaagaucaucaccaucggcuccaucugcaugaccaucggcaucaucucccucauccuccagaucggcaacaucaucuccaucugggucucccacuccauccagaccggcucccagaaccacaccggcaucugcaaccagcgcaucaucaccuacgagaacuccaccugggucaaccagaccuacgucaacaucaacaacaccaacgucgucgccggcaaggacaccaccuccgucacccucgccggcaacuccucccucugccccauccgcggcugggccaucuacuccaaggacaacuccauccgcaucggcuccaagggcgacgucuucgucauccgcgagcccuucaucuccugcucccaccucgagugccgcaccuucuuccucacccagggcgcccuccucaacgacaagcacuccaacggcaccgucaaggaccgcucccccuaccgcgcccucauguccugccccaucggcgaggcccccucccccuacaacucccgcuucgaguccgucgccugguccgccuccgccugccacgacggcaugggcuggcucaccaucggcaucuccggccccgacgacggcgccgucgccguccucaaguacaacggcaucaucaccgagaccaucaaguccuggcgcaagcgcauccuccgcacccaggaguccgagugcgucugcgucaacggcuccugcuucaccaucaugaccgacggccccuccaacggccccgccuccuaccgcaucuucaagaucgagaagggcaagaucaccaaguccaucgagcucgacgcccccaacucccacuacgaggagugcuccugcuaccccgacaccggcaccgucaugugcgucugccgcgacaacuggcacggcuccaaccgccccugggucuccuucaaccagaaccucgacuaccagaccggcuacaucugcuccggcgucuucggcgacaacccccgccccaaggacggcaagggcuccugcgaccccgucaccgucgacggcgccgacggcgucaagggcuucuccuaccgcuacggcaacggcgucuggaucggccgcaccaaguccaacuccucccgcaagggcuucgagaugaucugggaccccaacggcuggaccgacaccgacuccaacuuccucgucaagcaggacgucgucgccaugaccgacugguccggcuacuccggcuccuucguccagcaccccgagcucaccggccucgacugcaugcgccccugcuucugggucgagcucauccgcggccgcccccgcgagaagaccaccaucuggaccuccggcuccuccaucuccuucugcggcgucaacuccgacaccgccaacugguccuggcccgacggcgccgagcuccccuucaccaucgacaaguga

SEQ ID NO: 111339 - RNA, 1413 nt, Artificial Sequence
  derived and/or modified CDS sequence (opt2) from neuraminidase__InfluenzaA__ABI20873
augaaccccaaccagaagaucaucaccaucggcuccaucuccauggccaucggcaucaucucccucacccuccagaucggcaacaucaucuccaucugggccucccacuccauccagaccggcucccagaaccacaccggcaucugcaaccagcgcaucaucaccuacgagaacuccaccugggucaaccagaccuacgucaacaucaacaacaccaacgucgucgccgagaaggacaagaccuccgucacccucgccggcaacuccucccucugccccauccgcggcugggccaucuacaccaaggacaacuccauccgcaucggcuccaagggcgacgucuucgucauccgcgagcccuucaucuccugcucccaccucgagugccgcaccuucuuccucacccagggcgcccuccucaacgacaagcacuccaacggcaccgucaaggaccgcucccccuaccgcgcccucauguccugcccccucggcgaggcccccucccccuacaacucccgcuucgaguccgucgccugguccgccaccgccugccacgacggcaucggcuggcucaccaucggcaucuccggccccgacaacggcgccgucgccguccucaaguacaacggcgucaucaccgagaccaucaaguccuggaagaagcagauccuccgcacccaggaguccgagugcgucugcgucaacggcuccugcuucaccaucaugaccgacggccccuccaacggcgccgccuccuaccgcaucuucaagaucgagaagggcaagaucaccaaguccaucgagcucgacgcccccaacuuccacuacgaggagugcuccugcuaccccgacaccggcaccgucaugugcgucugccgcgacaacuggcacggcuccaaccgccccugggucuccuucaaccagaaccucgacuaccagaucggcuacaucugcuccggcgucuucggcgacaacccccgccccaaggacggcgagggcuccugcaaccccgucaccgucgacggcgccgacggcgucaagggcuucuccuaccgcuacggcaacggcgucuggaucggccgcaccaaguccaaccgccuccgcaagggcuucgagaucaucugggaccccaacggcuggaccgacaccgacuccgacuucuccgucaagcaggacgucgucgccaugaccgacugguccggcuacuccggcuccuucguccagcaccccgagcucaccggccucgacugcaugcgccccugcuucugggucgagcucguccgcggccucccccgcgagaacgccaccaucuggaccuccggcuccuccaucuccuucugcggcgucaacuccgacaccgccaacugguccuggcccgacggcgccgagcuccccuucaccaucgacaaguga

SEQ ID NO: 111340 - RNA, 1410 nt, Artificial Sequence; identical to SEQ ID NO: 111136
  derived and/or modified CDS sequence (opt2) from neuraminidase__InfluenzaA__ABI20895

SEQ ID NO: 111341 - RNA, 1410 nt, Artificial Sequence; identical to SEQ ID NO: 111149
  derived and/or modified CDS sequence (opt2) from neuraminidase__InfluenzaA__ABI20906

SEQ ID NO: 111342 - RNA, 1410 nt, Artificial Sequence; identical to SEQ ID NO: 111137
  derived and/or modified CDS sequence (opt2) from neuraminidase__InfluenzaA__ABI20928

SEQ ID NO: 111343 - RNA, 1410 nt, Artificial Sequence; identical to SEQ ID NO: 111137
  derived and/or modified CDS sequence (opt2) from neuraminidase__InfluenzaA__ABI20939

SEQ ID NO: 111344 - RNA, 1410 nt, Artificial Sequence; identical to SEQ ID NO: 111137
  derived and/or modified CDS sequence (opt2) from neuraminidase__InfluenzaA__ABI20950

SEQ ID NO: 111345 - RNA, 1410 nt, Artificial Sequence; identical to SEQ ID NO: 111137
  derived and/or modified CDS sequence (opt2) from neuraminidase__InfluenzaA__ABI20961

SEQ ID NO: 111346 - RNA, 1410 nt, Artificial Sequence; identical to SEQ ID NO: 110863
  derived and/or modified CDS sequence (opt2) from neuraminidase__InfluenzaA__ABI20983

SEQ ID NO: 111347 - RNA, 1410 nt, Artificial Sequence
  derived and/or modified CDS sequence (opt2) from neuraminidase__InfluenzaA__ABI20994
augaaccccaaccagaagaucaucaccaucggcuccgucucccucaccaucgccaccaucugcuuccucaugcagaucgccauccucgucaccaccgucacccuccacuucaagcaguacgagugcaacuccccccccaacaaccaggucaugcucugcgagcccaccaucaucgagcgcaacaucaccgagaucgucuaccucaccaacaccaccaucgagaaggagaucugccccaagcucgccgaguaccgcaacugguccaagccccagugcaacaucaccggcuucgcccccuucuccaaggacaacuccauccgccucuccgccggcggcgacaucugggucacccgcgagcccuacgucuccugcgaccccgacaagugcuaccaguucgcccucggccagggcaccacccucaacaacggccacuccaacgacaccguccacaaccgcacccccuaccgcacccuccucaugaacgagcucggcguccccuuccaccucggcaccaagcaggucugcaucgccugguccuccuccuccugccacgacggcaaggccuggcuccacgucugcgucaccggcgacgacgagaacgccaccgccuccuucaucuacaacggccgccucgucgacuccaucggcuccugguccaagaagauccuccgcacccaggaguccgagugcgucugcaucaacggcaccugcaccgucgucaugaccgacggcuccgccuccggcaaggccgacaccaagauccucuucaucgaggagggcaagaucguccacaccuccucccucuccggcuccgcccagcacgucgaggagugcuccugcuacccccgcuaccccggcguccgcugcgucugccgcgacaacuggaagggcuccaaccgccccaucgucgacaucaacgucaaggacuacuccaucgucuccuccuacgucugcuccggccucgucggcgacaccccccgcaagaacgacuccuccuccuccucccacugccucgaccccaacaacgaggagggcggccacggcgucaagggcugggccuucgacgacggcaacgacgucuggaugggccgcaccaucuccgagaagcuccgcuccggcuacgagaccuucaaggucaucgagggcugguccaagcccaacuccaagcuccagaucaaccgccaggucaucgucgaccgcggcaaccgcuccggcuacuccggcaucuucuccgucgaguccaaguccugcaucaaccgcugcuucuacgucgagcucauccgcggccgcaagcaggagaccgagguccucuggaccuccaacuccaucgucgucuucugcggcaccuccggcaccuacggcaccggcuccuggcccgacggcgccgacaucaaccucaugcccaucuga

SEQ ID NO: 111348 - RNA, 1410 nt, Artificial Sequence
  derived and/or modified CDS sequence (opt2) from neuraminidase__InfluenzaA__ABI21005
augaaccccaaccagaagaucaucaccaucggcuccgucucccucaccaucgccaccaucugcuuccucaugcagaucgccguccucgucaccaccgucacccuccacuucaagcaguacgagugcaacuccccccccaacaaccaggucaugcucugcgagcccaccaucaucgagcgcaacaucaccgagaucgucuaccucaccaacaccaccaucgagaaggagaucugccccaagcucgccgaguaccgcaacugguccaagccccagugcaacaucaccggcuucgcccccuucuccaaggacaacuccauccgccucuccgccggcggcgacaucugggucacccgcgagcccuacgucuccugcgaccccgacaagugcuaccaguucgcccucggccagggcaccacccucaacaacggccacuccaacgacaccguccacgaccgcacccccuaccgcacccuccucaugaacgagcucggcguccccuuccaccucggcaccaagcaggucugcaucgccugguccuccuccuccugccacgacggcaaggccuggcuccacgucugcgucaccggcgacgacgagaacgccaccgccuccuucaucuacaacggccgccucgccgacuccaucggcuccugguccaagaagauccuccgcacccaggaguccgagugcgucugcaucaacggcaccugcaccgucgucaugaccgacggcuccgccuccggcaaggccgacaccaagauccucuucaucgaggagggcaagaucguccacaccucccuccucuccggcuccgcccagcacgucgaggagugcuccugcuacccccgcuaccccggcguccgcugcgucugccgcgacaacuggaagggcuccaaccgccccaucgucgacaucaacgucaaggacuacuccaucgucuccuccuacgucugcuccggccucgucggcgacaccccccgcaagaacgacuccuccuccuccucccacugccucgaccccaacaacgaggagggcggccacggcgucaagggcugggccuucgacgacggcaacgacgucuggaugggccgcaccaucuccgagaagcuccgcuccggcuacgagaccuucaaggucaucgagggcugguccaagcccaacuccaagcuccagaucaaccgccaggucaucgucgaccgcggcaaccgcuccggcuacuccggcaucuucuccgucgagggcaaguccugcaucaaccgcugcuucuacgucgagcucauccgcggccgcaagcaggagaccgagguccucuggaccuccaacuccaucgucgucuucugcggcaccuccggcaccuacggcaccggcuccuggcccgacggcgccgacaucaaccucaugcccaucuga

SEQ ID NO: 111349 - RNA, 1410 nt, Artificial Sequence; identical to SEQ ID NO: 110190
  derived and/or modified CDS sequence (opt2) from neuraminidase__InfluenzaA__ABI21016

SEQ ID NO: 111350 - RNA, 1410 nt, Artificial Sequence
  derived and/or modified CDS sequence (opt2) from neuraminidase__InfluenzaA__ABI21027
augaaccccaaccagcgcaucaucaccaucggcuccgucucccucaccaucgccaccaucugcuuccucaugcagaucgccauccucgucaccaccgucacccuccacuucaagcaguacgagugcaacuccccccccaacaaccaggucaugcucugcgagcccaccaucaucgagcgcaacaucaccgagaucgucuaccucaccaacaccaccaucgagaaggagaucugccccaagcucgccgaguaccgcaacugguccaagccccagugcaacaucaccggcuucgcccccuucuccaaggacaacuccauccgccucuccgccggcggcgacaucugggucacccgcgagcccuacgucuccugcgaccccgacaagugcuaccaguucgcccucggccagggcaccacccucaacaacggccacuccaacgacaccguccacgaccgcacccccuaccgcacccuccucaugaacgagcucggcguccccuuccaccucggcacccgccaggucugcaucgccugguccuccuccuccugccacgacggcaaggccuggcuccacgucugcgucaccggcgacgacgagaacgccaccgccuccuucaucuacaacggccgccucgucgacuccaucggcuccugguccaagaagauccuccgcacccaggaguccgagugcgucugcaucaacggcaccugcaccgucgucaugaccgacggcuccgccuccggcaaggccgacaccaagauccucuucaucgaggagggcaagaucguccacaucuccacccucuccggcuccgcccagcacgucgaggagugcuccugcuacccccgcuaccccggcguccgcugcgucugccgcgacaacuggaagggcuccaaccgccccaucgucgacaucaacgucaaggacuacuccaucgucuccuccuacgucugcuccggccucgucggcgacaccccccgcaagaacgacuccuucuccuccucccacugccucgaccccaacaacgaggagggcggccacggcgucaagggcugggccuucgacgacggcaacgacgucuggaugggccgcaccaucuccgagaagcuccgcuccggcuacgagaccuucaaggucaucgagggcugguccaagcccaacuccaagcuccagaccaaccgccaggucaucgucgagcgcggcaaccgcuccggcuacuccggcaucuucuccgucgagggcaaguccugcaucaaccgcugcuucuacgucgagcucauccgcggccgcaaggaggagaccgaggucugguggaccuccaacuccaucgucgucuucugcggcacccccggcaccuacggcaccggcuccuggcccgacggcgccgacaucaaccucaugcccaucuga

SEQ ID NO: 111351 - RNA, 1410 nt, Artificial Sequence; identical to SEQ ID NO: 110627
  derived and/or modified CDS sequence (opt2) from neuraminidase__InfluenzaA__ABI21038

SEQ ID NO: 111352 - RNA, 1410 nt, Artificial Sequence
  derived and/or modified CDS sequence (opt2) from neuraminidase__InfluenzaA__ABI21049
augaaccccaaccagaagaucaucaccaucggcuccgucucccucaccaucgccaccaucugcuuccucaugcagaucgccauccucgucaccaccgucacccuccacuucaagcagcacgagugcaacuccccccccaacaaccaggucaugcucugcgagcccaccaucaucgagcgcaacaucaccgagaucgucuaccucaccaacaccaccaucgagaaggagaucugccccaagcucgucgaguaccgcaacugguccaagccccagugcaacaucaccggcuucgcccccuucuccaaggacaacuccauccgccucuccgccggcggcgacaucugggucacccgcgagcccuacgucuccugcgaccccgacaagugcuaccaguucgcccucggccagggcaccacccucaacaacggccacuccaacgacaccguccacgaccgcacccccuaccgcacccuccucaugaacgagcucggcguccccuuccaccucggcacccgccaggucugcaucgccugguccuccuccuccugccacgacggcaaggccuggcuccacgucugcgucaccggcgacgacaagaacgccaccgccuccuucaucuacaacggccgccucgucgacuccaucggcuccugguccaagaagauccuccgcacccaggaguccgagugcgucugcaucaacggcaccugcaccgucgucaugaccgacggcuccgccuccggcaaggccgacaccaagauccucuucaucgaggagggcaagaucguccacaucuccacccucuccggcuccgcccagcacgucgaggagugcuccugcuacccccgcuaccccggcguccgcugcgucugccgcgacaacuggaagggcuccaaccgccccaucgucgacaucaacgucaaggacuacuccaucgucuccggcuacgucugcuccggccucgucggcgacaccccccgcaagaacgacuccuucuccuccucccacugccucgaccccaacaacgaggagggcggccacggcgucaagggcugggccuucgacgacggcaacgacgucuggaugggccgcaccaucuccgagaagcuccgcuccggcuacgagaccuucaaggucaucgagggcugguccaagcccaacuccaagcuccagaucaaccgccaggucaucgucgagcgcggcaaccgcuccggcuacuccggcaucuucuccgucgagggcaaguccugcaucaaccgcugcuucuacgucgagcucauccgcggccgcaaggaggagaccgaggucugguggaccuccaacuccaucgucgucuucugcggcaccuccggcaccuacggcaccggcuccuggcccgacggcgccgacaucaaccucaugcccaucuga

SEQ ID NO: 111353 - RNA, 1410 nt, Artificial Sequence
  derived and/or modified CDS sequence (opt2) from neuraminidase__InfluenzaA__ABI21060
augaaccccaaccagaagaucaucaccaucggcuccgucucccucaccaucgccaccaucugcuuccucaugcagaucgccauccucgucaccaccgucacccuccacuucaagcagcacgagugcaacuccccccccaacaaccaggucaugcucugcgagcccaccaucaucgagcgcaacaucaccgagaucgucuaccucaccaacaccaccaucgagaaggagaucugccccaagcccgucgaguaccgcaacugguccaagccccagugcaacaucaccggcuucgcccccuucuccaaggacaacuccauccgccucuccgccggcggcgacaucugggucacccgcgagcccuacgucuccugcgaccccgacaagugcuaccaguucgcccucggccagggcaccacccucaacaacggccacuccaacgacaccguccacgaccgcacccccuaccgcacccuccucaugaacgagcucggcguccccuuccaccucggcacccgccaggucugcaucgccugguccuccuccuccugccacgacggcaaggccuggcuccacgucugcgucaccggcgacgacaagaacgccaccgccuccuucaucuacaacggccgccucgucgacuccaucggcuccugguccaagaagauccuccgcacccaggaguccgagugcgucugcaucaacggcaccugcaccgucgucaugaccgacggcuccgccuccggcaaggccgacaccaagauccucuucaucgaggagggcaagaucguccacaucuccacccucuccggcuccgcccagcacgucgaggagugcuccugcuacccccgcuaccccggcguccgcugcgucugccgcgacaacuggaagggcuccaaccgccccaucgucgacaucaacgucaaggacuacuccaucgucuccuccuacgucugcuccggccucgucggcgacaccccccgcaagaacgacuccuucuccuccucccacugccucgaccccaacaacgaggagggcggccacggcgucaagggcugggccuucgacgacggcaacgacgucuggaugggccgcaccaucuccgagaagcuccgcuccggcuacgagaccuucaaggucaucgagggcugguccaagcccaacuccaagcuccagaucaaccgccaggucaucgucgagcgcggcaaccgcuccggcuacuccggcaucuucuccgucgagggcaaguccugcaucaaccgcugcuucuacgucgagcucauccgcggccgcaaggaggagaccgaggucugguggaccuccaacuccaucgucgucuucugcggcaccuccggcaccuacggcaccggcuccuggcccgacggcgccgacaucaaccucaugcccaucuga

SEQ ID NO: 111354 - RNA, 1410 nt, Artificial Sequence
  derived and/or modified CDS sequence (opt2) from neuraminidase__InfluenzaA__ABI21071
augaaccccaaccagaagaucaucaccaucggcuccgucucccucaccaucuccaccaucugcuucuucaugcagaucgccauccucaucaccaccgucacccuccacuucaagcaguacgaguucaacuccccccccaacaaccaggucaugcucugcgagcccaccaucaucgagcgcaacaucaccgagaucgucuaccucaccaacaccaccaucgagaaggagaucugccccaagcucgccgaguaccgcaacugguccaagccccagugcgacaucaccggcuucgcccccuucuccaaggacaacuccauccgccucuccgccggcggcgacaucugggucacccgcgagcccuacgucuccugcgaccccgacaagugcuaccaguucgcccucggccagggcaccacccucaacaacguccacuccaacgacaccguccacgaccgcacccccuaccgcacccuccucauguccgagcucggcguccccuuccaccucggcaccaagcaggucugcaucgccugguccuccuccuccugccacgacggcaaggccuggcuccacgucugcgucaccggcgacgacaagaacgccaccgccuccuucaucuacaacggccgccucgucgacuccaucgucuccugguccaaggagauccuccgcacccaggaguccgagugcgucugcaucaacggcaccugcaccgucgucaugaccgacggcuccgccuccggcaaggccgacaccaagauccucuucaucgaggagggcaagaucguccacaccuccacccucuccggcuccgcccagcacgucgaggagugcuccugcuacccccgcuaccccggcguccgcugcgucugccgcgacaacuggaagggcuccaaccgccccaucgucgacaucaacaucaaggacuacuccaucgucuccuccuacgucugcuccggccucgucggcgacaccccccgcaagaacgacuccuccuccuccucccacugccucgaccccaacaacgaggagggcggccacggcgucaagggcugggccuucgacgacggcaacgacgucuggaugggccgcaccaucuccgagaagcuccgcuccggcuacgagaccuucaaggucaucgagggcugguccaaccccaacuccaagcuccagaucaaccgccaggucaucgucgaccgcggcaaccgcuccggcuacuccggcaucuucuccgucgagggcaaguccugcaucaaccgcugcuucuacgucgagcucauccgcggccgcaaggaggagaccgagguccucuggaccuccaacuccaucgucgucuucugcggcaccuccggcaccuacggcaccggcuccuggcccgacggcgccgacaucaaccucaugcccaucuga

SEQ ID NO: 111355 - RNA, 1410 nt, Artificial Sequence
  derived and/or modified CDS sequence (opt2) from neuraminidase__InfluenzaA__ABI21082
augaaccccaaccagaagaucaucaccaucggcuccgucucccucaccaucuccaccaucugcuucuucaugcagaucgccacccucaucaccaccgucacccuccacuucaagcaguacgaguucaacuccccccccaacaaccaggucaugcucugcgagcccaccaucaucgagcgcaacaucaccgagaucgucuaccucaccaacaccaccaucgagaaggagaucugccccaagcucgccgaguaccgcaacugguccaagccccagugcgacaucaccggcuucgcccccuucuccaaggacaacuccauccgccucuccgccggcggcgacaucugggucacccgcgagcccuacgucuccugcgaccccgacaagugcuaccaguucgcccucggccagggcaccacccucaacaacguccacuccaacgacaccguccacgaccgcacccccuaccgcacccuccucaugaacgagcucggcguccccuuccaccucggcaccaagcaggucugcaucgccugguccuccuccuccugccacgacggcaaggccuggcuccacgucugcgucaccggcgacgacaagaacgccaccgccuccuucaucuacaacggccgccucgucgacuccaucgucuccugguccaaggagauccuccgcacccaggaguccgagugcgucugcaucaacggcaccugcaccgucgucaugaccgacggcuccgccuccggcaaggccgacaccaagauccucuucaucgaggagggcaagaucguccacaccuccacccucuccggcuccgcccagcacgucgaggagugcuccugcuacccccgcuaccccggcguccgcugcgucugccgcgacaacuggaagggcuccaaccgccccaucgucgacaucaacaucaaggacuacuccaucgucuccuccuacgucugcuccggccucgucggcgacaccccccgcaagaacgacuccuccuccuccucccacugccucgaccccaacaacgaggagggcggccacggcgucaagggcugggccuucgacgacggcaacgacgucuggaugggccgcaccaucuccgagaagcuccgcuccggcuacgagaccuucaaggucaucgagggcugguccaaccccaacuccaagcuccagaucaaccgccaggucaucgucgaccgcggcaaccgcuccggcuacuccggcaucuucuccgucgagggcaaguccugcaucaaccgcugcuucuacgucgagcucauccgcggccgcaaggaggagaccgagguccucuggaccuccaacuccaucgucgucuucugcggcaccuccggcaccuacggcaccggcuccuggcccgacggcgccgacaucaaccucaugcccaucuga

SEQ ID NO: 111356 - RNA, 1410 nt, Artificial Sequence; identical to SEQ ID NO: 110772
  derived and/or modified CDS sequence (opt2) from neuraminidase__InfluenzaA__ABI21093

SEQ ID NO: 111357 - RNA, 1410 nt, Artificial Sequence
  derived and/or modified CDS sequence (opt2) from neuraminidase__InfluenzaA__ABI21104
augaaccccaaccagaagaucaucaccaucggcuccgucucccucaccaucuccaccaucugcuucuucaugcagaucgccauccucaucaccaccgucacccuccacuucaagcaguacgaguucaacuccccccccaacaaccaggucaugcucugcgagcccaccaucaucgagcgcaacaucaccgagaucgucuaccucgccaacaccaccaucgagaaggagaucugccccaagcucgccgaguaccgcaacugguccaagccccagugcgacaucaccggcuucgcccccuucuccaaggacaacuccauccgccucuccgccggcggcgacaucugggucacccgcgagcccuacgucuccugcgaccccgacaagugcuaccaguucgcccucggccagggcaccacccucaacaacguccacuccaacgacaccguccacgaccgcacccccuaccgcacccuccucaugaacgagcucggcguccccuuccaccucggcaccaagcaggucugcaucgccugguccuccuccuccugccacgacggcaaggccuggcuccacgucugcgucaccggcgacgacaagaacgccaccgccuccuucaucuacaacggccgccucgucgacuccaucgucuccugguccaaggagauccuccgcacccaggaguccgagugcgucugcaucaacggcaccugcaccgucgucaugaccgacggcuccgccuccggcaaggccgacaccaagauccucuucaucgaggagggcaagaucguccacaccuccacccucuccggcuccgcccagcacgucgaggagugcuccugcuacccccgcuaccccggcguccgcugcgucugccgcgacaacuggaagggcuccaaccgccccaucgucgacaucaacaucaaggacuacuccaucgucuccuccuacgucugcuccggccucgucggcgacaccccccgcaagaacgacuccuccuccuccucccacugccucgaccccaacaacgaggagggcggccacggcgucaagggcugggccuucgacgacggcaacgacgucuggaugggccgcaccaucuccgagaagcuccgcuccggcuacgagaccuucaaggucaucgagggcugguccaaccccaacuccaagcuccagaucaaccgccaggucaucgucgaccgcggcaaccgcuccggcuacuccggcaucuucuccgucgagggcaagaacugcaucaaccgcugcuucuacgucgagcucauccgcggccgcaaggaggagaccgagguccucuggaccuccaacuccaucgucgucuucugcggcaccuccggcaccuacggcaccggcuccuggcccgacggcgccgacaucaaccucaugcccaucuga

SEQ ID NO: 111358 - RNA, 1410 nt, Artificial Sequence; identical to SEQ ID NO: 110363
  derived and/or modified CDS sequence (opt2) from neuraminidase__InfluenzaA__ABI21115

SEQ ID NO: 111359 - RNA, 1410 nt, Artificial Sequence; identical to SEQ ID NO: 110363
  derived and/or modified CDS sequence (opt2) from neuraminidase__InfluenzaA__ABI21126

SEQ ID NO: 111360 - RNA, 1410 nt, Artificial Sequence; identical to SEQ ID NO: 110772
  derived and/or modified CDS sequence (opt2) from neuraminidase__InfluenzaA__ABI21137

SEQ ID NO: 111361 - RNA, 1410 nt, Artificial Sequence; identical to SEQ ID NO: 110363
  derived and/or modified CDS sequence (opt2) from neuraminidase__InfluenzaA__ABI21148

SEQ ID NO: 111362 - RNA, 1410 nt, Artificial Sequence
  derived and/or modified CDS sequence (opt2) from neuraminidase__InfluenzaA__ABI21159
augaaccccaaccagaagaucaucaccaucggcuccgucucccucaccaucuccaccaucugcuucuucaugcagaucgccauccucaucaccaccgucacccuccacuucaagcaguacgaguucaacuccccccccaacaaccaggucaugcucugcgagcccaccaucaucgagcgcaacaucaccgagaucgucuaccucaccaacaccaccaucgagaaggagaucugccccaagcucgccgaguaccgcaacugguccaagccccagugcgacaucaccggcuucgcccccuucuccaaggacaacuccauccgccucuccgccggcggcgacaucugggucacccgcgagcccuacgucuccugcgaccccgacaagugcuaccaguucgcccucggccagggcaccacccucaacaacguccacuccaacgacaccguccacgaccgcacccccuaccgcacccuccucaugaacgagcucggcguccccuuccaccucggcaccaagcaggucugcaucgccugguccuccuccuccugccacgacggcaaggccuggcuccacgucugcgucaccggcgacgacaagaacgccaccgccuccuucaucuacaacggccgccucgucgacuccaucgucuccugguccaaggagauccuccgcacccaggaguccgagugcgucugcaucaacggcaccugcaccgucgucaugaccgacggcuccgccuccggcaaggccgacaccaagauccucuucaucgaggagggcaagaucguccacaccuccacccucuccggcuccgcccagcacgucgaggagugcuccugcuacccccgcuaccccggcguccgcugcgucugccgcgacaacuggaagggcuccaaccgccccaucgucgacaucaacaucaaggacuacuccaucgucuccggcuacgucugcuccggccucgucggcgacaccccccgcaagaacgacuccuccuccuccucccacugccucgaccccaacaacgaggagggcggccacggcgucaagggcugggccuucgacgacggcaacgacgucuggaugggccgcaccaucuccgagaagcuccgcuccggcuacgagaccuucaaggucaucgagggcugguccaaccccaacuccaagcuccagaucaaccgccaggucaucgucgaccgcggcaaccgcuccggcuacuccggcaucuucuccgucgagggcaaguccugcaucaaccgcugcuucuacgucgagcucauccgcggccgcaaggaggagaccgagguccucuggaccuccaacuccaucgucgucuucugcggcaccuccggcaccuacggcaccggcuccuggcccgacggcgccgacaucaaccucaugcccaucuga

SEQ ID NO: 111363 - RNA, 1410 nt, Artificial Sequence; identical to SEQ ID NO: 110363
  derived and/or modified CDS sequence (opt2) from neuraminidase__InfluenzaA__ABI21170

SEQ ID NO: 111364 - RNA, 1410 nt, Artificial Sequence; identical to SEQ ID NO: 110363
  derived and/or modified CDS sequence (opt2) from neuraminidase__InfluenzaA__ABI21181

SEQ ID NO: 111365 - RNA, 1413 nt, Artificial Sequence
  derived and/or modified CDS sequence (opt2) from neuraminidase__InfluenzaA__ABI21192
augaaccccaaccagaagaucaucaccaucggcuccaucuccaucgccaucggcaucaucucccucaugcuccagaucggcaacaucaucuccaucugggccucccacuccauccagaccggcucccagaaccacaccggcaccugcaaccagcgcaucaucaccuacgagaacuccaccugggucaaccacaccuacgucaacaucaacaacaccaacgucgucgccggcaaggacaagaccuccgucacccucgccggcaacuccucccucugcuccaucuccggcugggccaucuacaccaaggacaacuccauccgcaucggcuccaagggcgacgucuucgucauccgcgagcccuucaucuccugcucccaccucgagugccgcaccuucuuccucacccagggcgcccuccucaacgacaagcacuccaacggcaccgucaaggaccgcucccccuaccgcgcccucauguccugcccccucggcgaggcccccucccccuacaacuccaaguucgaguccgucgccugguccgccuccgccugccacgacggcaugggcuggcucaccaucggcaucuccggccccgacaacggcgccgucgccguccucaaguacaacggcaucaucaccgagaccaucaaguccuggcgcaagcgcauccuccgcacccaggaguccgagugcgucugcgucaacggcuccugcuucaccaucaugaccgacggccccuccaacggcgccgccuccuacaagaucuucaagaucgagaagggcaaggucaccaaguccaucgagcucaacgcccccaacuuccacuacgaggagugcuccugcuaccccgacaccggcaccgucaugugcgucugccgcgacaacuggcacggcuccaaccgccccugggucuccuucaaccagaaccucgacuaccagaucggcuacaucugcuccggcgucuucggcgacaacccccgccccaaggacggcaagggcuccugcaaccccgucaccgucgacggcgccgacggcgucaagggcuucuccuacaaguacggcaacggcgucuggaucggccgcaccaaguccaaccgccuccgcaagggcuucgagaugaucugggaccccaacggcuggaccgacaccgacuccgacuucuccgucaagcaggacgucgucgccaucaccgacugguccggcuacuccggcuccuucguccagcaccccgagcucaccggccucgacugcauccgccccugcuucugggucgagcucguccgcggccucccccgcgagaacaccaccaucuggaccuccggcuccuccaucuccuucugcggcgucgacuccgacaccgccaacugguccuggcccgacggcgccgagcuccccuucaucaucgacaaguga

SEQ ID NO: 111366 - RNA, 1413 nt, Artificial Sequence; identical to SEQ ID NO: 110422
  derived and/or modified CDS sequence (opt2) from neuraminidase__InfluenzaA__ABI21203

SEQ ID NO: 111367 - RNA, 1413 nt, Artificial Sequence
  derived and/or modified CDS sequence (opt2) from neuraminidase__InfluenzaA__ABI21214
augaaccccaaccagaagaucaucaccaucggcuccaucuccaucgccaucggcaucaucucccucaugcuccagaucggcaacaucaucuccaucugggccucccacuccauccagaccggcucccagaaccacaccggcaucugcaaccagcgcaucaucaccuacgagaacuccaccugggucaaccacaccuacgucaacaucaacaacaccaacgucgucgccggcaaggacaucaccuccgucacccucgccggcaacuccucccucugcuccaucuccggcugggccaucuacaccaaggacaacuccauccgcaucggcuccaagggcgacgucuucgucauccgcgagcccuucaucuccugcucccaccucgagugccgcaccuucuuccucacccagggcgcccuccucaacgacaagcacuccaacggcaccgucaaggaccgcucccccuaccgcgcccucauguccugcccccucggcgaggcccccucccccuacaacuccaaguucgaguccgucgccugguccgccuccgccugccacgacggcaugggcuggcucaccaucggcaucuccggccccgacaacggcgccgucgccguccucaaguacaacggcaucaucaccgagaccaucaaguccuggaagaagcgcauccuccgcacccaggaguccgagugcgucugcgucaacggcuccugcuucaccaucaugaccgacggccccuccaacggcgccgccuccuacaagaucuucaagaucgagaagggcaaggucaccaaguccaucgagcucaacgcccccaacuuccacuacgaggagugcuccugcuaccccgacaccggcaccgucaugugcgucugccgcgacaacuggcacggcuccaaccgccccugggucuccuucaaccagaaccucgacuaccagaucggcuacaucugcuccggcgucuucggcgacaacccccgccccaaggacggcaagggcuccugcaaccccgucaccgucgacggcgccgacggcgucaagggcuucuccuacaaguacggcaacggcgucuggaucggccgcaccaaguccaaccgccuccgcaagggcuucgagaugaucugggaccccaacggcuggaccgacaccgacuccgacuucuccgucaagcaggacgucgucgccaucaccgacugguccggcuacuccggcuccuucguccagcaccccgagcucaccggccucgacugcauccgccccugcuucugggucgagcucguccgcggccucccccgcgagaacaccaccaucuggaccuccggcuccuccaucuccuucugcggcgucgacuccgacaccgccaacugguccuggcccgacggcgccgagcuccccuucaccaucgacaaguga

SEQ ID NO: 111368 - RNA, 1410 nt, Artificial Sequence
  derived and/or modified CDS sequence (opt2) from neuraminidase__InfluenzaA__ABI21247
augaaccccaaccagaagaucaucaccaucggcuccgucucccucaccaucgccaccaucugcuuccucaugcagaucgccauccucgucaccaccgucacccuccacuucaagcaguacgagugcaacuccccccccaacaaccaggucaugcucugcgagcccaccaucaucgagcgcaacaucaccgagaucgucuaccucaccaacaccaccaucgagaaggagaagugccccaagcucgccgaguaccgcaacugguccaagccccagugcaagaucaccggcuucgcccccuucuccaaggacaacuccauccgccucuccgccggcggcgacaucugggucacccgcgagcccuacgucuccugcgaccccggcaagugcuaccaguucgcccucggccagggcaccacccucaacaaccgccacuccaacgacaccguccacgaccgcacccccuaccgcacccuccucaugaacgagcucggcguccccuuccaccucggcaccaagcaggucugcaucgccugguccuccuccuccugccacgacggcaaggccuggcuccacgucugcgucaccggccacgacgagaacgccaccgccuccuucaucuacgacggccgccucgucgacuccaucggcuccugguccaagaacauccuccgcacccaggaguccgagugcgucugcaucaacggcaccugcaccgucgucaugaccgacggcuccgccuccgagcgcgccgacaccaagauccucuucaucgaggagggcaagaucguccacaucuccccccucuccggcuccgcccagcacgucgaggagugcuccugcuacccccgcuaccccggcguccgcugcgucugccgcgacaacuggaagggcuccaaccgccccaucgucgacaucaacgucaaggaccacuccaucgucuccuccuacgucugcuccggccucgucggcgacaccccccgcaagaacgacuccuccuccuccuccuacugccgcaaccccaacaacgagaagggcucccacggcaugaagggcugggccuucgacgacggcaacgacgucuggaugggccgcaccaucuccgaggagcuccgcuccggcuacgagaccuucaaggucaucggcggcugguccaagcccaacuccaagcuccagaucaaccgccaggucaucgucgaccgcggcaaccgcuccggcuacuccggcaucuucuccgucgagggcaaguccugcaucaaccgcugcuucuacgucgagcucauccgcggccgcaagcaggagaccgaggucugguggaccuccaacuccaucgucgucuucugcggcaccuccggcaccuacggcaccggcuccuggcccgacggcgccgacaucaaccucaugcccaucuga

SEQ ID NO: 111369 - RNA, 1410 nt, Artificial Sequence; identical to SEQ ID NO: 111289
  derived and/or modified CDS sequence (opt2) from neuraminidase__InfluenzaA__ABI21258

SEQ ID NO: 111370 - RNA, 1410 nt, Artificial Sequence; identical to SEQ ID NO: 111289
  derived and/or modified CDS sequence (opt2) from neuraminidase__InfluenzaA__ABI21269

SEQ ID NO: 111371 - RNA, 1410 nt, Artificial Sequence; identical to SEQ ID NO: 111289
  derived and/or modified CDS sequence (opt2) from neuraminidase__InfluenzaA__ABI21280

SEQ ID NO: 111372 - RNA, 1410 nt, Artificial Sequence; identical to SEQ ID NO: 111221
  derived and/or modified CDS sequence (opt2) from neuraminidase__InfluenzaA__ABI21302

SEQ ID NO: 111373 - RNA, 1410 nt, Artificial Sequence; identical to SEQ ID NO: 111221
  derived and/or modified CDS sequence (opt2) from neuraminidase__InfluenzaA__ABI21313

SEQ ID NO: 111374 - RNA, 1410 nt, Artificial Sequence; identical to SEQ ID NO: 111221
  derived and/or modified CDS sequence (opt2) from neuraminidase__InfluenzaA__ABI21324

SEQ ID NO: 111375 - RNA, 1410 nt, Artificial Sequence; identical to SEQ ID NO: 111221
  derived and/or modified CDS sequence (opt2) from neuraminidase__InfluenzaA__ABI21335

SEQ ID NO: 111376 - RNA, 1410 nt, Artificial Sequence; identical to SEQ ID NO: 111289
  derived and/or modified CDS sequence (opt2) from neuraminidase__InfluenzaA__ABI21346

SEQ ID NO: 111377 - RNA, 1410 nt, Artificial Sequence
  derived and/or modified CDS sequence (opt2) from neuraminidase__InfluenzaA__ABI21357
augaaccccaaccagaagaucaucaccaucggcuccgucucccucaccaucgccaccaucugcuuccucaugcagaucgccauccucgucaccaccgucacccuccacuucaagcaguacgagugcaacuccccccccaacaaccaggucaugcucugcgagcccaccaucaucgagcgcaacaucaccgagaucgucuaccucaccaacaccaccaucgagaaggagaucugccccaagcucgccgaguaccgcaacugguccaagccccagugcaagaucaccggcuucgcccccuucuccaaggacaacuccauccgccucuccgccggcggcgacaucugggucacccgcgagcccuacgucuccugcgaccccggcaagugcuaccaguucgcccucggccagggcaccacccucaacaaccgccacuccaacgacaccguccacgaccgcacccccuaccgcacccuccucaugaacgagcucggcguccccuuccaccucggcaccaagcaggucugcaucgccugguccuccuccuccugccacgacggcaaggccuggcuccacgucugcgucaccggccacgacgagaacgccaccgccuccuucaucuacgacggccgccucgucgacuccaucggcuccugguccaagaacauccuccgcacccaggaguccgagugcgucugcaucaacggcaccugcaccgucgucaugaccgacggcuccgccuccgagcgcgccgacaccaagauccucuucaucgaggagggcaagaucguccacaucuccccccucuccggcuccgcccagcacgucgaggagugcuccugcuacccccgcuaccccggcguccgcugcgucugccgcgacaacuggaagggcuccaaccgccccaucgucgacaucaacgucaagaacuacuccaucgucuccuccuacgucugcuccggccucgucggcgacaccccccgcaagaacgacuccuccuccuccuccuacugccgcaaccccaacaacgagaagggcucccacggcgucaagggcugggccuucgacgacggcaacgacgucuggaugggccgcaccaucuccgaggagcuccgcuccggcuacgagaccuucaaggucaucggcggcugguccaagcccaacuccaagcuccagaucaaccgccaggucaucgucgaccgcggcaaccgcuccggcuacuccggcaucuucuccgucgagggcaaguccugcaucaaccgcugcuucuacgucgagcucauccgcggccgcaagcaggaggccgaggucugguggaccuccaacuccaucgucgucuucugcggcaccuccggcaccuacggcaccggcuccuggcccgacggcgccgacaucaaccucaugcccaucuga

SEQ ID NO: 111378 - RNA, 1410 nt, Artificial Sequence; identical to SEQ ID NO: 111221
  derived and/or modified CDS sequence (opt2) from neuraminidase__InfluenzaA__ABI21368

SEQ ID NO: 111379 - RNA, 1410 nt, Artificial Sequence; identical to SEQ ID NO: 111221
  derived and/or modified CDS sequence (opt2) from neuraminidase__InfluenzaA__ABI21379

SEQ ID NO: 111380 - RNA, 1410 nt, Artificial Sequence; identical to SEQ ID NO: 111221
  derived and/or modified CDS sequence (opt2) from neuraminidase__InfluenzaA__ABI21390

SEQ ID NO: 111381 - RNA, 1410 nt, Artificial Sequence; identical to SEQ ID NO: 111289
  derived and/or modified CDS sequence (opt2) from neuraminidase__InfluenzaA__ABI21401

SEQ ID NO: 111382 - RNA, 1410 nt, Artificial Sequence
  derived and/or modified CDS sequence (opt2) from neuraminidase__InfluenzaA__ABI21412
augaaccccaaccagaagaucaucaccaucggcuccgucucccucaccaucgccaccaucugcuuccucaugcagaucgccauccucgucaccaccgucacccuccacuucaagcaguacgagugcaaccccccccccaacaaccaggucaugcucugcgagcccaccaucaucgagcgcaacaucaccgagaucgucuaccucaccaacaccaccaucgagaaggagaucugccccaagcucgccgaguaccgcaacugguccaagccccagugcaagaucaccggcuucgcccccuucuccaaggacaacuccauccgccucuccgccggcggcgacaucugggucacccgcgagcccuacgucuccugcgaccccggcaagugcuaccaguucgcccucggccagggcaccacccucaacaaccgccacuccaacgacaccguccacgaccgcacccccuaccgcacccuccucaugaacgagcucggcguccccuuccaccucggcaccaagcaggucugcaucgccugguccuccuccuccugccacgacggcaaggccuggcuccacgucugcgucaccggccacgacgagaacgccaccgccuccuucaucuacgacggccgccucgucgacuccaucggcuccugguccaagaacauccuccgcacccaggaguccgagugcgucugcaucaacggcaccugcaccgucgucaugaccgacggcuccgccuccgagcgcgccgacaccaagauccucuucaucgaggagggcaagaucguccacaucuccccccucuccggcuccgcccagcacgucgaggagugcuccugcuacccccgcuaccccggcguccgcugcgucugccgcgacaacuggaagggcuccaaccgccccaucgucgacaucaacgucaaggacuacuccaucgucuccuccuacgucugcuccggccucgucggcgacaccccccgcaagaacgacuccuccuccuccuccuacugccgcaaccccaacaacgagaagggcucccacggcgucaagggcugggccuucgacgacggcaacgacgucuggaugggccgcaccaucuccgaggagcuccgcuccggcuacgagaccuucaaggucaucggcggcugguccaagcccaacuccaagcuccagaucaaccgccaggucaucgucgaccgcggcaaccgcuccggcuacuccggcaucuucuccgucgagggcaaguccugcaucaaccgcugcuucuacgucgagcucauccgcggccgcaagcaggagaccgaggucugguggaccuccaacuccaucgucgucuucugcggcaccuccggcaccuacggcaccggcuccuggcccgacggcgccgacaucaaccucaugcccaucuga

SEQ ID NO: 111383 - RNA, 1410 nt, Artificial Sequence; identical to SEQ ID NO: 110555
  derived and/or modified CDS sequence (opt2) from neuraminidase__InfluenzaA__ABI21423

SEQ ID NO: 111384 - RNA, 1410 nt, Artificial Sequence; identical to SEQ ID NO: 111221
  derived and/or modified CDS sequence (opt2) from neuraminidase__InfluenzaA__ABI21434

SEQ ID NO: 111385 - RNA, 1410 nt, Artificial Sequence; identical to SEQ ID NO: 111289
  derived and/or modified CDS sequence (opt2) from neuraminidase__InfluenzaA__ABI21445

SEQ ID NO: 111386 - RNA, 1410 nt, Artificial Sequence; identical to SEQ ID NO: 111289
  derived and/or modified CDS sequence (opt2) from neuraminidase__InfluenzaA__ABI21456

SEQ ID NO: 111387 - RNA, 1410 nt, Artificial Sequence; identical to SEQ ID NO: 111382
  derived and/or modified CDS sequence (opt2) from neuraminidase__InfluenzaA__ABI21467

SEQ ID NO: 111388 - RNA, 1410 nt, Artificial Sequence; identical to SEQ ID NO: 111289
  derived and/or modified CDS sequence (opt2) from neuraminidase__InfluenzaA__ABI21478

SEQ ID NO: 111389 - RNA, 1410 nt, Artificial Sequence; identical to SEQ ID NO: 111289
  derived and/or modified CDS sequence (opt2) from neuraminidase__InfluenzaA__ABI21489

SEQ ID NO: 111390 - RNA, 1410 nt, Artificial Sequence; identical to SEQ ID NO: 111289
  derived and/or modified CDS sequence (opt2) from neuraminidase__InfluenzaA__ABI21500

SEQ ID NO: 111391 - RNA, 1410 nt, Artificial Sequence
  derived and/or modified CDS sequence (opt2) from neuraminidase__InfluenzaA__ABI21511
augaaccccaaccagaagaucaucaccaucggcuccgucucccucaccaucgccaccaucugcuuccucaugcagaucgccauccucgucaccaccgucacccuccacuucaagcaguacgagugcaacuccccccccaacaaccaggucaugcucugcgagcccgccaucaucgagcgcaacaucaccgagaucgucuaccucaccaacaccaccaucgagaaggagaugugccccaagcucgccgaguaccgcaacugguccaagccccagugcaacaucaccggcuucgcccccuucuccaaggacaacuccauccgccucuccgccggcggcgacaucugggucacccgcgagcccuacgucuccugcgaccccgacaagugcuaccaguucgcccucggccagggcaccacccucaacaacggccacuccaacgacaccguccacgaccgcacccccuaccgcacccuccucaugaacgagcucggcguccccuuccaccucggcacccgccaggucugcaucgccugguccuccuccuccugccacgacggcaaggccuggcuccacgucugcgucaccggcgacgacgagaacgccaccgccuccuucaucuacgacggccgccucgucgacuccaucggcuccugguccaagaagauccuccgcacccaggaguccgagugcgucugcaucaacggcaccugcaccgucgucaugaccgacggcuccgccuccggcaaggccgacaccaagauccucuucaucgaggagggcaagaucgucaacaucuccacccucuccggcuccgcccagcacgucgaggagugcuccugcuacccccgcuaccccggcguccgcugcgucugccgcgacaacuggaagggcuccaaccgccccaucgucgacaucaacgucaaggacuacuccaucgucuccuccuacgucugcuccggccucgucggcgacaccccccgcaagaacgacuccuucuccuccucccacugccucgaccccaacaacgaggagggcggccacggcgucaagggcugggccuucgacgacggcaacgacgucuggaugggccgcaccaucuccgagaagcuccgcuccggcuacgagaccuucaaggucaucgagggcugguccaagcccaacuccaagcuccagaucaaccgccaggucaucgucgagcgcggcaaccgcuccggcuacuccggcaucuucuccgucgagggcaaguccugcaucaaccgcugcuucuacgucgagcucauccgcggccgcaaggaggagaccgaggucugguggaccuccaacuccaucgucgucuucugcggcaccuccggcaccuacggcaccggcuccuggcccgacggcgccgacaucaaccucaugcccaucuga

SEQ ID NO: 111392 - RNA, 1413 nt, Artificial Sequence
  derived and/or modified CDS sequence (opt2) from neuraminidase__InfluenzaA__ABI21533
augaaccccaaccagaagaucaucaccaucggcuccaucuccaucgccaucggcaucaucucccucaugcuccagaucggcaacaucaucuccaucugggccucccacuccauccagaccggcucccagaaccacaccggcaucugcaaccagcgcaucaucaccuacgagaacuccaccugggucaaccacaccuacgucaacaucaacaacaccaacgucgucgccggcaaggacaagaccuccgucacccucgccggcaacuccucccucugcuccaucuccggcugggccaucuacaccaaggacaacuccauccgcaucggcuccaagggcgacgucuucgucaugcgcgagcccuucaucuccugcucccaccucgagugccgcaccuucuuccucacccagggcgcccuccucaacgacaagcacuccaacggcaccgucaaggaccgcucccccuaccgcgcccucauguccugcccccucggcgaggcccccucccccuacaacuccaaguucgaguccgucgccugguccgccuccgccugccacgacggcaugggcuggcucaccaucggcaucuccggccccgacaacggcgccgucgccguccucaaguacaacggcaucaucaccgagaccaucaaguccuggaagaagcgcauccuccgcacccaggaguccgagugcgucugcgucaacggcuccugcuucaccaucaugaccgacggccccuccaacggcgccgccuccuacaagaucuucaagaucgagaagggcaaggucaucaaguccaucgagcucaacgcccccaacucccacuacgaggagugcuccugcuaccccgacaccggcaccgucaugugcgucugccgcgacaacuggcacggcuccaaccgccccugggucuccuucaaccagaaccucgacuaccagaucggcuacaucugcuccggcgucuucggcgacaacccccgccccaaggacggcgagggcuccugcaaccccgucaccgucgacggcgccgacggcgucaagggcuucuccuacaaguacggcaacggcgucuggaucggccgcaccaaguccaaccgccuccgcaagggcuucgagaugaucugggaccccaacggcuggaccgacaccgacuccgacuucuccgucaagcaggacgucgucgccaucaccgacugguccggcuacuccggcuccuucguccagcaccccgagcucaccggccucgacugcauccgccccugcuucugggucgagcucguccgcggccgcccccgcgagaacaccaccaucuggaccuccggcuccuccaucuccuucugcggcgucaacuccgacaccgccaacugguccuggcccgacggcgccgagcuccccuucaccaucgacaaguga

SEQ ID NO: 111393 - RNA, 1413 nt, Artificial Sequence; identical to SEQ ID NO: 111392
  derived and/or modified CDS sequence (opt2) from neuraminidase__InfluenzaA__ABI21544

SEQ ID NO: 111394 - RNA, 1413 nt, Artificial Sequence; identical to SEQ ID NO: 111392
  derived and/or modified CDS sequence (opt2) from neuraminidase__InfluenzaA__ABI21555

SEQ ID NO: 111395 - RNA, 1413 nt, Artificial Sequence; identical to SEQ ID NO: 111392
  derived and/or modified CDS sequence (opt2) from neuraminidase__InfluenzaA__ABI21566

SEQ ID NO: 111396 - RNA, 1413 nt, Artificial Sequence; identical to SEQ ID NO: 111392
  derived and/or modified CDS sequence (opt2) from neuraminidase__InfluenzaA__ABI21577

SEQ ID NO: 111397 - RNA, 1413 nt, Artificial Sequence
  derived and/or modified CDS sequence (opt2) from neuraminidase__InfluenzaA__ABI22112
augaaccccaaccagaagaucaucaccaucggcuccaucuccaucgccaucggcaucaucucccucaugcuccagaucggcaacaucaucuccaucugggccucccacuccauccagaccggcucccagaaccacaccggcaucugcaaccagcgcaucaucaccuacgagaacuccaccugggucaaccacaccuacgucaacaucaacaacaccaacgucgucgccggcaaggacaagaccuccgucacccucgccggcaacuccucccucugcuccaucuccggcugggccaucuacaccaaggacaacuccauccgcaucggcuccaagggcgacgucuucgucauccgcgagcccuucaucuccugcucccaccucgagugccgcaccuucuuccucacccagggcgcccuccucaacgacaagcacuccaacggcaccgucaaggaccgcucccccuaccgcgcccucauguccugcccccucggcgaggcccccucccccuacaacuccaaguucgaguccgucgccugguccgccuccgccugccacgacggcaugggcuggcucaccaucggcaucuccggccccgacaacggcgccgucgccguccucaaguacaacgagaucaucaccgagaccaucaaguccuggaagaagcgcauccuccgcacccaggaguccgagugcgucugcgucaacggcuccugcuucaccaucaugaccgacggccccuccaacggcgccgccuccuacaagaucuucaagaucgagaagggcaaggucaccaaguccaucgagcucaacgcccccaacuuccacuacgaggagugcuccugcuaccccgacaccggcaccgucaugugcgucugccgcgacaacuggcacggcuccaaccgccccugggucuccuucaaccagaaccucgacuaccagaucggcuacaucugcuccggcgucuucggcgacaacccccgccccaaggacggcaagggcuccugcaaccccgucaccgucgacggcgccgacggcgucaagggcuucuccuacaaguacggcaacggcgucuggaucggccgcaccaaguccaaccgccuccgcaagggcuucgagaugaucugggaccccaacggcuggaccgacaccgacuccgacuucuccgucaagcaggacgucgucgccaucaccgacugguccggcuacuccggcuccuucguccagcaccccgagcucaccggccucgacugcauccgccccugcuucugggucgagcucguccgcggccucccccgcgagaacaccaccaucuggaccuccggcuccuccaucuccuucugcggcgucgacuccgacaccgccaacugguccuggcccgacggcgccgagcuccccuucaccaucgacaaguga

SEQ ID NO: 111398 - RNA, 1410 nt, Artificial Sequence
  derived and/or modified CDS sequence (opt2) from neuraminidase__InfluenzaA__ABI22162
augaaccccaaccagaagaucaucaccaucggcuccgucucccucaccaucuccaccaucugcuucuucaugcagaucgccauccucaucaccaccgucacccuccacuucaagcaguacgaguucaacuccccccccaacaaccaggucaugcucugcgagcccaccaucaucgagcgcaacaucaccgagaucgucuaccucaccaacaccaccaucgagaaggagaucugccccaagcucgccgaguaccgcaacugguccaagccccagugcaacaucaccggcuucgcccccuucuccaaggacaacuccauccgccucuccgccggcggcgacaucugggucacccgcgagcccuacgucuccugcgaccccgacaagugcuaccaguucgcccucggccagggcaccacccucaacaacguccacuccaacgacaccguccacgaccgcacccccuaccgcacccuccucaugaacgagcucggcguccccuuccaccucggcaccaagcaggucugcaucgccugguccuccuccuccugccacgacggcaaggccuggcuccacgucugcgucaccggcgacgacaagaacgccaccgccuccuucaucuacaacggccgccucgucgacuccaucgucuccugguccaaggagauccuccgcacccaggaguccgagugcgucugcaucaacggcaccugcaccgucgucaugaccgacggcuccgccuccggcaaggccgacaccaagauccucuucaucgaggagggcaagaucguccacaccuccacccucuccggcuccgcccagcacgucgaggagugcuccugcuacccccgcuaccccggcguccgcugcgucugccgcgacaacuggaagggcuccaaccgccccaucgucgacaucaacaucaaggacuacuccaucgucuccuccuacgucugcuccggccucgucggcgacaccccccgcaagaacgacuccuccuccuccucccacugccucgaccccaacaacgaggagggcggccacggcgucaagggcugggccuucgacgacggcaacgacgucuggaugggccgcaccaucuccgagaagcuccgcuccggcuacgagaccuucaaggucaucgagggcugguccaaccccaacuccaagcuccagaccaaccgccaggucaucgucgaccgcggcaaccgcuccggcuacuccggcaucuucuccgucgagggcaaguccugcaucaaccgcugcuucuacgucgagcucauccgcggccgcaaggaggagaccgagguccucuggaccuccaacuccaucgucgucuucugcggcaccuccggcaccuacggcaccggcuccuggcccgacggcgccgacaucgaccucaugcccaucuga

SEQ ID NO: 111399 - RNA, 1350 nt, Artificial Sequence
  derived and/or modified CDS sequence (opt2) from neuraminidase__InfluenzaA__ABI23981
augaaccccaaccagaagaucaucaccaucggcuccaucugcauggucaucggcaucgucucccucaugcuccagaucggcaacaugaucuccaucugggucucccacuccauccagaccggcaaccagcgccaggccgaguccaucuccaacaccaaguuccucaccgagaaggccgucgccuccgucacccucgccggcaacuccucccucugccccaucuccggcugggccgucuacuccaaggacaacuccauccgcaucggcucccgcggcgacgucuucgucauccgcgagcccuucaucuccugcucccaccucgagugccgcaccuucuuccucacccagggcgcccuccucaacgacaagcacuccaacggcaccgucaaggaccgcucccccuaccgcacccucauguccucccccgucggcgaggcccccucccccuacaacucccgcuucgaguccgucgccugguccgccuccgccugccacgacggcaccuccuggcucaccaucggcaucuccggccccgacaacggcgccgucgccguccucaaguacaacggcaucaucaccgacaccaucaaguccuggcgcaacaacauccuccgcacccaggaguccgagugcgccugcgucaacggcuccugcuucaccgucaugaccgacggccccuccaacggccaggccuccuacaagaucuucaagauggagaagggcaaggucgucaaguccgucgagcucgacgcccccaacuaccacuacgaggagugcuccugcuaccccgacgccggcgagaucaccugcgucugccgcgacaacuggcacggcuccaaccgccccugggucuccuucaaccagaaccucgaguaccagaucggcuacaucugcuccggcgucuucggcgacaacccccgccccaacgacggcaccggcuccugcggccccgucucccucaacggcgccuacggcgucaagggcuucuccuucaaguacggcaacggcgucuggaucggccgcaccaaguccaccaacucccgcuccggcuucgagaugaucugggaccccaacggcuggaccggcaccgacuccuccuucuccgucaagcaggacaucgucgccaucaccgacugguccggcuacuccggcuccuucguccagcaccccgagcucaccggccucgacugcauccgccccugcuucugggucgagcucauccgcggccgccccaaggaguccaccaucuggaccuccggcuccuccaucuccuucugcggcgucaacuccgacaccgucuccugguccuggcccgacggcgccgagcuccccuucaccaucgacaaguga

SEQ ID NO: 111400 - RNA, 1410 nt, Artificial Sequence; identical to SEQ ID NO: 110363
  derived and/or modified CDS sequence (opt2) from neuraminidase__InfluenzaA__ABI26649

SEQ ID NO: 111401 - RNA, 1413 nt, Artificial Sequence; identical to SEQ ID NO: 111086
  derived and/or modified CDS sequence (opt2) from neuraminidase__InfluenzaA__ABI30370

SEQ ID NO: 111402 - RNA, 1410 nt, Artificial Sequence; identical to SEQ ID NO: 111137
  derived and/or modified CDS sequence (opt2) from neuraminidase__InfluenzaA__ABI30392

SEQ ID NO: 111403 - RNA, 1410 nt, Artificial Sequence; identical to SEQ ID NO: 110766
  derived and/or modified CDS sequence (opt2) from neuraminidase__InfluenzaA__ABI30403

SEQ ID NO: 111404 - RNA, 1410 nt, Artificial Sequence; identical to SEQ ID NO: 110766
  derived and/or modified CDS sequence (opt2) from neuraminidase__InfluenzaA__ABI30414

SEQ ID NO: 111405 - RNA, 1410 nt, Artificial Sequence; identical to SEQ ID NO: 110363
  derived and/or modified CDS sequence (opt2) from neuraminidase__InfluenzaA__ABI30425

SEQ ID NO: 111406 - RNA, 1410 nt, Artificial Sequence; identical to SEQ ID NO: 110363
  derived and/or modified CDS sequence (opt2) from neuraminidase__InfluenzaA__ABI30436

SEQ ID NO: 111407 - RNA, 1410 nt, Artificial Sequence; identical to SEQ ID NO: 110363
  derived and/or modified CDS sequence (opt2) from neuraminidase__InfluenzaA__ABI30447

SEQ ID NO: 111408 - RNA, 1410 nt, Artificial Sequence; identical to SEQ ID NO: 110363
  derived and/or modified CDS sequence (opt2) from neuraminidase__InfluenzaA__ABI30458

SEQ ID NO: 111409 - RNA, 1410 nt, Artificial Sequence; identical to SEQ ID NO: 110363
  derived and/or modified CDS sequence (opt2) from neuraminidase__InfluenzaA__ABI30469

SEQ ID NO: 111410 - RNA, 1410 nt, Artificial Sequence; identical to SEQ ID NO: 110363
  derived and/or modified CDS sequence (opt2) from neuraminidase__InfluenzaA__ABI30480

SEQ ID NO: 111411 - RNA, 1410 nt, Artificial Sequence
  derived and/or modified CDS sequence (opt2) from neuraminidase__InfluenzaA__ABI30491
augaaccccaaccagaagaucaucaccaucggcuccgucucccucaccaucuccaccaucugcuucuucaugcagaucgccauccucaucaccaccgucacccuccacuucaagcaguacgaguucaacuccccccccaacaaccaggucaugcucugcgagcccaccaucaucgagcgcaacaucaccaagaucgucuaccucaccaacaccaccaucgagaaggagaucugccccaagcucgccgaguaccgcaacugguccaagccccagugcgacaucaccggcuucgcccccuucuccaaggacaacuccauccgccucuccgccggcggcgacaucugggucacccgcgagcccuacgucuccugcgaccccgacaagugcuaccaguucgcccucggccagggcaccacccucaacaacguccacuccaacgacaccguccacgaccgcacccccuaccgcacccuccucaugaacgagcucggcguccccuuccaccucggcaccaagcaggucugcaucgccugguccuccuccuccugccacgacggcaaggccuggcuccacgucugcgucaccggcgacgacaagaacgccaccgccuccuucaucuacaacggccgccucgucgacuccaucgucuccugguccaaggagauccuccgcacccaggaguccgagugcgucugcaucaacggcaccugcaccgucgucaugaccgacggcuccgccuccggcaaggccgacaccaagauccucuucaucgaggagggcaagaucguccacaccuccacccucuccggcuccgcccagcacgucgaggagugcuccugcuacccccgcuaccccggcguccgcugcgucugccgcgacaacuggaagggcuccaaccgccccaucgucgacaucaacaucaaggacuacuccaucgucuccuccuacgucugcuccggccucgucggcgacaccccccgcaagaacgacuccuccuccuccucccacugccucgaccccaacaacgaggagggcggccacggcgucaagggcugggccuucgacgacggcaacgacgucuggaugggccgcaccaucuccgagaagcuccgcuccggcuacgagaccuucaaggucaucgagggcugguccaaccccaacuccaagcuccagaucaaccgccaggucaucgucgaccgcggcaaccgcuccggcuacuccggcaucuucuccgucgagggcaaguccugcaucaaccgcugcuucuacgucgagcucauccgcggccgcaaggaggagaccgagguccucuggaccuccaacuccaucgucgucuucugcggcaccuccggcaccuacggcaccggcuccuggcccgacggcgccgacaucaaccucaugcccaucuga

SEQ ID NO: 111412 - RNA, 1410 nt, Artificial Sequence; identical to SEQ ID NO: 110363
  derived and/or modified CDS sequence (opt2) from neuraminidase__InfluenzaA__ABI30502

SEQ ID NO: 111413 - RNA, 1410 nt, Artificial Sequence
  derived and/or modified CDS sequence (opt2) from neuraminidase__InfluenzaA__ABI30513
augaaccccaaccagaagaucaucaccaucggcuccgucucccucaccaucuccaccaucugcuucuucaugcagaucgccauccucaucaccaccgucacccuccacuucaagcaguacgaguucaacuccccccccaacaaccaggucaugcucugcgagcccaccaucaucgagcgcaacaucaccgagaucgucuaccucaccaacaccaccaucgagaaggagaucugccccaagcucgccgaguaccgcaacugguccaagccccagugcgacaucaccggcuucgcccccuucuccaaggacaacuccauccgccucuccgccggcggcgacaucugggucacccgcgagcccuacgucuccugcgaccccgacaagugcuaccaguucgcccucggccagggcaccacccucaacaacguccacuccaacgacaccguccacgaccgcacccccuaccgcacccuccucaugaacgagcucggcguccccuuccaccucggcaccaagcaggucugcaucgccugguccuccuccuccugccacgacggcaaggccuggcuccacgucugcgucaccggcgacgacaagaacgccaccgccuccuucaucuacaacggccgccucgucgacuccaucgucuccugguccaaggagauccuccgcacccaggaguccgagugcgucugcaucaacggcaccugcaccgucgucaugaccgacggcuccgccuccggcaaggccgacaccaagauccucuucaucgaggagggcaagaucguccacaccuccacccucuccggcuccgcccagcacgucgaggagugcuccugcuacccccgcuaccccggcguccgcugcgucugccgcgacaacuggaagggcuccaaccgccccaucgucgacaucaacaucaaggacuacuccaucgucuccuccuacgucugcuccggccucgucggcgacaccccccgcaagaacgacuccuccuccuccucccacugccucgaccccaacaacgaggagggcggccacggcgucaagggcugggccuucgacgacggcaacgacgucuggaugggccgcaccaucuccgagaagcuccgcuccggcuacgagaccuucaaggucaucgagggcugguccaaccccaacuccaagcuccagaccaaccgccaggucaucgucgaccgcggcaaccgcuccggcuacuccggcaucuucuccgucgagggcaaguccugcaucaaccgcugcuucuacgucgagcucauccgcggccgcaaggaggagaccgagguccucuggaccuccaacuccaucgucgucuucugcggcaccuccggcaccuacggcaccggcuccuggcccgacggcgccgacaucaaccucaugcccaucuga

SEQ ID NO: 111414 - RNA, 1410 nt, Artificial Sequence; identical to SEQ ID NO: 110363
  derived and/or modified CDS sequence (opt2) from neuraminidase__InfluenzaA__ABI30524

SEQ ID NO: 111415 - RNA, 1410 nt, Artificial Sequence; identical to SEQ ID NO: 110363
  derived and/or modified CDS sequence (opt2) from neuraminidase__InfluenzaA__ABI30535

SEQ ID NO: 111416 - RNA, 1410 nt, Artificial Sequence
  derived and/or modified CDS sequence (opt2) from neuraminidase__InfluenzaA__ABI30546
augaaccccaaccagaagaucaucaccaucggcuccgucucccucaccaucuccaccaucugcuucuucaugcagaucgccauccucaucaccaccgucacccuccacuucaagcaguacgaguucaacuccccccccaacaaccaggucaugcucugcgagcccaccaucaucgagcgcaacaucaccgagaucgucuaccucaccaacaccaccaucgagaaggagaucugccccaagcucgccgaguaccgcaacugguccaagccccagugcgacaucaccggcuucgcccccuucuccaaggacaacuccauccgccucuccgccggcggcgacaucugggucacccgcgagcccuacgucuccugcgaccccgacaagugcuaccaguucgcccucggccagggcaccacccucaacaaccuccacuccaacgacaccguccacgaccgcacccccuaccgcacccuccucauguccgagcucggcguccccuuccaccucggcaccaagcaggucugcaucgccugguccuccuccuccugccacgacggcaaggccuggaugcacgucugcgucaccggcgacgacaagaacgccaccgccuccuucaucuacaacggccgccucgucgacuccaucgucuccugguccaaggagauccuccgcacccaggaguccgagugcgucugcaucaacggcaccugcaccgucgucaugaccgacggcuccgccuccggcaaggccgacaccaagauccucuucaucgaggagggcaagaucguccacaccuccacccucuccggcuccgcccagcacgucgaggagugcuccugcuacccccgcuaccccggcguccgcugcgucugccgcgacaacuggaagggcuccaaccgccccaucgucgacaucaacaucaaggacuacuccaucgucuccuccuacgucugcuccggccucgucggcgacaccccccgcaagaacgacuccuccuccuccucccacugccucgaccccaacaacgaggagggcggccacggcgucaagggcugggccuucgacgacggcaacgacgucuggaugggccgcaccaucuccgagaagcuccgcuccggcuacgagaccuucaaggucaucgagggcugguccaaccccaacuccaagcuccagaucaaccgccaggucaucgucgaccgcggcaaccgcuccggcuacuccggcaucuucuccgucgagggcaagaacugcaucaaccgcugcuucuacgucgagcucauccgcggccgcaaggaggagaccgagguccucuggaccuccaacuccaucgucgucuucugcggcaccuccggcaccuacggcaccggcuccuggcccgacggcgccgacaucaaccucaugcccaucuga

SEQ ID NO: 111417 - RNA, 1410 nt, Artificial Sequence; identical to SEQ ID NO: 110363
  derived and/or modified CDS sequence (opt2) from neuraminidase__InfluenzaA__ABI30557

SEQ ID NO: 111418 - RNA, 1410 nt, Artificial Sequence; identical to SEQ ID NO: 110750
  derived and/or modified CDS sequence (opt2) from neuraminidase__InfluenzaA__ABI30579

SEQ ID NO: 111419 - RNA, 1410 nt, Artificial Sequence
  derived and/or modified CDS sequence (opt2) from neuraminidase__InfluenzaA__ABI30590
augaaccccaaccagaagaucaucaccaucggcuccgucucccucaccaucuccaccaucugcuucuucaugcagaucgccauccucaucaccaccgucacccuccacuucaagcaguacgaguucaacuccccccccaacaaccaggucaugcucugcgagcccaccaucaucgagcgcaacaucaccgagaucgucuaccucaccaacaccaccaucgagaaggagaucugccccaagcucgccgaguaccgcaacugguccaagccccagugcgacaucaccggcuucgcccccuucuccaaggacaacuccauccgccucuccgccggcggcgacaucugggucacccgcgagcccuacgucuccugcgaccccgacaagugcuaccaguucgcccucggccagggcaccacccucaacaacguccacuccaacgacaccguccacgaccgcacccccuaccgcacccuccucaugaacgagcucggcguccccuuccaccucggcaccaagcaggucugcaucgccugguccuccuccuccugccacgacggcaaggccuggcuccacgucugcgucaccggcgacgacaagaacgccaccgccuccuucaucuacaacggccgccucgucgacuccaucgucuccugguccaagaagauccuccgcacccaggaguccgagugcgucugcaucaacggcaccugcaccgucgucaugaccgacggcuccgccuccggcaaggccgacaccaagauccucuucaucgaggagggcaagaucguccacaccuccacccucuccggcuccgcccagcacgucgaggagugcuccugcuacccccgcuaccccggcguccgcugcgucugccgcgacaacuggaagggcuccaaccgccccaucgucgacaucaacaucaaggacuacuccaucgucuccuccuacgucugcuccggccucgucggcgacaccccccgcaagaacgacuccuccuccuccucccacugccucgaccccaacaacgaggagggcggccacggcgucaagggcugggccuucgacgacggcaacgacgucuggaugggccgcaccaucuccgagaagcuccgcuccggcuacgagaccuucaaggucaucgagggcugguccaaccccaacuccaagcuccagaucaaccgccaggucaucgucgaccgcggcaaccgcuccggcuacuccggcaucuucuccgucgagggcaagggcugcaucaaccgcugcuucuacgucgagcucauccgcggccgcaaggaggagaccgagguccucuggaccuccaacuccaucgucgucuucugcggcaccuccggcaccuacggcaccggcuccuggcccgacggcgccgacaucaaccucaugcccaucuga

SEQ ID NO: 111420 - RNA, 1410 nt, Artificial Sequence; identical to SEQ ID NO: 110843
  derived and/or modified CDS sequence (opt2) from neuraminidase__InfluenzaA__ABI30601

SEQ ID NO: 111421 - RNA, 1410 nt, Artificial Sequence
  derived and/or modified CDS sequence (opt2) from neuraminidase__InfluenzaA__ABI30612
augaaccccaaccagaagaucaucaccaucggcuccgucucccucaccaucuccaccaucugcuucuucaugcagaucgccauccucaucaccaccgucacccuccacuucaagcaguacgaguucaacuccccccccaacaaccaggucaugcucugcgagcccaccaucaucgagcgcaacaucaccgagaucgucuaccucaccaacaccaccaucgagaaggagaucugccccaagcucgccgaguaccgcaacugguccaagccccagugcaacaucaccggcuucgcccccuucuccaaggacaacuccauccgccucuccgccggcggcgacaucugggucacccgcgagcccuacgucuccugcgaccccgacaagugcuaccaguucgcccucggccagggcaccacccucaacaacguccacuccaacgacaccguccacgaccgcacccccuaccgcacccuccucaugaacgagcucggcguccccuuccaccucggcaccaagcaggucugcaucgccugguccuccuccuccugccacgacggcaaggccuggcuccacgucugcgucaccggcgacgacaagaacgccaccgccuccuucaucuacaacggccgccucgucgacuccaucgucuccugguccaaggagauccuccgcacccaggaguccgagugcgucugcaucaacggcaccugcaccgucgucaugaccgacggcuccgccuccggcaaggccgacaccaagauccucuucaucgaggagggcaagaucauccacaccuccacccucuccggcuccgcccagcacgucgaggagugcuccugcuacccccgcuaccccggcguccgcugcgucugccgcgacaacuggaagggcuccaaccgccccaucgucgacaucaacaucaaggacuacuccaucgucuccuccuacgucugcuccggccucgucggcgacaccccccgcaagaacgacuccuccuccuccucccacugccucgaccccaacaacgaggagggcggccacggcgucaagggcugggccuucgacgacggcaacgacgucuggaugggccgcaccaucuccgagaagcuccgcuccggcuacgagaccuucaaggucaucgagggcugguccaaccccaacuccaagcuccagaucaaccgccaggucaucgucgaccgcggcaaccgcuccggcuacuccggcaucuucuccgucgagggcaaguccugcaucaaccgcugcuucuacgucgagcucauccgcggccgcaaggaggagaccgagguccucuggaccuccaacuccaucgucgucuucugcggcaccuccggcaccuacggcaccggcuccuggcccgacggcgccgacaucaaccucaugcccaucuga

SEQ ID NO: 111422 - RNA, 1410 nt, Artificial Sequence; identical to SEQ ID NO: 110843
  derived and/or modified CDS sequence (opt2) from neuraminidase__InfluenzaA__ABI30623

SEQ ID NO: 111423 - RNA, 1410 nt, Artificial Sequence
  derived and/or modified CDS sequence (opt2) from neuraminidase__InfluenzaA__ABI30736
augaaccccaaccagaagaucaucaccaucggcuccgucucccucaccaucuccaccaucugcuucuucaugcagaucgccauccucaucaccaccgucacccuccacuucaagcaguacgaguucaacuccccccccaacaaccaggucaugcucugcgagcccaccaucaucgagcgcaacaucaccgagaucgucuaccucaccaacaccaccaucgagaaggagaucugccccaagcucgccgaguaccgcaacugguccaagccccagugcgacaucaccggcuucgcccccuucuccaaggacaacuccauccgccucuccgccggcggcgacaucugggucacccgcgagcccuacgucuccugcgaccccgacaagugcuaccaguucgcccucggccagggcaccacccucaacaacguccacuccaacgacaccguccacgaccgcacccccuaccgcacccuccucaugaacgagcucggcguccccuuccaccucggcaccaagcaggucugcaucgccugguccuccuccuccugccacgacggcaaggccuggcuccacgucugcgucaccggcgacgacaagaacgccaccgccuccuucaucuacaacggccgccucgucgacuccaucgucuccugguccaagaagauccuccgcacccaggaguccgagugcgucugcaucaacggcaccugcaccgucgucaugaccgacggcuccgccuccggcaaggccgacaccaagauccucuucaucgaggagggcaagaucguccacaccuccacccucuccggcuccgcccagcacgucgaggagugcuccugcuacccccgcuaccccggcguccgcugcgucugccgcgacaacuggaagggcuccaaccgccccaucgucgacaucaacaucaaggacuacuccgucgucuccuccuacgucugcuccggccucgucggcgacaccccccgcaagaacgacuccuccuccuccucccacugccucgaccccaacaacgaggagggcggccacggcgucaagggcugggccuucgacgacggcaacgacgucuggaugggccgcaccaucuccgagaagcuccgcuccggcuacgagaccuucaaggucaucgagggcugguccaaccccaacuccaagcuccagaucaaccgccaggucaucgucgaccgcggcaaccgcuccggcuacuccggcaucuucuccgucgagggcaaguccugcaucaaccgcugcuucuacgucgagcucauccgcggccgcaaggaggagaccgagguccucuggaccuccaacuccaucgucgucuucugcggcaccuccggcaccuacggcaccggcuccuggcccgacggcgccgacaucaaccucaugcccaucuga

SEQ ID NO: 111424 - RNA, 1410 nt, Artificial Sequence
  derived and/or modified CDS sequence (opt2) from neuraminidase__InfluenzaA__ABI30758
augaaccccaaccagaagaucaucaccaucggcuccgucucccucaccaucuccaccaucugcuucuucaugcagaucgccauccucaucaccaccgucacccuccacuucaagcaguacgaguucaacuccccccccaacaaccaggucaugcucuacgagcccaccaucaucgagcgcaacaucaccgagaucgucuaccucaccaacaccaccaucgagaaggagaucugccccaagcucgccgaguaccgcaacugguccaagccccagugcgacaucaccggcuucgcccccuucuccaaggacaacuccauccgccucuccgccggcggcgacaucugggucacccgcgagcccuacgucuccugcgaccccgacaagugcuaccaguucgcccucggccagggcaccacccucaacaacguccacuccaacgacaccguccacgaccgcacccccuaccgcacccuccucaugaacgagcucggcguccccuuccaccucggcaccaagcaggucugcaucgccugguccuccuccuccugccacgacggcaaggccuggcuccacgucugcgucaccggcgacgacaagaacgccaccgccuccuucaucuacaacggccgccucgucgacuccaucgucuccugguccaagaagauccuccgcacccaggaguccgagugcgucugcaucaacggcaccugcaccgucgucaugaccgacggcuccgccuccggcaaggccgacaccaagauccucuucaucgaggagggcaagaucguccacaccuccacccucuccggcuccgcccagcacgucgaggagugcuccugcuacccccgcuaccccggcguccgcugcgucugccgcgacaacuggaagggcuccaaccgccccaucgucgacaucaacaucaaggacuacuccaucgucuccuccuacgucugcuccggccucgucggcgacaccccccgcaagaacgacuccuccuccuccucccacugccucgaccccaacaacgaggagggcggccacggcgucaagggcugggccuucgacgacggcaacgacgucuggaugggccgcaccaucuccgagaagcuccgcuccggcuacgagaccuucaaggucaucgagggcugguccaaccccaacuccaagcuccagaucaaccgccaggucaucgucgaccgcggcaaccgcuccggcuacuccggcaucuucuccgucgagggcaaguccugcaucaaccgcugcuucuacgucgagcucauccgcggccgcaaggaggagaccgagguccucuggaccuccaacuccaucgucgucuucugcggcaccuccggcaccuacggcaccggcuccuggcccgacggcgccgacaucaaccucaugcccaucuga

SEQ ID NO: 111425 - RNA, 1410 nt, Artificial Sequence; identical to SEQ ID NO: 110750
  derived and/or modified CDS sequence (opt2) from neuraminidase__InfluenzaA__ABI30769

SEQ ID NO: 111426 - RNA, 1410 nt, Artificial Sequence; identical to SEQ ID NO: 110750
  derived and/or modified CDS sequence (opt2) from neuraminidase__InfluenzaA__ABI30780

SEQ ID NO: 111427 - RNA, 1410 nt, Artificial Sequence; identical to SEQ ID NO: 110750
  derived and/or modified CDS sequence (opt2) from neuraminidase__InfluenzaA__ABI30791

SEQ ID NO: 111428 - RNA, 1410 nt, Artificial Sequence; identical to SEQ ID NO: 110750
  derived and/or modified CDS sequence (opt2) from neuraminidase__InfluenzaA__ABI30802

SEQ ID NO: 111429 - RNA, 1410 nt, Artificial Sequence; identical to SEQ ID NO: 110750
  derived and/or modified CDS sequence (opt2) from neuraminidase__InfluenzaA__ABI30813

SEQ ID NO: 111430 - RNA, 1410 nt, Artificial Sequence; identical to SEQ ID NO: 110750
  derived and/or modified CDS sequence (opt2) from neuraminidase__InfluenzaA__ABI30824

SEQ ID NO: 111431 - RNA, 1410 nt, Artificial Sequence; identical to SEQ ID NO: 110750
  derived and/or modified CDS sequence (opt2) from neuraminidase__InfluenzaA__ABI30835

SEQ ID NO: 111432 - RNA, 1410 nt, Artificial Sequence; identical to SEQ ID NO: 110750
  derived and/or modified CDS sequence (opt2) from neuraminidase__InfluenzaA__ABI30846

SEQ ID NO: 111433 - RNA, 1410 nt, Artificial Sequence; identical to SEQ ID NO: 111221
  derived and/or modified CDS sequence (opt2) from neuraminidase__InfluenzaA__ABI30857

SEQ ID NO: 111434 - RNA, 1410 nt, Artificial Sequence; identical to SEQ ID NO: 111221
  derived and/or modified CDS sequence (opt2) from neuraminidase__InfluenzaA__ABI30868

SEQ ID NO: 111435 - RNA, 1350 nt, Artificial Sequence
  derived and/or modified CDS sequence (opt2) from neuraminidase__InfluenzaA__ABI36157
augaaccccaaccagaagaucaucaccaucggcuccaucugcauggccaucggcaccgucucccucaugcuccagaucggcaacaugaucuccaucugggucucccacuccauccagaccggcaaccagcaccaggccgaguccaucuccaacaccaacccccucaccgagaaggccgucgccuccgucacccucgccggcaacuccucccucugccccauccgcggcugggccguccacuccaaggacaacuccauccgcaucggcuccaagggcgacgucuucgucauccgcgagcccuucaucuccugcucccacuccgagugccgcaccuucuuccucacccagggcgcccuccucaacgacaagcacuccaacgagaccgucaaggaccgcuccccccaccgcacccucauguccugccccgucggcgaggcccccucccccuacaacucccgcuucgaguccgucgccugguccgccuccgccugccacgacggcaccuccuggcucaccaucggcaucuccggccccgacaacggcgccgucgccguccucaaguacaacggcaucaucaccgacaccaucaaguccuggcgcaacaacauccuccgcacccaggaguccgagugcgccugcgucaacggcuccugcuucaccgucaugaccgacggccccuccaacggccaggccuccuacaagaucuucaagauggagaagggcaaggucgucaaguccgucgagcucgacgcccccaacuaccacuacgaggagugcuccugcuaccccgacgccggcgagaucaccugcgucugccgcgacaacuggcacggcuccaaccgccccugggucuccuucaaccagaaccucgaguaccagaucggcuacaucugcuccggcgucuucggcgacaacccccgccccaacgacggcaccggcuccugcggccccauguccuccaacggcgccuacggcgucaagggcuucuccuucaaguacggcaacggcgucuggaucggccgcaccaaguccaccaacucccgcuccggcuucgagaugaucugggaccccaacggcuggaccggcaccgacuccuccuucuccgucaagcaggacaucgucgccaucaccgacugguccggcuacuccggcuccuucguccagcaccccgagcucaccggccucgacugcauccgccccugcuucugggucgagcucauccgcggccgccccaaggaguccaccaucuggaccuccggcuccuccaucuccuucugcggcgucaacuccgacaccgucuccugguccuggcccgacggcgccgagcuccccuucaccaucgacaaguga

SEQ ID NO: 111436 - RNA, 1350 nt, Artificial Sequence; identical to SEQ ID NO: 111435
  derived and/or modified CDS sequence (opt2) from neuraminidase__InfluenzaA__ABI36168

SEQ ID NO: 111437 - RNA, 1350 nt, Artificial Sequence; identical to SEQ ID NO: 111435
  derived and/or modified CDS sequence (opt2) from neuraminidase__InfluenzaA__ABI36179

SEQ ID NO: 111438 - RNA, 1350 nt, Artificial Sequence; identical to SEQ ID NO: 111435
  derived and/or modified CDS sequence (opt2) from neuraminidase__InfluenzaA__ABI36189

SEQ ID NO: 111439 - RNA, 1350 nt, Artificial Sequence
  derived and/or modified CDS sequence (opt2) from neuraminidase__InfluenzaA__ABI36278
augaaccccaaccagaagaucaucaccaucggcuccaucugcauggucaucggcaucgucucccucaugcuccagaucggcaacaugaucuccaucugggucucccacuccauccagaagggcaaccagcaccaggccgaguccaucuccaacaccaacccccucaccgagaaggccgucgccuccgucacccucgccggcaacuccucccucugccccauccgcggcugggccguccacuccaaggacaacaacauccgcaucggcuccaagggcgacgucuucgucauccgcgagcccuucaucuccugcucccaccucgagugccgcaccuucuuccucacccagggcgcccuccucaacgacaagcacuccaacggcaccgucaaggaccgcuccccccaccgcacccucauguccugccccgucggcgaggcccccucccccuacaacucccgcuucgaguccgucgccugguccgccuccgccugccacgacggcaccuccuggcucaccaucggcaucuccggccccgacaacgaggccgucgccguccucaaguacaacggcaucaucaccgacaccaucaaguccuggcgcaacaacauccuccgcacccaggaguccgagugcgccugcgucaacggcuccugcuucaccgucaugaccgacggccccuccaacggccaggccuccuacaagaucuucaagauggagaagggcaaggucgucaaguccgucgagcucgacgcccccaacuaccacuacgaggagugcuccugcuaccccgacgccggcgagaucaccugcgucugccgcgacaacuggcacggcuccaaccgccccugggucuccuucaaccagaaccucgaguaccagaucggcuacaucugcuccggcgucuucggcgacaacccccgccccaacgacggcaccggcuccugcggccccaugucccccaacggcgccuacggcgucaagggcuucuccuucaaguacggcaacggcgucuggaucggccgcaccaaguccaccaacucccgcuccggcuucgagaugaucugggaccccaacggcuggaccggcaccgacuccuccuucuccgucaagcaggacaucgucgccaucaccgacugguccggcuacuccggcuccuucguccagcaccccgagcucaccggccucgacugcauccgccccugcuucugggucgagcucauccgcggccgccccaaggaguccaccaucuggaccuccggcuccuccaucuccuucugcggcgucaacuccgacaccgucuccugguccuggcccgacggcgccgagcuccccuucaccaucgacaaguga

SEQ ID NO: 111440 - RNA, 1350 nt, Artificial Sequence; identical to SEQ ID NO: 111439
  derived and/or modified CDS sequence (opt2) from neuraminidase__InfluenzaA__ABI36287

SEQ ID NO: 111441 - RNA, 1350 nt, Artificial Sequence; identical to SEQ ID NO: 111439
  derived and/or modified CDS sequence (opt2) from neuraminidase__InfluenzaA__ABI36298

SEQ ID NO: 111442 - RNA, 1350 nt, Artificial Sequence
  derived and/or modified CDS sequence (opt2) from neuraminidase__InfluenzaA__ABI36314
augaaccccaaccagaagaucaucaccaucggcuccaucugcauggucaucggcaucgucucccucaugcuccagaucggcaacaugaucuccaucugggucucccacuccauccagaccggcaaccagcaccaggccgaguccaucuccaacaccaacccccucaccgagaaggccgucgccuccgucacccucgccggcaacuccucccucugccccauccgcggcugggccguccacuccaaggacaacaacauccgcaucggcuccaagggcgacgucuucgucauccgcgagcccuucaucuccugcucccaccucgagugccgcaccuucuuccucacccagggcgcccuccucaacgacaagcacuccaacggcaccgucaaggaccgcuccccccaccgcacccucauguccugccccgucggcgaggcccccucccccuacaacucccgcuucgaguccgucgccugguccgccuccgccugccacgacggcaacuccuggcucaccaucggcaucuccggccccgacaacgaggccgucgccguccucaaguacaacggcaucaucaccgacaccaucaaguccuggcgcaacaacauccuccgcacccaggaguccgagugcgccugcgucaacggcuccugcuucaccgucaugaccgacggccccuccaacggccaggccuccuacaagaucuucaagauggagaagggcaaggucgucaaguccgucgagcucgacgcccccaacuaccacuacgaggagugcuccugcuaccccgacgccggcgagaucaccugcgucugccgcgacaacuggcacggcuccaaccgccccugggucuccuucaaccagaaccucgaguaccagaucggcuacaucugcuccggcgucuucggcgacaacccccgccccaacgacggcaccggcuccugcggccccaugucccccaacggcgccuacggcgucaagggcuucuccuucaaguacggcaacggcgucuggaucggccgcaccaaguccaccaacucccgcuccggcuucgagaugaucugggaccccaacggcuggaccggcaccgacuccuccuucuccgucaagcaggacaucgucgccaucaccgacugguccggcuacuccggcuccuucguccagcaccccgagcucaccggccucgacugcauccgccccugcuucugggucgagcucauccgcggccgccccaaggaguccaccaucuggaccuccggcuccuccaucuccuucugcggcgucaacuccgacaccgucuccugguccuggcccgacggcgccgagcuccccuucaccaucgacaaguga

SEQ ID NO: 111443 - RNA, 1350 nt, Artificial Sequence
  derived and/or modified CDS sequence (opt2) from neuraminidase__InfluenzaA__ABI36336
augaaccccaaccagaagaucaucaccaucggcuccaucugcauggucaucggcaucgucucccucaugcuccagaucggcaacaugaucuccaucugggucucccacuccguccagaccggcaaccagcaccaggccgaguccaucuccaacaccaacccccucaccgagaaggccgucgccuccgucacccucgccggcaacuccucccucugccccauccgcggcugggccguccacuccaaggacaacaacauccgcaucggcuccaagggcgacgucuucgucauccgcgagcccuucaucuccugcucccaccucgagugccgcaccuucuuccucacccagggcgcccuccucaacgacaagcacuccaacggcaccgucaaggaccgcuccccccaccgcacccucauguccugcccccucggcgaggcccccucccccuacaacucccgcuucgaguccgucuccugguccgccuccgccugccacgacggcaccuccuggcucaccaucggcaucuccggccccgacaacgaggccgucgccguccucaaguacaacggcaucaucaccgacaccaucaaguccuggcgcaacaacauccuccgcacccaggaguccgagugcgccugcgucaacggcuccugcuucaccgucaugaccgacggccccuccaacggccaggccuccuacaagaucuucaagauggagaagggcaaggucgucaaguccgucgagcucgacgcccccaacuaccacuacgaggagugcuccugcuaccccgacgccggcgagaucaccugcgucugccgcgacaacuggcacggcuccaaccgccccugggucuccuucaaccagaaccucgaguaccagaucggcuacaucugcuccggcgucuucggcgacaacccccgccccaacgacggcaccggcuccugcggccccaugucccccaacggcgccuacggcgucaagggcuucuccuucaaguacggcaacggcgucuggaucggccgcaccaaguccaccaacucccgcuccggcuucgagaugaucugggaccccaacggcuggaccggcaccgacuccuccuucuccgucaagcaggacaucgucgccaucaccgacugguccggcuacuccggcuccuucguccagcaccccgagcucaccggccucgacugcauccgccccugcuucugggucgagcucauccgcggccgccccaaggaguccaccaucuggaccuccggcuccaucaucuccuucugcggcgucaacuccgacaccgucuccugguccuggcccgacggcgccgagcuccccuucaccaucgacaaguga

SEQ ID NO: 111444 - RNA, 1350 nt, Artificial Sequence
  derived and/or modified CDS sequence (opt2) from neuraminidase__InfluenzaA__ABI36358
augaaccccaaccagaagaucaucaccaucggcuccaucugcauggucaucggcaucgucucccucaugcuccagaucggcaacaugaucuccaucugggucucccacuccguccagaccggcaaccagcaccaggccgaguccaucuccaacaccaacccccucaccgagaaggccgucgccuccgucacccucgccggcaacuccucccucugccccauccgcggcugggccguccacuccaaggacaacaacauccgcaucggcuccaagggcgacgucuucgucauccgcgagcccuucaucuccugcucccaccucgagugccgcaccuucuuccucacccagggcgcccuccucaacgacaagcacuccaacggcaccgucaaggaccgcuccccccaccgcacccucauguccugccccgucggcgaggcccccucccccuacaacucccgcuucgaguccgucgccugguccgccuccgccugccacgacggcaccuccuggcucaccaucggcaucuccggccccgacaacgaggccgucgccguccucaaguacaacggcaucaucaccgacaccaucaaguccuggcgcaacaacauccuccgcacccaggaguccgagugcgccugcgucaacggcuccugcuucaccgucaugaccgacggccccuccaacggccaggccuccuacaagaucuucaagauggagaagggcaaggucgucaaguccgucgagcucgacgcccccaacuaccacuacgaggagugcuccugcuaccccgacgccggcgagaucaccugcgucugccgcgacaacuggcacggcuccaaccgccccugggucuccuucaaccagaaccucgaguaccagaucggcuacaucugcuccggcgucuucggcgacaacccccgccccaacgacggcaccggcuccugcggccccaugucccccaacggcgccuacggcgucaagggcuucuccuucaaguacggcaacggcgucuggaucggccgcaccaaguccaccaacucccgcuccggcuucgagaugaucugggaccccaacggcuggaccggcaccgacuccuccuucuccgucaagcaggacaucgucgccaucaccgacugguccggcuacuccggcuccuucguccagcaccccgagcucaccggccucgacugcauccgccccugcuucugggucgagcucauccgcggccgccccaaggaguccaccaucuggaccuccggcuccuccaucuccuucugcggcgucaacuccgacaccgucuccugguccuggcccgacggcgccgagcuccccuucaccaucgacaaguga

SEQ ID NO: 111445 - RNA, 1350 nt, Artificial Sequence; identical to SEQ ID NO: 111435
  derived and/or modified CDS sequence (opt2) from neuraminidase__InfluenzaA__ABI36369

SEQ ID NO: 111446 - RNA, 1350 nt, Artificial Sequence
  derived and/or modified CDS sequence (opt2) from neuraminidase__InfluenzaA__ABI36391
augaaccccaaccagaagaucaucaccaucggcuccaucugcauggucaucggcaucgucucccucaugcuccagaucggcaacaugaucuccaucugggucucccacuccacccagaagggcaaccagcaccaggccgaguccaucuccaacaccaacccccucaccgagaaggccgucgccuccgucacccucgccggcaacuccucccucugccccauccgcggcugggccguccacuccaaggacaacaacauccgcaucggcuccaagggcgacgucuucgucauccgcgagcccuucaucuccugcucccaccucgagugccgcaccuucuuccucacccagggcgcccuccucaacgacaagcacuccaacggcaccgucaaggaccgcuccccccaccgcacccucauguccugccccgucggcgaggcccccucccccuacaacucccgcuucgaguccgucgccugguccgccuccgccugccacgacggcaccuccuggcucaccaucggcaucuccggccccgacaacgaggccgucgccguccucaaguacaacggcaucaucaccgacaccaucaaguccuggcgcaacaacauccuccgcacccaggaguccgagugcgccugcgucaacggcuccugcuucaccgucaugaccgacggccccuccaacggccaggccuccuacaagaucuucaagauggagaagggcaaggucgucaaguccgucgagcucgacgcccccaacuaccacuacgaggagugcuccugcuaccccgacgccggcgagaucaccugcgucugccgcgacaacuggcacggcuccaaccgccccugggucuccuucaaccagaaccucgaguaccagaucggcuacaucugcuccggcaucuucggcgacaacccccgccccaacgacggcaccggcuccugcggccccauguuccccaacggcgccuacggcgucaagggcuucuccuucaaguacggcaacggcgucuggaucggccgcaccaaguccaccaacucccgcuccggcuucgagaugaucugggaccccaacggcuggaccggcaccgacuccuccuucuccgucaagcaggacaucgucgccaucaccgacugguccggcuacuccggcuccuucguccagcaccccgagcucaccggccucgacugcauccgccccugcuucugggucgagcucauccgcggccgccccaaggaguccaccaucuggaccuccggcuccuccaucuccuucugcggcgucaacuccgacaccgucuccugguccuggcccgacggcgccgagcuccccuucaccaucgacaaguga

SEQ ID NO: 111447 - RNA, 1350 nt, Artificial Sequence; identical to SEQ ID NO: 111446
  derived and/or modified CDS sequence (opt2) from neuraminidase__InfluenzaA__ABI36402

SEQ ID NO: 111448 - RNA, 1350 nt, Artificial Sequence; identical to SEQ ID NO: 111435
  derived and/or modified CDS sequence (opt2) from neuraminidase__InfluenzaA__ABI36413

SEQ ID NO: 111449 - RNA, 1350 nt, Artificial Sequence
  derived and/or modified CDS sequence (opt2) from neuraminidase__InfluenzaA__ABI36446
augaaccccaaccagaagaucaucaccaucggcuccaucugcauggucaucggcaucgucucccucaugcuccagaucggcaacaugaucuccaucugggucucccacuccauccagaccggcaaccagcaccaggccgaguccaucuccaacaccaacccccucaccgagaaggccgucgccuccgucacccucgccggcaacuccucccucugccccauccgcggcugggccguccacuccaaggacaacaacauccgcaucggcuccaagggcgacgucuucgucauccgcgagcccuucaucuccugcucccaccucgagugccgcaccuucuuccucacccagggcgcccuccucaacgacaagcacuccaacggcaccgucaaggaccgcuccccccaccgcacccucauguccugccccgucggcgaggcccccucccccuacaacucccgcuucgaguccgucgccugguccgccuccgccugccacgacggcaccuccuggcucaccaucggcaucuccggccccgacaacgaggccgucgccguccucaaguacaacggcaucaucaccgacaccaucaaguccuggcgcaacaacauccuccgcacccaggaguccgagugcgccugcgucaacggcuccugcuucaccgucaugaccgacggccccuccaacggccaggccuccuacaagaucuucaagauggagaagggcaaggucgucaaguccgucgagcucgacgcccccaacuaccacuacgaggagugcuccugcuaccccgacgccggcgagaucaccugcgucugccgcgacaacuggcacggcuccaaccgccccuggaucuccuucaaccagaaccucgaguaccagaucggcuacaucugcuccggcgucuucggcgacaacccccgccccaacgacggcaccggcuccugcggccccaugucccccaacggcgccuacggcgucaagggcuucuccuucaaguacggcaacggcgucuggaucggccgcaccaaguccaccaacucccgcuccggcuucgagaugaucugggaccccaacggcuggaccggcaccgacuccuccuucuccgucaagcaggacaucgucgccaucaccgacugguccggcuacuccggcuccuucguccagcaccccgagcucaccggccucgacugcauccgccccugcuucugggucgagcucauccgcggccgccccaaggaguccaccaucuggaccuccggcuccuccaucuccuucugcggcgucaacuccgacaccgucuccugguccuggcccgacggcgccgagcuccccuucaccaucgacaaguga

SEQ ID NO: 111450 - RNA, 1350 nt, Artificial Sequence; identical to SEQ ID NO: 111439
  derived and/or modified CDS sequence (opt2) from neuraminidase__InfluenzaA__ABI36457

SEQ ID NO: 111451 - RNA, 1350 nt, Artificial Sequence
  derived and/or modified CDS sequence (opt2) from neuraminidase__InfluenzaA__ABI36476
augaaccccaaccagaagaucaucaccaucggcuccaucugcauggucaucggcaucgucucccucaugcuccagaucggcaacaugaucuccaucugggucucccacuccacccagaagggcaaccagcaccaggccgaguccaucuccaacaccaacccccucaccgagaaggccgucgccuccgucacccucgccggcaacuccucccucugccccauccgcggcugggccguccacuccaaggacaacaacauccgcaucggcuccaagggcgacgucuucgucauccgcgagcccuucaucuccugcucccaccucgagugccgcaccuucuuccucacccagggcgcccuccucaacgacaagcacuccaacggcaccgucaaggaccgcuccccccaccgcacccucauguccugccccgucggcgaggcccccucccccuacaacucccgcuucgaguccgucgccugguccgccuccgccugccacgacggcaccuccuggcucaccaucggcaucuccggccccgacaacgaggccgucgccguccucaaguacaacggcaucaucaccgacaccaucaaguccuggcgcaacaacauccuccgcacccaggaguccgagugcgccugcgucaacggcuccugcuucaccgucaugaccgacggccccuccaacggccaggccuccuacaagaucuucaagauggagaagggcaaggucgucaaguccgucgagcucgacgcccccaacuaccacuacgaggagugcuccugcuaccccgacgccggcgagaucaccugcgucugccgcgacaacuggcacggcuccaaccgccccugggucuccuucaaccagaaccucgaguaccagaucggcuacaucugcuccggcgucuucggcgacaacccccgccccaacgacggcaccggcuccugcggccccaugucccccaacggcgccuacggcgucaagggcuucuccuucaaguacggcaacggcgucuggaucggccgcaccaaguccaccaacucccgcuccggcuucgagaugaucugggaccccaacggcuggaccggcaccgacuccuccuucuccgucaagcaggacaucgucgccaucaccgacugguccggcuacuccggcuccuucguccagcaccccgagcucaccggccucgacugcauccgccccugcuucugggucgagcucauccgcggccgccccaaggaguccaccaucuggaccuccggcuccuccaucuccuucugcggcgucaacuccgacaccgucuccugguccuggcccgacggcgccgagcuccccuucaccaucgacaaguga

SEQ ID NO: 111452 - RNA, 1350 nt, Artificial Sequence
  derived and/or modified CDS sequence (opt2) from neuraminidase__InfluenzaA__ABI49409
augaaccccaaccgcaagaucaucaccaucggcuccaucugcauggucaucggcauggucucccucaugcuccagaucggcaacaugaucuccaucugggucucccacuccauccagaccggcaaccagcaccaggccgaguccaucuccaacaccaacccccucaccgagaaggccgucgccuccgucacccucgccggcaacuccucccucugccccauccgcggcugggccguccacuccaaggacaacaacauccgcaucggcuccaagggcgacgucuucgucauccgcgagcccuucaucuccugcucccaccucgagugccgcaccuucuuccucacccagggcgcccuccucaacgacaagcacuccaacggcaccgucaaggaccgcuccccccaccgcacccucauguccugccccgucggcgaggcccccucccccuacaacucccgcuucgaguccgucgccugguccgccuccgccugccacgacggcaccuccuggcucaccaucggcaucuccggccccgacaacgaggccgucgccguccucaaguacaacggcaucaucaccgacaccaucaaguccuggcgcaacaacauccuccgcacccaggaguccgagugcgccugcgucaacggcuccugcuucaccgucaugaccgacggccccuccaacggccaggccuccuacaagaucuucaagauggagaagggcaaggucgucaaguccgucgagcucgucgcccccaacuaccacuacgaggagugcuccugcuaccccgacgccggcgagaucaccugcgucugccgcgacaacuggcacggcuccaaccgccccugggucuccuucaaccagaaccucgaguaccagaucggcuacaucugcuccggcgucuucggcgacaacccccgccccaacgacggcaccggcuccugcggccccaugucccccaacggcgccuacggcgucaagggcuucuccuucaaguacggcaacggcgucuggaucggccgcaccaaguccaccaacucccgcuccggcuucgagaugaucugggaccccaacggcuggaccggcaccgacuccuccuucuccgucaagcaggacaucgucgccaucaccgacugguccggcuacuccggcuccuucguccagcaccccgagcucaccggccucgacugcauccgccccugcuucugggucgagcucauccgcggccgccccaaggaguccaccaucuggaccuccggcuccuccaucuccuucugcggcgucaacuccgacaccgccuccugguccuggcccgacggcgccgagcuccccuucaccaucgacaaguga

SEQ ID NO: 111453 - RNA, 1350 nt, Artificial Sequence
  derived and/or modified CDS sequence (opt2) from neuraminidase__InfluenzaA__ABI49417
augaaccccaaccagaagaucaucaccaucggcuccaucugcauggucaucggcaucgucucccucaugcuccagaucggcaacaugaucuccaucugggucucccacuccauccagaccggcaaccagcaccaggccgaguccaucuccaacaccaacccccucaccgagaaggccgucgccuccgucacccucgccggcaacuccucccucugccccauccgcggcugggccguccacuccaaggacaacaacauccgcaucggcuccaagggcgacgucuucgucauccgcgagcccuucaucuccugcucccaccucgagugccgcaccuucuuccucacccgcggcgcccuccucaacgacaagcacuccaacggcaccgucaaggaccgcuccccccaccgcacccucauguccugccccgucggcgaggcccccucccccuacaacucccgcuucgaguccgucgccugguccgccuccgccugccacgacggcaccuccuggcucaccaucggcaucuccggccccgacaacgaggccgucgccguccucaaguacaacggcaucaucaccgacaccaucaaguccuggcgcaacaacauccuccgcacccaggaguccgagugcgccugcgucaacggcuccugcuucaccgucaugaccgacggccccuccaacggccaggccuccuacaagaucuucaagauggagaagggcaaggucgucaaguccgucgagcucgacgcccccaacuaccacuacgaggagugcuccugcuaccccgacgccggcgagaucaccugcgucugccgcgacaacuggcacggcuccaaccgccccugggucuccuucaaccagaaccucgaguaccagaucggcuacaucugcuccggcgucuucggcgacaacccccgccccaacgacggcaccggcuccugcggccccaugucccccaacggcgccuacggcgucaagggcuucuccuucaaguacggcaacggcgucuggaucggccgcaccaaguccaccaacucccgcuccggcuucgagaugaucugggaccccaacggcuggaccggcaccgacuccuccuucuccgucaagcaggacaucgucgccaucaccgacugguccggcuacuccggcuccuucguccagcaccccgagcucaccggccucgacugcauccgccccugcuucugggucgagcucauccgcggccagcccaaggaguccaccaucuggaccuccggcuccuccaucuccuucugcggcgucaacuccgacaccgucuccugguccuggcccgacggcgccgagcuccccuucaccaucgacaaguga

SEQ ID NO: 111454 - RNA, 1410 nt, Artificial Sequence
  derived and/or modified CDS sequence (opt2) from neuraminidase__InfluenzaA__ABI84962
augaaccccaaccagaagaucaucaccaucggcuccgucucccucaccaucgccaccgucugcuuccucaugcagaucgccauccucgccaccaccgucacccuccacuucaagcagcacgagugcgacucccccgccuccaaccaggucaugcccugcgagcccaucaucaucgagcgcaacaucaccgagaucgucuaccucaacaacaccaccaucgagaaggagaucugccccgaggucgucgaguaccgcaacugguccaagccccagugccagaucaccggcuucgcccccuucuccaaggacaacuccauccgccucuccgccggcggcgacaucugggucacccgcgagcccuacgucuccugcgaccccggcaagugcuaccaguucgcccucggccagggcaccacccucgacaacaagcacuccaacggcaccauccacgaccgcaucccccaccgcacccuccucaugaacgagcucggcguccccuuccaccucggcaccaagcaggucugcgucgccugguccuccuccuccugccacgacggcaaggccuggcuccacgucugcgucaccggcgacgaccgcaacgccaccgccuccuucaucuacgacggccgccucgucgacuccaucggcuccuggucccagaacauccuccgcacccaggaguccgagugcgucugcaucaacggcaccugcaccgucgucaugaccgacggcuccgccuccggccgcgccgacacccgcauccucuucaucaaggagggcaagaucguccacaucuccccccucuccggcuccgcccagcacaucgaggagugcuccugcuacccccgcuaccccgacguccgcugcaucugccgcgacaacuggaagggcuccaaccgccccgucaucgacaucaacauggaggacuacuccaucgacuccuccuacgucugcuccggccucgucggcgacaccccccgcaacgacgacuccuccuccaacuccaacugccgcgaccccaacaacgagcgcggcaaccccggcgucaagggcugggccuucgacaacggcgacgacgucuggaugggccgcaccaucuccaaggacucccgcuccggcuacgagaccuucaaggucaucggcggcugguccacccccaacuccaagucccaggucaaccgccaggucaucgucgacaacaacaacugguccggcuacuccggcaucuucuccgucgagggcaaguccugcaucaaccgcugcuucuacgucgagcucauccgcggccgcccccaggagacccgcgucugguggaccuccaacuccaucgucgucuucugcggcaccuccggcaccuacggcaccggcuccuggcccgacggcgccaacaucaacuucaugcccaucuga

SEQ ID NO: 111455 - RNA, 1410 nt, Artificial Sequence
  derived and/or modified CDS sequence (opt2) from neuraminidase__InfluenzaA__ABI85003
augaaccccaaccagaagaucaucaccaucggcgucgucaacaccacccucuccaccaucgcccuccucaucggcgucggcaaccucgucuucaacaccgucauccacgagaagaucggcgaccaccagaucgucacccaccccaccaucaugacccccgagguccccaacugcuccgacaccaucaucaccuacaacaacaccgucaucaacaacaucaccaccaccaucaucaccgaggccgagcgccccuucaaguccccccucccccucugccccuuccgcggcuucuuccccuuccacaaggacaacgccauccgccucggcgagaacaaggacgucaucgucacccgcgagcccuacgucuccugcgacaacgacaacugcugguccuucgcccucgcccagggcgcccuccucggcaccaagcacuccaacggcaccaucaaggaccgcacccccuaccgcucccucauccgcuuccccaucggcaccgcccccguccucggcaacuacaaggagaucugcaucgccugguccuccuccuccugcuucgacggcaaggaguggaugcacgucugcaugaccggcaacgacaacgacgccuccgcccagaucaucuacggcggccgcaugaccgacuccaucaaguccuggcgcaaggacauccuccgcacccaggaguccgagugccagugcaucgacggcaccugcgucgucgccgucaccgacggccccgccgccaacuccgccgaccaccgcgucuacuggauccgcgagggccgcaucaucaaguacgagaacguccccaagaccaagauccagcaccucgaggagugcuccugcuacgucgacaucgacgucuacugcaucugccgcgacaacuggaagggcuccaaccgccccuggaugcgcaucaacaacgagaccauccucgagaccggcuacgucugcuccaaguuccacuccgacaccccccgccccgccgaccccuccaucauguccugcgacucccccuccaacgucaacggcggccccggcgucaagggcuucggcuucaaggccggcaacgacgucuggcucggccgcaccgucuccaccuccggccgcuccggcuucgagaucaucaaggucaccgagggcuggaucaacucccccaaccacgucaaguccaucacccagacccucgucuccaacaacgacugguccggcuacuccggcuccuucaucgucaaggccaaggacugcuuccagcccugcuucuacgucgagcucauccgcggccgccccaacaagaacgacgacgucuccuggaccuccaacuccaucgucaccuucugcggccucgacaacgagcccggcuccggcaacuggcccgacggcuccaacaucggcuucaugcccaaguga

SEQ ID NO: 111456 - RNA, 1410 nt, Artificial Sequence; identical to SEQ ID NO: 111126
  derived and/or modified CDS sequence (opt2) from neuraminidase__InfluenzaA__ABI92294

SEQ ID NO: 111457 - RNA, 1413 nt, Artificial Sequence
  derived and/or modified CDS sequence (opt2) from neuraminidase__InfluenzaA__ABI92305
augaaccccaaccagaagaucaucaccaucggcuccaucugcauggccaucggcaucaucucccucauccuccagaucggcaacaucaucuccaucugggucucccaccucauccagaccggcucccagaaccacaccggcaucugcaaccagcgcaucaucaccuacgagaacuccaccugggucaaccagaccuacgucaacaucaacaacaccaacgucgucgccggcaaggacaccaccuccgucacccucgccggcaacuccucccucugccccguccgcggcugggccaucuacuccaaggacaacuccauccgcaucggcuccaagggcgacgucuucgucauccgcgagcccuucaucuccugcucccaccucgagugccgcaccuucuuccucacccagggcgcccuccucaacgacaagcacuccaacggcaccgucaaggaccgcucccccuaccgcgcccucauguccugccccaucggcgaggcccccucccccuacaacucccgcuucgaguccgucgccugguccgccuccgccugccacgacggcaugggcuggcucaccaucggcaucuccggccccgacgacggcgccgucgccguccucaaguacaacggcaucaucaccgagaccaucaaguccuggcgcaagcgcauccuccgcacccaggaguccgagugcgucugcaucaacggcuccugcuucaccaucaugaccgacggccccuccaacggccccgccuccuaccgcaucuucaagaucgagaagggcaagaucaccaaguccaucgagcucgacgcccccaacucccacuacgaggagugcuccugcuaccccgacaccggcaccgucaugugcgucugccgcgacaacuggcacggcuccaaccgccccugggucuccuucaaccagaaccucgacuaccagaucggcuacaucugcuccggcgucuucggcgacaacccccgccccaaggacggcaagggcuccugcggccccgucaccgucgacggcgccgacggcgucaagggcuucuccuaccgcuacggcaacggcgucuggaucggccgcaccaaguccaacuccucccgcaagggcuucgagaugaucugggaccccaacggcuggaccgacaccgacuccaacuuccucgucaagcaggacgucgucgccaugaccgacugguccggcuacuccggcuccuucguccagcaccccgagcucaccggccucgacugcaugcgccccugcuucugggucgagcucauccgcggccgcccccgcgagaagaccaccaucuggaccuccggcuccuccaucuccuucugcggcgucaacuccgacaccgucaacugguccuggcccgacggcgccgagcuccccuucaccaucgacaaguga

SEQ ID NO: 111458 - RNA, 1413 nt, Artificial Sequence
  derived and/or modified CDS sequence (opt2) from neuraminidase__InfluenzaA__ABI92316
augaaccccaaccagaagaucaucaccaucggcuccaucuccaucgccaucggcgucaucucccucauccuccagaucggcaacaucaucuccaucugggccucccacuccauccagaccggcucccagaaccacaccggcaucugcaaccagcgcaucaucaccuacgagaacuccaccugggucaaccagaccuacgucaacaucaacaacaccaacgucgucgccggcaaggacaagaccuccaugacccucgccggcaacuccucccucugccccauccgcggcugggccaucuacaccaaggacaacuccauccgcaucggcuccaagggcgacgucuucgucauccgcgagcccuucaucuccugcucccaccucgagugccgcaccuucuuccucacccagggcgcccuccucaacgacaagcacuccaacggcaccgucaaggaccgcucccccuaccgcgcccucauguccugcccccucggcgaggcccccucccccuacaacucccgcuucgaguccgucgccugguccgccuccgccugccacgacggccucggcuggcucaccaucggcaucuccggccccgacaacggcgccgucgccguccucaaguacaacggcaucaucaccgagaccaucaaguccuggaagaagcgcauccuccgcacccaggaguccgagugcgucugcgucaacggcuccugcuucaccaucaugaccgacggccccuccaacggcgccgccuccuaccgcaucuucaagaucgagaagggccgcgucaccaaguccaucgagcucgacgcccccaacuaccacuacgaggagugcuccugcuaccccgacaccggcaccgucaugugcgucugccgcgacaacuggcacggcuccaaccgccccugggucuccuucaaccagaaccucgacuaccagaucggcuacaucugcuccggcgucuucggcgacaacccccgccccaaggacggcgagggcuccugcaaccccgucaccgucgacggcgccgacggcgucaagggcuucuccuaccgcuacggcaacggcgucuggaucggccgcaccaaguccaaccgccuccgcaagggcuucgagaugaucugggaccccaacggcuggaccgacaccgacuccgacuucuccaugaagcaggacaucgucgccaugaccgacugguccggcuacuccggcuccuucguccagcaccccgagcucaccggccucgacugcaugcgccccugcuucugggucgagcucguccgcggccucccccgcgagaacaccaccaucuggaccuccggcuccuccaucuccuucugcggcgucaacuccgacaccgccaacugguccuggcccgacggcgccgagcuccccuucaccaucgacaaguga

SEQ ID NO: 111459 - RNA, 1410 nt, Artificial Sequence; identical to SEQ ID NO: 111137
  derived and/or modified CDS sequence (opt2) from neuraminidase__InfluenzaA__ABI92327

SEQ ID NO: 111460 - RNA, 1410 nt, Artificial Sequence
  derived and/or modified CDS sequence (opt2) from neuraminidase__InfluenzaA__ABI92338
augaaccccaaccagaagaucaucaccaucggcuccgucucccucaccaucgccaccaucugcuuccucaugcagaucgccauccucgucaccaccgucacccuccacuucaagcaguacgagugcaacuccccccccaacaaccaggucaugcucugcgagcccgccaucaucgagcgcaacaucaccgagaucgucuaccucaccaacaccaccaucgagaaggagaucugccccaagcucgccgaguaccgcaacugguccaagccccagugcaacaucaccggcuucgcccccuucuccaaggacaacuccauccgccucuccgccggcggcgacaucugggucacccgcgagcccuacgucuccugcgaccccgacaagugcuaccaguucgcccucggccagggcaccacccucaacaacggccacuccaacgacaccguccacgaccgcacccccuaccgcacccuccucaugaacgagcucggcguccccuuccaccucggcacccgccaggucugcaucgccugguccuccuccuccugccacgacggcaaggccuggcuccacgucugcgucaccggcgacgacgagaacgccaccgccuccuucaucuacaacggccgccucgucgacuccaucggcuccugguccaagaagauccuccgcacccaggaguccgagugcgucugcaucaacggcaccugcaccgucgucaugaccgacggcuccgccuccggcaaggccgacaccaagauccucuucaucgaggagggcaagaucgucaacaucuccacccucuccggcuccgcccagcacgucgaggagugcuccugcuacccccgcuaccccggcguccgcugcgucugccgcgacaacuggaagggcuccaaccgccccaucaucgacaucaacgucaaggacuacuccaucgucuccuccuacgucugcuccggccucgucggcgacaccccccgcaagaacgacuccuucuccuccucccacugccucgaccccaacaacgaggagggcggccacggcgucaagggcugggccuucgacgacggcaacgacgucuggaugggccgcaccaucuccgagaagcuccgcuccggcuacgagaccuucaaggucaucgagggcugguccaagcccaacuccaagcuccagaucaaccgccaggucaucgucgagcgcggcaaccgcuccggcuacuccggcaucuucuccgucgagggcaaguccugcaucaaccgcugcuucuacgucgagcucauccgcggccgcaaggaggagaccgaggucugguggaccuccaacuccaucgucgucuucugcggcaccuccggcaccuacggcaccggcuccuggcccgacggcgccgacaucaaccucaugcccaucuga

SEQ ID NO: 111461 - RNA, 1410 nt, Artificial Sequence
  derived and/or modified CDS sequence (opt2) from neuraminidase__InfluenzaA__ABI92349
augaaccccaaccagaagaucaucaccaucggcuccgucucccucaccaucgccaccaucugcuuccucaugcagaucgccauccucgucaccaccgucacccuccacuucaagcaguacgagugcaacuccccccccaacaaccaggucaugcucugcgagcccaccaucaucgagcgcaacaucaccgagaucgucuaccucaccaacaccaccaucgagaaggagaucugccccaagcucgccaaguaccgcaacugguccaagccccagugcaacaucaccggcuucgcccccuucuccaaggacaacuccauccgccucuccgccggcggcgacaucugggucacccgcgagcccuacgucuccugcgaccccgacaagugcuaccaguucgcccucggccagggcaccacccucaacaacggccacuccaacgacaccguccacgaccgcacccccuaccgcacccuccucaugaacgagcucggcguccccuuccaccucggcacccgccaggucugcaucgccugguccuccuccuccugccacgacggcaaggccuggcuccacgucugcgucaccggcgacgacgagaacgccaccgccuccuucaucuacaacggccgccucgucgacuccaucggcuccugguccaagaagauccuccgcacccaggaguccgagugcgucugcaucaacggcaccugcaccgucgucaugaccgacggcuccgccuccggcaaggccgacaccaagauccucuucaucgaggagggcaagaucguccacaucuccacccucuccggcuccgcccagcacgucgaggagugcuccugcuacccccgcuaccccggcguccgcugcgucugccgcgacaacuggaagggcuccaaccgccccaucgucgacaucaacgucaaggacuacuccaucgucuccuccuacgucugcuccggccucgucggcgacaccccccgcaagaacgacuccuucuccuccucccacugccucgaccccaacaacgaggagggcggccacggcgucaagggcugggccuucgacgacggcaacgacgucuggaucggccgcaccaucuccgagaagcuccgcuccggcuacgagaccuucaaggucaucgagggcugguccaagcccaacuccaagcuccagaccaaccgccaggucaucgucgagcgcggcaaccgcuccggcuacuccggcaucuucuccgucgagggcaaguccugcaucaaccgcugcuucuacgucgagcucauccgcggccgcaaggaggagaccgaggucugguggaccuccaacuccaucgucgucuucugcggcaccuccggcaccuacggcaccggcuccuggcccgacggcgccgacaucaaccucaugcccaucuga

SEQ ID NO: 111462 - RNA, 1410 nt, Artificial Sequence; identical to SEQ ID NO: 110363
  derived and/or modified CDS sequence (opt2) from neuraminidase__InfluenzaA__ABI92360

SEQ ID NO: 111463 - RNA, 1410 nt, Artificial Sequence; identical to SEQ ID NO: 110363
  derived and/or modified CDS sequence (opt2) from neuraminidase__InfluenzaA__ABI92371

SEQ ID NO: 111464 - RNA, 1413 nt, Artificial Sequence; identical to SEQ ID NO: 110422
  derived and/or modified CDS sequence (opt2) from neuraminidase__InfluenzaA__ABI92382

SEQ ID NO: 111465 - RNA, 1410 nt, Artificial Sequence; identical to SEQ ID NO: 110750
  derived and/or modified CDS sequence (opt2) from neuraminidase__InfluenzaA__ABI92393

SEQ ID NO: 111466 - RNA, 1410 nt, Artificial Sequence; identical to SEQ ID NO: 110363
  derived and/or modified CDS sequence (opt2) from neuraminidase__InfluenzaA__ABI92404

SEQ ID NO: 111467 - RNA, 1410 nt, Artificial Sequence
  derived and/or modified CDS sequence (opt2) from neuraminidase__InfluenzaA__ABI92415
augaaccccaaccagaagaucaucaccaucggcuccgucucccucaccaucuccaccaucugcuucuucaugcagaucgccauccucaucaccaccgucacccuccacuucaagcaguacgaguucaacuccccccccaacaaccaggucaugcucugcgagcccaccaucaucgagcgcaacaucaccgagaucgucuaccucaccaacaccaccaucgagaaggagaucugccccaagcucgccgaguaccgcaacugguccaagccccagugcgacaucaccggcuucgcccccuucuccaaggacaacuccauccgccucuccgccggcggcgacaucugggucacccgcgagcccuacgucuccugcgaccccgacaagugcuaccaguucgcccucggccagggcaccacccucaacaacguccacuccaacgacaccguccacgaccgcacccccuaccgcacccuccucaugaacgagcucggcguccccuuccaccucggcaccaagcaggucugcaucgccugguccuccuccuccugccacgacggcaaggccuggcuccacgucugcgucaccggcgacgacaagaacgccaccgccuccuucaucuacaacggccgccucgucgacuccaucgucuccugguccaagaagauccuccgcacccaggaguccgagugcgucugcaucaacggcaccugcaccgucgucaugaccgacggcuccgccuccggcaaggccgacaccaagauccucuucaucgaggagggcaagaucguccacaccuccacccucuccggcuccgcccagcacgucgaggagugcuccugcuacccccgcuaccccggcguccgcugcgucugccgcgacaacuggaagggcuccaaccgccccaucgucgacaucaacaucaaggacuacuccaucgucuccuccuacgucugcuccggccucgucggcgacaccccccgcaagaacgacuccuccuccuccucccacugccucgaccccaacaacgaggagggcggccacggcgucaagggcugggccuucgacgacggcaacgacgucuggaugggccgcaccaucuccgagaagcuccgcuccggcuacgagaccuucaaggucaucgagggcugguccaaccccaacuccaagcuccagaucaaccgccaggucaucgucgaccgcggcaaccgcuccggcuacuccggcaucuucuccgucgagggcaaguccugcaucaaccgcugcuucuacgucgagcucauccgcggccgcaaggaggagaccgagguccucuggaccuccaacuccaucgucgucuucugcggcaccuccggcaccuacggcaccggcuccuggcccgacggcgccgacaucaacuucaugcccaucuga

SEQ ID NO: 111468 - RNA, 1410 nt, Artificial Sequence; identical to SEQ ID NO: 110750
  derived and/or modified CDS sequence (opt2) from neuraminidase__InfluenzaA__ABI92426

SEQ ID NO: 111469 - RNA, 1410 nt, Artificial Sequence; identical to SEQ ID NO: 110750
  derived and/or modified CDS sequence (opt2) from neuraminidase__InfluenzaA__ABI92437

SEQ ID NO: 111470 - RNA, 1410 nt, Artificial Sequence; identical to SEQ ID NO: 110750
  derived and/or modified CDS sequence (opt2) from neuraminidase__InfluenzaA__ABI92448

SEQ ID NO: 111471 - RNA, 1410 nt, Artificial Sequence; identical to SEQ ID NO: 110750
  derived and/or modified CDS sequence (opt2) from neuraminidase__InfluenzaA__ABI92459

SEQ ID NO: 111472 - RNA, 1410 nt, Artificial Sequence
  derived and/or modified CDS sequence (opt2) from neuraminidase__InfluenzaA__ABI92470
augaaccccaaccagaagaucaucaccaucggcuccgucucccucaccaucgccaccaucugcuuccucaugcagaucgccauccucgucaccaccgucacccuccacuucaagcaguacgagugcaacuccccccccaacaaccaggucaugcucugcgagcccaccaucaucgagcgcaacaucaccgagaucgucuaccucaccaacaccaccaucgagaaggagaucugccccaagcucgccgaguaccgcaacugguccaagccccagugcaacaucaccggcuucgcccccuucuccaaggacaacuccauccgccucuccgccggcggcgacaucugggucacccgcgagcccuacgucuccugcgaccccgacaagugcuaccaguucgcccucggccagggcaccacccucaacaacggccacuccaacgacaccguccacgaccgcacccccuaccgcacccuccucaugaacgagcucggcguccccuuccaccucggcaccaagcaggucugcaucgccugguccuccuccuccugccacgacggcaaggccuggcuccacgucugcgucaccggcgacgacgagaacgccaccgccuccuucaucuacaacggccgccucgucgacuccaucggcuccugguccaagaagauccuccgcacccaggaguccgagugcgucugcaucaacggcaccugcaccgucgucaugaccgacggcuccgccuccgagaaggccgacaccaagauccucuucaucgaggagggcaagaucguccacaccuccucccucuccggcuccgcccagcacgucgaggagugcuccugcuacccccgcuaccccggcguccgcugcgucugccgcgacaacuggaagggcuccaaccgccccaucgucgacaucaacgucaaggacuacuccaucgucuccuccuacgucugcuccggccucgucggcgacaccccccgcaagaacgacuccuccuccuccucccacugccucgaccccaacaacgaggagggcggccacggcgucaagggcugggccuucgacgacggcaacgacgucuggaugggccgcaccaucuccgagaagcuccgcuccggcuacgagaccuucaaggucaucgagggcugguccaagcccaacuccaagcuccagaucaaccgccaggucaucgucgaccgcggcaaccgcuccggcuacuccggcaucuucuccgucgaguccaaguccugcaucaaccgcugcuucuacgucgagcucauccgcggccgcaagcaggagaccgagguccucuggaccuccaacuccaucgucgucuucugcggcaccuccggcaccuacggcaccggcuccuggcccgacggcgccgacaucaaccucaugcccaucuga

SEQ ID NO: 111473 - RNA, 1410 nt, Artificial Sequence; identical to SEQ ID NO: 110766
  derived and/or modified CDS sequence (opt2) from neuraminidase__InfluenzaA__ABI92481

SEQ ID NO: 111474 - RNA, 1410 nt, Artificial Sequence; identical to SEQ ID NO: 110766
  derived and/or modified CDS sequence (opt2) from neuraminidase__InfluenzaA__ABI92492

SEQ ID NO: 111475 - RNA, 1410 nt, Artificial Sequence
  derived and/or modified CDS sequence (opt2) from neuraminidase__InfluenzaA__ABI92503
augaaccccaaccagaagaucaucaccaucggcuccgucucccucaccaucgccaccaucugcuuccucaugcagaucgccauccucgucaccaccgucacccuccacuucaagcaguacgagugcaacuccccccccaacaaccaggucaugcucugcgagcccaccaucaucgagcgcaacaucaccgagaucgucuaccucaccaacaccaccaucgagaaggagaucugccccaagcucgaggaguaccgcaacugguccaagccccagugcaacaucaccggcuucgcccccuucuccaaggacaacuccauccgccucuccgccggcggcgacaucugggucacccgcgagcccuacgucuccugcgaccccgacaagugcuaccaguucgcccucggccagggcaccacccucaacaacggccacuccaacgacaccguccacgaccgcacccccuaccgcacccuccucaugaacgagcucggcguccccuuccaccucggcaccaagcaggucugcaucgccugguccuccuccuccugccacgacggcaaggccuggcuccacgucugcgucaccggcgacgacgagaacgccaccgccuccuucaucuacaacggccgccucgucgacuccaucggcuccugguccaagaagauccuccgcacccaggaguccgagugcgucugcaucaacggcaccugcaccgucgucaugaccgacggcuccgccuccggcaaggccgacaccaagauccucuucaucgaggagggcaagaucguccacaccuccucccucuccggcuccgcccagcacgucgaggagugcuccugcuacccccgcuaccccggcguccgcugcgucugccgcgacaacuggaagggcuccaaccgccccaucgucgacaucaacgucaaggacuacuccaucgucuccuccuacgucugcuccggccucgucggcgacaccccccgcaagaacgacuccuccuccuccucccacugccucgaccccaacaacgaggagggcggccacggcgucaagggcugggccuucgacgacggcaacgacgucuggaugggccgcaccaucuccgagaagcuccgcuccggcuacgagaccuucaaggucaucgagggcugguccaagcccaacuccaagcuccagaucaaccgccaggucaucgucgaccgcggcaaccgcuccggcuacuccggcaucuucuccgucgaguccaaguccugcaucaaccgcugcuucuacgucgagcucauccgcggccgcaagcaggagaccgagguccucuggaccuccaacuccaucgucgucuucugcggcaccuccggcaccuacggcaccggcuccuggcccgacggcgccgacaucaaccucaugcccaucuga

SEQ ID NO: 111476 - RNA, 1410 nt, Artificial Sequence
  derived and/or modified CDS sequence (opt2) from neuraminidase__InfluenzaA__ABI92514
augaaccccaaccagaagaucaucaccaucggcuccgucucccucaccaucgccaccaucugcuuccucguccagaucgccauccucgucaccaccgucacccuccacuucaagcaguacgagugcaacuccccccccaacaaccaggucaugcucugcgagcccaccaucaucgagcgcaacaucaccgagaucgucuaccucaccaacaccaccaucgagaaggagaucugccccaagcucgccgaguaccgcaacugguccaagccccagugcaagaucaccggcuucgcccccuucuccaaggacaacuccauccgccucuccgccggcggcgacaucugggucacccgcgagcccuacgucuccugcgaccccgacaagugcuaccaguucgcccucggccagggcaccacccucaacaaccgccacuccaacgacaccguccacgaccgcacccccuaccgcacccuccucaugaacgagcucggcguccccuuccaccucggcaccaagcaggucugcaucgccugguccuccuccuccugccacgacggcaaggccuggcuccacgucugcgucaccggcgacgacgagaacgccaccgccuccuucaucuacgacggccgccucgucgacuccaucggcuccugguccaagaagauccuccgcacccaggaguccgagugcgucugcaucaacggcaccugcaccgucgucaugaccgacggcuccgccuccggccgcgccgacaccaagauccucuucaucgaggagggcaagaucguccacaccuccaagcucuccggcuccgcccagcacgucgaggagugcuccugcuacccccgcuaccccggcguccgcugcgucugccgcgacaacuggaagggcuccaaccgccccaucgucgacaucaacgucaaggacuacuccaucgucuccuccuacgucugcuccggccucgucggcgacaccccccgcaagaacgacuccuccuccuccucccacugccucgaccccaacaacgaggagggcggccacggcgucaagggcugggccuucgacgacggcgacgacgucuggaugggccgcaccaucuccgagaagucccgcuccggcuacgagaccuucaaggucaucgagggcugguccaagcccaacuccaagcuccagaucaaccgccaggucaucgucgagcgcggcaacauguccggcuacuccggcaucuucuccgucgagggcaaguccugcaucaaccgcugcuucuacgucgagcucauccgcggccgcaagcaggagaccgaggucugguggaccuccaacuccaucgucgucuucugcggcaccuccggcaccuacggcaccggcuccuggcccgacggcgccgacaucaaccucaugcccaucuga

SEQ ID NO: 111477 - RNA, 1410 nt, Artificial Sequence
  derived and/or modified CDS sequence (opt2) from neuraminidase__InfluenzaA__ABI92525
augaaccccaaccagaagaucaucaccaucggcuccgucucccucaccaucgccaccaucugcuuccucaugcagaucgccauccucgucaccaccgucacccuccacuucaagcaguacgagugcaacuccccccccaacaaccaggucaugcucugcgagcccaccaucaucgagcgcaacaucaccgagaucgucuaccucaccaacaccaccaucgagaaggagaucugccccaagcucgccgaguaccgcaacugguccaagccccagugcaacaucaccggcuucgcccccuucuccaaggacaacuccauccgccucuccgccggcggcgacaucugggucacccgcgagcccuacgucuccugcgaccccgacaagugcuaccaguucgcccucggccagggcaccacccucaacaacggccacuccaacgacaccguccacgaccgcacccccuaccgcacccuccucaugaacgagcucggcguccccuuccaccucggcaccaagcaggucugcaucgccugguccuccuccuccugccacgacggcaaggccuggcuccacgucugcgucaccggcgacgacgagaacgccaccgccuccuucaucuacaacggccgccucgucgacuccaucggcuccugguccaagaagauccuccgcacccaggaguccgagugcgucugcaucaacggcaccugcaccgucgucaugaccgacggcuccgccuccggcaaggccgacaccaagauccucuucaucgaggagggcaagaucguccacaucuccacccucuccggcuccgcccagcacgucgaggagugcuccugcuacccccgcuaccccggcguccgcugcgucugccgcgacaacuggaagggcuccaaccgccccaucgucgacaucaacgucaaggacuacuccaucgucuccuccuacgucugcuccggccucgucggcgacaccccccgcaagaacgacuccuucuccuccucccacugccucgaccccaacaacgaggagggcggccacggcgucaagggcugggccuucgacgacggcaacgacgucuggaugggccgcaccaucuccgagaagcuccgcuccggcuacgagaccuucaaggucaucgagggcugguccaagcccaacuccaagcuccagaucaaccgccaggucaucgucgagcgcggcaaccgcuccggcuacuccggcaucuucuccgucgagggcaaguccugcaucaaccgcugcuucuacgucgagcucauccgcggccgcaaggaggagaccgaggucugguggaccuccaacuccaucgucgucuucugcggcaccuccggcaccuacggcaccggcuccuggcccgacggcgccgacaucaaccucaugcccaucuga

SEQ ID NO: 111478 - RNA, 1410 nt, Artificial Sequence
  derived and/or modified CDS sequence (opt2) from neuraminidase__InfluenzaA__ABI92536
augaaccccaaccagaagaucaucaccaucggcuccgucucccucaccaucgccaccaucugcuuccucaugcagaucgccauccucgucaccaccgucacccuccacuucaagcaguacgagugcaacuccccccccaacaaccaggucaugcucugcgagcccaccaucaucgagcgcaacaucaccgagaucgucuaccucaccaacaccaccaucgagaaggagaagugccccaagcucgccgaguaccgcaacugguccaagccccagugcaacaucaccggcuucgcccccuucuccaaggacaacuccauccgccucuccgccggcggcgacaucugggucacccgcgagcccuacgucuccugcgaccccgacaagugcuaccaguucgcccucggccagggcaccacccucaacaacggccacuccaacgacaccguccacgaccgcacccccuaccgcacccuccucaugaacgagcucggcguccccuuccaccucggcacccgccaggucugcaucgccugguccuccuccuccugccacgacggcaaggccuggcuccacgucugcgucaccggcgacgacgagaacgccaccgccuccuucaucuacaacggccgccucgucgacuccaucggcuccugguccaagaagauccuccgcacccaggaguccgagugcgucugcaucaacggcaccugcaccgucgucaugaccgacggcuccgccuccggcaaggccgacaccaagauccucuucaucgaggagggcaagaucguccacaucuccacccucuccggcuccgcccagcacgucgaggagugcuccugcuacccccgcuaccccggcguccgcugcgucugccgcgacaacuggaagggcuccaaccgccccaucgucgacaucaacgucaaggacuacuccaucgucuccuccuacgucugcuccggccucgucggcgacaccccccgcaagaacgacuccuucuccuccucccacugccucgaccccaacaacgaggagggcggccacggcgucaagggcugggccuucgacgacggcaacgacgucuggaugggccgcaccaucuccgagaagcuccgcuccggcuacgagaccuucaaggucaucgagggcugguccaagcccaacuccaagcuccagaucaaccgccaggucaucgucgagcgcggcaaccgcuccggcuacuccggcaucuucuccgucgagggcaaguccugcaucaaccgcugcuucuacgucgagcucauccgcggccgcaaggaggagaccgaggucugguggaccuccaacuccaucgucgucuucugcggcaccuccggcaccuacggcgccggcuccuggcccgacggcgccgacaucaaccucaugcccaucuga

SEQ ID NO: 111479 - RNA, 1410 nt, Artificial Sequence
  derived and/or modified CDS sequence (opt2) from neuraminidase__InfluenzaA__ABI92547
augaaccccaaccagaagaucaucaccaucggcuccgucucccucaccaucgccaccaucugcuuccucaugcagaucgccauccucgucaccaccgucacccuccacuucaagcaguacgagugcaacuccccccccaacaaccaggucaugcucugcgagcccaccaucaucgagcgcaacaucaccgagaucgucuaccucaccaacaccaccaucgagaaggagaugugccccaagcucgccgaguaccgcaacugguccaagccccagugcaacaucaccggcuucgcccccuucuccaaggacaacuccauccgccucuccgccggcggcgacaucugggucacccgcgagcccuacgucuccugcgaccccgacaagugcuaccaguucgcccucggccagggcaccacccucaacaacggccacuccaacgacaccguccacgaccgcacccccuaccgcacccuccucaugaacgagcucggcguccccuuccaccucggcacccgccaggucugcaucgccugguccuccuccuccugccacgacggcaaggccuggcuccacgucugcgucaccggcgacgacgagaacgccaccgccuccuucaucuacaacggccgccucgucgacuccaucggcuccugguccaagaagauccuccgcacccaggaguccgagugcgucugcaucaacggcaccugcaccgucgucaugaccgacggcuccgccuccggcaaggccgacaccaagauccucuucaucgaggagggcaagaucguccacaucuccacccucuccggcuccgcccagcacgucgaggagugcuccugcuacccccgcuaccccggcguccgcugcgucugccgcgacaacuggaagggcuccaaccgccccaucgucgacaucaacgucaaggacuacuccaucgucuccuccuacgucugcuccggccucgucggcgacaccccccgcaagaacgacuccuucuccuccucccacugccucgaccccaacaacgaggagggcggccacggcgucaagggcugggccuucgacgacggcaacgacgucuggaugggccgcaccaucuccgagaagcuccgcuccggcuacgagaccuucaaggucaucgagggcugguccaagcccaacuccaagcuccagaucaaccgccaggucaucgucgagcgcggcaaccgcuccggcuacuccggcaucuucuccgucgagggcaaguccugcaucaaccgcugcuucuacgucgagcucauccgcggccgcaaggaggagaccgaggucugguggaccuccaacuccaucgucgucuucugcggcaccuccggcaccuacggcgccggcuccuggcccgacggcgccgacaucaaccucaugcccaucuga

SEQ ID NO: 111480 - RNA, 1410 nt, Artificial Sequence
  derived and/or modified CDS sequence (opt2) from neuraminidase__InfluenzaA__ABI92558
augaaccccaaccagaagaucaucaccaucggcuccgucucccucaccaucgccaccaucugcuuccucaugcagaucgccauccucgucaccaccgucacccuccacuucaagcaguacgagugcaacuccccccccaacaaccaggucaugcucugcgagcccaccaucaucgagcgcaacaucaccgagaucgucuaccucaccaacaccaccaucgagaaggagaucugccccaagcucgccgaguaccgcaacuggucccgcccccagugcaacaucaccggcuucgcccccuucuccaaggacaacuccauccgccucuccgccggcggcgacaucugggucacccgcgagcccuacgucuccugcgaccccgacaagugcuaccaguucgcccucggccagggcaccacccucaacaacggccacuccaacgacaccguccacgaccgcacccccuaccgcacccuccucaugaacgagcucggcguccccuuccaccucggcacccgccaggucugcaucgccugguccuccuccuccugccacgacggcaaggccuggcuccacgucugcgucaccggcgacgacgagaacgccaccgccuccuucaucuacaacggccgccucgucgacuccaucggcuccugguccaagaagauccuccgcacccaggaguccgagugcgucugcaucaacggcaccugcaccgucgucaugaccgacggcuccgccuccggcaaggccgacaccaagauccucuucaucgaggagggcaagaucguccacaucuccacccucuccggcuccgcccagcacgucgaggagugcuccugcuacccccgcuaccccggcguccgcugcgucugccgcgacaacuggaagggcuccaaccgccccaucgucgacaucaacgucaaggacuacuccaucgucuccuccuacgucugcuccggccucgucggcgacaccccccgcaagaacgacuccuucuccuccucccacugccucgaccccaacaacgaggagggcggccacggcgucaagggcugggccuucgacgacggcaacgacgucuggaugggccgcaccaucuccgagaagcuccgcuccggcuacgagaccuucaaggucaucgagggcugguccaagcccaacuccaagcuccagaucaaccgccaggucaucgucgagcgcggcaaccgcuccggcuacuccggcaucuucuccgucgagggcaaguccugcaucaaccgcugcuucuacgucgagcucauccgcggccgcaaggaggagaccgaggucugguggaccuccaacuccaucgucgucuucugcggcaccuccggcaccuacggcaccggcuccuggcccgacggcgccgacaucaaccucaugcccaucuga

SEQ ID NO: 111481 - RNA, 1410 nt, Artificial Sequence
  derived and/or modified CDS sequence (opt2) from neuraminidase__InfluenzaA__ABI92569
augaaccccaaccagaagaucaucaccaucggcuccgucucccucaccaucgccaccaucugcuuccucaugcagaucgccauccucgucaccaccgucacccuccacuucaagcaguacgagugcaacuccccccccaacaaccaggucaugcucugcgagcccaccaucaucgagcgcaacaucaccgagaucgucuaccucaccaacaccaccaucgagaaggagaucugccccaagcucgccgaguaccgcaacugguccaagccccagugcaacaucaccggcuucgcccccuucuccaaggacaacuccauccgccucuccgccggcggcgacaucugggucacccgcgagcccuacgucuccugcgaccccgacaagugcuaccaguucgcccucggccagggcaccacccucaacaacggccacuccaacgacaccguccacgaccgcacccccuaccgcacccuccucaugaacgagcucggcguccccuuccaccucggcacccgccaggucugcaucgccugguccuccuccuccugccacgacggcaaggccuggcuccacgucugcgucaccggcgacgacgagaacgccaccgccuccuucaucuacaacggcaagcucgucgacuccaucggcuccugguccaagaagauccuccgcacccaggaguccgagugcgucugcaucaacggcaccugcgccgucgucaugaccgacggcuccgccuccggcaaggccgacaccaagauccucuucaucgaggagggcaagaucguccacaucuccacccucuccggcuccgcccagcacgucgaggagugcuccugcuacccccgcuaccccggcguccgcugcgucugccgcgacaacuggaagggcuccaaccgccccaucgucgacaucaacgucaaggacuacuccaucgucuccuccuacgucugcuccggccucgucggcgacaccccccgcaagaacgacuccuucuccuccucccacugccucgaccccaacaacgaggagggcggccacggcgucaagggcugggccuucgacgacggcaacgacgucuggaugggccgcaccaucuccgagaagcuccgcuccggcuacgagaccuucaaggucaucgagggcugguccaagcccaacuccaagcuccagaccaaccgccaggucaucgucgagcgcggcaaccgcuccggcuacuccggcaucuucuccgucgagggcaaguccugcaucaaccgcugcuucuacgucgagcucauccgcggccgcaaggaggagaccgaggucugguggaccuccaacuccaucgucgucuucugcggcaccuccggcaccuacggcaccggcuccuggcccgacggcgccgacaucaaccucaugcccaucuga

SEQ ID NO: 111482 - RNA, 1410 nt, Artificial Sequence
  derived and/or modified CDS sequence (opt2) from neuraminidase__InfluenzaA__ABI92580
augaaccccaaccagaagaucaucaccaucggcuccgucucccucaccaucgccaccaucugcuuccucaugcagaucgccauccucgucaccaccgucacccuccacuucaagcaguacgagugcaacuccccccccaacaacaaggucaugcucugcgagcccaccaucaucgagcgcaacaucaccgagaucgucuaccucaccaacaccaccaucgagaaggagaucugccccaagcucgccgaguaccgcaacugguccaagccccagugcaacaucaccggcuucgcccccuucuccaaggacaacuccauccgccucuccgccggcggcgacaucugggucacccgcgagcccuacgucuccugcgaccccgacaagugcuaccaguucgcccucggccagggcaccacccucaacaacggccacuccaacgacaccguccacgaccgcacccccuaccgcacccuccucaugaacgagcucggcguccccuuccaccucggcacccgccaggucugcaucgccugguccuccuccuccugccacgacggcaaggccuggcuccacgucugcgucaccggcgacgacgagaacgccaccgccuccuucaucuacaacggccgccucgucgacuccaucggcuccugguccaagaagauccuccgcacccaggaguccgagugcgucugcaucaacggcaccugcaccgucgucaugaccgacggcuccgccuccggcaaggccgacaccaagauccucuucaucgaggagggcaagaucguccacaucuccacccucuccggcuccgcccagcacgucgaggagugcuccugcuacccccgcuaccccggcguccgcugcgucugccgcgacaacuggaagggcuccaaccgccccaucgucgacaucaacgucaaggacuacuccaucgucuccuccuacgucugcuccggccucgucggcgacaccccccgcaagaacgacuccuucuccuccucccacugccucgaccccaacaacgaggagggcggccacggcgucaagggcugggccuucgacgacggcaacgacgucuggaugggccgcaccaucuccgagaagcuccgcuccggcuacgagaccuucaaggucaucgagggcugguccaagcccaacuccaagcuccagaucaaccgccaggucaucgucgagcgcggcaaccgcuccggcuacuccggcaucuucuccgucgagggcaagggcugcaucaaccgcugcuucuacgucgagcucauccgcggccgcaaggaggagaccgaggucugguggaccuccaacuccaucgucgucuucugcggcaccuccggcaccuacggcaccggcuccuggcccgacggcgccgacaucaaccucaugcccaucuga

SEQ ID NO: 111483 - RNA, 1410 nt, Artificial Sequence
  derived and/or modified CDS sequence (opt2) from neuraminidase__InfluenzaA__ABI92591
augaaccccaaccagaagaucaucaccaucggcuccgucucccucaccaucgccaccaucugcuuccucaugcagaucgccauccucgucaccaccgucacccuccacuucaagcaguacgagugcaacuccccccccaacaaccaggucaugcucugcgagcccaccaucaucgagcgcaacaucaccgagaucgucuaccucaccaacaccaccaucgagaaggagaucugccccaagcucgccgaguaccgcaacugguccaagccccagugcaacaucaccggcuucgcccccuucuccaaggacaacuccauccgccucuccgccggcggcgacaucugggucacccgcgagcccuacgucuccugcgaccccgacaagugcuaccaguucgcccucggccagggcaccacccucaacaacggccacuccaacgacaccguccacgaccgcacccccuaccgcacccuccucaugaacgagcucggcguccccuuccaccuccgcacccgccaggucugcaucgccugguccuccuccuccugccacgacggcaaggccuggcuccacgucugcgucaccggcgacgacgagaacgccaccgccuccuucaucuacaacggccgccucgucgacuccaucggcuccugguccaagaagauccuccgcacccaggaguccgagugcgucugcaucaacggcaccugcaccgucgucaugaccgacggcuccgccuccggcaaggccgacaccaagauccucuucaucgaggagggcaagaucguccacaucuccacccucuccggcuccgcccagcacgucgaggagugcuccugcuacccccgcuaccccggcguccgcugcgucugccgcgacaacuggaagggcuccaaccgccccaucgucgacaucaacgucaaggacuacuccaucgucuccuccuacgucugcuccggccucgucggcgacaccccccgcaagaacgacucccucuccuccucccacugccucgaccccaacaacgaggagggcggccacggcgucaagggcugggccuucgacgacggcaacgacgucuggaugggccgcaccaucuccgagaagcuccgcuccggcuacgagaccuucaaggucaucgagggcugguccaagcccaacuccaagcuccagaucaaccgccaggucaucgucgagcgcggcaaccgcuccggcuacuccggcaucuucuccgucgagggcaagggcugcaucaaccgcugcuucuacgucgagcucauccgcggccgcaaggaggagaccgaggucugguggaccuccaacuccaucgucgucuucugcggcaccuccggcaccuacggcaccggcuccuggcccgacggcgccgacaucaaccucaugcccaucuga

SEQ ID NO: 111484 - RNA, 1410 nt, Artificial Sequence
  derived and/or modified CDS sequence (opt2) from neuraminidase__InfluenzaA__ABI92602
augaaccccaaccagaagaucaucaccaucggcuccgucucccucaccaucgccaccaucugcuuccucaugcagaucgccauccucgucaccaccgucacccuccacuucaagcaguacgagugcaacuccccccccaacaaccaggucaugcucugcgagcccaccaucaucgagcgcaacaucaccgagaucgucuaccucaccaacaccaccaucgagaaggagaucugccccaagcucgccgaguaccgcaacugguccaagccccagugcaacaucaccggcuucgcccccuucuccaaggacaacuccauccgccucuccgccggcggcgacaucugggucacccgcgagcccuacgucuccugcgaccccgacaagugcuaccaguucgcccucggccagggcaccacccucaacaacggccacuccaacgacaccguccacgaccgcacccccuaccgcacccuccucaugaacgagcucggcguccccuuccaccucggcacccgccaggucugcaucgccugguccuccuccuccugccacgacggcaaggccuggcuccacgucugcgucaccggcgacgacgagaacgccaccgccucccucaucuacaacggccgccucgucgacuccaucggcuccugguccaagaagauccuccgcacccaggaguccgagugcgucugcaucaacggcaccugcaccgucgucaugaccgacggcuccgccuccggcaaggccgacaccaagauccucuucaucgaggagggcaagaucguccacaucuccacccucuccggcuccgcccagcacgucgaggagugcuccugcuacccccgcuaccccggcguccgcugcgucugccgcgacaacuggaagggcuccaaccgccccaucgucgacaucaacgucaaggacuacuccaucgucuccuccuacgucugcuccggccucgucggcgacaccccccgcaagaacgacuccuucuccuccucccacugccucgaccccaacaacgaggagggcggccacggcgucaagggcugggccuucgacgacggcaacgacgucuggaugggccgcaccaucuccgagaagcuccgcuccggcuacgagaccuucaaggucaucgagggcugguccaagcccaacuccaagcuccaggucaaccgccaggucaucgucgagcgcggcaaccgcuccggcuacuccggcaucuucuccgucgagggcaaguccugcaucaaccgcugcuucuacgucgagcucauccgcggccgcaaggaggagaccgaggucugguggaccuccaacuccaucgucgucuucugcggcaccuccggcaccuacggcaccggcuccuggcccgacggcgccgacaucaaccucaugcccaucuga

SEQ ID NO: 111485 - RNA, 1410 nt, Artificial Sequence
  derived and/or modified CDS sequence (opt2) from neuraminidase__InfluenzaA__ABI92613
augaaccccaaccagaagaucaucaccaucggcuccgucucccucaccaucgccaccaucugcuuccucaugcagaucgccauccucgucaccaccgucacccuccacuucaagcaguacgagugcaacuccccccccaacaaccaggucaugcucugcgagcccaccaucaucgagcgcaacaucaccgagaucgucuaccucaccaacaccaccaucgagaaggagaucugccccaagcucgccgaguaccgcaacugguccaagccccagugcaacaucaccggcuucgcccccuucuccaaggacaacuccauccgccucuccgccggcggcgacaucugggucacccgcgagcccuacgucuccugcgaccccgacaagugcuaccaguucgcccucggccagggcaccacccucaacaacggccacuccaacgacaccguccacgaccgcacccccuaccgcacccuccucaugaacgagcucggcguccccuuccaccucggcacccgccaggucugcaucgccugguccuccuccuccugccacgacggcaaggccuggcuccacgucugcgucaccggcgacaacgagaacgccaccgccuccuucaucuacaacggcaagcucgucgacuccaucggcuccugguccaagaagauccuccgcacccaggaguccgagugcgucugcaucaacggcaccugcgccgucgucaugaccgacggcuccgccuccggcaaggccgacaccaagauccucuucaucgaggagggcaagaucguccacaucuccacccucuccggcuccgcccagcacgucgaggagugcuccugcuacccccgcuaccccggcguccgcugcgucugccgcgacaacuggaagggcuccaaccgccccaucgucgacaucaacgucaaggacuacuccaucgucuccuccuacgucugcuccggccucgucggcgacaccccccgcaagaacgacuccuucuccuccucccacugccucgaccccaacaacgaggagggcggccacggcgucaagggcugggccuucgacgacggcaacgacgucuggaugggccgcaccaucuccgagaagcuccgcuccggcuacgagaccuucaaggucaucgagggcugguccaagcccaacuccaagcuccagaccaaccgccaggucaucgucgagcgcggcaaccgcuccggcuacuccggcaucuucuccgucgagggcaaguccugcaucaaccgcugcuucuacgucgagcucauccgcggccgcaaggaggagaccgaggucugguggaccuccaacuccaucgucgucuucugcggcaccuccggcaccuacggcaccggcuccuggcccgacggcgccgacaucaaccucaugcccaucuga

SEQ ID NO: 111486 - RNA, 1410 nt, Artificial Sequence
  derived and/or modified CDS sequence (opt2) from neuraminidase__InfluenzaA__ABI92624
augaaccccaaccagaagaucaucaccaucggcuccgucucccucaccaucgccaccaucugcuuccucaugcagaucgccauccucgucaccaccgucacccuccacuucaagcaguacgagugcaacuccccccccaacaaccaggucaugcucugcgagcccaccaucaucgagcgcaacaucaccgagaucgucuaccucaccaacaccaccaucgagaaggagaucugccccaagcucgccgaguaccgcaacugguccaagccccagugcaacaucaccggcuucgcccccuucuccaaggacaacuccauccgccucuccgccggcggcgacaucugggucauccgcgagcccuacgucuccugcgaccccgacaagugcuaccaguucgcccucggccagggcaccacccucaacaacggccacuccaacgacaccguccacgaccgcacccccuaccgcacccuccucaugaacgagcucggcguccccuuccaccucggcacccgccaggucugcaucgccugguccuccuccuccugccacgacggcaaggccuggcuccacgucugcgucaccggcgacgacgagaacgccaccgccuccuucaucuacaacggccgccucgucgacuccaucggcuccugguccaagaagauccuccgcacccaggaguccgagugcgucugcaucaacggcaccugcaccgucgucaugaccgacggcuccgccuccggcaaggccgacaccaagauccucuucaucgaggagggcaagaucguccacaucuccacccucuccggcuccgcccagcacgucgaggagugcuccugcuacccccgcuaccccggcguccgcugcgucugccgcgacaacuggaagggcuccaaccgccccaucgucgacaucaacgucaaggaccacuccaucgucuccuccuacgucugcuccggccucgucggcgacaccccccgcaagaacgacuccuucuccuccucccacugccucgaccccaacaacgaggagggcggccacggcgucaagggcugggccuucgacgacggcaacgacgucuggaugggccgcaccaucuccgagaagcuccgcuccggcuacgagaccuucaaggucaucgagggcugguccaagcccaacuccaagcuccagaucaaccgccaggucaucgucgagcgcggcaaccgcuccggcuacuccggcaucuucuccgucgagggcaaguccugcaucaaccgcugcuucuacgucgagcucauccgcggccgcaaggaggagaccgaggucugguggaccuccaacuccaucgucgucuucugcggcaccuccggcaccuacggcaccggcuccuggcccgacggcgccgacaucaaccucaugcccaucuga

SEQ ID NO: 111487 - RNA, 1410 nt, Artificial Sequence
  derived and/or modified CDS sequence (opt2) from neuraminidase__InfluenzaA__ABI92635
augaaccccaaccagaagaucaucaccaucggcuccgucucccucaccaucgccaccaucugcuuccucaugcagaucgccauccucgucaccaccgucacccuccacuucaagcaguacgagugcaaccccccccccaacaaccaggucaugcucugcgagcccaccaucaucgagcgcaacaucaccgagaucgucuaccucaccaacaccaccaucgagaaggagaucugccccaagcucgccgaguaccgcaacugguccaagccccagugcaaccucaccggcuucgcccccuucuccaaggacaacuccauccgccucuccgccggcggcgacaucugggucacccgcgagcccuacgucuccugcgaccccgacaagugcuaccaguucgcccucggccagggcaccacccucaacaacggccacuccaacgacaccguccacgaccgcacccccuaccgcacccuccucaugaacgagcucggcguccccuuccaccucggcacccgccaggucugcaucgccugguccuccuccuccugccacgacggcaaggccuggcuccacgucugcgucaccggcgacgacgagaacgccaccgccuccuucaucuacaacggccgccucgucgacuccaucggcuccugguccaagaagauccuccgcacccaggaguccgagugcgucugcaucaacggcaccugcaccgucgucaugaccgacggcuccgccuccggcaaggccgacaccaagaucaucuucaucgaggagggcaagaucguccacaccuccacccucuccggcuccgcccagcacgucgaggagugcuccugcuacccccgcuaccccggcguccgcugcgucugccgcgacaacuggaagggcuccaaccgccccaucgucgacaucaacgucaaggacuacuccaucgucuccuccuacgucugcuccggccucgucggcgacaccccccgcaagaacgacuccuucuccuccucccacugccucgaccccaacaacgaggagggcggccacggcgucaagggcugggccuucgacgacggcaacgacgucuggaugggccgcaccaucuccgagaagcuccgcuccggcuacgagaccuucaaggucaucgagggcugguccaagcccaacuccaagcuccagaccaaccgccaggucaucgucgagcgcggcaaccgcuccggcuacuccggcaucuucuccgucgagggcaaguccugcaucaaccgcugcuucuacgucgagcucauccgcggccgcaaggaggagaccgaggucugguggaccuccaacuccaucgucgucuucugcggcaccuccggcaccuacggcaccggcuccuggcccgacggcgccgacaucaaccucaugcccaucuga

SEQ ID NO: 111488 - RNA, 1410 nt, Artificial Sequence; identical to SEQ ID NO: 110181
  derived and/or modified CDS sequence (opt2) from neuraminidase__InfluenzaA__ABI92646

SEQ ID NO: 111489 - RNA, 1410 nt, Artificial Sequence; identical to SEQ ID NO: 110181
  derived and/or modified CDS sequence (opt2) from neuraminidase__InfluenzaA__ABI92657

SEQ ID NO: 111490 - RNA, 1410 nt, Artificial Sequence
  derived and/or modified CDS sequence (opt2) from neuraminidase__InfluenzaA__ABI92668
augaaccccaaccagaagaucaucaccaucggcuccgucucccucaccaucgccaccaucugcuuccucaugcagaucgccauccucgucaccaccgucacccuccacuucaagcagcacgagugcaacuccccccccaacaaccaggucaugcucugcgagcccaccaucaucgagcgcaacaucaccgagaucgucuaccucaccaacaccaccaucgagaaggagaucugccccaagcucgccgaguaccgcaacugguccaagccccagugcaacaucaccggcuucgcccccuucuccaaggacaacuccauccgccucuccgccggcggcgacaucugggucacccgcgagcccuacgucuccugcggccccgacaagugcuaccaguucgcccucggccagggcaccacccucaacaacggccacuccaacgacaccguccacgaccgcacccccuaccgcacccuccucaugaacgagcucggcguccccuuccaccucggcacccgccaggucugcaucgccugguccuccuccuccugccacgacggcaaggccuggcuccacgucugcgucaccggcgacgacaagaacgccaccgccuccuucaucuacaacggccgccucgucgacuccaucggcuccugguccaagaagauccuccgcacccaggaguccgagugcgucugcaucaacggcaccugcaccgucgucaugaccgacggcuccgccuccggcaaggccgacaccaagauccucuucaucgaggagggcaagaucguccacaucuccacccucuccggcuccgcccagcacgucgaggagugcuccugcuacccccgcuaccccggcguccgcugcgucugccgcgacaacuggaagggcuccaaccgccccaucgucgacaucaacgucaaggacuacuccaucgucuccuccuacgucugcuccggccucgucggcgacaccccccgcaagaacgacuccuucuccuccucccacugccucgaccccaacaacgaggagggcggccacggcgucaagggcugggccuucgacgacggcaacgacgucuggaugggccgcaccaucuccgagaagcuccgcuccggcuacgagaccuucaaggucaucgagggcugguccaagcccaacuccaagcuccagaucaaccgccaggucaucgucgagcgcggcaaccgcuccggcuacuccggcaucuucuccgucgagggcaaguccugcaucaaccgcugcuucuacgucgagcucauccgcggccgcaaggaggagaccgaggucugguggaccuccaacuccaucgucgucuucugcggcaccuccggcaccuacggcaccggcuccuggcccgacggcgccgacaucaaccucaugcccaucuga

SEQ ID NO: 111491 - RNA, 1410 nt, Artificial Sequence; identical to SEQ ID NO: 110627
  derived and/or modified CDS sequence (opt2) from neuraminidase__InfluenzaA__ABI92679

SEQ ID NO: 111492 - RNA, 1410 nt, Artificial Sequence; identical to SEQ ID NO: 110181
  derived and/or modified CDS sequence (opt2) from neuraminidase__InfluenzaA__ABI92701

SEQ ID NO: 111493 - RNA, 1410 nt, Artificial Sequence
  derived and/or modified CDS sequence (opt2) from neuraminidase__InfluenzaA__ABI92712
augaaccccaaccagaagaucaucaccaucggcuccgucucccucaccaucgccaccaucugcuuccucaugcagaucgccauccucgucaccaccgucacccuccacuucaagcagcacgagugcaacuccccccccaacaaccaggccaugcucugcgagcccaccaccaccgagcgcaacaccaccgagaucgucuaccucaccaacaccaccaucgagaaggagaucugccccaagcucgucgaguaccgcaacugguccaagccccagugcaacaucaccggcuucgcccccuucuccaaggacaacuccauccgccucuccgccggcggcgacaucugggucacccgcgagcccuacgucuccugcgaccccgacaagugcuaccaguucgcccucggccagggcaccacccucaacaacggccacuccaacgacaccguccacgaccgcacccccuaccgcacccuccucaugaacgagcucggcguccccuuccaccucggcacccgccaggucugcaucgccugguccuccuccuccugccacgacggcaaggccuggcuccacgucugcgucaccggcgacgacaagaacgccaccgccuccuucaucuacaacggccgccucgucgacuccaucggcuccugguccaagaagauccuccgcacccaggaguccgagugcgucugcaucaacggcaccugcaccgucgucaugaccgacggcuccgccuccggcaaggccgacaccaagauccucuucaucgaggagggcaagaucguccacaucuccacccucuccggcuccgcccagcacgucgaggagugcuccugcuacccccgcuaccccggcguccgcugcgucugccgcgacaacuggaagggcuccaaccgccccaucgucgacaucaacgucaaggacuacuccaucgucuccuccuacgucugcuccggccucgucggcgacaccccccgcaagaacgacuccuucuccuccucccacugccucgaccccaacaacgaggagggcggccacggcgucaagggcugggccuucgacgacggcaacgacgucuggaugggccgcaccaucuccgagaagcuccgcuccggcuacgagaccuucaaggucaucgagggcugguccaagcccaacuccaagcuccagaucaaccgccaggucaucgucgagcgcggcaaccgcuccggcuacuccggcaucuucuccgucgagggcaaguccugcaucaaccgcugcuucuacgucgagcucauccgcggccgcaaggaggagaccgaggucugguggaccuccaacuccaucgucgucuucugcggcaccuccggcaccuacggcaccggcuccuggcccgacggcgccgacaucaaccucaugcccaucuga

SEQ ID NO: 111494 - RNA, 1410 nt, Artificial Sequence
  derived and/or modified CDS sequence (opt2) from neuraminidase__InfluenzaA__ABI92723
augaaccccaaccagaagaucaucaccaucggcuccgucucccucaccaucgccaccaucugcuuccucaugcagaucgccauccucgucaccaccgucacccuccacuucaagcagcacgagugcaacuccccccccaacaaccaggucaugcucugcgagcccaccaucaucgagcgcaacaucaccgagaucgucuaccucaccaacaccaccaucgagaaggagaucugccccaagcucgucgaguaccgcaacugguccaagccccagugcaacaucaccggcuucgcccccuucuccaaggacaacuccauccgccucuccgccggcggcgacaucugggucacccgcgagcccuacgucuccugcgaccccgacaagugcuaccaguucgcccucggccagggcaccacccucaacaacggccacuccaacgacaccguccacgaccgcacccccuaccgcacccuccucaugaacgagcucggcguccccuuccaccucggcaccaagcaggucugcaucgccugguccuccuccuccugccacgacggcaaggccuggcuccacgucugcgucaccggcgacgacaagaacgccaccgccuccuucaucuacaacggccgccucgucgacuccaucggcuccugguccaagaagauccuccgcacccaggaguccgagugcgucugcaucaacggcaccugcaccgucgucaugaccgacggcuccgccuccggcaaggccgacaccaagauccucuucaucgaggagggcaagaucguccacaucuccacccucuccggcuccgcccagcacgucgaggagugcuccugcuacccccgcuaccccggcguccgcugcgucugccgcgacaacuggaagggcuccaaccgccccaucgucgacaucaacgucaaggacuacuccaucgucuccuccuacgucugcuccggccucgucggcgacaccccccgcaagaacgacuccuucuccuccucccacugccucgaccccaacaacgaggagggcggccacggcgucaagggcugggccuucgacgacggcaacgacgucuggaugggccgcaccaucuccgagaagcuccgcuccggcuacgagaccuucaaggucaucgagggcugguccaagcccaacuccaagcuccagaucaaccgccaggucaucgucgagcgcggcaaccgcuccggcuacuccggcaucuucuccgucgagggcaaguccugcaucaaccgcugcuucuacgucgagcucauccgcggccgcaaggaggagaccgaggucugguggaccuccaacuccaucgucgucuucugcggcaccuccggcaccuacggcaccggcuccuggcccgacggcgccgacaucaaccucaugcccaucuga

SEQ ID NO: 111495 - RNA, 1410 nt, Artificial Sequence; identical to SEQ ID NO: 110181
  derived and/or modified CDS sequence (opt2) from neuraminidase__InfluenzaA__ABI92734

SEQ ID NO: 111496 - RNA, 1410 nt, Artificial Sequence; identical to SEQ ID NO: 110627
  derived and/or modified CDS sequence (opt2) from neuraminidase__InfluenzaA__ABI92745

SEQ ID NO: 111497 - RNA, 1410 nt, Artificial Sequence
  derived and/or modified CDS sequence (opt2) from neuraminidase__InfluenzaA__ABI92756
augaaccccaaccagaagaucaucaccaucggcuccgucucccucaccaucgccaccaucugcuuccucaugcagaucgccauccucgucaccaccgucacccuccacuucaagcagcacgagugcaacuccccccccaacaaccaggucauccucugcgagcccaccaucaucgagcgcaacaucaccgagaucgucuaccucaccaacaccaccaucgagaaggagaucugccccaagcucgccgaguaccgcaacugguccaagccccagugcaacaucaccggcuucgcccccuucuccaaggacaacuccauccgccucuccgccggcggcgacaucugggucacccgcgagcccuacgucuccugcgaccccgacaagugcuaccaguucgcccucggccagggcaccacccucaacaacggccacuccaacgacaccguccacgaccgcacccccuaccgcacccuccucaugaacgagcucggcguccccuuccaccucggcacccgccaggucugcaucgccugguccuccuccuccugccacgacggcaaggccuggcuccacgucugcgucaccggcgacgacaagaacgccaccgccuccuucaucuacaacggccgccucgucgacuccaucggcuccugguccaagaagauccuccgcacccaggaguccgagugcgucugcaucaacggcaccugcaccgucgucaugaccgacggcuccgccuccggcaaggccgacaccaagauccucuucaucgaggagggcaagaucguccacaucuccacccucuccggcuccgcccagcacgucgaggagugcuccugcuacccccgcuaccccggcguccgcugcgucugccgcgacaacuggaagggcuccaaccgccccaucgucgacaucaacgucaaggacuacuccaucgucuccuccuacgucugcuccggccucgucggcgacaccccccgcaagaacgacuccuucuccuccucccacugccucgaccccaacaacgaggagggcggccacggcgucaagggcugggccuucgacgacggcaacgacgucuggaugggccgcaccaucuccgagaagcuccgcuccggcuacgagaccuucaaggucaucgagggcugguccaagcccaacuccaagcuccagaucaaccgccaggucaucgucgagcgcggcaaccgcuccggcuacuccggcaucuucuccgucgagggcaaguccugcaucaaccgcugcuucuacgucgagcucauccgcggccgcaaggaggagaccgaggucugguggaccuccaacuccaucgucgucuucugcggcaccuccggcaccuacggcaccggcuccuggcccgacggcgccgacaucaaccucaugcccaucuga

SEQ ID NO: 111498 - RNA, 1410 nt, Artificial Sequence
  derived and/or modified CDS sequence (opt2) from neuraminidase__InfluenzaA__ABI92767
augaaccccaaccagaagaucaucaccaucggcuccgucucccucaccaucgccaccaucugcuuccucaugcagaucgccauccucgucaccaccgucacccuccacuucaagcagcacgagugcaacuccccccccaacaaccaggucaugcucugcgagcccaccaucaucgagcgcaacaucaccgagaucgucuaccucaccaacaccaccaucgagaaggagaucugccccaagcucgccgaguaccgcaacugguccaagccccagugcaacaucaccggcuucgcccccuucuccaaggacaacuccauccgccucuccgccggcggcgacaucugggucacccgcgagcccuacgucuccugcgaccccgacaagugcuaccaguucgcccucggccagggcaccacccucaacaacggccacuccaacgacaccguccacgaccgcacccccuaccgcacccuccucaugaacgagcucggcguccccuuccaccucggcacccgccaggucugcaucgccugguccuccuccuccugccacgacggcaaggccuggcuccacgucugcgucaccggcgacgacaagaacgccaccgccuccuucaucuacaacggccgccucgucgacuccaucggcuccugguccaagaagauccuccgcacccaggaguccgagugcgucugcaucaacggcaccugcaccgucgucaugaccgacggcuccgccuccggcaaggccgacaccaagauccucuucaucgaggagggcaagaucguccacaucuccacccucuccggcuccgcccagcacgucgaggagugcuccugcuacccccgcuaccccggcguccgcugcgucugccgcgacaacuggaagggcuccaaccgccccaucgucgacaucaacgucaaggacuacuccaucgucuccuccuacgucugcuccggccucgucggcgacaccccccgcaagaacgacuccuucuccuccucccacugccucgaccccaacaacgaggagggcggccacggcgucaagggcugggccuucgacgacggcaacgacgucuggaugggccgcaccaucuccgagaagcuccgcuccggcuacgagaccuucaaggucaucgagggcugguccaagcccaacuccaagcuccagaucaaccgccaggucaucgucgagcgcggcaaccgcuccggcuacuccggcaucuucuccgucgagggcaaguccugcaucaaccgcugcuucuacgucgagcucauccgcggccgcaaggagaagaccgaggucugguggaccuccaacuccaucgucgucuucugcggcaccuccggcaccuacggcaccggcuccuggcccgacggcgccgacaucaaccucaugcccaucuga

SEQ ID NO: 111499 - RNA, 1410 nt, Artificial Sequence; identical to SEQ ID NO: 110181
  derived and/or modified CDS sequence (opt2) from neuraminidase__InfluenzaA__ABI92778

SEQ ID NO: 111500 - RNA, 1410 nt, Artificial Sequence; identical to SEQ ID NO: 110363
  derived and/or modified CDS sequence (opt2) from neuraminidase__InfluenzaA__ABI92789

SEQ ID NO: 111501 - RNA, 1410 nt, Artificial Sequence; identical to SEQ ID NO: 110363
  derived and/or modified CDS sequence (opt2) from neuraminidase__InfluenzaA__ABI92800

SEQ ID NO: 111502 - RNA, 1410 nt, Artificial Sequence; identical to SEQ ID NO: 110363
  derived and/or modified CDS sequence (opt2) from neuraminidase__InfluenzaA__ABI92811

SEQ ID NO: 111503 - RNA, 1410 nt, Artificial Sequence; identical to SEQ ID NO: 110363
  derived and/or modified CDS sequence (opt2) from neuraminidase__InfluenzaA__ABI92822

SEQ ID NO: 111504 - RNA, 1410 nt, Artificial Sequence; identical to SEQ ID NO: 110363
  derived and/or modified CDS sequence (opt2) from neuraminidase__InfluenzaA__ABI92844

SEQ ID NO: 111505 - RNA, 1410 nt, Artificial Sequence; identical to SEQ ID NO: 110363
  derived and/or modified CDS sequence (opt2) from neuraminidase__InfluenzaA__ABI92855

SEQ ID NO: 111506 - RNA, 1410 nt, Artificial Sequence
  derived and/or modified CDS sequence (opt2) from neuraminidase__InfluenzaA__ABI92866
augaaccccaaccagaagaucaucaccaucggcuccgccucccucaccaucgccaccaucugcuuccucauccagaucgccauccucgucaccaccgucacccuccacuucaagcagcacgagugcaacucccuccccaacaaccaggucaugcucugcgagcccaccaucaucgagcgcaacaucaccgagaucgucuaccucaccaacaccaccaucgagaaggagaucugccccaagcucgccgaguaccgcaacugguccaagccccagugcaacaucaccggcuucgcccccuucuccaaggacaacuccauccgccucuccgccggcggcgacaucugggucacccgcgagcccuacgucuccugcgaccccgacaagugcuaccaguucgcccucggccagggcaccacccucaacaacggccacuccaacgacaccguccacgaccgcacccccuaccgcacccuccucaugaacgagcucggcguccccuuccaccucggcacccgccaggucugcaucgccugguccuccuccuccugccacgacggcaaggccuggcuccacgucugcgucaccggcgacgacaagaacgccaccgccuccuucaucuacaacggccgccucgucgacuccaucuccuccugguccaagaagauccuccgcacccaggaguccgagugcgucugcaucaacggcaccugcaccgucgucaugaccgacggcuccgccuccggcaaggccgacaccaagauccucuucaucgaggagggcaagaucauccacaucuccacccucuccggcuccgcccagcacgucgaggagugcuccugcuacccccgcuaccccggcguccgcugcgucugccgcgacaacuggaagggcuccaaccgccccaucgucgacaucaacgucaaggacuacuccaucgucuccuccuacgucugcuccggccucgucggcgacaccccccgcaagaacgacuccuucuccuccucccacugccucgaccccaacaacgaggagggcggccacggcgucaagggcugggccuucgacgacggcaacgacgucuggaugggccgcaccaucuccgagaagcuccgcuccggcuacgagaccuucaaggucaucgagggcugguccaaccccaacuccaagcuccagaucaaccgccaggucaucgucgagcgcggcaaccgcuccggcuacuccggcaucuucuccgucgagggcaaguccugcaucaaccgcugcuucuacgucgagcucauccgcggccgcaaggaggagaccgaggucugguggaccuccaacuccaucgucgucuucugcggcaccuccggcaccuacggcaccggcuccuggcccgacggcgccgacaucaaccucaugcccaucuga

SEQ ID NO: 111507 - RNA, 1410 nt, Artificial Sequence; identical to SEQ ID NO: 110363
  derived and/or modified CDS sequence (opt2) from neuraminidase__InfluenzaA__ABI92877

SEQ ID NO: 111508 - RNA, 1410 nt, Artificial Sequence; identical to SEQ ID NO: 110363
  derived and/or modified CDS sequence (opt2) from neuraminidase__InfluenzaA__ABI92888

SEQ ID NO: 111509 - RNA, 1410 nt, Artificial Sequence; identical to SEQ ID NO: 110363
  derived and/or modified CDS sequence (opt2) from neuraminidase__InfluenzaA__ABI92899

SEQ ID NO: 111510 - RNA, 1410 nt, Artificial Sequence; identical to SEQ ID NO: 110363
  derived and/or modified CDS sequence (opt2) from neuraminidase__InfluenzaA__ABI92910

SEQ ID NO: 111511 - RNA, 1410 nt, Artificial Sequence; identical to SEQ ID NO: 110363
  derived and/or modified CDS sequence (opt2) from neuraminidase__InfluenzaA__ABI92921

SEQ ID NO: 111512 - RNA, 1410 nt, Artificial Sequence; identical to SEQ ID NO: 110363
  derived and/or modified CDS sequence (opt2) from neuraminidase__InfluenzaA__ABI92932

SEQ ID NO: 111513 - RNA, 1410 nt, Artificial Sequence; identical to SEQ ID NO: 110750
  derived and/or modified CDS sequence (opt2) from neuraminidase__InfluenzaA__ABI92943

SEQ ID NO: 111514 - RNA, 1410 nt, Artificial Sequence; identical to SEQ ID NO: 110750
  derived and/or modified CDS sequence (opt2) from neuraminidase__InfluenzaA__ABI92954

SEQ ID NO: 111515 - RNA, 1410 nt, Artificial Sequence
  derived and/or modified CDS sequence (opt2) from neuraminidase__InfluenzaA__ABI92965
augaaccccaaccagaagaucaucaccaucggcuccgucucccucaccaucuccaccaucugcuucuucaugcagaucgccauccucaucaccaccgucacccuccacuucaagcaguacgaguucaacuccccccccaacaaccaggucaugcucugcgagcccaccaucaucgagcgcaacaucaccgagaucgucuaccucaccaacaccaccaucgagaaggagaucugccccaagcucgccgaguaccgcaacugguccaagccccagugcgacaucaccggcuucgcccccuucuccaaggacaacuccauccgccucuccgccggcggcgacaucugggucacccgcgagcccuacgucuccugcgaccccgacaagugcuaccaguucgcccucggccagggcaccacccucaacaacguccacuccaacgacaccguccacgaccgcacccccuaccgcacccuccucaugaacgagcucggcguccccuuccaccucggcaccaagcaggucugcaucgccugguccuccuccuccugccacgacggcaaggccuggcuccacgucugcgucaccggcgacgacaagaacgccaccgccuccuucaucuacaacggccgccucgucgacuccaucgucuccugguccaagaagauccuccgcacccaggaguccgagugcgucugcaucaacggcaccugcaccgucgucaugaccgacggcuccgccuccggcaaggccgacaccaagauccucuucaucgaggagggcaagaucguccacaccuccacccucuccggcuccgcccagcacgucgaggagugcuccugcuacccccgcuaccccggcguccgcugcgucugccgcgacaacuggaagggcuccaaccgccccaucgucgacaucaacaucaaggacuacuccaucgucuccuccuacgucugcuccggccucgucggcgacaccccccgcaagaacgaccgcuccuccuccucccacugccucgaccccaacaacgaggagggcggccacggcgucaagggcugggccuucgacgacggcaacgacgucuggaugggccgcaccaucuccgagaagcuccgcuccggcuacgagaccuucaaggucaucgagggcugguccaaccccaacuccaagcuccagaucaaccgccaggucaucgucgaccgcggcaaccgcuccggcuacuccggcaucuucuccgucgagggcaaguccugcaucaaccgcugcuucuacgucgagcucauccgcggccgcaaggaggagaccgagguccucuggaccuccaacuccaucgucgucuucugcggcaccuccggcaccuacggcaccggcuccuggcccgacggcgccgacaucaaccucaugcccaucuga

SEQ ID NO: 111516 - RNA, 1410 nt, Artificial Sequence; identical to SEQ ID NO: 110750
  derived and/or modified CDS sequence (opt2) from neuraminidase__InfluenzaA__ABI92976

SEQ ID NO: 111517 - RNA, 1410 nt, Artificial Sequence; identical to SEQ ID NO: 110750
  derived and/or modified CDS sequence (opt2) from neuraminidase__InfluenzaA__ABI92987

SEQ ID NO: 111518 - RNA, 1410 nt, Artificial Sequence; identical to SEQ ID NO: 110750
  derived and/or modified CDS sequence (opt2) from neuraminidase__InfluenzaA__ABI92998

SEQ ID NO: 111519 - RNA, 1410 nt, Artificial Sequence; identical to SEQ ID NO: 110954
  derived and/or modified CDS sequence (opt2) from neuraminidase__InfluenzaA__ABI93009

SEQ ID NO: 111520 - RNA, 1410 nt, Artificial Sequence; identical to SEQ ID NO: 110750
  derived and/or modified CDS sequence (opt2) from neuraminidase__InfluenzaA__ABI93020

SEQ ID NO: 111521 - RNA, 1413 nt, Artificial Sequence; identical to SEQ ID NO: 111392
  derived and/or modified CDS sequence (opt2) from neuraminidase__InfluenzaA__ABI93031

SEQ ID NO: 111522 - RNA, 1410 nt, Artificial Sequence; identical to SEQ ID NO: 111147
  derived and/or modified CDS sequence (opt2) from neuraminidase__InfluenzaA__ABI93042

SEQ ID NO: 111523 - RNA, 1410 nt, Artificial Sequence; identical to SEQ ID NO: 110320
  derived and/or modified CDS sequence (opt2) from neuraminidase__InfluenzaA__ABI93053

SEQ ID NO: 111524 - RNA, 1410 nt, Artificial Sequence
  derived and/or modified CDS sequence (opt2) from neuraminidase__InfluenzaA__ABI93064
augaaccccaaccagaagaucaucaccaucggcuccgucucccucaccaucgccaccaucugcuuccucaugcagaucgccauccucgucaccaccgucacccuccacuucaagcaguacgagugcaacuccccccccaacaaccaggucaugcucugcgagcccaccaucaucgagcgcaacaucaccgagaucgucuaccucaccaacaccaccaucgagaaggagaucugccccaagcucgccgaguaccgcaacugguccaagccccagugcaagaucaccggcuucgcccccuucuccaaggacaacuccauccgccucuccgccggcggcgacaucugggucacccgcgagcccuacgucuccugcgaccccgacaagugcuaccaguucgcccucggccagggcaccacccucaacaaccgccacuccaacgacaccguccacgaccgcacccccuaccgcacccuccucaugaacgagcucggcguccccuuccaccucggcaccaagcaggucugcaucgccugguccuccuccuccugccacgacggcaaggccuggcuccacgucugcgucaccggccacgacgagaacgccaccgccuccuucaucuacgacggccgccucgucgacuccaucggcuccugguccaagaagauccuccgcacccaggaguccgagugcgucugcaucaacggcaccugcaccgucgucaugaccgacggcuccgccuccggccgcgccgacaccaagauccucuucaucgaggagggcaagaucguccacaccuccaagcucuccggcuccgcccagcacgucgaggagugcuccugcuacccccgcuaccccggcguccgcugcgucugccgcgacaacuggaagggcuccaaccgccccaucgucgacaucaacgucaaggacuacuccaucgucuccuccuacgucugcuccggccucgucggcgacaccccccgcaagaacgacuccuccuccuccucccacugccucgaccccaacaacgaggagggcggccacggcgucaagggcugggccuucgacgacggcaacgacgucuggaugggccgcaccaucuccgagaagucccgcuccggcuacgagaccuucaaggucaucgagggcugguccaagcccaacuccaagcuccagaucaaccgccaggucaucgucgagcgcggcaaccgcuccggcuacuccggcaucuucuccgucgagggcaaguccugcaucaaccgcugcuucuacgucgagcucauccgcggccgcaagcaggagaccgaggucugguggaccuccaacuccaucgucgucuucugcggcaccuccggcaccuacggcaccggcuccuggcccgacggcgccgacaucaaccucaugcccaucuga

SEQ ID NO: 111525 - RNA, 1410 nt, Artificial Sequence; identical to SEQ ID NO: 110766
  derived and/or modified CDS sequence (opt2) from neuraminidase__InfluenzaA__ABI93075

SEQ ID NO: 111526 - RNA, 1410 nt, Artificial Sequence; identical to SEQ ID NO: 110766
  derived and/or modified CDS sequence (opt2) from neuraminidase__InfluenzaA__ABI93086

SEQ ID NO: 111527 - RNA, 1410 nt, Artificial Sequence; identical to SEQ ID NO: 110766
  derived and/or modified CDS sequence (opt2) from neuraminidase__InfluenzaA__ABI93097

SEQ ID NO: 111528 - RNA, 1410 nt, Artificial Sequence
  derived and/or modified CDS sequence (opt2) from neuraminidase__InfluenzaA__ABI93108
augaaccccaaccagaagaucaucaccaucggcuccgucucccucaccaucgccaccaucugcuuccucaugcagaucgccauccucgucaccaccgucacccuccacuucaagcaguacgagugcaacuccccccccaacaaccaggucaugcucugcgagcccaccaucaucgagcgcaacaucaccgagaucgucuaccucaccaacaccaccaucgagaaggagaucugccccaagcucgccgaguaccgcaacugguccaagccccagugcaacaucaccggcuucgcccccuucuccaaggacaacuccauccgccucuccgccggcggcgacaucugggucacccgcgagcccuacgucuccugcgaccccgacaagugcuaccaguucgcccucggccagggcaccacccucaacaacggccacuccaacgacaccguccacgaccgcacccccuaccgcacccuccucaugaacgagcucggcguccccuuccaccucggcaccaagcaggucugcaucgccugguccuccuccuccugccacgacggcaaggccuggcuccacgucugcgucaccggcgacgacgagaacgccaccgccuccuucaucuacaacggccgccucgucgacuccaucggcuccugguccaagaagauccuccgcacccaggaguccgagugcgucugcaucaacggcaccugcaccgucgucaugaccgacggcuccgccuccggcaaggccgacaccaagauccucuucaucgaggagggcaagaucguccacaccuccucccucuccggcuccgcccagcacgucgaggagugcuccugcuacccccgcuaccccggcguccgcugcgucugccgcgacaacuggaagggcuccaaccgccccaucgucgacaucaacgucaacgacuacuccaucgucuccuccuacgucugcuccggccucgucggcgacaccccccgcaagaacgacuccuccuccuccucccacugccucgaccccaacaacgaggagggcggccacggcgucaagggcugggccuucgacgacggcaacgacgucuggaugggccgcaccaucuccgagaagcuccgcuccggcuacgagaccuucaaggucaucgagggcugguccaagcccaacuccaagcuccagaucaaccgccaggucaucgucgaccgcggcaaccgcuccggcuacuccggcaucuucuccgucgaguccaaguccugcaucaaccgcugcuucuacgucgagcucauccgcggccgcaagcaggagaccgagguccucuggaccuccaacuccaucgucgucuucugcggcaccuccggcaccuacggcaccggcuccuggcccgacggcgccgacaucaaccucaugcccaucuga

SEQ ID NO: 111529 - RNA, 1410 nt, Artificial Sequence
  derived and/or modified CDS sequence (opt2) from neuraminidase__InfluenzaA__ABI93119
augaaccccaaccagaagaucaucaccaucggcuccgucucccucaccaucgccaccaucugcuuccucaugcagaucgccauccucgucaccaccgucacccuccacuucaagcaguacgagugcaacuccccccccaacaaccaggucaugcucugcgagcccaccaucaucgagcgcaacaucaccgagaucgucuaccucaccaacaccaccaucgagaaggagaucugccccaagcucgccgaguaccgcaacugguccaagccccagugcaacaucaccggcuucgcccccuucuccaaggacaacuccauccgccucuccgccggcggcgacaucugggucacccgcgagcccuacgucuccugcgaccccgacaagugcuaccaguucgcccucggccagggcaccacccucaacaacggccacuccaacgacaccguccacgaccgcacccccuaccgcacccuccucaugaacgagcucggcguccccuuccaccucggcaccaagcaggucugcaucgccugguccuccuccuccugccacgacggcaaggccuggcuccacgucugcgucaccggcgacgacgagaacgccaccgccuccuucaucuacaacggccgccucgucgacuccaucggcuccugguccaagaagauccuccgcacccaggaguccgagugcgucugcaucaacggcaccugcaccgucgucaugaccgacggcuccgccuccggcaaggccgacaccaagauccucuucaucgaggagggcaagaucguccacaccuccucccucuccggcuccgcccagcacgucgaggagugcuccugcuacccccgcuaccccggcguccgcugcgucugccgcgacaacuggaagggcuccaaccgccccaucgucgacaucaacgucaaggacuacuccaucgucuccuccuacgucugcuccggccucgucggcgacaccccccgcaagaacgacaacuccuccuccucccacugccucgaccccaacaacgaggagggcggccacggcgucaagggcugggccuucgacgacggcaacgacgucuggaugggccgcaccaucuccgagaagcuccgcuccggcuacgagaccuucaaggucaucgagggcugguccaagcccaacuccaagcuccagaucaaccgccaggucaucgucgaccgcuccaaccgcuccggcuacuccggcaucuucuccgucgaguccaaguccugcaucaaccgcugcuucuacgucgagcucauccgcggccgcaagcaggagaccgagguccucuggaccuccaacuccaucgucgucuucugcggcaccuccggcaccuacggcaccggcuccuggcccgacggcgccgacaucaaccucaugcccaucuga

SEQ ID NO: 111530 - RNA, 1416 nt, Artificial Sequence
  derived and/or modified CDS sequence (opt2) from neuraminidase__InfluenzaA__ABI94584
augaaccccaaccagaagcucuucgcccucuccggcgucgccaucgcccucuccguccucaaccuccucaucggcaucuccaacgucggccucaacgucucccuccaccucaaggagaagggccccaagcaggaggagaaccucaccugcaccaccaucaaccagaacaacaccaccgucgucgagaacaccuacgucaacaacaccaccaucaucaccaagggcaccgaccucaagacccccuccuaccuccuccucaacaagucccucugcaacgucgagggcugggucgucaucgccaaggacaacgccguccgcuucggcgaguccgagcagaucaucgucacccgcgagcccuacgucuccugcgaccccaccggcugcaagauguacgcccuccaccagggcaccaccauccgcaacaagcacuccaacggcaccauccacgaccgcaccgccuuccgcggccucaucuccaccccccucggcaccccccccaccgucuccaacuccgacuucaugugcgucggcugguccuccaccaccugccacgacggcaucgcccgcaugaccaucugcauccagggcaacaacgacaacgccaccgccaccgucuacuacaaccgccgccucaccaccaccaucaagaccugggcccgcaacauccuccgcacccaggaguccgagugcgucugccacaacggcaccugcgccgucgucaugaccgacggcuccgccuccucccaggccuacaccaaggucauguacuuccacaagggccucgucgucaaggaggaggagcuccgcggcuccgcccgccacaucgaggagugcuccugcuacggccacaaccagaaggucaccugcgucugccgcgacaacuggcagggcgccaaccgccccaucaucgagaucgacauguccacccucgagcacaccucccgcuacgucugcaccggcauccucaccgacaccucccgccccggcgacaaguccuccggcgacugcuccaaccccaucaccggcucccccggcguccccggcgucaagggcuucggcuuccucaacggcgacaacaccuggcucggccgcaccaucuccccccgcucccgcuccggcuucgagaugcucaagauccccaacgccggcaccgaccccaacucccgcaucgccgagcgccaggagaucgucgacaacaacaacugguccggcuacuccggcuccuucaucgacuacuggaacgacaacuccgagugcuacaaccccugcuucuacgucgagcucauccgcggccgccccgaggaggccaaguacgucuggugggccuccaacucccucaucgcccucugcggcucccccuuccccgucggcuccggcuccuuccccgacggcgcccagauccaguacuucuccuga

SEQ ID NO: 111531 - RNA, 1413 nt, Artificial Sequence; identical to SEQ ID NO: 110864
  derived and/or modified CDS sequence (opt2) from neuraminidase__InfluenzaA__ABI95220

SEQ ID NO: 111532 - RNA, 1410 nt, Artificial Sequence
  derived and/or modified CDS sequence (opt2) from neuraminidase__InfluenzaA__ABI95242
augaaccccaaccagaagaucaucaccaucggcuccgucucccucaccaucuccaccaucugcuucuucaugcagaucgccauccucaucaccaccgucacccuccacuucaagcaguacgaguucaacuccccccccaacaaccaggucaugcucugcgagcccaccaucaucgagcgcaacaucaccgagaucgucuaccucaccaacaccaccaucgagaaggagaucugccccaagcucgccgaguaccgcaacugguccaagccccagugcgacaucaccggcuucgcccccuucuccaaggacaacuccauccgccucuccgccggcggcgacaucugggucacccgcgagcccuacgucuccugcgaccccgacaagugcuaccaguucgcccucggccagggcaccacccucaacaacguccacuccaacgacaccguccacggccgcacccccuaccgcacccuccucaugaacgagcucggcguccccuuccaccucggcaccaagcaggucugcaucgccugguccuccuccuccugccacgacggcaaggccuggcuccacgucugcgucaccggcgacgacaagaacgccaccgccuccuucaucuacaacggccgccucgucgacuccaucgucuccugguccaaggagauccuccgcacccaggaguccgagugcgucugcaucaacggcaccugcaccgucgucaugaccgacggcuccgccuccggcgaggccgacaccaagauccucuucaucgaggagggcaagaucguccacaccuccacccucuccggcuccgcccagcacgucgaggagugcuccugcuacccccgcuaccccggcguccgcugcgucugccgcgacaacuggaagggcuccaaccgccccaucgucgacaucaacaucaaggacuacuccaucgucuccuccuacgucugcuccggccucgucggcgacaccccccgcaagaacgacuccuccuccuccucccacugccucgaccccaacaacgaggagggcggccacggcgucaagggcugggccuucgacgacggcaacgacgucuggaugggccgcaccaucuccgagaagcuccgcuccggcuacgagaccuucaaggucaucgagggcugguccaaccccaacuccaagcuccagaucaaccgccaggucaucgucgaccgcggcaaccgcuccggcuacuccggcaucuucuccgucgagggcaaguccugcaucaaccgcugcuucuacgucgagcucauccgcggccgcaaggaggagaccgagguccucuggaccuccaacuccaucgucgucuucugcggcaccuccggcaccuacggcaccggcuccuggcccgacggcgccgacaucaaccucaugcccaucuga

SEQ ID NO: 111533 - RNA, 1413 nt, Artificial Sequence
  derived and/or modified CDS sequence (opt2) from neuraminidase__InfluenzaA__ABI95253
augaaccccaaccagaagaucaucaccaucggcuccaucuccaucgccaucggcaucaucuccaucaugcuccagaucggcaacaucaucuccaucugggccucccacuccauccagaccggcucccagaaccacaccggcaucugcaaccagcgcaucaucaccuacgagaacuccaccugggucaaccacaccuacgucaacaucaacaacaccaacgucgucgccggcaaggacaagaccuccgucacccucgccggcaacuccucccucugcuccaucuccggcugggccaucuacaccaaggacaacuccauccgcaucggcuccaagggcgacgucuucgucauccgcgagcccuucaucuccugcucccaccucgagugccgcaccuucuuccucacccagggcgcccuccucaacgacaagcacuccaacggcaccgucaaggaccgcucccccuaccgcgcccucauguccugcccccucggcgaggcccccucccccuacaacuccaaguucgaguccgucgccugguccgccuccgccugccacgacggcaugggcuggcucaccaucggcaucuccggccccgacaacggcgccgucgccguccucaaguacaacggcaucaucaccgagaccaucaaguccuggaagaagcgcauccuccgcacccaggaguccgagugcgucugcgucaacggcuccugcuucaccaucaugaccgacggccccuccgacggcgccgccuccuacaagaucuucaagaucgagaagggcaaggucaccaaguccaucgagcucaacgcccccaacucccacuacgaggagugcuccugcuaccccgacaccggcaccgucaugugcgucugccgcgacaacuggcacggcuccaaccgccccugggucuccuucaaccagaaccucgacuaccagaucggcuacaucugcuccggcgucuucggcgacaacccccgccccaaggacggcgagggcuccugcaaccccgucaccgucgacggcgccgacggcgucaagggcuucuccuacaaguacggcaacggcgucuggaucggccgcaccaaguccaaccgccuccgcaagggcuucgagaugaucugggaccccaacggcuggaccgacaccgacuccgacuucuccgucaagcaggacgucgucgccaucaccgacugguccggcuacuccggcuccuucguccagcaccccgagcucaccggccucgacugcauccgccccugcuucugggucgagcucguccgcggccgcccccgcgagaacaccaccaucuggaccuccggcuccuccaucuccuucugcggcgucaacuccgacaccgccaacugguccuggcccgacggcgccgagcuccccuucaccaucgacaaguga

SEQ ID NO: 111534 - RNA, 1413 nt, Artificial Sequence; identical to SEQ ID NO: 111392
  derived and/or modified CDS sequence (opt2) from neuraminidase__InfluenzaA__ABI95264

SEQ ID NO: 111535 - RNA, 1413 nt, Artificial Sequence; identical to SEQ ID NO: 111392
  derived and/or modified CDS sequence (opt2) from neuraminidase__InfluenzaA__ABI95275

SEQ ID NO: 111536 - RNA, 1413 nt, Artificial Sequence; identical to SEQ ID NO: 111392
  derived and/or modified CDS sequence (opt2) from neuraminidase__InfluenzaA__ABI95286

SEQ ID NO: 111537 - RNA, 1413 nt, Artificial Sequence
  derived and/or modified CDS sequence (opt2) from neuraminidase__InfluenzaA__ABI95297
augaaccccaaccagaagaucaucaccaucggcuccaucuccaucgccaucggcaucaucucccucaugcuccagaucggcaacaucaucuccaucugggccucccacuccauccagaccggcucccagaaccacaccggcgucugcaaccagcgcaucaucaccuacgagaacuccaccugggucaaccacaccuacgucaacaucaacaacaccaacgucaucgccggcaaggacaagaccuccgucacccucgccggcaacuccucccucugcuccaucuccggcugggccaucuacaccaaggacaacuccauccgcaucggcuccaagggcgacgucuucgucauccgcgagcccuucaucuccugcucccaccucgagugccgcaccuucuuccucacccagggcgcccuccucaacgacaagcacuccaacggcaccgucaagaaccgcucccccuaccgcgcccucauguccugcccccucggcgaggcccccucccccuacaacuccaaguucgaguccgucgccugguccgccuccgccugccacgacggcaugggcuggcucaccaucggcaucuccggccccgacaacggcgccgucgccguccucaaguacaacggcaucaucaccgagaccaucaaguccuggaagaagcagauccuccgcacccaggaguccgagugcgucugcgucaacggcuccugcuucaccaucaugaccgacggccccuccaacggcgccgccuccuacaagaucuucaagaucgagaagggcaaggucaccaaguccaucgagcucaacgcccccaacuuccacuacgaggagugcuccugcuaccccgacaccggcaccgucaugugcgucugccgcgacaacuggcacggcuccaaccgccccugggucuccuucaaccagaaccucgacuaccagaucggcuacaucugcuccggcgucuucggcgacaacccccgccccaaggacggcgagggcuccugcaaccccgucaccgucgacggcgccaacggcgucaagggcuucuccuacaaguacggcaacggcgucuggaucggccgcaccaaguccaaccgccuccgcaagggcuucgagaugaucugggaccccaacggcuggaccgacaccgacuccgacuucuccgucaagcaggacgucgucgccaucaccgacugguccggcuacuccggcuccuucguccagcaccccgagcucaccggccucgacugcauccgccccugcuucugggucgagcucguccgcggccuccccaaggagaacaccaccaucuggaccuccggcuccuccaucuccuucugcggcgucaacuccgacaccgccaacugguccuggcccgacggcgccgagcuccccuucaccaucgacaaguga

SEQ ID NO: 111538 - RNA, 1410 nt, Artificial Sequence; identical to SEQ ID NO: 110766
  derived and/or modified CDS sequence (opt2) from neuraminidase__InfluenzaA__ABI95308

SEQ ID NO: 111539 - RNA, 1413 nt, Artificial Sequence; identical to SEQ ID NO: 110422
  derived and/or modified CDS sequence (opt2) from neuraminidase__InfluenzaA__ABI96131

SEQ ID NO: 111540 - RNA, 1413 nt, Artificial Sequence; identical to SEQ ID NO: 110422
  derived and/or modified CDS sequence (opt2) from neuraminidase__InfluenzaA__ABI96133

SEQ ID NO: 111541 - RNA, 1413 nt, Artificial Sequence; identical to SEQ ID NO: 110422
  derived and/or modified CDS sequence (opt2) from neuraminidase__InfluenzaA__ABI96136

SEQ ID NO: 111542 - RNA, 1410 nt, Artificial Sequence
  derived and/or modified CDS sequence (opt2) from neuraminidase__InfluenzaA__ABJ09110
augaaccccaaccagaagaucaucaccaucggcuccgucucccucaccaucgccaccaucugcuuccucaugcagaucgccauccucgucaccaccgucacccuccacuucaagcaguacgagugcaacuccccccccaacaaccaggucaugcucugcgagcccaccaucaucgagcgcaacaucaccgagaucgucuaccucaccaacaccaccaucgagaaggagaucugccccaagcucgccgaguaccgcaacugguccaagccccagugcaacaucaccggcuucgcccccuucuccaaggacaacuccauccgccucuccgccggcggcgacaucugggucacccgcgagcccuacgucuccugcgaccccgacaagugcuaccaguucgcccucggccagggcaccacccucaacaacggccacuccaacgacaccguccacgaccgcacccccuaccgcacccuccucaugaacgagcucggcguccccuuccaccucggcaccaagcaggucugcaucgccugguccuccuccuccugccacgacggcaaggccuggcuccacgucugcgucaccggcgacgacgagaacgccaccgccuccuucaucuacaacggccgccucgucgacuccaucggcuccugguccaagaagauccuccgcacccaggaguccgagugcgucugcaucaacggcaccugcaccgucgucaugaccgacggcuccgccuccggcaaggccgacaccaagauccucuucaucgaggagggcaagaucauccacaccuccucccucuccggcuccgcccagcacgucgaggagugcuccugcuacccccgcuaccccggcguccgcugcgucugccgcgacaacuggaagggcuccaaccgccccaucgucgacaucaacgucaaggacuacuccaucgucuccuccuacgucugcuccggccucgucggcgacaccccccgcaagaacgacuccuccuccuccucccacugccucgaccccaacaacgaggagggcggccacggcgucaagggcugggccuucgacgacggcaacgacgucuggaugggccgcaccaucuccgagaagcuccgcuccggcuacgagaccuucaaggucaucgagggcugguccaagcccaacuccaagcuccagaucaaccgccaggucaucgucgaccgcggcaaccgcuccggcuacuccggcaucuucuccgucgaguccaaguccugcaucaaccgcugcuucuacgucgagcucauccgcggccgcaagcaggagaccgagguccucuggaccuccaacuccaucgucgucuucugcggcaccuccggcaccuacggcaccggcuccuggcccgacggcgccgacaucaaccucaugcccaucuga

SEQ ID NO: 111543 - RNA, 1410 nt, Artificial Sequence; identical to SEQ ID NO: 111137
  derived and/or modified CDS sequence (opt2) from neuraminidase__InfluenzaA__ABJ09143

SEQ ID NO: 111544 - RNA, 1413 nt, Artificial Sequence; identical to SEQ ID NO: 110961
  derived and/or modified CDS sequence (opt2) from neuraminidase__InfluenzaA__ABJ09154

SEQ ID NO: 111545 - RNA, 1410 nt, Artificial Sequence; identical to SEQ ID NO: 110363
  derived and/or modified CDS sequence (opt2) from neuraminidase__InfluenzaA__ABJ09165

SEQ ID NO: 111546 - RNA, 1410 nt, Artificial Sequence; identical to SEQ ID NO: 110363
  derived and/or modified CDS sequence (opt2) from neuraminidase__InfluenzaA__ABJ09176

SEQ ID NO: 111547 - RNA, 1410 nt, Artificial Sequence; identical to SEQ ID NO: 110750
  derived and/or modified CDS sequence (opt2) from neuraminidase__InfluenzaA__ABJ09198

SEQ ID NO: 111548 - RNA, 1410 nt, Artificial Sequence; identical to SEQ ID NO: 110750
  derived and/or modified CDS sequence (opt2) from neuraminidase__InfluenzaA__ABJ09209

SEQ ID NO: 111549 - RNA, 1410 nt, Artificial Sequence
  derived and/or modified CDS sequence (opt2) from neuraminidase__InfluenzaA__ABJ09220
augaaccccaaccagaagaucaucaccaucggcuccgucucccucaccaucgccaccaucugcuuccucaugcagaucgccauccucgucaccaccgucacccuccacuucaagcaguacgagugcaacuccccccccaacaaccaggucaugcucugcgagcccaccaucaucgagcgcaacaucaccgagaucgucuaccucaccaacaccaccaucgagaaggagaucugccccaagcucgccaaguaccgcaacugguccaagccccagugcaagaucaccggcuucgcccccuucuccaaggacaacuccauccgccucuccgccggcggcgacaucugggucacccgcgagcccuacgucuccugcgaccccggcaagugcuaccaguucgcccucggccgcggcaccacccucaacaaccgccacuccaacgacaccguccacgaccgcacccccuaccgcacccuccucaugaacgagcucggcguccccuuccaccucggcaccaagcaggucugcaucgccugguccuccuccuccugccacgacggcaaggccuggcuccacgucugcgucaccggccacgacgagaacgccaccgccuccuucaucuacgacggccgccucgucgacuccaucggcuccugguccaagaacauccuccgcacccaggaguccgagugcgucugcaucaacggcaccugcaccgucgucaugaccgacggcuccgccuccgagcgcgccgacaccaagauccucuucaucgaggagggcaagaucguccacaucuccccccucuccggcuccgcccagcacgucgaggagugcuccugcuacccccgcuaccccggcguccgcugcgucugccgcgacaacuggaagggcuccaaccgccccaucgucgacaucaacgucaaggacuacuccaucgucuccuccuacgucugcuccggccucgucggcgacaccccccgcaagaacgacuccuccuccuccuccuacugccgcaaccccaacaacgagaagggcucccacggcgucaagggcugggccuucgacgacggcaacgacgucuggaugggccgcaccaucuccgaggagcuccgcuccggcuacgagaccuucaaggucaucggcggcugguccaagcccaacuccaagcuccagaucaaccgccaggucaucgucgaccgcggcaaccgcuccggcuacuccggcaucuucuccgucgagggcaaguccugcaucaaccgcugcuucuacgucgagcucauccgcggccgcaagcaggagaccgaggucugguggaccuccaacuccaucgucgucuucugcggcaccuccggcaccuacggcaccggcuccuggcccgacggcgccgacaucaaccucaugcccaucuga

SEQ ID NO: 111550 - RNA, 1410 nt, Artificial Sequence; identical to SEQ ID NO: 110766
  derived and/or modified CDS sequence (opt2) from neuraminidase__InfluenzaA__ABJ09231

SEQ ID NO: 111551 - RNA, 1410 nt, Artificial Sequence; identical to SEQ ID NO: 110766
  derived and/or modified CDS sequence (opt2) from neuraminidase__InfluenzaA__ABJ09242

SEQ ID NO: 111552 - RNA, 1410 nt, Artificial Sequence; identical to SEQ ID NO: 110320
  derived and/or modified CDS sequence (opt2) from neuraminidase__InfluenzaA__ABJ09253

SEQ ID NO: 111553 - RNA, 1410 nt, Artificial Sequence
  derived and/or modified CDS sequence (opt2) from neuraminidase__InfluenzaA__ABJ09264
augaaccccaaccagaagaucaucaccaucggcuccgucucccucaccaucgccaccaucugcuuccucaugcagaucgccauccucgucaccaccgucacccuccacuucaagcaguacgagugcaacuccccccccaacaaccaggucaugcucugcgagcccaccaucaucgagcgcaacaucaccgagaucgucuacaugaccaacaccaccaucgagaaggagaucugccccaagcucgccgaguaccgcaacugguccaagccccagugcaacaucaccggcuucgcccccuucuccaaggacaacuccauccgccucuccgccggcggcgacaucugggucacccgcgagcccuacgucuccugcgaccccgacaagugcuaccaguucgcccucggccagggcaccacccucaacaaccgccacuccaacgacaccguccacgaccgcacccccuaccgcacccuccucaugaacgagcucggcguccccuuccaccucggcaccaagcaggucugcaucgccugguccuccuccuccugccacgacggcaaggccuggcuccacgucugcgucaccggccacgacgagaacgccaccgccuccuucaucuacaacggccgccucgucgacuccaucggcuccugguccaagaagauccuccgcacccaggaguccgagugcgucugcaucaacggcaccugcaccgucgucaugaccgacggcuccgccuccggcaaggccgacaccaagauccucuucaucgaggagggcaagaucguccacaucuccccccucuccggcuccgcccagcacgucgaggagugcuccugcuacccccgcuaccccggcguccgcugcgucugccgcgacaacuggaagggcuccaaccgccccaucgucgacaucaacgucaaggacuacuccaucgucuccuccuacgucugcuccggccucgucggcgacaccccccgcaagaacgacuccuccuccuccucccacugccucaaccccaacaacgaggagggcggccacggcgucaagggcugggccuucgacgacggcaacgacgucuggaugggccgcaccaucuccgagaagcuccgcuccggcuacgagaccuucaaggucaucgagggcugguccaagcccaacuccaagcuccagaucaaccgccaggucaucgucgaccgcggcaacuccuccggcuacuccggcaucuucuccgucgagggcaaguccugcaucaaccgcugcuucuacgucgagcucauccgcggccgcaagcaggagaccgaggucugguggaccuccaacuccaucgucguccucugcggcaccuccggcaccuacggcaccggcuccuggcccgacggcgccgacaucaaccucaugcccaucuga

SEQ ID NO: 111554 - RNA, 1410 nt, Artificial Sequence
  derived and/or modified CDS sequence (opt2) from neuraminidase__InfluenzaA__ABJ09286
augaaccccaaccagaagaucaucaccaucggcuccgucucccucaccaucgccaccaucugcuuccucaugcagaucgccauccucgucaccaccgucacccuccacuucaagcaguacgagugcaacuccccccccaacaaccaggucaugcucugcgagcccaccaucaucgagcgcaacaucaccgagaucgucuaccucaccaacaccaccaucgagaaggagaucugccccaagcucgccgaguaccgcaacugguccaagccccagugcaacaucaccggcuucgcccccuucuccaaggacaacuccauccgccucuccgccggcggcgacaucugggucacccgcgagcccuacgucuccugcgaccccgacaagugcuaccaguucgcccucggccagggcaccacccucaacaacggccacuccaacgacaccguccacgaccgcacccccuaccgcacccuccucaugaacgagcucggcguccccuuccaccucggcaccaagcaggucugcaucgccugguccuccuccuccugccacgacggcaaggccuggcuccacgucugcgucaccggcgacgacgagaacgccaccgccuccuucaucuacaacggccgccucgucgacuccaucggcuccugguccaagaagauccuccgcacccaggaguccgagugcgucugcaucaacggcaccugcaccgucgucaugaccgacggcuccgccuccggcaaggccgacaccaagauccucuucaucgaggagggcaagaucguccacaccuccccccucuccggcuccgcccagcacgucgaggagugcuccugcuacccccgcuaccccggcguccgcugcgucugccgcgacaacuggaagggcuccaaccgccccaucgucgacaucaacgucaaggacuacuccaucgucuccuccuacgucugcuccggccucgucggcgacaccccccgcaagaacgacuccuccuccuccucccacugccucgaccccaacaacgaggagggcggccacggcgucaagggcugggccuucgacgacggcaacgacgucuggaugggccgcaccaucuccgagaagcuccgcuccggcuacgagaccuucaaggucaucgagggcugguccaagcccaacuccaagcuccagaucaacaagcaggucaucgucgaccgcggcaaccgcuccggcuacuccggcaucuucuccgucgagggcaaguccugcaucaaccgcugcuucuacgucgagcucauccgcggccgcaagcaggagaccgagguccucuggaccuccaacuccaucgucgucuucugcggcaccuccggcaccuacggcaccggcuccuggcccgacggcgccgacaucaaccucaugcccaucuga

SEQ ID NO: 111555 - RNA, 1410 nt, Artificial Sequence; identical to SEQ ID NO: 110320
  derived and/or modified CDS sequence (opt2) from neuraminidase__InfluenzaA__ABJ09308

SEQ ID NO: 111556 - RNA, 1410 nt, Artificial Sequence; identical to SEQ ID NO: 111524
  derived and/or modified CDS sequence (opt2) from neuraminidase__InfluenzaA__ABJ09319

SEQ ID NO: 111557 - RNA, 1413 nt, Artificial Sequence; identical to SEQ ID NO: 110989
  derived and/or modified CDS sequence (opt2) from neuraminidase__InfluenzaA__ABJ09330

SEQ ID NO: 111558 - RNA, 1410 nt, Artificial Sequence
  derived and/or modified CDS sequence (opt2) from neuraminidase__InfluenzaA__ABJ09341
augaaccccaaccagaagaucaucaccaucggcuccgucucccucaccaucgccaccaucugcuuccucaugcagaucgccauccucgucaccaccgucacccuccacuucaagcaguacgagugcaacuccccccccaacaaccaggucaugcucugcgagcccaccaucaucgagcgcaacaucaccgagaucgucuaccucaccaacaccaccaucgagaaggagaucugccccaagcucgccgaguaccgcaacugguccaagccccagugcaacaucaccggcuucgcccccuucuccaaggacaacuccauccgccucuccgccggcggcgacaucugggucacccgcgagcccuacgucuccugcgaccccgacaagugcuaccaguucgcccucggccagggcaccacccucaacaacggccacuccaacgacaccguccacgaccgcacccccuaccgcacccuccucaugaacgagcucggcguccccuuccaccucggcaccaagcaggucugcaucgccugguccuccuccuccugccacgacggcaaggccuggcuccacgucugcgucaccggcgacgacgagaacgccaccgccuccuucaucuacaacggccgccucgucgacuccaucggcuccugguccaagaagauccuccgcacccaggaguccgagugcgucugcaucaacggcaccugcaccgucgucaugaccgacggcuccgccuccggcaaggccgacaccaagauccucuucaucgaggagggcaagaucguccacaccuccucccuccucggcuccgcccagcacgucgaggagugcuccugcuacccccgcuaccccggcguccgcugcgucugccgcgacaacuggaagggcuccaaccgccccaucgucgacaucaacgucaaggacuacuccaucgucuccuccuacgucugcuccggccucgucggcgacaccccccgcaagaacgacuccuccuccuccucccacugccucgaccccaacaacgaggagggcggccacggcgucaagggcugggccuucgacgacggcaacgacgucuggaugggccgcaccaucuccgagaagcuccgcuccggcuacgagaccuucaaggucaucgagggcugguccaagcccaacuccaagcuccagaucaaccgccaggucaucgucgaccgcggcaaccgcuccggcuacuccggcaucuucuccgucgaguccaaguccugcaucaaccgcugcuucuacgucgagcucauccgcggccgcaagcaggagaccgagguccucuggaccuccaacuccaucgucgucuucugcggcaccuccggcaccuacggcaccggcuccuggcccgacggcgccgacaucaaccucaugcccaucuga

SEQ ID NO: 111559 - RNA, 1410 nt, Artificial Sequence
  derived and/or modified CDS sequence (opt2) from neuraminidase__InfluenzaA__ABJ09352
augaaccccaaccagaagaucaucaccaucggcuccgucucccucaccaucgccaccaucugcuuccucaugcagaucgccauccucgucaccaccgucacccuccacuucaagcaguacgagugcaacuccccccccaacaaccaggucaugcucugcgagcccaccaucaucgagcgcaacaucaccgagaucgucuaccucaccaacaccaccaucgagaaggagaucugccccaagcucgccgaguaccgcaacugguccaagccccagugcaacaucaccggcuucgcccccuucuccaaggacaacuccauccgccucuccgccggcggcgacaucugggucacccgcgagcccuacgucuccugcgaccccgacaagugcuaccaguucgcccucggccagggcaccacccucaacaacggccacuccaacgacaccguccacggccgcacccccuaccgcacccuccucaugaacgagcucggcguccccuuccaccucggcaccaagcaggucugcaucgccugguccuccuccuccugccacgacggcaaggccuggcuccacgucugcgucaccggcgacgacgagaacgccaccgccuccuucaucuacaacggccgccucgucgacuccaucggcuccugguccaagaagauccuccgcacccaggaguccgagugcgucugcaucaacggcaccugcaccgucgucaugaccgacggcuccgccuccggcaaggccgacaccaagauccucuucaucgaggagggcaagaucguccacaccuccucccucuccggcuccgcccagcacgucgaggagugcuccugcuacccccgcuaccccggcguccgcugcgucugccgcgacaacuggaagggcuccaaccgccccaucgucgacaucaacgucaaggacuacuccaucgucuccuccuacgucugcuccggccucgucggcgacaccccccgcaagaacgacuccuccuccuccucccacugccucgaccccaacaacgaggagggcggccacggcgucaagggcugggccuucgacgacggcaacgacgucuggaugggccgcaccaucuccgagaagcuccgcuccggcuacgagaccuucaaggucaucgagggcugguccaagcccaacuccaagcuccagaucaaccgccaggucaucgucgaccgcggcaaccgcuccggcuacuccggcaucuucuccgucgaguccaaguccugcaucaaccgcugcuucuacgucgagcucauccgcggccgcaagcaggagaccgagguccucuggaccuccaacuccaucgucgucuucugcggcaccuccggcaccuacggcaccggcuccuggcccgacggcgccgacaucaaccucaugcccaucuga

SEQ ID NO: 111560 - RNA, 1407 nt, Artificial Sequence
  derived and/or modified CDS sequence (opt2) from neuraminidase__InfluenzaA__ABJ09374
augauccaguccaagaucaucaccaucggcuccgucucccucaccaucuccaccaucugcuucuucaugcagaucgccauccucaucaccaccgucacccuccacuucaagcaguacgaguucaacuccccccccaacaaccaggucaugcucugcgagcccaccaucaucgagcgcaacaucaccgagaucgucuaccucaccaacaccaccaucgagaaggagaucugccccaagcucgccgaguaccgcaacugguccaagccccagugcgacaucaccggcuucgcccccuucuccaaggacaacuccauccgccucuccgccggcggcgacaucugggucacccgcgagcccuacgucuccugcgaccccgacaagugcuaccaguucgcccucggccagggcaccacccucaacaacguccacuccaacgacaccguccacgaccgcacccccuaccgcacccuccucaugaacgagcucggcguccccuuccaccucggcaccaagcaggucugcaucgccugguccuccuccuccugccacgacggcaaggccuggcuccacgucugcgucaccggcgacgacaagaacgccaccgccuccuucaucuacaacggccgccucgucgacuccaucgucuccugguccaagaagauccuccgcacccaggaguccgagugcgucugcaucaacggcaccugcaccgucgucaugaccgacggcuccgccuccggcaaggccgacaccaagauccucuucaucgaggagggcaagaucguccacaccuccacccucuccggcuccgcccagcacgucgaggagugcuccugcuacccccgcuaccccggcguccgcugcgucugccgcgacaacuggaagggcuccaaccgccccaucgucgacaucaacaucaaggacuacuccaucgucuccuccuacgucugcuccggccucgucggcgacaccccccgcaagaacgacuccuccuccuccucccacugccucgaccccaacaacgaggagggcggccacggcgucaagggcugggccuucgacgacggcaacgacgucuggaugggccgcaccaucuccgagaagcuccgcuccggcuacgagaccuucaaggucaucgagggcugguccaaccccaacuccaagcuccagaucaaccgccaggucaucgucgaccgcggcaaccgcuccggcuacuccggcaucuucuccgucgagggcaaguccugcaucaaccgcugcuucuacgucgagcucauccgcggcaagaaggaggagaccgagguccucuggaccuccaacuccaucgucgucuucugcggcaccuccggcaccuacggcaccggcuccuggcccgacggcgccgacaucaaccucaugcccaucuga

SEQ ID NO: 111561 - RNA, 1410 nt, Artificial Sequence; identical to SEQ ID NO: 110750
  derived and/or modified CDS sequence (opt2) from neuraminidase__InfluenzaA__ABJ09385

SEQ ID NO: 111562 - RNA, 1410 nt, Artificial Sequence; identical to SEQ ID NO: 110289
  derived and/or modified CDS sequence (opt2) from neuraminidase__InfluenzaA__ABJ16590

SEQ ID NO: 111563 - RNA, 1410 nt, Artificial Sequence; identical to SEQ ID NO: 111554
  derived and/or modified CDS sequence (opt2) from neuraminidase__InfluenzaA__ABJ16601

SEQ ID NO: 111564 - RNA, 1413 nt, Artificial Sequence
  derived and/or modified CDS sequence (opt2) from neuraminidase__InfluenzaA__ABJ16612
augaaccccaaccagaagaucaucaccaucggcuccaucuccaucgccaucggcaucaucucccucaugcuccagaucggcaacaucaucuccaucugggccucccacuccauccagaccggcucccagaaccacaccggcgucugcaaccagcgcaucaucaccuacgagaacuccaccugggucaaccacaccuacgucaacaucaacaacaccaacgucgucgccggcaaggacaagaccuccgucacccucgccggcaacuccucccucugcuccaucuccggcugggccaucuacaccaaggacaacuccauccgcaucggcuccaagggcgacgucuucgucauccgcgagcccuucaucuccugcucccaccucgagugccgcaccuucuuccucacccagggcgcccuccucaacgacaagcacuccaacggcaccgucaaggaccgcucccccuaccgcgcccucauguccugcccccucggcgaggcccccucccccuacaacuccaaguucgaguccgucgccugguccgccuccgccugccacgacggcaugggcuggcucaccgucggcaucuccggccccgacaacggcgccgucgccguccucaaguacaacggcaucaucaccgagaccaucaaguccuggaagaagcgcauccuccgcacccaggaguccgagugcgucugcgucaacggcuccugcuucaccaucaugaccgacggccccuccaacggcgccgccuccuacaagaucuucaagaucgagaagggcaaggucaccaaguccaucgagcucaacgcccccaacuuccacuacgaggagugcuccugcuaccccgacaccggcaccgucaugugcgucugccgcgacaacuggcacggcuccaaccgccccugggucuccuucaaccagaaccucgacuaccagaucggcuacaucugcuccggcgucuucggcgacaacccccgccccaaggacggcgagggcuccugcaaccccgucaccgucgacggcgccgacggcgucaagggcuucuccuacaaguacggcaacggcgucuggaucggccgcaccaaguccaaccgccuccgcaagggcuucgagaugaucugggaccccaacggcuggaccgacaccgacuccgacuucuccgucaagcaggacgucgucgccaucaccgacugguccggcuacuccggcuccuucguccagcaccccgagcucaccggccucgacugcauccgccccugcuucugggucgagcucguccgcggccucccccgcgagaacaccaccaucuggaccuccggcuccuccaucuccuucugcggcgucaacuccgacaccgccaacugguccuggcccgacggcgccgagcuccccuucaccaucgacaaguga

SEQ ID NO: 111565 - RNA, 1410 nt, Artificial Sequence; identical to SEQ ID NO: 111554
  derived and/or modified CDS sequence (opt2) from neuraminidase__InfluenzaA__ABJ16623

SEQ ID NO: 111566 - RNA, 1410 nt, Artificial Sequence
  derived and/or modified CDS sequence (opt2) from neuraminidase__InfluenzaA__ABJ16634
augaaccccaaccagaagaucaucaccaucggcuccgucucccucaccaucuccaccaucugcuucuucaugcagaucgccauccucaucaccaccgucacccuccacuucaagcaguacgaguucaacuccccccccaacaaccaggucaugcucugcgagcccaccaucaucgagcgcaacaucaccgagaucgucuaccucaccaacaucaccaucgagaaggagaucugccccaagcucgccgaguaccgcaacugguccaagccccagugcgacaucaccggcuucgcccccuucuccaaggacaacuccauccgccucuccgccggcggcgacaucugggucacccgcgagcccuacgucuccugcgaccccgacaagugcuaccaguucgcccucggccagggcaccacccucaacaacguccacuccaacgacaccguccacgaccgcacccccuaccgcacccuccucaugaacgagcucggcguccccuuccaccucggcaccaagcaggucugcaucgccugguccuccuccuccugccacgacggcaaggccuggcuccacgucugcgucaccggcgacgacaagaacgccaccgccuccuucaucuacaacggccgccucgucgacuccaucgucuccugguccaagaagauccuccgcacccaggaguccgagugcgucugcaucaacggcaccugcaccgucgucaugaccgacggcuccgccuccggcaaggccgacaccaagauccucuucaucgaggagggcaagaucguccacaccuccacccucuccggcuccgcccagcacgucgaggagugcuccugcuacccccgcuaccccggcguccgcugcgucugccgcgacaacuggaagggcuccaaccgccccaucgucgacaucaacaucaaggacuacuccaucgucuccuccuacgucugcuccggccucgucggcgacaccccccgcaagaacgacuccuccuccuccucccacugccucgaccccaacaacgaggagggcggccacggcgucaagggcugggccuucgacgacggcaacgacgucuggaugggccgcaccaucuccgagaagcuccgcuccggcuacgagaccuucaaggucaucgagggcugguccaaccccaacuccaagcuccagaucaaccgccaggucaucgucgaccgcggcaaccgcuccggcuacuccggcaucuucuccgucgagggcaaguccugcaucaaccgcugcuucuacgucgagcucauccgcggccgcaaggaggagaccgagguccucuggaccuccaacuccaucgucgucuucugcggcaccuccggcaccuacggcaccggcuccuggcccgacggcgccgacaucaaccucaugcccaucuga

SEQ ID NO: 111567 - RNA, 1413 nt, Artificial Sequence; identical to SEQ ID NO: 110422
  derived and/or modified CDS sequence (opt2) from neuraminidase__InfluenzaA__ABJ16656

SEQ ID NO: 111568 - RNA, 1413 nt, Artificial Sequence; identical to SEQ ID NO: 110422
  derived and/or modified CDS sequence (opt2) from neuraminidase__InfluenzaA__ABJ16667

SEQ ID NO: 111569 - RNA, 1413 nt, Artificial Sequence
  derived and/or modified CDS sequence (opt2) from neuraminidase__InfluenzaA__ABJ16678
augaaccccaaccagaagaucaucaccaucggcuccaucuccaucgccaucggcaucaucucccucaugcuccagaucggcaacaucaucuccaucugggccucccacuccauccagaccggcucccagaaccacaccggcaucugcaaccagcgcaucaucaccuacgagaacuccaccugggucaaccacaccuacgucaacaucaacaacaccaacgucgucgccggcaaggacaagaccuccgucacccucgccggcaacuccucccucugcuccaucuccggcugggccaucuacaccaaggacaacuccauccgcaucggcuccaagggcgacgucuucgucauccgcgagcccuucaucuccugcucccaccucgagugccgcaccuucuuccucacccagggcgcccuccucaacgacaagcacuccaacggcaccgucaaggaccgcucccccuaccgcgcccucauguccugcccccucggcgaggcccccucccccuacaacuccaaguucgaguccgucgccugguccgccuccgccugccacgacggcaugggcuggcucaccaucggcaucuccggccccgacaacggcgccgucgccguccucaaguacaacggcaucaucaccgagaccaucaaguccuggaagaagcgcauccuccgcacccaggaguccgagugcgucugcgucaacggcuccugcuucaccaucaugaccgacggccccuccaacggcgccgccuccuacaagaucuucaagaucgagaagggcaaggucaccaaguccaucgagcucaacgcccccaacuuccacuacgaggagugcuccugcuaccccgacaccggcaccgucaugugcgucugccgcgacaacuggcacggcuccaaccgccccugggucuccuucaaccagaaccucgacuaccagaucggcuacaucugcuccggcgucuucggcgacaacccccgccccaaggacggcaagggcuccugcaaccccgucaccgucgacggcgccgacggcgucaagggcuucuccuacaaguacggcaacggcgucuggaucggccgcaccaaguccaaccgccuccgcaagggcuucgagaugaucugggaccccaacggcuggaccgacaccgacuccgacuuccucgucaagcaggacgucgucgccaucaccgacugguccggcuacuccggcuccuucguccagcaccccgagcucaccggccucgacugcauccgccccugcuucugggucgagcucguccgcggccucccccgcgagaacaccaccaucuggaccuccggcuccuccaucuccuucugcggcgucgacuccgacaccgccaacugguccuggcccgacggcgccgagcuccccuucaccaucgacaaguga

SEQ ID NO: 111570 - RNA, 1413 nt, Artificial Sequence; identical to SEQ ID NO: 110422
  derived and/or modified CDS sequence (opt2) from neuraminidase__InfluenzaA__ABJ16689

SEQ ID NO: 111571 - RNA, 1410 nt, Artificial Sequence
  derived and/or modified CDS sequence (opt2) from neuraminidase__InfluenzaA__ABJ16700
augaaccccaaccagaagaucaucaccaucggcuccgucucccucaccaucgccaccaucugcuuccucaugcagaucgccauccucgucaccaccgucacccuccacuucaagcaguacgagugcaacuccccccccaacaaccaggucaugcucugcgagcccaccaucaucgagcgcaacaucaccgagaucgucuaccucaccaacaccaccaucgagaaggagaucugccccaagcucgccgaguaccgcaacugguccaagccccagugcaacaucaccggcuucgcccccuucuccaaggacaacuccauccgccucuccgccggcggcgacaucugggucacccgcgagcccuacgucuccugcgaccccgacaagugcuaccaguucgcccucggccagggcaccacccucaacaacggccacuccaacgacaccguccacgaccgcacccccuaccgcacccuccucaugaacgagcucggcguccccuuccaccucggcaccaagcaggucugcaucgccugguccuccuccuccugccacgacggcaaggccuggcuccacgucugcgucaccggcgacgacgagaacgccaccgccuccuucaucuacaacggccgccucgucgacuccaucggcuccugguccaagaagauccuccgcacccaggaguccgagugcgucugcaucaacggcaccugcaccgucgucaugaccgacggcuccgccuccggcaaggccgacaccaagauccucuucaucgaggagggcaagaucguccacaccuccucccucuccggcuccgcccagcacgucgaggagugcuccugcuacccccgcuaccccggcguccgcugcgucugccgcgacaacuggaagggcuccaaccgccccaucgucgacaucaacgucaaggacuacuccaucgucuccuccuacgucugcuccggccucgucggcgacaccccccgcaagaacgacuccuccuccuccucccacugccucgaccccaacaacgaggagggcggccacggcgucaagggcugggccuucgacgacggcaacgacgucuggaugggccgcaccaucuccgagaagcuccgcuccggcuacgagaccuucaaggucaucgagggcugguccaagcccaacuccaagcuccagaucaaccgccaggucaucgucgaccgcggcaaccgcuccggcuacuccggcaucuucuccgucgaguccaaguccugcaucaaccgcugcuucuacgucgagcucauccgcggcaagaagcaggagaccgagguccucuggaccuccaacuccaucgucgucuucugcggcaccuccggcaccuacggcaccggcuccuggcccgacggcgccgacaucaaccucaugcccaucuga

SEQ ID NO: 111572 - RNA, 1410 nt, Artificial Sequence
  derived and/or modified CDS sequence (opt2) from neuraminidase__InfluenzaA__ABJ16711
augaaccccaaccagaagaucaucaccaucggcuccgucucccucaccaucgccaccaucugcuuccucaugcagaucgccauccucgucaccaccgucacccuccacuucaagcaguacgagugcaacuccccccccaacaaccaggucaugcucugcgagcccaccaucaucgagcgcaacaucaccgagaucgucuaccucaccaacaccaccaucgagaaggagaucugccccaagcucgccgaguaccgcaacugguccaagccccagugcaacaucaccggcuucgcccccuucuccaaggacaacuccauccgccucuccgccggcggcgacaucugggucacccgcgagcccuacgucuccugcgaccccgacaagugcuaccaguucgcccucggccagggcaccacccucaacaacggccacuccaacgacaccguccacgaccgcacccccuaccgcacccuccucaugaacgagcucggcguccccuuccaccucggcaccaagcaggucugcaucgccugguccuccuccuccugccacgacggcaaggccuggcuccacgucugcgucaccggcgacgacgagaacgccaccgccuccuucaucuacaacggccgccucgucgacuccaucggcuccugguccaagaagauccuccgcacccaggaguccgagugcgucugcaucaacggcaccugcaccgucgucaugaccgacggcuccgccuccggcaaggccgacaccaagauccucuucaucgaggagggcaagaucguccacaccuccucccucuccggcuccgcccagcacgucgaggagugcuccugcuacccccgcuaccccggcguccgcugcgucugccgcgacaacuggaagggcuccaaccgccccaucgucgacaucaacaucaaggacuacuccaucgucuccuccuacgucugcuccggccucgucggcgacaccccccgcaagaacgacuccuccuccuccucccacugccucgaccccaacaacgaggagggcggccacggcgucaagggcugggccuucgacgacggcaacgacgccuggaugggccgcaccaucuccgagaagcuccgcuccggcuacgagaccuucaaggucaucgagggcugguccaaguccaacuccaagcuccagaucaaccgccaggucaucgucgaccgcggcaaccgcuccggcuacuccggcaucuucuccgucgagggcaaguccugcaucaaccgcugcuucuacgucgagcucauccgcggccgcaagcaggagaccgagguccucuggaccuccaacuccaucgucgucuucugcggcaccuccggcaccuacggcaccggcuccuggcccgacggcgccgacaucaaccucaugcccaucuga

SEQ ID NO: 111573 - RNA, 1413 nt, Artificial Sequence
  derived and/or modified CDS sequence (opt2) from neuraminidase__InfluenzaA__ABJ16733
augaaccccaaccagaagaucaucaccaucggcuccaucuccgucgccaucggcaucaucaaccucauccuccagaucggcaacaucaucuccaucugggccucccacuccauccagaccggcucccagaacuacaccggcaucugcaaccagcgcaucaucaccuacgagaaccgcaccugggucaaccagaccuacgucaacaucaacaacaccaacgucgucgccggcaaggacaagaccuccaugacccucgccggcaacuccucccucugccccauccgcggcugggccaucuacaccaaggacaacuccauccgcaucggcuccaagggcgacaucuucgucauccgcgagcccuucaucuccugcucccaccucgagugccgcaccuucuuccucacccagggcgcccuccucaacgacaagcacuccaacggcaccaucaaggaccgcucccccuuccgcgcccucauguccugcccccucggcgaggcccccucccccuacaacucccgcuucgaguccgucgccugguccgccuccgccugccacgacggccucggcuggcucaccaucggcaucuccggccccgacaacggcgccgucgccguccucaaguacaacggcaucaucaccgagaccaucaaguccuggaagaagcagauccuccgcacccaggaguccgagugcgucugcgucaacggcuccugcuucaccaucaugaccgacggccccuccaaccgcgccgccuccuaccgcaucuucaagaucgagaagggccgcgucaccaaguccaucgagcucgacgcccccaacuaccacuacgaggagugcuccugcuaccccgacaccggcaccgucaugugcgucugccgcgacaacuggcacggcuccaaccgccccugggucuccuucaaccagaaccucgacuaccagaucggcuacaucugcuccggcgucuucggcgacaacccccgccccaaggacggcgagggcuccugcaaccccgucaccgucgacggcgccgacggcgucaagggcuucuccuaccgcuacggcaacggcgucuggaucggccgcaccaaguccaaccgccuccgcaagggcuucgagaugaucugggaccccaacggcuggaccgacaccgacuccgacuucuccaugaagcaggacgucgucgccaugaccgacugguccggcuacuccggcuccuucguccagcaccccgagcucaccggccucgacugcaugcgccccugcuucugggucgagcucguccgcggccucccccgcgagaacaccaccaucuggaccuccggcuccuccaucuccuucugcggcgucaacuccgagaccgccaacugguccuggcccgacggcgccgagcuccccuucaccaucgacaaguga

SEQ ID NO: 111574 - RNA, 1410 nt, Artificial Sequence; identical to SEQ ID NO: 110766
  derived and/or modified CDS sequence (opt2) from neuraminidase__InfluenzaA__ABJ16744

SEQ ID NO: 111575 - RNA, 1410 nt, Artificial Sequence; identical to SEQ ID NO: 110766
  derived and/or modified CDS sequence (opt2) from neuraminidase__InfluenzaA__ABJ16755

SEQ ID NO: 111576 - RNA, 1410 nt, Artificial Sequence; identical to SEQ ID NO: 110766
  derived and/or modified CDS sequence (opt2) from neuraminidase__InfluenzaA__ABJ16766

SEQ ID NO: 111577 - RNA, 1410 nt, Artificial Sequence
  derived and/or modified CDS sequence (opt2) from neuraminidase__InfluenzaA__ABJ16777
augaaccccaaccagaagaucaucaccaucggcuccgucucccucaccaucgccaccaucugcuuccucaugcagaucgccauccucgucaccaccgucacccuccacuucaagcaguacgagugcaacuccccccccaacaaccaggucaugcucugcgagcccaccaucaucgagcgcaacaucaccgagaucgucuaccucaccaacaccaccaucgagaaggagaucugccccaagcucgccgaguaccgcaacugguccaagccccagugcaacaucaccggcuucgcccccuucuccaaggacaacuccauccgccucuccgccggcggcgacaucugggucacccgcgagcccuacgucuccugcgaccccgacaagugcuaccaguucgcccucggccagggcaccacccucaacaacggccacuccaacgacaccguccacgaccgcacccccuaccgcacccuccucaugaacgagcucggcguccccuuccaccucggcaccaagcaggucugcaucgccugguccuccuccuccugccacgacggcaaggccuggcuccacgucugcgucaccggcgacgacgagaacgccaccgccuccuucaucuacaacggccgccucgucgacuccaucggcuccugguccaagaagauccuccgcacccaggaguccgagugcgucugcaucaacggcaccugcaccgucgucaugaccgacggcuccgccuccggcaaggccgacaccaagauccucuucaucgaggagggcaagaucguccacaccuccucccucuccggcuccgcccagcacgucgaggagugcuccugcuacccccgcuaccccggcguccgcugcgucugccgcgacaacuggaagggcuccaaccgccccaucgucgacaucaacaucaaggacuacuccaucgucuccuccuacgucugcuccggccucgucggcgacaccccccgcaagaacgacuccuccuccuccucccacugccucgaccccaacaacgaggagggcggccacggcgucaagggcugggccuucgacgacggcaacgacgucuggaugggccgcaccaucuccgagaagcuccgcuccggcuacgagaccuucaaggucaucgagggcugguccaagcccaacuccaagcuccagaucaaccgccaggucaucgucgaccgcggcaaccgcuccggcuacuccggcaucuucuccgucgagggcaaguccugcaucaaccgcugcuucuacgucgagcucauccgcggccgcaagcaggagaccgagguccucuggaccuccaacuccaucgucgucuucugcggcaccuccggcaccuacggcaccggcuccuggcccgacggcgccgacaucaaccucaugcccaucuga

SEQ ID NO: 111578 - RNA, 1410 nt, Artificial Sequence; identical to SEQ ID NO: 110766
  derived and/or modified CDS sequence (opt2) from neuraminidase__InfluenzaA__ABJ16788

SEQ ID NO: 111579 - RNA, 1413 nt, Artificial Sequence; identical to SEQ ID NO: 111004
  derived and/or modified CDS sequence (opt2) from neuraminidase__InfluenzaA__ABJ53441

SEQ ID NO: 111580 - RNA, 1413 nt, Artificial Sequence
  derived and/or modified CDS sequence (opt2) from neuraminidase__InfluenzaA__ABJ53452
augaaccccaaccagaagaucaucaccaucggcuccaucuccaucgccaucggcaucaucucccucaugcuccagaucggcaacaucaucuccaucugggccucccacuccauccagaccggcucccagaaccacaccggcaucugcaaccagcgcaucaucaccuacgagaacuccaccugggucaaccacaccuacgucaacaucaacaacaccaacgucaucgccggcaaggacaagaccuccgucacccucgccggcaacuccucccucugcuccaucuccggcugggccaucuacaccaaggacaacuccauccgcaucggcuccaagggcgacgucuucgucauccgcgagcccuucaucuccugcucccaccucgagugccgcaccuucuuccucacccagggcgcccuccucaacgacaagcacuccaacggcaccgucaaggaccgcucccccuaccgcgcccucauguccugcccccucggcgaggcccccucccccuacaacuccaaguucgaguccgucgccugguccgccuccgccugccacgacggcaugggcuggcucaccaucggcaucuccggccccgacaacggcgccgucgccguccucaaguacaacggcaucaucaccgagaccaucaaguccuggaagaagcgcauccuccgcacccaggaguccgagugcgucugcgucaacggcuccugcuucaccaucaugaccgacggccccuccaacggcgccgccuccuacaagaucuucaagaucgagaagggcaaggucaccaaguccaucgagcucaacgcccccaacuuccacuacgaggagugcuccugcuaccccgacaccggcaccgucaugugcgucugccgcgacaacuggcacggcuccaaccgccccugggucuccuucaaccagaaccucgacuaccagaucggcuacaucugcuccggcgucuucggcgacaacccccgccccaaggacggcgagggcuccugcaaccccgucaccgucgacggcgccgacggcgucaagggcuucuccuacaaguacggcaacggcgucuggaucggccgcaccaaguccaaccgccuccgcaagggcuucgagaugaucugggaccccaacggcuggaccgacaccgacuccaacuucuccgucaagcaggacgucgucgccaucaccgacugguccggcuacuccggcuccuucguccagcaccccgagcucaccggccucgacugcauccgccccugcuucugggucgagcucguccgcggccucccccgcgagaacaccaccaucuggaccuccggcuccuccaucuccuucugcggcgucaacuccgacaccgccaacugguccuggcccgacggcgccgagcuccccuucaccaucgacaaguga

SEQ ID NO: 111581 - RNA, 1410 nt, Artificial Sequence; identical to SEQ ID NO: 110748
  derived and/or modified CDS sequence (opt2) from neuraminidase__InfluenzaA__ABJ53463

SEQ ID NO: 111582 - RNA, 1410 nt, Artificial Sequence; identical to SEQ ID NO: 110748
  derived and/or modified CDS sequence (opt2) from neuraminidase__InfluenzaA__ABJ53474

SEQ ID NO: 111583 - RNA, 1410 nt, Artificial Sequence
  derived and/or modified CDS sequence (opt2) from neuraminidase__InfluenzaA__ABJ53485
augaaccccaaccagaagaucaucaccaucggcuccgucucccucaccaucuccaccaucugcuucuucaugcagaucgccauccucaucaccaccgucacccuccacuucaagcaguacgaguucaacuccccccccaacaaccaggucaugcucugcgagcccaccaucaucgagcgcaacaucaccgagaucgucuaccucaccaacaccaccaucgagaaggagaucugccccaagcucgccgaguaccgcaacugguccaagccccagugcaacaucaccggcuucgcccccuucuccaaggacaacuccauccgccucuccgccggcggcgacaucugggucacccgcgagcccuacgucuccugcgaccccgacaagugcuaccaguucgcccucggccagggcaccacccucaacaacguccacuccaacgacaccguccacgaccgcacccccuaccgcacccuccucaugaacgagcucggcguccccuuccaccucggcaccaagcaggucugcaucgccugguccuccuccuccugccacgacggcaaggccuggcuccacgucugcgucaccggcgacgacaagaacgccaccgccuccuucaucuacaacggccgccucgucgacuccaucgucuccugguccaaggagauccuccgcacccaggaguccgagugcgucugcaucaacggcaccugcaccgucgucaugaccgacggcuccgccuccggcaaggccgacaccaagauccucuucaucgaggagggcaagaucguccacaccuccacccucuccggcuccgcccagcacgucgaggagugcuccugcuacccccgcuaccccggcguccgcugcgucugccgcgacaacuggaagggcuccaaccgccccaucgucgacaucaacaucaaggacuacuccaucgucuccuccuacgucugcuccggccucgucggcgacaccccccgcaagaacgacuccuccuccuccucccacugccucgaccccaacaacgaggagggcggccacggcgucaagggcugggccuucgacgacggcaacgacgucuggaugggccgcaccaucuccgagaagcuccgccucggcuacgagaccuucaaggucaucgagggcugguccaacuccaacuccaagcuccagaccaaccgccaggucaucgucgaccgcggcaaccgcuccggcuacuccggcaucuucuccgucgagggcaaguccugcaucaaccgcugcuucuacgucgagcucauccgcggccgcaaggaggagaccgagguccucuggaccuccaacuccaucgucgucuucugcggcaccuccggcaccuacggcaccggcuccuggcccgacggcgccgacaucaaccucaugcccaucuga

SEQ ID NO: 111584 - RNA, 1413 nt, Artificial Sequence; identical to SEQ ID NO: 111392
  derived and/or modified CDS sequence (opt2) from neuraminidase__InfluenzaA__ABJ53496

SEQ ID NO: 111585 - RNA, 1413 nt, Artificial Sequence; identical to SEQ ID NO: 111392
  derived and/or modified CDS sequence (opt2) from neuraminidase__InfluenzaA__ABJ53507

SEQ ID NO: 111586 - RNA, 1413 nt, Artificial Sequence
  derived and/or modified CDS sequence (opt2) from neuraminidase__InfluenzaA__ABJ53518
augaaccccaaccagaagaucaucaccaucggcuccaucuccgucgccaucggcaucaucaaccucauccuccagaucggcaacaucaucuccaucugggccucccacuccauccagaccggcucccagaacuacaccggcaucugcaaccagcgcaucaucaccuacgagaaccgcaccugggucaaccagaccuacgucaacaucaacaacaccaacgucgucgccggcaaggacaagaccuccaugacccucgccggcaaccucucccucugccccauccgcggcugggccaucuacaccaaggacaacuccauccgcaucggcuccaagggcgacgucuucgucauccgcgagcccuucaucuccugcucccaccucgagugccgcaccuucuuccucacccagggcgcccuccucaacgacaagcacuccaacggcaccaucaaggaccgcucccccuuccgcgcccucauguccugcccccucggcgaggcccccucccccuacaacucccgcuucgaguccgucgccugguccgccuccgccugccacgacggccucggcuggcucaccaucggcaucuccggccccgacaacggcgccgucgccguccucaaguacaacggcaucaucaccgagaccaucaaguccuggaagaagcagauccuccgcacccaggaguccgagugcgucugcgucaacggcuccugcuucaccaucaugaccgacggccccuccaaccgcgccgccuccuaccgcaucuucaagaucgagaagggccgcgucaccaaguccaucgagcucgacgcccccaacuaccacuacgaggagugcuccugcuaccccgacaccggcaccgucaugugcgucugccgcgacaacuggcacggcuccaaccgccccugggucuccuucaaccagaaccucgacuaccagaucggcuacaucugcuccggcgucuucggcgacaacccccgccccaaggacggcgagggcuccugcaaccccgucaccgucgacggcgccgacggcgucaagggcuucuccuaccgcuacggcaacggcgucuggaucggccgcaccaaguccaaccgccuccgcaagggcuucgagaugaucugggaccccaacggcuggaccgacaccgacuccgacuucuccaugaagcaggacgucgucgccaugaccgacugguccggcuacuccggcuccuucguccagcaccccgagcucaccggccucgacugcaugcgccccugcuucugggucgagcucguccgcggccucccccgcgagaacaccaccaucuggaccuccggcuccuccaucuccuucugcggcgucaacuccgagaccgccaacugguccuggcccgacggcgccgagcuccccuucaccaucgacaaguga

SEQ ID NO: 111587 - RNA, 1410 nt, Artificial Sequence; identical to SEQ ID NO: 110190
  derived and/or modified CDS sequence (opt2) from neuraminidase__InfluenzaA__ABK39965

SEQ ID NO: 111588 - RNA, 1410 nt, Artificial Sequence
  derived and/or modified CDS sequence (opt2) from neuraminidase__InfluenzaA__ABK39976
augaaccccaaccagaagaucaucaccaucggcuccgucucccucaccaucuccaccaccugcuucuucaugcagaucgccauccucaucaccaccgucacccuccacuucaagcaguacgaguucaacuccccccccaacaaccaggucaugcucugcgagcccaccaucaucgagcgcaacaucaccgagaucgucuaccucaccaacaccaccaucgagaaggagaucugccccaagcucgccgaguaccgcaacugguccaagccccagugcaacaucaccggcuucgcccccuucuccaaggacaacuccauccgccucuccgccggcggcgacaucugggucacccgcgagcccuacgucuccugcgaccccgacaagugcuaccaguucgcccucggccagggcaccacccucaacaacguccacuccaacgacaccguccacgaccgcacccccuaccgcacccuccucaugaacgagcucggcguccccuuccaccucggcaccaagcaggucugcaucgccugguccuccuccuccugccacgacggcaaggccuggcuccacgucugcgucaccggcgacgacaagaacgccaccgccuccuucaucuacaacggccgccucgucgacuccaucgucuccugguccaaggagauccuccgcacccaggaguccgagugcgucugcaucaacggcaccugcgccgucgucaugaccgacggcuccgccuccggcaaggccgacaccaagauccucuucaucgaggagggcaagaucguccacaccuccacccucuccggcuccgcccagcacgucgaggagugcuccugcuacccccgcuaccccggcguccgcugcgucugccgcgacaacuggaagggcuccaaccgccccaucgucgacaucaacaucaaggacuacuccaucgucuccuccuacgucugcuccggccucgucggcgacaccccccgcaagaacgacuccuccuccuccucccacugccucgaccccaacaacgaggagggcggccacggcgucaagggcugggccuucgacgacggcaacgacgucuggaugggccgcaccaucuccgagaagcuccgcuccggcuacgagaccuucaaggucaucgagggcugguccaaccccaacuccaagcuccagaucaaccgccaggucaucgucgaccgcggcaaccgcuccggcuacuccggcaucuucuccgucgagggcaaguccugcaucaaccgcugcuucuacgucgagcucauccgcggccgcaaggaggagaccgagguccucuggaccuccaacuccaucgucgucuucugcggcaccuccggcaccuacggcaccggcuccuggcccgacggcgccgacaucaaccucaugcccaucuga

SEQ ID NO: 111589 - RNA, 1410 nt, Artificial Sequence; identical to SEQ ID NO: 110748
  derived and/or modified CDS sequence (opt2) from neuraminidase__InfluenzaA__ABK39987

SEQ ID NO: 111590 - RNA, 1410 nt, Artificial Sequence; identical to SEQ ID NO: 110418
  derived and/or modified CDS sequence (opt2) from neuraminidase__InfluenzaA__ABK39998

SEQ ID NO: 111591 - RNA, 1410 nt, Artificial Sequence; identical to SEQ ID NO: 110363
  derived and/or modified CDS sequence (opt2) from neuraminidase__InfluenzaA__ABK40020

SEQ ID NO: 111592 - RNA, 1413 nt, Artificial Sequence
  derived and/or modified CDS sequence (opt2) from neuraminidase__InfluenzaA__ABK40031
augaaccccaaccagaagaucaucaccaucggcuccaucuccgucgccaucggcaucaucaaccucauccuccagaucggcaacaucaucuccaucugggccucccacuccauccagaccggcucccagaacuacaccggcaucugcaaccagcgcaucaucaccuacgagaaccgcaccugggucaaccagaccuacgucaacaucaacaacaccaacgucgucgccggcaaggacaagaccuccaugacccucgccggcaacuccucccucugccccauccgcggcugggccaucuacaccaaggacaacuccauccgcaucggcuccaagggcgacgucuucgucauccgcgagcccuucaucuccugcucccaccucgagugccgcaccuucuuccucacccagggcgcccuccucaacgacaagcacuccaacggcaccaucaaggaccgcucccccuuccgcgcccucauguccugcccccucggcgaggcccccucccccuacaacucccgcuucgaguccgucgccugguccgccuccgccugccacgacggccucggcuggcucaccaucggcaucuccggccccgacaacggcgccgucgccguccucaaguacaacggcaucaucaccgagaccaucaaguccuggaagaagcagauccuccgcacccaggaguccgagugcgucugcgucaacggcuccugcuucaccaucaugaccgacggccccuccaaccgcgccgccuccuaccgcaucuucaagaucgagaagggccgcgucaccaaguccaucgagcucgacgcccccaacuaccacuacgaggagugcuccugcuaccccgacaccggcaccgucaugugcgucugccgcgacaacuggcacggcuccaaccgccccugggucuccuucaaccagaaccucgacuaccagaucggcuacaucugcuccggcgucuucggcgacaacccccgccccaaggacggcgagggcuccugcaaccccgucaccgucgacggcgccgacggcgucaagggcuucuccuaccgcuacggcaacggcgucuggaucggccgcaccaaguccaaccgccuccgcaagggcuucgagaugaucugggaccccaacggcuggaccgacaccgacuccgacuucuccaugaagcaggacgucgucgccaugaccgacugguccggcuacuccggcuccuucguccagcaccccgagcucaccggccucgacugcaugcgccccugcuucugggucgagcucguccgcggccucccccgcgagaacaccaccaucuggaccuccggcuccuccaucuccuucugcggcgucaacuccgagaccgccaacugguccuggcccgacggcgccgagcuccccuucaccaucgacaaguga

SEQ ID NO: 111593 - RNA, 1413 nt, Artificial Sequence; identical to SEQ ID NO: 111592
  derived and/or modified CDS sequence (opt2) from neuraminidase__InfluenzaA__ABK40042

SEQ ID NO: 111594 - RNA, 1413 nt, Artificial Sequence; identical to SEQ ID NO: 111592
  derived and/or modified CDS sequence (opt2) from neuraminidase__InfluenzaA__ABK40053

SEQ ID NO: 111595 - RNA, 1410 nt, Artificial Sequence; identical to SEQ ID NO: 110766
  derived and/or modified CDS sequence (opt2) from neuraminidase__InfluenzaA__ABK40064

SEQ ID NO: 111596 - RNA, 1410 nt, Artificial Sequence; identical to SEQ ID NO: 110766
  derived and/or modified CDS sequence (opt2) from neuraminidase__InfluenzaA__ABK40078

SEQ ID NO: 111597 - RNA, 1413 nt, Artificial Sequence; identical to SEQ ID NO: 111095
  derived and/or modified CDS sequence (opt2) from neuraminidase__InfluenzaA__ABK40513

SEQ ID NO: 111598 - RNA, 1413 nt, Artificial Sequence; identical to SEQ ID NO: 111095
  derived and/or modified CDS sequence (opt2) from neuraminidase__InfluenzaA__ABK40538

SEQ ID NO: 111599 - RNA, 1413 nt, Artificial Sequence
  derived and/or modified CDS sequence (opt2) from neuraminidase__InfluenzaA__ABK40549
augaaccccaaccagaagaucaucaccaucggcuccaucugcaugaccaucggcaucaucucccucauccuccagaucggcaacaucaucuccaucugggucucccacuccauccagaccggcucccagaaccacaccggcaucugcaaccagcgcaucaucaccuacgagaacuccaccugggucaaccagaccuacgucaacaucaacaacaccaacgucgucgccggcaaggacaccaccuccgucacccucgccggcaacuccucccucugccccauccgcggcugggccaucuacuccaaggacaacuccauccgcaucggcuccaagggcgacgucuucgucauccgcgagcccuucaucuccugcucccaccucgagugccgcaccuucuuccucacccagggcgcccuccucaacgacaagcacuccaacggcaccgucaaggaccgcucccccuaccgcgcccucauguccugccccaucggcgaggcccccucccccuacaacucccgcuucgaguccgucgccugguccgccuccgccugccacgacggcaugggcuggcucaccaucggcaucuccggccccgacgacggcgccgucgccguccucaaguacaacggcaucaucaccgagaccaucaaguccuggcgcaagcgcauccuccgcacccaggaguccgagugcgucugcgucaacggcuccugcuucaccaucaugaccgacggccccuccaacggccccgccuccuaccgcaucuucaagaucgagaagggcaagaucaccaaguccaucgagcucgacgcccccaacucccacuacgaggagugcuccugcuaccccgacaccggcaccgucaugugcgucugccgcgacaacuggcacggcuccaaccgccccugggucuccuucaaccagaaccucgacuacaagaucggcuacaucugcuccggcgucuucggcgacaacccccgccccaaggacggcaagggcuccugcgaccccgucaccgucgacggcgccgacggcgucaagggcuucuccuaccgcuacggcaacggcgucuggaucggccgcaccaaguccaacuccucccgcaagggcuucgagaugaucugggaccccaacggcuggaccgacaccgacuccaacuuccucgucaagcaggacgucgucgccaugaccgacugguccggcuacuccggcuccuucguccagcaccccgagcucaccggccucgacugcaugcgccccugcuucugggucgagcucauccgcggccgcccccgcgagaagaccaccaucuggaccuccggcuccuccaucuccuucugcggcgucaacuccgacaccgccaacugguccuggcccgacggcgccgagcuccccuucaccaucgacaaguga

SEQ ID NO: 111600 - RNA, 1413 nt, Artificial Sequence; identical to SEQ ID NO: 111095
  derived and/or modified CDS sequence (opt2) from neuraminidase__InfluenzaA__ABK40560

SEQ ID NO: 111601 - RNA, 1413 nt, Artificial Sequence; identical to SEQ ID NO: 111095
  derived and/or modified CDS sequence (opt2) from neuraminidase__InfluenzaA__ABK40571

SEQ ID NO: 111602 - RNA, 1413 nt, Artificial Sequence; identical to SEQ ID NO: 111095
  derived and/or modified CDS sequence (opt2) from neuraminidase__InfluenzaA__ABK40582

SEQ ID NO: 111603 - RNA, 1413 nt, Artificial Sequence
  derived and/or modified CDS sequence (opt2) from neuraminidase__InfluenzaA__ABK40593
augaaccccaaccagaagaucaucaccaucggcuccaucugcaugaccaucggcaucaucucccucauccuccagaucggcaacaucaucuccaucugggucucccacuccauccagaccggcucccagaaccacaccggcaucugcaaccagcgcaucaucaccuacgagaacuccaccugggucaaccagaccuacgucaacaucaacaacaccaacgucgucgccggcaaggacaccaccuccgucacccucgccggcaacuccucccucugccccauccgcggcugggccaucuacuccaaggacaacuccauccgcaucggcuccaagggcgacgucuucgucauccgcgagcccuucaucuccugcucccaccucgagugccgcaccuucuuccucacccagggcgcccuccucaacgacaagcacuccaacggcaccgucaaggaccgcucccccuaccgcgcccucauguccugccccaucggcgaggcccccucccccuacaacucccgcuucgaguccgucgccugguccgccuccgccugccacgacggcaugggcuggcucaccaucggcaucuccggccccgacgacggcgccgucgccguccucaaguacaacggcaucaucaccgagaccaucaaguccuggcgcaagcgcauccuccgcacccaggaguccgagugcgucugcgucaacggcuccugcuucaccaucaugaccgacggccccuccaacggccccgccucccaccgcaucuucaagaucgagaagggcaagaucaccaaguccaucgagcucgacgcccccaacucccacuacgaggagugcuccugcuaccccgacaccggcaccgucaugugcgucugccgcgacaacuggcacggcuccaaccgccccugggucuccuucaaccagaaccucgacuacaagaucggcuacaucugcuccggcgucuucggcgacaacccccgccccaaggacggcaagggcuccugcgaccccgucaccgucgacggcgccgacggcgucaagggcuucuccuaccgcuacggcaacggcgucuggaucggccgcaccaaguccaacuccucccgcaagggcuucgagaugaucugggaccccaacggcuggaccgacaccgacuccaacuuccucgucaagcaggacgucgucgccaugaccgacugguccggcuacuccggcuccuucguccagcaccccgagcucaccggccucgacugcaugcgccccugcuucugggucgagcucauccgcggccgcccccgcgagaagaccaccaucuggaccuccggcuccuccaucuccuucugcggcgucaacuccgacaccgccaacugguccuggcccgacggcgccgagcuccccuucaccaucgacaaguga

SEQ ID NO: 111604 - RNA, 1413 nt, Artificial Sequence; identical to SEQ ID NO: 111095
  derived and/or modified CDS sequence (opt2) from neuraminidase__InfluenzaA__ABK40604

SEQ ID NO: 111605 - RNA, 1410 nt, Artificial Sequence; identical to SEQ ID NO: 110766
  derived and/or modified CDS sequence (opt2) from neuraminidase__InfluenzaA__ABK40615

SEQ ID NO: 111606 - RNA, 1410 nt, Artificial Sequence; identical to SEQ ID NO: 110097
  derived and/or modified CDS sequence (opt2) from neuraminidase__InfluenzaA__ABK40626

SEQ ID NO: 111607 - RNA, 1410 nt, Artificial Sequence
  derived and/or modified CDS sequence (opt2) from neuraminidase__InfluenzaA__ABK40648
augaaccccaaccagaagaucaucaccaucggcuccgucucccucaccaucgccaccaucugcuuccucaugcagaucgccauccucgucaccaccgucacccuccacuucaagcaguacgagugcaacuccccccccaacaaccaggucaugcucugcgagcccaccaucaucgagcgcaacaucaccgagaucgucuaccucaccaacaccaccaucgagaaggagaucugccccaagcucgccgaguaccgcaacugguccaagccccagugcaagaucaccggcuucgcccccuucuccaaggacaacuccauccgccucuccgccggcggcgacaucugggucacccgcgagcccuacgucuccugcgaccccggcaagugcuaccaguucgcccucggccagggcaccacccucaacaaccgccacuccaacgacaccguccacgaccgcacccccuaccgcacccuccucaugaacgagcucggcauccccuuccaccucggcaccaagcaggucugcaucgccugguccuccuccuccugccacgacggcaaggccuggcuccacgucugcgucaccggccacgacgagaacgccaccgccuccuucaucuacgacggccgccucgucgacuccaucggcuccugguccaagaacauccuccgcacccaggaguccgagugcgucugcaucaacggcaccugcaccgucgucaugaccgacggcuccgccuccgaccgcgccgacaccaagauccucuucaucgaggagggcaagaucguccacaucuccccccucuccggcuccgcccagcacgucgaggagugcuccugcuacccccgcuaccccggcguccgcugcgucugccgcgacaacuggaagggcuccaaccgccccaucgucgacaucaacgucaaggacuacuccaucgucuccuccuacgucugcuccggccucgucggcgacaccccccgcaagaacgacuccuccuccuccuccuacugcuggaaccccaacaacgagaagggcggccacggcgucaagggcugggccuucgacgacggcaacgacgucuggaugggccgcaccaucuccgaggagucccgcuccggcuacgagaccuucaaggucaucggcggcugguccaagcccaacuccaagcuccagaucaaccgccaggucaucgucgaccgcggcaaccgcuccggcuacuccggcaucuucuccgucgagggcaaguccugcaucaaccgcugcuucuacgucgagcucauccgcggccgcaagcaggagaccgaggucugguggaccuccaacuccaucgucgucuucugcggcaccuccggcaccuacggcaccggcuccuggcccgacggcgccgacaucaaccucaugcccaucuga

SEQ ID NO: 111608 - RNA, 1410 nt, Artificial Sequence; identical to SEQ ID NO: 111149
  derived and/or modified CDS sequence (opt2) from neuraminidase__InfluenzaA__ABK40659

SEQ ID NO: 111609 - RNA, 1410 nt, Artificial Sequence; identical to SEQ ID NO: 111137
  derived and/or modified CDS sequence (opt2) from neuraminidase__InfluenzaA__ABK40681

SEQ ID NO: 111610 - RNA, 1413 nt, Artificial Sequence
  derived and/or modified CDS sequence (opt2) from neuraminidase__InfluenzaA__ABK40692
augaaccccaaccagaagaucaucaccaucggcuccaucuccaucgccaucggcaucaucucccucaugcuccagaucggcaacaucaucuccaucugggccucccacuccauccagaccggcucccagaaccacaccggcaucugcaaccagcgcaucaucaccuacgagaacuccaccugggucaaccacaccuacgucaacaucaacaacaccaacgucgucgccggcaaggacaagaccuccgucacccucgccggcaacuccucccucugcuccaucuccggcugggccaucuacaccaaggacaacuccauccgcaucggcuccaagggcgacgucuucgucauccgcgagcccuucaucuccugcucccaccucgagugccgcaccuucuuccucacccagggcgcccuccucaacgacaagcacuccaacggcaccgucaaggaccgcucccccuaccgcgcccucauguccugcccccucggcgaggcccccucccccuacaacuccaaguucgaguccgucgccugguccgccuccgccugccacgacggcaugggcuggcucaccaucggcaucuccggccccgacaacggcgccgucgccguccucaaguacaacggcaucaucaccgagaccaucaaguccugggagaagcgcauccuccgcacccaggaguccgagugcgucugcgucaacggcuccugcuucaccaucaugaccgacggccccuccaacggcgccgccuccuacaagaucuucaagaucgagaagggcaaggucaccaaguccgucgagcucaacgcccccaacuuccacuacgaggagugcuccugcuaccccgacaccggcaccgucaugugcgucugccgcgacaacuggcacggcuccaaccgccccugggucuccuucaaccagaaccucgacuaccagaucggcuacaucugcuccggcgucuucggcgacaacccccgccccaaggacggcaagggcuccugcaaccccgucaccgucgacggcgccgacggcgucaagggcuucuccuacaaguacggcaacggcgucuggaucggccgcaccaaguccaaccgccuccgcaagggcuucgagaugaucugggaccccaacggcuggaccgacaccgacuccgacuucuccgucaagcaggacgucgucgccaucaccgacugguccggcuacuccggcuccuucguccagcaccccgagcucaccggccucgacugcauccgccccugcuucugggucgagcucguccgcggccucccccgcgagaacaccaccaucuggaccuccggcuccuccaucuccuucugcggcgucgacuccgacaccgccaacugguccuggcccgacggcgccgagcuccccuucaccaucgacaaguga

SEQ ID NO: 111611 - RNA, 1410 nt, Artificial Sequence; identical to SEQ ID NO: 110766
  derived and/or modified CDS sequence (opt2) from neuraminidase__InfluenzaA__ABK40703

SEQ ID NO: 111612 - RNA, 1410 nt, Artificial Sequence; identical to SEQ ID NO: 110766
  derived and/or modified CDS sequence (opt2) from neuraminidase__InfluenzaA__ABK40714

SEQ ID NO: 111613 - RNA, 1410 nt, Artificial Sequence; identical to SEQ ID NO: 110766
  derived and/or modified CDS sequence (opt2) from neuraminidase__InfluenzaA__ABK40725

SEQ ID NO: 111614 - RNA, 1410 nt, Artificial Sequence; identical to SEQ ID NO: 110766
  derived and/or modified CDS sequence (opt2) from neuraminidase__InfluenzaA__ABK40736

SEQ ID NO: 111615 - RNA, 1410 nt, Artificial Sequence; identical to SEQ ID NO: 111481
  derived and/or modified CDS sequence (opt2) from neuraminidase__InfluenzaA__ABK40747

SEQ ID NO: 111616 - RNA, 1413 nt, Artificial Sequence; identical to SEQ ID NO: 110987
  derived and/or modified CDS sequence (opt2) from neuraminidase__InfluenzaA__ABK79951

SEQ ID NO: 111617 - RNA, 1413 nt, Artificial Sequence; identical to SEQ ID NO: 111592
  derived and/or modified CDS sequence (opt2) from neuraminidase__InfluenzaA__ABK79973

SEQ ID NO: 111618 - RNA, 1410 nt, Artificial Sequence; identical to SEQ ID NO: 110766
  derived and/or modified CDS sequence (opt2) from neuraminidase__InfluenzaA__ABK79984

SEQ ID NO: 111619 - RNA, 1410 nt, Artificial Sequence; identical to SEQ ID NO: 110766
  derived and/or modified CDS sequence (opt2) from neuraminidase__InfluenzaA__ABK79995

SEQ ID NO: 111620 - RNA, 1413 nt, Artificial Sequence; identical to SEQ ID NO: 111095
  derived and/or modified CDS sequence (opt2) from neuraminidase__InfluenzaA__ABK80028

SEQ ID NO: 111621 - RNA, 1413 nt, Artificial Sequence; identical to SEQ ID NO: 111095
  derived and/or modified CDS sequence (opt2) from neuraminidase__InfluenzaA__ABK80039

SEQ ID NO: 111622 - RNA, 1413 nt, Artificial Sequence; identical to SEQ ID NO: 111095
  derived and/or modified CDS sequence (opt2) from neuraminidase__InfluenzaA__ABK80050

SEQ ID NO: 111623 - RNA, 1410 nt, Artificial Sequence
  derived and/or modified CDS sequence (opt2) from neuraminidase__InfluenzaA__ABK80061
augaaccccaaccagaagaucaucaccaucggcuccgucucccucaccaucgccaccaucugcuuccucaugcagaucgccauccucgucaccaccgucacccuccacuucaagcaguacgagugcaacuccccccccaacaaccaggucaugcucugcgagcccaccaucaucgagcgcaacaucaccgagaucgucuaccucaccaacaccaccaucgagaaggagaucugccccaagcucgccgaguaccgcaacugguccaagccccagugcaacaucaccggcuucgcccccuucuccaaggacaacuccauccgccucuccgccggcggcgacaucugggucacccgcgagcccuacgucuccugcgaccccgacaagugcuaccaguucgcccucggccagggcaccacccucaacaacggccacuccaacgacaccguccacgaccgcacccccuaccgcacccuccucaugaacgagcucggcguccccuuccaccucggcaccaagcaggucugcaucgccugguccuccuccuccugccacgacggcaaggccuggcuccacgucugcgucaccggcgacgacgagaacgccaccgccuccuucaucuacaacggccgccucgucgacuccaucggcuccugguccaagaagauccuccgcacccaggaguccgagugcgucugcaucaacggcaccugcaccgucgucaugaccgacggcuccgccuccggcaaggccgacaccaagauccucuucaucgaggagggcaagaucguccacaccuccucccucuccggcuccgcccagcacgucgaggagugcuccugcuacccccgcuaccccggcguccgcugcgucugccgcgacaacuggaagggcuccaaccgccccaucgucgacaucaacgucaaggacuacuccaucgucuccuccuacgucugcuccggccucgucggcgacaccccccgcaagaacgacuccuccuccuccucccacugccucgaccccaacaacgaggagggcggccacggcgucaagggcugggccuucgacgacggcaacgacgucuggaugggccgcaccaucuccgagaagucccgcuccggcuacgagaccuucaaggucaucgagggcugguccaagcccaacuccaagcuccagaucaaccgccaggucaucgucgaccgcggcaaccgcuccggcuacuccggcaucuucuccgucgagggcaaguccugcaucaaccgcugcuucuacgucgagcucauccgcggccgcaagcaggagaccgagguccucuggaccuccaacuccaucgucgucuucugcggcaccuccggcaccuacggcaccggcuccuggcccgacggcgccgacaucaaccucaugcccaucuga

SEQ ID NO: 111624 - RNA, 1410 nt, Artificial Sequence; identical to SEQ ID NO: 110097
  derived and/or modified CDS sequence (opt2) from neuraminidase__InfluenzaA__ABK80072

SEQ ID NO: 111625 - RNA, 1410 nt, Artificial Sequence
  derived and/or modified CDS sequence (opt2) from neuraminidase__InfluenzaA__ABK80083
augaaccccaaccagaagaucaucaccaucggcuccgucucccucaccaucgccaccaucugcuuccucaugcagaucgccauccucgucaccaccgucacccuccacuucaagcaguacgagugcuccuccccccccaacaaccaggucaugcucugcgagcccaccaucaucgagcgcaacaucaccgagaucgucuaccucaccaacaccaccaucgagaaggagaucugccccaagcucgccgaguaccgcaacugguccaagccccagugcaacaucaccggcuucgcccccuucuccaaggacaacuccauccgccucuccgccggcggcgacaucugggucacccgcgagcccuacgucuccugcgaccccgacaagugcuaccaguucgcccucggccagggcaccacccucaacaacggccacuccaacgacaccguccacgaccgcacccccuaccgcacccuccucaugaacgagcucggcguccccuuccaccucggcaccaagcaggucugcaucgccugguccuccuccuccugccacgacggcaaggccuggcuccacgucugcgucaccggcgacgacgagaacgccaccgccuccuucaucuacaacggccgccucgucgacuccaucggcuccugguccaagaagauccuccgcacccaggaguccgagugcgucugcaucaacggcaccugcaccgucgucaugaccgacggcuccgccuccggcaaggccgacaccaagauccucuucaucgaggagggcaagaucguccacaccucccuccucuccggcuccgcccagcacgucgaggagugcuccugcuacccccgcuaccccggcguccgcugcgucugccgcgacaacuggaagggcuccaaccgccccaucgucgacaucaacgucaaggacuacuccaucgucuccuccuacgucugcuccggccucgucggcgacaccccccgcaagaacgacuccuccuccuccucccacugccucgaccccaacaacgaggagggcggccacggcgucaagggcugggccuucgacgacggcaacgacgucuggaugggccgcaccaucuccgagaagcuccgcuccggcuacgagaccuucaaggucaucgagggcugguccaagcccaacuccaagcuccagaucaaccgccaggucaucgucgaccgcggcaaccgcuccggcuacuccggcaucuucuccgucgagggcaaguccugcaucaaccgcugcuucuacgucgagcucauccgcggccgcaagcaggagaccgagguccucuggaccuccaacuccaucgucgucuucugcggcaccuccggcaccuacggcaccggcuccuggcccgacggcgccgacaucaaccucaugcccaucuga

SEQ ID NO: 111626 - RNA, 1410 nt, Artificial Sequence
  derived and/or modified CDS sequence (opt2) from neuraminidase__InfluenzaA__ABK80094
augaaccccaaccagaagaucaucaccaucggcuccgucucccucaucaucgccaccaucugcuuccucaugcagaucgccauccucgucaccaccgucacccuccacuucaagcaguacgagugcaacuccccccccaacaaccaggucaugcucugcgagcccaccaucaucgagcgcaacaucaccgagaucgucuaccucaccaacaccaccaucgagaaggagaucugccccaagcucgccgaguaccgcaacugguccaagccccagugcaacaucaccggcuucgcccccuucuccaaggacaacuccauccgccucuccgccggcggcgacaucugggucacccgcgagcccuacgucuccugcgaccccgacaagugcuaccaguucgcccucggccagggcaccacccucaacaacggccacuccaacgacaccguccacgaccgcacccccuaccgcacccuccucaugaacgagcucggcguccccuuccaccucggcaccaagcaggucugcaucgccugguccuccuccuccugccacgacggcaaggccuggcuccacgucugcgucaccggcgacgacgagaacgccaccgccuccuucaucuacaacggccgccucgucgacuccaucggcuccugguccaagaagauccuccgcacccaggaguccgagugcgucugcaucaacggcaccugcaccgucgucaugaccgacggcuccgccuccggcaaggccgacaccaagauccucuucaucgaggagggcaagaucguccacaccuccucccucuccggcuccgcccagcacgucgaggagugcuccugcuacccccgcuaccccggcguccgcugcgucugccgcgacaacuggaagggcuccaaccgccccaucgucgacaucaacgucaaggacuacuccaucgucuccuccuacgucugcuccggccucgucggcgacaccccccgcaagaacgacuccuccuccuccucccacugccucgaccccaacaacgaggagggcggccacggcgucaagggcugggccuucgacgacggcaacgacgucuggaugggccgcaccaucuccgagaagcuccgcuccggcuacgagaccuucaaggucaucgagggcugguccaagcccaacuccaagcuccagaucaaccgccaggucaucgucgaccgcggcaaccgcuccggcuacuccggcaucuucuccgucgaguccaaguccugcaucaaccgcugcuucuacgucgagcucauccgcggccgcaagcaggagaccgagguccucuggaccuccaacuccaucgucgucuucugcggcaccuccggcaccuacggcaccggcuccuggcccgacggcgccgacaucaaccucaugcccaucuga

SEQ ID NO: 111627 - RNA, 1410 nt, Artificial Sequence; identical to SEQ ID NO: 110766
  derived and/or modified CDS sequence (opt2) from neuraminidase__InfluenzaA__ABK80105

SEQ ID NO: 111628 - RNA, 1410 nt, Artificial Sequence
  derived and/or modified CDS sequence (opt2) from neuraminidase__InfluenzaA__ABK80138
augaaccccaaccagaagaucaucaccaucggcuccgucucccucaccaucgccaccaucugcuuccucaugcagaccgccauccucgucaccaccgucacccuccacuucaagcaguacgagugcaacuccccccccaacaaccaggucaugcucugcgagcccaccaucaucgagcgcaacaucaccgagaucgucuaccucaccaacaccaccaucgagaaggagaucugccccaagcucgccgaguaccgcaacugguccaagccccagugcaacaucaccggcuucgcccccuucuccaaggacaacuccauccgccucuccgccggcggcgacaucugggucacccgcgagcccuacgucuccugcgaccccgacaagugcuaccaguucgcccucggccagggcaccacccucaacaacggccacuccaacgacaccguccacgaccgcacccccuaccgcacccuccucaugaacgagcucggcguccccuuccaccucggcacccgccaggucugcaucgccugguccuccuccuccugccacgacggcaaggccuggcuccacgucugcgucaccggcgacgacgagaacgccaccgccuccuucaucuacaacggccgccucgucgacuccaucggcuccugguccaagaagauccuccgcacccaggaguccgagugcgucugcaucaacggcaccugcaccgucgucaugaccgacggcuccgccuccggcaaggccgacaccaagauccucuucaucgaggagggcaagaucguccacaucuccacccucuccggcuccgcccagcacgucgaggagugcuccugcuacccccgcuaccccggcguccgcugcgucugccgcgacaacuggaagggcuccaaccgccccaucgucgacaucaacgucaaggacuacuccaucgucuccuccuacgucugcuccggccucgucggcgacaccccccgcaagaacgacuccuucuccuccucccacugccucgaccccaacaacgaggagggcggccacggcgucaagggcugggccuucgacgacggcaacgacgucuggaugggccgcaccaucuccgagaagcuccgcuccggcuacgagaccuucaaggucaucgagggcugguccaagcccaacuccaagcuccagaucaaccgccaggucaucgucgagcgcggcaaccgcuccggcuacuccggcaucuucuccgucgagggcaaguccugcaucaaccgcugcuucuacgucgagcucauccgcggccgcaaggaggagaccgaggucugguggaccuccaacuccaucgucgucuucugcggcaccuccggcaccuacggcaccggcuccuggcccgacggcgccgacaucaaccucaugcccaucuga

SEQ ID NO: 111629 - RNA, 1410 nt, Artificial Sequence
  derived and/or modified CDS sequence (opt2) from neuraminidase__InfluenzaA__ABK80149
augaaccccaaccagaagaucaucaccaucggcuccgucucccucaccaucgccaccaucugcuuccucaugcagaucgccauccucgucaccaccgucacccuccacuucaagcaguacgagugcaacuccccccccaacaaccaggccaugcucuacgagcccaccaucaucgagcgcaacaucaccgagaucgucuaccucaccaacaccaccaucgagaaggagaucugccccaagcucgccgaguaccgcaacugguccaagccccagugcaacaucaccggcuucgcccccuucuccaaggacaacuccauccgccucuccgccggcggcgacaucugggucacccgcgagcccuacgucuccugcgaccccgacaagugcuaccaguucgcccucggccagggcaccacccucaacaacggccacuccaacgacaccguccacgaccgcacccccuaccgcacccuccucaugaacgagcucggcguccccuuccaccucggcacccgccaggucugcaucgccugguccuccuccuccugccacgacggcaaggccuggcuccacgucugcgucaccggcgacgacgagaacgccaccgccuccuucaucuacaacggccgccucgucgacuccaucggcuccugguccaagaagauccuccgcacccaggaguccgagugcgucugcaucaacggcaccugcaccgucgucaugaccgacggcuccgccuccggcaaggccgacaccaagauccucuucaucgaggagggcaagaucguccacaucuccacccucuccggcuccgcccagcacgucgaggagugcuccugcuacccccgcuaccccggcguccgcugcgucugccgcgacaacuggaagggcuccaaccgccccaucgucgacaucaacgucaaggacuacuccaucgucuccuccuacgucugcuccggccucgucggcgacaccccccgcaagaacgacuccuucuccuccucccacugccucgaccccaacaacgaggagggcggccacggcgucaagggcugggccuucgacgacggcaacgacgucuggaugggccgcaccaucuccgagaagcuccgcuccggcuacgagaccuucaaggucaucgagggcugguccaagcccaacuccaagcuccagaucaaccgccaggucaucgucgagcgcggcaaccgcuccggcuacuccggcaucuucuccgucgagggcaaguccugcaucaaccgcugcuucuacgucgagcucauccgcggccgcaaggaggagaccgaggucugguggaccuccaacuccaucgucgucuucugcggcaccuccggcaccuacggcaccggcuccuggcccgacggcgccgacaucaaccucaugcccaucuga

SEQ ID NO: 111630 - RNA, 1410 nt, Artificial Sequence; identical to SEQ ID NO: 111629
  derived and/or modified CDS sequence (opt2) from neuraminidase__InfluenzaA__ABK80160

SEQ ID NO: 111631 - RNA, 1410 nt, Artificial Sequence
  derived and/or modified CDS sequence (opt2) from neuraminidase__InfluenzaA__ABK80171
augaaccccaaccagaagaucaucaccaucggcuccgucucccucaccaucgccaccaucugcuuccucaugcagaucgccauccucgucaccaccgucacccuccacuucaagcaguacgagugcaaccccccccccaacaaccaggucaugcucugcgagcccaccaucaucgagcgcaacaucaccgagaucgucuaccucaccaacaccaccaucgagaaggagaucugccccaagcucgccgaguaccgcaacugguccaagccccagugcaacaucaccggcuucgcccccuucuccaaggacaacuccauccgccucuccgccggcggcgacaucugggucacccgcgagcccuacgucuccugcgaccccgacaagugcuaccaguucgcccucggccagggcaccacccucaacaacggccacuccaacgacaccguccacgaccgcacccccuaccgcacccuccucaugaacgagcucggcguccccuuccaccucggcacccgccaggucugcaucgccugguccuccuccuccugccacgacggcaaggccuggcuccacgucugcgucaccggcgacgacgagaacgccaccgccuccuucaucuacaacggccgccucgucgacuccaucggcuccugguccaagaagauccuccgcacccaggaguccgagugcgucugcaucaacggcaccugcaccgucgucaugaccgacggcuccgccuccggcaaggccgacaccaagauccucuucaucgaggagggcaagaucguccacaucuccacccucuccggcuccgcccagcacgucgaggagugcuccugcuacccccgcuaccccggcguccgcugcgucugccgcgacaacuggaagggcuccaaccgccccaucgucgacaucaacgucaaggacuacuccaucuucuccuccuacgucugcuccggccucgucggcgacaccccccgcaagaacgacuccuucuccuccucccacugccucgaccccaacaacgaggagggcggccacggcgucaagggcugggccuucgacgacggcaacgacgucuggaugggccgcaccaucuccgagaagcuccgcuccggcuacgagaccuucaaggucaucgagggcugguccaagcccaacuccaagcuccagaccaaccgccaggucaucgucgagcgcggcaaccgcuccggcuacuccggcaucuucuccgucgagggcaaguccugcaucaaccgcugcuucuacgucgagcucauccgcggccgcaaggaggagaccgaggucugguggaccuccaacuccaucgucgucuucugcggcaccuccggcaccuacggcaccggcuccuggcccgacggcgccgacaucaaccucaugcccaucuga

SEQ ID NO: 111632 - RNA, 1410 nt, Artificial Sequence
  derived and/or modified CDS sequence (opt2) from neuraminidase__InfluenzaA__ABK80182
augaaccccaaccagaagaucaucaccaucggcuccgucucccucaccaucgccaccaucugcuuccucaugcagaucgccauccucgucaccaccgucacccuccacuucaagcaguacgagugcaacuccccccccaacaaccaggucaugcucugcgagcccaccaucaucgagcgcaacaucaccgagaucgucuaccucaccaacaccaccaucgagaaggagaucugccccaagcucgccgaguaccgcaacugguccaagccccagugcaacaucaccggcuucgcccccuucuccaaggacaacuccauccgccucuccgccggcggcgacaucugggucacccgcgagcccuacgucuccugcgaccccgacaagugcuaccaguucgcccucggccagggcaccacccucaacaacggccacuccaacgacaccguccacgaccgcacccccuaccgcacccuccucaugaacgagcucggcguccccuuccaccucggcacccgccaggucugcaucgccugguccuccuccuccugccacgacggcaaggccuggcuccacgucugcgucaccggcgacgacaagaacgccaccgccuccuucaucuacaacggcaagcucgucgacuccaucggcuccugguccaagaagauccuccgcacccaggaguccgagugcgucugcaucaacggcaccugcgccgucgucaugaccgacggcuccgccuccggcaaggccgacaccaagauccucuucaucgaggagggcaagaucguccacaucuccacccucuccggcuccgcccagcacgucgaggagugcuccugcuacccccgcuaccccggcguccgcugcgucugccgcgacaacuggaagggcuccaaccgccccaucgucgacaucaacgucaaggacuacuccaucgucuccuccuacgucugcuccggccucgucggcgacaccccccgcaagaacgacuccuucuccuccucccacugccucgaccccaacaacgaggagggcggccacggcgucaagggcugggccuucgacgacggcaacgacgucuggaugggccgcaccaucuccgagaagcuccgcuccggcuacgagaccuucaaggucaucgagggcugguccaagcccaacuccaagcuccagaccaaccgccaggucaucgucgagcgcggcaaccgcuccggcuacuccggcaucuucuccgucgagggcaaguccugcaucaaccgcugcuucuacgucgagcucauccgcggccgcaaggaggagaccgaggucugguggaccuccaacuccaucgucgucuucugcggcaccuccggcaccuacggcaccggcuccuggcccgacggcgccgacaucaaccucaugcccaucuga

SEQ ID NO: 111633 - RNA, 1410 nt, Artificial Sequence
  derived and/or modified CDS sequence (opt2) from neuraminidase__InfluenzaA__ABK80193
augaaccccaaccagaagaucaucaccaucggcuccgucucccucaccaucgccaccaucugcuuccucaugcagaucgccauccucgucaccaccgucacccuccacuucaagcaguacgagugcaacuccccccccaacaaccaggucaugcucugcgagcccaccaucaucgagcgcaacaucaccgagaucgucuaccucaccaacaccaccaucgagaaggagaucugccccaagcucgccgaguaccgcaacugguccaagccccagugcaacaucaccggcuucgcccccuucuccaaggacaacuccauccgccucuccgccggcggcgacaucugggucacccgcgagcccuacgucuccugcgaccccgacaagugcuaccaguucgcccucggccagggcaccacccucaacaacggccacuccaacgacaccguccacgaccgcacccccuaccgcacccuccucaugaacgagcucggcguccccuuccaccucggcacccgccaggucugcaucgccugguccuccuccuccugccacgacggcaaggccuggcuccacgucugcgucaccggcgacgacgagaacgccaccgccuccuucaucuacaacggccgccucgucgacuccaucggcuccugguccaagaagauccuccgcacccaggaguccgagugcgucugcaucaacggcaccugcaccgucgucaugaccgacggcuccgccuccggcaaggccgacaccaagauccucuucaucgaggagggcaagaucguccacaucuccacccucuccggcuccgcccagcacgucgaggagugcuccugcuacccccgcuaccccggcguccgcugcgucugccgcgacaacuggaagggcuccaaccgccccaucgucgacaucaacgucaaggacuacuccaucgucuccuccuacgucugcuccggccucgucggcgacaccccccgcaagaacgacuccuucuccuccucccacugccucgaccccaacaacgaggagggcggccacggcgucaagggcugggccuucgacgacggcaacgacgucuggaugggccgcaccaucggcgagaagcuccgcuccggcuacgagaccuucaaggucaucgagggcugguccaagcccaacuccaagcuccagaccaaccgccaggucaucgucgagcgcggcaaccgcuccggcuacuccggcaucuucuccgucgagggcaaguccugcaucaaccgcugcuucuacgucgagcucauccgcggccgcaaggaggagaccgaggucugguggaccuccaacuccaucgucgucuucugcggcaccuccggcaccuacggcaccggcuccuggcccgacggcgccgacaucaaccucaugcccaucuga

SEQ ID NO: 111634 - RNA, 1410 nt, Artificial Sequence
  derived and/or modified CDS sequence (opt2) from neuraminidase__InfluenzaA__ABK80204
augaaccccaaccagaagaucaucaccaucggcuccgucucccucaccaucgccaccaucugcuuccucaugcagaucgccauccucgucaccaccgucacccuccacuucaagcaguacgagugcaacuccccccccaacaaccaggucaugcucugcgagcccaccaucaucgagcgcaacaucaccgagaucgucuaccucaccaacaccaccaucgagaaggagaucugccccaagcucgccgaguaccgcaacugguccaagccccagugcaacaucaccggcuucgcccccuucuccaaggacaacuccauccgccucuccgccggcggcgacaucugggucacccgcgagcccuacgucuccugcgaccccgacaagugcuaccaguucgcccucggccagggcaccacccucaacaacggccacuccaacgacaccguccacgaccgcacccccuaccgcacccuccucaugaacgagcucggcguccccuuccaccucggcacccgccaggucugcaucgccugguccuccuccuccugccacgacggcaaggccuggcuccacgucugcgucaccggcgacgacgagaacgccaccgccuccuucaucuacaacggcaagcucgucgacuccaucggcuccugguccaagaagauccuccgcacccaggaguccgagugcgucugcaucaacggcaccugcgccgucgucaugaccgacggcuccgccuccggcaaggccgacaccaagauccucuucaucgaggagggcaagaucguccacaucuccacccucuccggcuccgcccagcacgucgaggagugcuccugcuacccccgcuaccccggcguccgcugcgucugccgcgacaacuggaagggcuccaaccgccccaucgucgacaucaacgucaaggacuacuccaucgucuccuccuacgucugcuccggccucgucggcgacaccccccgcaagaacgacuccuucuccuccucccacugccucgaccccaacaacgaggagggcggccacggcgucaagggcugggccuucgacgacggcaacgacgccuggaugggccgcaccaucuccgagaagcuccgcuccggcuacgagaccuucaaggucaucgagggcugguccaagcccaacuccaagcuccagaccaaccgccaggucaucgucgagcgcggcaaccgcuccggcuacuccggcaucuucuccgucgagggcaaguccugcaucaaccgcugcuucuacgucgagcucauccgcggccgcaaggaggagaccgaggucugguggaccuccaacuccaucgucgucuucugcggcaccuccggcaccuacggcaccggcuccuggcccgacggcgccgacaucaaccucaugcccaucuga

SEQ ID NO: 111635 - RNA, 1410 nt, Artificial Sequence; identical to SEQ ID NO: 110627
  derived and/or modified CDS sequence (opt2) from neuraminidase__InfluenzaA__ABK80215

SEQ ID NO: 111636 - RNA, 1410 nt, Artificial Sequence; identical to SEQ ID NO: 110627
  derived and/or modified CDS sequence (opt2) from neuraminidase__InfluenzaA__ABK80226

SEQ ID NO: 111637 - RNA, 1410 nt, Artificial Sequence
  derived and/or modified CDS sequence (opt2) from neuraminidase__InfluenzaA__ABK80237
augaaccccaaccagaagaucaucaccaucggcuccgucucccucaccaucgccaccaucugcuuccucaugcagaucgccauccucgucaccaccgucacccuccacuucaagcagcacgagugcaacuccccccccaacaaccaggucaugcucugcgagcccaccaucaucgagcgcaacaucaccgagaucgucuaccucaccaacaccaccaucgagaaggagaucugccccaagcucgucgaguaccgcaacugguccaagccccagugcaacaucaccggcuucgcccccuucuccaaggacaacuccauccgccucuccgccggcggcgacaucugggucacccgcgagcccuacgucuccugcgaccccgacaagugcuaccaguucgcccucggccagggcaccacccucaacaacggccacuccaacgacaccguccacgaccgcacccccuaccgcacccuccucaugaacgagcucggcguccccuuccaccucggcacccgccaggucugcaucgccugguccuccuccuccugccacgacggcaaggccuggcuccacgucugcgucaccggcgacgacaagaacgccaccgccuccuucaucuacaacggccgccucgucgacuccaucggcuccugguccaagaagauccuccgcacccaggaguccgagugcgucugcaucaacggcaccugcaccgucgucaugaccgacggcuccgccuccggcaaggccgacaccaagauccucuucaucgaggagggcaagaucguccacaucuccacccucuccggcuccgcccagcacgucgaggagugcuccugcuacccccgcuaccccggcguccgcugcgucugccgcgacaacuggaagggcuccaaccgccccaucgucgacaucaacgucaaggacuacuccaucgucuccuccuacgucugcuccggccucgucggcgacaccccccgcaagaccgacuccuucuccuccucccacugccucgaccccaacaacgaggagggcggccacggcgucaagggcugggccuucgacgacggcaacgacgucuggaugggccgcaccaucuccgagaagcuccgcuccggcuacgagaccuucaaggucaucgagggcugguccaagcccaacuccaagcuccagaucaaccgccaggucaucgucgagcgcggcaaccgcuccggcuacuccggcaucuucuccgucgagggcaaguccugcaucaaccgcugcuucuacgucgagcucauccgcggccgcaaggaggagaccgaggucugguggaccuccaacuccaucgucgucuucugcggcaccuccggcaccuacggcaccggcuccuggcccgacggcgccgacaucaaccucaugcccaucuga

SEQ ID NO: 111638 - RNA, 1410 nt, Artificial Sequence
  derived and/or modified CDS sequence (opt2) from neuraminidase__InfluenzaA__ABK80259
augaaccccaaccagaagaucaucaccaucggcuccgccucccucaccaucgccaccaucugcuuccucauccagaucgccauccucgucaccaccgucacccuccacuucaagcagcacgagugcaacuccccccccaacaaccaggucaugcucugcgagcccaccaucaucgagcgcaacaucaccgagaucgucuaccucaccaacaccaccaucgagaaggagaucugccccaagcucgccgaguaccgcaacugguccaagccccagugcaacaucaccggcuucgcccccuucuccaaggacaacuccauccgccucuccgccggcggcgacaucugggucacccgcgagcccuacgucuccugcgaccccgacaagugcuaccaguucgcccucggccagggcaccacccucaacaacggccacuccaacgacaccguccacgaccgcacccccuaccgcacccuccucaugaacgagcucggcguccccuuccaccucggcacccgccaggucugcaucgccugguccuccuccuccugccacgacggcaaggccuggcuccacgucugcgucaccggcgacgacaagaacgccaccgccuccuucaucuacaacggccgccucgucgacuccaucuccuccugguccaagaagauccuccgcacccaggaguccgagugcgucugcaucaacggcaccugcaccgucgucaugaccgacggcuccgccuccggcaaggccgacaccaagauccucuucaucgaggagggcaagaucauccacaucuccacccucuccggcuccgcccagcacgucgaggagugcuccugcuacccccgcuaccccggcguccgcugcgucugccgcgacaacuggaagggcuccaaccgccccaucgucgacaucaacgucaaggacuacuccaucgucuccuccuacgucugcuccggccucgucggcgacaccccccgcaagaacgacuccuucuccuccucccacugccucgaccccaacaacgaggagggcggccacggcgucaagggcugggccuucgacgacggcaacgacgucuggaugggccgcaccaucuccgagaagcuccgcuccggcuacgagaccuucaaggucaucgagggcugguccaaccccaacuccaagcuccagaucaaccgccaggucaucgucgagcgcggcaaccgcuccggcuacuccggcaucuucuccgucgagggcaaguccugcaucaaccgcugcuucuacgucgagcucauccgcggccgcaaggaggagaccgaggucugguggaccuccaacuccaucgucgucuucugcggcaccuccggcaccuacggcaccggcuccuggcccgacggcgccgacaucaaccucaugcccaucuga

SEQ ID NO: 111639 - RNA, 1410 nt, Artificial Sequence; identical to SEQ ID NO: 110363
  derived and/or modified CDS sequence (opt2) from neuraminidase__InfluenzaA__ABK80270

SEQ ID NO: 111640 - RNA, 1410 nt, Artificial Sequence; identical to SEQ ID NO: 110750
  derived and/or modified CDS sequence (opt2) from neuraminidase__InfluenzaA__ABK80281

SEQ ID NO: 111641 - RNA, 1410 nt, Artificial Sequence
  derived and/or modified CDS sequence (opt2) from neuraminidase__InfluenzaA__ABK80292
augaaccccaaccagaagaucaucaccaucggcuccgucucccucaccaucuccaccaucugcuucuucaugcagaucgccauccucaucaccaccgucacccuccacuucaagcaguacgaguucaacuccccccccaacaaccaggucaugcucugcgagcccaccaucaucgagcgcaacaucaccgagaucgucuaccucaccaacaccaccaucgagaaggagaucugccccaagcucgccgaguaccgcaacugguccaagccccagugcaacaucaccggcuucgcccccuucuccaaggacaacuccauccgccucuccgccggcggcgacaucugggucacccgcgagcccuacgucuccugcgaccccgacaagugcuaccaguucgcccucggccagggcaccacccucaacaacguccacuccaacgacaccguccacgaccgcacccccuaccgcacccuccucaugaacgagcucggcguccccuuccaccucggcaccaagcaggucugcaucgccugguccuccuccuccugccacgacggcaaggccuggcuccacgucugcgucaccggcgacgacaagaacgccaccgccuccuucaucuacaacggccgccucgucgacuccaucgucuccugguccaaggagauccuccgcacccaggaguccgagugcgucugcaucaacggcaccugcaccgucgucaugaccgacggcuccgccuccggcaaggccgacaccaagauccucuucaucgaggagggcaagaucauccacaccuccacccucuccggcuccgcccagcacgucgaggagugcuccugcuacccccgcuaccccggcguccgcugcgucugccgcgacaacuggaagggcuccaaccgccccaucgucgacaucaacaucaaggacuacuccaucgucuccuccuacgucugcuccggccucgucggcgacaccccccgcaagaacgacuccuccuccuccucccacugccucgaccccaacaacgaggagggcggccacggcgucaagggcugggccuucgacgacggcaacgacgucuggaugggccgcaccaucuccgagaagcuccgcuccggcuacgagaccuucaaggucaucgagggcugguccaaccccaacuccaagcuccagaucaaccgccaggucaucgucgaccgcuccaaccgcuccggcuacuccggcaucuucuccgucgagggcaaguccugcaucaaccgcugcuucuacgucgagcucauccgcggccgcaaggaggagaccgagguccucuggaccuccaacuccaucgucgucuucugcggcaccuccggcaccuacggcaccggcuccuggcccgacggcgccgacaucaaccucaugcccaucuga

SEQ ID NO: 111642 - RNA, 1410 nt, Artificial Sequence
  derived and/or modified CDS sequence (opt2) from neuraminidase__InfluenzaA__ABK80303
augaaccccaaccagaagaucaucaccaucggcuccgucucccucaccaucgccaccaucugcuuccucaugcagaucgccauccucgucaccaccgucacccuccacuucaagcaguacgagugcaacuccccccccaacaaccaggucaugcucuacgagcccaccaucaucgagcgcaacaucaccgagaucgucuaccucaccaacaccaccaucgagaaggagaucugccccaagcucgccgaguaccgcaacugguccaagccccagugcaacaucaccggcuucgcccccuucuccaaggacaacuccauccgccucuccgccggcggcgacaucugggucacccgcgagcccuacgucuccugcgaccccgacaagugcuaccaguucgcccucggccagggcaccacccucaacaacggccacuccaacgacaccguccacgaccgcacccccuaccgcacccuccucaugaacgagcucggcguccccuuccaccucggcacccgccaggucugcaucgccugguccuccuccuccugccacgacggcaaggccuggcuccacgucugcgucaccggcgacgacgagaacgccaccgccuccuucaucuacaacggccgccucgucgacuccaucggcuccugguccaagaagauccuccgcacccaggaguccgagugcgucugcaucaacggcaccugcaccgucgucaugaccgacggcaacgccuccggcaaggccgacaccaagauccucuucaucgaggagggcaagaucguccacaucuccacccucuccggcuccgcccagcacgucgaggagugcuccugcuacccccgcuaccccggcguccgcugcgucugccgcgacaacuggaagggcuccaaccgccccaucgucgacaucaacgucaaggacuacuccaucgucuccuccuacgucugcuccggccucgucggcgacaccccccgcaagaacgacuccuucuccuccucccacugccucgaccccaacaacgaggagggcggccacggcgucaagggcugggccuucgacgacggcaacgacgucuggaugggccgcaccaucuccgagaagcuccgcuccggcuacgagaccuucaaggucaucgagggcugguccaagcccaacuccaagcuccagaucaaccgccaggucaucgucgagcgcggcaaccgcuccggcuacuccggcaucuucuccgucgagggcaaguccugcaucaaccgcugcuucuacgucgagcucauccgcggccgcaaggaggagaccgaggucugguggaccuccaacuccaucgucgucuucugcggcaccuccggcaccuacggcaccggcuccuggcccgacggcgccgacaucaaccucaugcccaucuga

SEQ ID NO: 111643 - RNA, 1410 nt, Artificial Sequence
  derived and/or modified CDS sequence (opt2) from neuraminidase__InfluenzaA__ABK80314
augaaccccaaccagaagaucaucaccaucggcuccgucucccucaccaucgccaccaucugcuuccucaugcagaucgccauccucgucaccaccgucacccuccacuucaagcaguacgagugcgacuccccccccaacaaccaggucaugcucuacgagcccaccaucaucgagcgcaacaucaccgagaucgucuaccucaccaacaccaccaucgagaaggagaucugccccaagcucgccgaguaccgcaacugguccaagccccagugcaacaucaccggcuucgcccccuucuccaaggacaacuccauccgccucuccgccggcggcgacaucugggucacccgcgagcccuacgucuccugcgaccccgacaagugcuaccaguucgcccucggccagggcaccacccucaacaacggccacuccaacgacaccguccacgaccgcacccccuaccgcacccuccucaugaacgagcucggcguccccuuccaccucggcacccgccaggucugcaucgccugguccuccuccuccugccacgacggcaaggccuggcuccacgucugcgucaccggcgacgacgagaacgccaccgccuccuucaucuacaacggccgccucgucgacuccaucggcuccugguccaagaagauccuccgcacccaggaguccgagugcgucugcaucaacggcaccugcaccgucgucaugaccgacggcuccgccuccggcaaggccgacaccaagauccucuucaucgaggagggcaagaucguccacaucuccacccucuccggcuccgcccagcacgucgaggagugcuccugcuacccccgcuaccccggcguccgcugcgucugccgcgacaacuggaagggcuccaaccgccccaucgucgacaucaacgucaaggacuacuccaucgucuccuccuacgucugcuccggccucgucggcgacaccccccgcaagaacgacuccuucuccuccucccacugccucgaccccaacaacgaggagggcggccacggcgucaagggcugggccuucgacgacggcaacgacgucuggaugggccgcaccaucuccgagaagcuccgcuccggcuacgagaccuucaaggucaucgagggcugguccaagcccaacuccaagcuccagaucaaccgccaggucaucgucgagcgcggcaaccgcuccggcuacuccggcaucuucuccgucgagggcaaguccugcaucaaccgcugcuucuacgucgagcucauccgcggccgcaaggaggagaccgaggucugguggaccuccaacuccaucgucgucuucugcggcaccuccggcaccuacggcaccggcuccuggcccgacggcgccgacaucaaccucaugcccaucuga

SEQ ID NO: 111644 - RNA, 1350 nt, Artificial Sequence
  derived and/or modified CDS sequence (opt2) from neuraminidase__InfluenzaA__ABL07021
augaaccccaaccagaagaucaucaccaucggcuccaucugcauggucaucggcaucgucucccucaugcuccagaucggcaacaugaucuccaucugggucucccacuccauccagaagggcaaccagcaccaggccgaguccaucuccaacaccaacccccucaccgagaaggccgucgccuccaucacccucgccggcaacuccucccucugccccauccgcggcugggccguccacuccaaggacaacaacauccgcaucggcuccaagggcgacgucuucgucauccgcgagcccuucaucuccugcucccaccucgagugccgcaccuucuuccucacccagggcgcccuccucaacgacaagcacuccaacggcaccgucaaggaccgcuccccccaccgcacccucauguccugccccgucggcgaggcccccucccccuacaacucccgcuucgaguccgucgccugguccgccuccgccugccacgacggcaccuccuggcucaccaucggcaucuccggccccgacaacgaggccgucgccguccucaaguacaacggcaucaucaccgacaccaucaaguccuggcgcaacaacauccuccgcacccaggaguccgagugcgccugcgucaacggcuccugcuucaccgucaugaccgacggccccuccaacggccaggccuccuacaagaucuucaagaugaagaagggcaaggucgucaaguccgucgagcucgacgcccccaacuaccacuacgaggagugcuccugcuaccccgacgccggcgagaucaccugcgucugccgcgacaacuggcacggcuccaaccgccccugggucuccuucaaccagaaccucgaguaccagaucggcuacaucugcuccggcgucuucggcgacaacccccgccccaacgacggcaccggcuccugcggccccaugucccccaacggcgccuacggcgucaagggcuucuccuucaaguacggcaacggcgucuggaucggccgcaccaaguccaccaacucccgcuccggcuucgagaugaucugggaccccaacggcuggaccggcaccgacuccuccuucuccgucaagcaggacaucgucgccaucaccgacugguccggcuacuccggcuccuucguccagcaccccgagcucaccggccucgacugcauccgccccugcuucugggucgagcucauccgcggccgccccaaggaguccaccaucuggaccuccggcuccuccaucuccuucugcggcgucaacuccgacaccgucuccugguccuggcccgacggcgccgagcuccccuucaccaucgacaaguga

SEQ ID NO: 111645 - RNA, 1350 nt, Artificial Sequence
  derived and/or modified CDS sequence (opt2) from neuraminidase__InfluenzaA__ABL07032
augaaccccaaccagaagaucaucaccaucggcuccaucugcauggucaucggcaucgucucccucaugcuccagaucggcaacauggucuccaccugggucucccacuccauccagaccggcaaccaguaccaggccgaguccaucuccaacaccaacccccucaccgagaaggccgucgccuccgucacccucgccggcaacuccucccucugccccauccgcggcugggccguccacuccaaggacaacaacauccgcaucggcuccaagggcgacgucuucgucauccgcgagcccuucaucuccugcucccaccucgagugccgcaccuucuuccucacccagggcgcccuccucaacgacaagcacuccaacggcaccgucaaggaccgcuccccccaccgcacccucauguccugccccgucggcgaggcccccucccccuacaacucccgcuucgaguccgucgccugguccgccuccgccugccacgacggcaccuccuggcucaccaucggcaucuccggccccgacaacgaggccgucgccguccucaaguacaacggcaucaucaccgacaccaucaaguccuggcgcaacaacauccuccgcacccaggaguccgagugcgccugcgucaacggcuccugcuucaccgucaugaccgacggccccuccaacggccaggccuccuacaagaucuucaagauggagaagggcaaggucgucaaguccgucgagcucgacgcccccaacuaccacuacgaggagugcuccugcuaccccgacgccggcgagaucaccugcgucugccgcgacaacuggcacggcuccaaccgccccugggucuccuucaaccagaaccucgaguaccagaucggcuacaucugcuccggcgucuucggcgacaacccccgccccaacgacggcaccggcuccugcggccccaugucccccaacggcgccuacggcgucaagggcuucuccuucaaguacggcaacggcgucuggaucggccgcaccaaguccaccaacucccgcuccggcuucgagaugaucugggaccccaacggcuggaccggcaccgacuccuccuucuccgucaagcaggacaucgucgccaucaccgacugguccggcuacuccggcuccuucguccagcaccccgagcucaccggccucgacugcauccgccccugcuucugggucgagcucauccgcggccgccccaaggaguccaccaucuggaccuccggcuccuccaucuccuucugcggcgucaacuccgacaccgucuccugguccuggcccgacggcgccgagcuccccuucaccaucgacaaguga

SEQ ID NO: 111646 - RNA, 1350 nt, Artificial Sequence
  derived and/or modified CDS sequence (opt2) from neuraminidase__InfluenzaA__ABL31746
augaaccccaaccagaagaucaucaccaucggcuccaucugcauggucaucggcaucgucucccucaugcuccagaucggcaacaugaucuccaucugggucucccacuccauccagaccggcaaccagcaccaggccgaguccaucuccaacaccaacccccucaccgagaaggccgucgccuccgucacccucgccggcaacuccucccucugccccauccgcggcugggccguccacuccaaggacaacaacauccgcaucggcuccaagggcgacgucuucgucauccgcgagcccuucaucuccugcucccaccucgagugccgcaccuucuuccucacccagggcgcccuccucaacgacaagcacuccaacggcaccgucaaggaccgcuccccccaccgcacccucauguccugccccgucggcgaggcccccucccccuacaacucccgcuucgaguccgucgccugguccgccuccgccugccacgacggcaacuccuggcucaccaucggcaucuccggccccgacaacgaggccgucgccguccucaaguacaacggcaucaucaccgacaccaucaaguccuggcgcaagaacauccuccgcacccaggaguccgagugcgccugcgucaacggcuccugcuucaccgucaugaccgacggccccuccaacggccaggccuccuacaagaucuucaagauggagaagggcaaggucgucaaguccgucgagcucgacgcccccaacuaccacuacgaggagugcuccugcuaccccgacgccggcgagaucaccugcgucugccgcgacaacuggcacggcuccaaccgccccugggucuccuucaaccagaaccucgaguaccagaucggcuacaucugcuccggcgucuucggcgacaacccccgccccaacgacggcaccggcuccugcggccccaugucccccaacggcgccuacggcgucaagggcuucuccuucaaguacggcaacggcgucuggaucggccgcaccaaguccaccaacucccgcuccggcuucgagaugaucugggaccccaacggcuggaccggcaccgacuccuccuucuccgucaagcaggacaucgucgccaucaccgacugguccggcuacuccggcuccuucguccagcaccccgagcucaccggccucgacugcauccgccccugcuucugggucgagcucauccgcggccgccccaaggaguccaccaucuggaccuccggcuccuccaucuccuucugcggcgucaacuccgacaccgucuccugguccuggcccgacggcgccgagcuccccuucaccaucgacaaguga

SEQ ID NO: 111647 - RNA, 1350 nt, Artificial Sequence
  derived and/or modified CDS sequence (opt2) from neuraminidase__InfluenzaA__ABL31757
augaaccccaaccagaagaucaucaccaucggcuccaucugcauggucaucggcaucgucucccucaugcuccagaucggcaacaugaucuccaucugggucucccacuccauccagaccggcaaccagcaccaggccgaguccaucuccaacaccaacccccucaccgagaaggccgucgccuccgucacccucgccggcaacuccucccucugccccauccgcggcugggccguccacuccaaggacaacaacauccgcaucggcuccaagggcgacgucuucgucauccgcgagcccuucaucuccugcucccaccucgagugccgcaccuucuuccucacccagggcgcccuccucaacgacaagcacuccaacggcaccgucaaggaccgcuccccccaccgcacccucauguccugccccgucggcgaggcccccucccccuacaacucccgcuucgaguccgucgccugguccgccuccgccugccacgacggcaccuccuggcucaccaucggcaucuccggccccgacaacgaggccgucgccguccucaaguacaacggcaucaucaccgacaccaucaaguccuggcgcaacaacauccuccgcacccaggaguccgagugcgccugcgucaacggcuccugcuucaccgucaugaccgacggccccuccaacggccaggccuccuacaagaucuucaagauggagaagggcaaggucgucaaguccgucgagcucgacgcccccaacuaccacuacgaggagugcuccugcuaccccgacgccggcgagaucaccugcgucugccgcgacaacuggcacggcuccaaccgccccugggucuccuucaaccagaaccucgaguaccagaucggcuacaucugcuccggcgucuucggcgacaacccccgccccaacgacggcaccggcuccugcggccccaugucccccaacggcgccuacggcgucaagggcuucuccuucaaguacggcaacggcgucuggaucggccgcaccaaguccaccaacucccgcuccggcuucgagaugaucugggaccccaacggcuggaccggcaccgacuccuccuucuccgucaagcaggacaucgucgccaucaccgacugguccggcuacuccggcuccuucguccagcaccccgagcucaccggccucgacugcauccgccccugcuucugggucgagcucauccgcggccgccccaaggaguccaccaucuggaccuccggcuccuccaucuccuucugcggcgucaacuccgacaccgucuccugguccuggcccgacggcgccgagcuccccuucaccaucgacaaguga

SEQ ID NO: 111648 - RNA, 1350 nt, Artificial Sequence; identical to SEQ ID NO: 111647
  derived and/or modified CDS sequence (opt2) from neuraminidase__InfluenzaA__ABL31768

SEQ ID NO: 111649 - RNA, 1410 nt, Artificial Sequence; identical to SEQ ID NO: 110627
  derived and/or modified CDS sequence (opt2) from neuraminidase__InfluenzaA__ABL67168

SEQ ID NO: 111650 - RNA, 1410 nt, Artificial Sequence; identical to SEQ ID NO: 110766
  derived and/or modified CDS sequence (opt2) from neuraminidase__InfluenzaA__ABL67179

SEQ ID NO: 111651 - RNA, 1413 nt, Artificial Sequence; identical to SEQ ID NO: 111592
  derived and/or modified CDS sequence (opt2) from neuraminidase__InfluenzaA__ABL67190

SEQ ID NO: 111652 - RNA, 1410 nt, Artificial Sequence
  derived and/or modified CDS sequence (opt2) from neuraminidase__InfluenzaA__ABL67201
augaaccccaaccagaagaucaucaccaucuccuccgucucccucaccaucuccaccaucugcuucuucaugcagaucgccauccucaucaccaccgucacccuccacuucaagcaguacgaguucaacuccccccccaacaaccaggucaugcucugcgagcccaccaucaucgagcgcaacaucaccgagaucgucuaccucaccaacaccaccaucgagaaggagaucugccccaagcucgccgaguaccgcaacugguccaagccccagugcgacaucaccggcuucgcccccuucuccaaggacaacuccauccgccucuccgccggcggcgacaucugggucacccgcgagcccuacgucuccugcgaccccgacaagugcuaccaguucgcccucggccagggcaccacccucaacaacguccacuccaacgacaccguccacgaccgcacccccuaccgcacccuccucaugaacgagcucggcguccccuuccaccucggcaccaagcaggucugcaucgccugguccuccuccuccugccacgacggcaaggccuggcuccacgucugcgucaccggcgacgacaagaacgccaccgccuccuucaucuacaacggccgccucgucgacuccaucgucuccugguccaagaagauccuccgcacccaggaguccgagugcgucugcaucaacggcaccugcaccgucgucaugaccgacggcuccgccuccggcaaggccgacaccaagauccucuucaucgaggagggcaagaucguccacaccuccacccucuccggcuccgcccagcacgucgaggagugcuccugcuacccccgcuaccccggcguccgcugcgucugccgcgacaacuggaagggcuccaaccgccccaucgucgacaucaacaucaaggacuacuccaucgucuccuccuacgucugcuccggccucgucggcgacaccccccgcaagaacgacuccuccuccuccucccacugccucgaccccaacaacgaggagggcggccacggcgucaagggcugggccuucgacgacggcaacgacgucuggaugggccgcaccaucuccgagaagcuccgcuccggcuacgagaccuucaaggucaucgagggcugguccaaccccaacuccaagcuccagaucaaccgccaggucaucgucgaccgcggcaaccgcuccggcuacuccggcaucuucuccgucgagggcaaguccugcaucaaccgcugcuucuacgucgagcucauccgcggccgcaaggaggagaccgagguccucuggaccuccaacuccaucgucgucuucugcggcaccuccggcaccuacggcaccggcuccuggcccgacggcgccgacaucaaccucaugcccaucuga

SEQ ID NO: 111653 - RNA, 1413 nt, Artificial Sequence; identical to SEQ ID NO: 111592
  derived and/or modified CDS sequence (opt2) from neuraminidase__InfluenzaA__ABL67212

SEQ ID NO: 111654 - RNA, 1413 nt, Artificial Sequence; identical to SEQ ID NO: 111095
  derived and/or modified CDS sequence (opt2) from neuraminidase__InfluenzaA__ABL67256

SEQ ID NO: 111655 - RNA, 1413 nt, Artificial Sequence; identical to SEQ ID NO: 111095
  derived and/or modified CDS sequence (opt2) from neuraminidase__InfluenzaA__ABL67267

SEQ ID NO: 111656 - RNA, 1410 nt, Artificial Sequence; identical to SEQ ID NO: 110097
  derived and/or modified CDS sequence (opt2) from neuraminidase__InfluenzaA__ABL67278

SEQ ID NO: 111657 - RNA, 1410 nt, Artificial Sequence
  derived and/or modified CDS sequence (opt2) from neuraminidase__InfluenzaA__ABL67289
augaaccccaaccagaagaucaucaccaucggcuccgucucccucaccaucgccaccaucugcuuccucaugcagaucgccauccucgucaccaccgucacccuccacuucaagcaguacgagugcaacuccccccccaacaaccaggucaugcucuacgagcccaccaucaucgagcgcaacaucaccgagaucgucuaccucaccaacaccaccaucgagaaggagaucugccccaagcucgccgaguaccgcaacugguccaagccccagugcaacaucaccggcuucgcccccuucuccaaggacaacuccauccgccucuccgccggcggcgacaucugggucacccgcgagcccuacgucuccugcgaccccgacaagugcuaccaguucgcccucggccagggcaccacccucaacaacggccacuccaacgacaccguccacgaccgcacccccuaccgcacccuccucaugaacgagcucggcguccccuuccaccucggcacccgccaggucugcaucgccugguccuccuccuccugccacgacggcaaggccuggcuccacgucugcgucaccggcgacgacgagaacgccaccgccuccuucaucuacaacggccgccucgucgacuccaucggcuccugguccaagaagauccuccgcacccaggaguccgagugcgucugcaucaacggcaccugcaccgucgucaugaccgacggcuccgccuccggcaaggccgacaccaagauccucuucaucgaggagggcaagaucguccacaucuccacccucuccggcuccgcccagcacgucgaggagugcuccugcuacccccgcuaccccggcguccgcugcgucugccgcgacaacuggaagggcuccaaccgccccaucgucgacaucaacgucaaggacuacuccaucgucuccuccuacgucugcuccggccucgucggcgacaccccccgcaagaacgacuccuucuccuccucccacugccucgaccccaacaacgaggagggcggccacggcgucaagggcugggccuucgacgacggcaacgacgucuggaugggccgcaccaucuccgagaagcuccgcuccggcuacgagaccuucaaggucaucgagggcugguccaagcccaacuccaagcuccagaucaaccgccaggucaucgucgagcgcggcaaccgcuccggcuacuccggcaucuucuccgucgagggcaaguccugcaucaaccgcugcuucuacgucgagcucauccgcggccgcaaggaggagaccgaggucugguggaccuccaacuccaucgucgucuucugcggcaccuccggcaccuacggcaccggcuccuggcccgacggcgccgacaucaaccucaugcccaucuga

SEQ ID NO: 111658 - RNA, 1410 nt, Artificial Sequence
  derived and/or modified CDS sequence (opt2) from neuraminidase__InfluenzaA__ABL67300
augaaccccaaccagaagaucaucaccaucggcuccgucucccucaccaucgccaccaucugcuuccucaugcagaucgccauccucgucaccaccgucacccuccacuucaagcaguacgagugcaacuccccccccaacaaccaggucaugcucugcgagcccaccaucaucgagcgcaacaucaccgagaucgucuaccucaccaacaccaccaucgagaaggagaucugccccaagcucgccgaguaccgcaacugguccaagccccagugcaacaucaccggcuucgcccccuucuccaaggacaacuccauccgccucuccgccggcggcgacaucugggucacccgcgagcccuacgucuccugcgaccccgacaagugcuaccaguucgcccucggccagggcaccacccucaacaacggccacuccaacgacaccguccacgaccgcacccccuaccgcacccuccucaugaacgagcucggcguccccuuccaccucggcacccgccaggucugcaucgccugguccuccuccuccugccacgacggcaaggccuggcuccacgucugcgucaccggcgacgacgagaacgccaccgccuccuucaucuacaacggccgccucgucgacuccaucggcuccugguccaagaacauccuccgcacccaggaguccgagugcgucugcaucaacggcaccugcaccgucgucaugaccgacggcuccgccuccggcaaggccgacaccaagauccucuucaucgaggagggcaagaucguccacaucuccacccucuccggcuccgcccagcacgucgaggagugcuccugcuacccccgcuaccccggcguccgcugcgucugccgcgacaacuggaagggcuccaaccgccccaucgucgacaucaacgucaaggaccacuccaucgucuccuccuacgucugcuccggccucgucggcgacaccccccgcaagaacgacuccuucuccuccucccacugccucgaccccaacaacgaggagggcggccacggcgucaagggcugggccuucgacgacggcaacgacgucuggaugggccgcaccaucuccgagaagcuccgcuccggcuacgagaccuucaaggucaucgagggcugguccaagcccaacuccaagcuccagaucaaccgccaggucaucgucgagcgcggcaaccgcuccggcuacuccggcaucuucuccgucgagggcaaguccugcaucaaccgcugcuucuacgucgagcucauccgcggccgcaaggaggagaccgaggucugguggaccuccaacuccaucgucgucuucugcggcaccuccggcaccuacggcaccggcuccuggcccgacggcgccgacaucaaccucaugcccaucuga

SEQ ID NO: 111659 - RNA, 1410 nt, Artificial Sequence; identical to SEQ ID NO: 110216
  derived and/or modified CDS sequence (opt2) from neuraminidase__InfluenzaA__ABL67311

SEQ ID NO: 111660 - RNA, 1410 nt, Artificial Sequence
  derived and/or modified CDS sequence (opt2) from neuraminidase__InfluenzaA__ABL67322
augaaccccaaccagaagaucaucaccaucggcuccgucucccucaccaucgccaccaucugcuuccucaugcagaucgccauccucgucaccaccgucacccuccacuucaagcaguacgagugcaaccccccccccaacaaccaggucaugcucugcgagcccaccaucaucgagcgcaacaucaccgagaucgucuaccucaccaacaccaccaucgagaaggagaucugccccaagcucgccgaguaccgcaacugguccaagccccagugcaacaucaccggcuucgcccccuucuccaaggacaacuccauccgccucuccgccggcggcgacaucugggucacccgcgagcccuacgucuccugcgaccccgacaagugcuaccaguucgcccucggccagggcaccacccucaacaacggccacuccaacgacaccguccacgaccgcacccccuaccgcacccuccucaugaacgagcucggcguccccuuccaccucggcacccgccaggucugcaucgccugguccuccuccuccugccacgacggcaaggccuggcuccacgucugcgucaccggcgacgacgagaacgccaccgccuccuucaucuacaacggccgccucgucgacuccaucggcuccugguccaagaagauccuccgcacccaggaguccgagugcgucugcaucaacggcaccugcaccgucgucaugaccgacggcuccgccuccggcaaggccgacaccaagauccucuucaucgaggagggcaagaucguccacaccuccacccucuccggcuccgcccagcacgucgaggagugcuccugcuacccccgcuaccccggcguccgcugcgucugccgcgacaacuggaagggcuccaaccgccccaucgucgacaucaacgucaaggacuacuccaucgucuccuccuacgucugcuccggccucgucggcgacaccccccgcaagaacgacuccuucuccuccucccacugccucgaccccaacaacgaggagggcggccacggcgucaagggcugggccuucgacgacggcaacgacgucuggaugggccgcaccaucuccgagaagcuccgcuccggcuacgagaccuucaaggucaucgagggcugguccaagcccaacuccaagcuccagaccaaccgccaggucaucgucgagcgcggcaaccgcuccggcuacuccggcaucuucuccgucgagggcaaguccugcaucaaccgcugcuucuacgucgagcucauccgcggccgcaaggaggagaccgaggucugguggaccuccaacuccaucgucgucuucugcggcaccuccggcaccuacggcaccggcuccuggcccgacggcgccgacaucaaccucaugcccaucuga

SEQ ID NO: 111661 - RNA, 1410 nt, Artificial Sequence
  derived and/or modified CDS sequence (opt2) from neuraminidase__InfluenzaA__ABL67333
augaaccccaaccagaagaucaucaccaucggcuccgucucccucaccaucgccaccaucugcuuccucaugcagaucgccauccucgucaucaccgucacccuccacuucaagcaguacgagugcaacuccccccccaacaaccaggucaugcucugcgagcccaccaucaucgagcgcaacaucaccgagaucgucuaccucaccaacaccaccaucgagaaggagaucugccccaagcucgccgaguaccgcaacugguccaagccccagugcaacaucaccggcuucgcccccuucuccaaggacaacuccauccgccucuccgccggcggcgacaucugggucacccgcgagcccuacgucuccugcgaccccgacaagugcuaccaguucgcccucggccagggcaccacccucaacaacggccacuccaacgacaccguccacgaccgcacccccuaccgcacccuccucaugaacgagcucggcguccccuuccaccucggcacccgccaggucugcaucgccugguccuccuccuccugccacgacggcaaggccuggcuccacgucugcgucaccggcgacgacgagaacgccaccgccuccuucaucuacaacggcaagcucgucgacuccaucggcuccugguccaagaagauccuccgcacccaggaguccgagugcgucugcaucaacggcaccugcgccgucgucaugaccgacggcuccgccuccggcaaggccgacaccaagauccucuucaucgaggagggcaagaucguccacaucuccacccucuccggcuccgcccagcacgucgaggagugcuccugcuacccccgcuaccccggcguccgcugcgucugccgcgacaacuggaagggcuccaaccgccccaucgucgacaucaacgucaaggacuacuccaucgucuccuccuacgucugcuccggccucgucggcgacaccccccgcaagaacgacuccuucuccuccucccacugccucgaccccaacaacgaggagggcggccacggcgucaagggcugggccuucgacgacggcaacgacgucuggaugggccgcaccaucuccgagaagcuccgcuccggcuacgagaccuucaaggucaucgagggcugguccaagcccaacuccaagcuccagaccaaccgccaggucaucgucgagcgcggcaaccgcuccggcuacuccggcaucuucuccgucgagggcaaguccugcaucaaccgcugcuucuacgucgagcucauccgcggccgcaaggaggagaccgaggucugguggaccuccaacuccaucgucgucuucugcggcaccuccggcaccuacggcaccggcuccuggcccgacggcgccgacaucaaccucaugcccaucuga

SEQ ID NO: 111662 - RNA, 1410 nt, Artificial Sequence; identical to SEQ ID NO: 110627
  derived and/or modified CDS sequence (opt2) from neuraminidase__InfluenzaA__ABL67344

SEQ ID NO: 111663 - RNA, 1410 nt, Artificial Sequence
  derived and/or modified CDS sequence (opt2) from neuraminidase__InfluenzaA__ABL67355
augaaccccaaccagaagaucaucaccaucggcuccgucucccucaccaucgccaccaucugcuuccucaugcagaucgccauccucgucaccaccgucacccuccacuucaagcagcacgagugcaacuccccccccaacaaccaggucaugcucugcgagcccaccaucaucgagcgcaacaucaccgagaucgucuaccucaccaacaccaccaucgagaaggagaucugccccaagcucgucgaguaccgcaacugguccaagccccagugcaacaucaccggcuucgcccccuucuccaaggacaacuccauccgccucuccgccggcggcgacaucugggucacccgcgagcccuacgucuccugcgaccccgagaagugcuaccaguucgcccucggccagggcaccacccucaacaacggccacuccaacgacaccguccacgaccgcacccccuaccgcacccuccucaugaacgagcucggcguccccuuccaccucggcaccaagcaggucugcaucgccugguccuccuccuccugccacgacggcaaggccuggcuccacgucugcgucaccggcgacgacaagaacgccaccgccuccuucaucuacaacggccgccucgucgacuccaucggcuccugguccaagaagauccuccgcacccaggaguccgagugcgucugcaucaacggcaccugcaccgucgucaugaccgacggcuccgccuccggcaaggccgacaccaagauccucuucaucgaggagggcaagaucguccacaucuccacccucuccggcuccgcccagcacgucgaggagugcuccugcuacccccgcuaccccggcguccgcugcgucugccgcgacaacuggaagggcuccaaccgccccaucgucgacaucaacgucaaggacuacuccaucgucuccuccuacgucugcuccggccucgucggcgacaccccccgcaagaacgacuccuucuccuccucccacugccucgaccccaacaacgaggagggcggccacggcgucaagggcugggccuucgacgacggcaacgacgucuggaugggccgcaccaucuccgagaagcuccgcuccggcuacgagaccuucaaggucaucgagggcugguccaagcccaacuccaagcuccagaucaaccgccaggucaucgucgagcgcggcaaccgcuccggcuacuccggcaucuucuccgucgagggcaaguccugcaucaaccgcugcuucuacgucgagcucauccgcggccgcaaggaggagaccgaggucugguggaccuccaacuccaucgucgucuucugcggcaccuccggcaccuacggcaccggcuccuggcccgacggcgccgacaucaaccucaugcccaucuga

SEQ ID NO: 111664 - RNA, 1410 nt, Artificial Sequence
  derived and/or modified CDS sequence (opt2) from neuraminidase__InfluenzaA__ABL67366
augaaccccaaccagaagaucaucaccaucggcuccgucucccucaccaucgccaccaucugcuuccucaugcagaucgccauccucgucaccaccgucacccuccacuucaagcagcacgagugcaacuccccccccaacaaccaggucaugcucugcgagcccaccaucaucgagcgcaacaucaccgagaucgucuaccucaccaacaccaccaucgagaaggagaucugccccaagcucgccgaguaccgcaacugguccaagccccagugcaacaucaccggcuucgcccccuucuccaaggacaacuccauccgccucuccgccggcggcgacaucugggucacccgcgagcccuacgucuccugcgaccccgacaagugcuaccaguucgcccucggccagggcaccacccucaacaacggccacuccaacgacaccguccacgaccgcacccccuaccgcacccuccucaugaacgagcucggcguccccuuccaccucggcacccgccaggucugcaucgccugguccuccuccuccugccacgacggcaaggccuggcuccacgucugcgucaccggcgacgacaagaacgccaccgccuccuucaucuacaacggccgccucgucgacuccaucggcuccugguccaagaagauccuccgcacccaggaguccgagugcgucugcaucaacggcaccugcaccgucgucaugaccgacggcuccgccuccggcaaggccgacacccgcauccucuucaucgaggagggcaagaucguccacaucuccacccucuccggcuccgcccagcacgucgaggagugcuccugcuacccccgcuaccccggcguccgcugcgucugccgcgacaacuggaagggcuccaaccgccccaucgucgacaucaacgucaaggacuacuccaucgucuccuccuacgucugcuccggccucgucggcgacaccccccgcaagaacgacuccuucuccuccucccacugccucgaccccaacaacgaggagggcggccacggcgucaagggcugggccuucgacgacggcaacgacgucuggaugggccgcaccaucuccgagaagcuccgcuccggcuacgagaccuucaaggucaucgagggcugguccaagcccaacuccaagcuccagaucaaccgccaggucaucgucgagcgcggcaaccgcuccggcuacuccggcaucuucuccgucgagggcaaguccugcaucaaccgcugcuucuacgucgagcucauccgcggccgcaaggaggagaccgaggucugguggaccuccaacuccaucgucgucuucugcggcaccuccggcaccuacggcaccggcuccuggcccgacggcgccgacaucaaccucaugcccaucuga

SEQ ID NO: 111665 - RNA, 1410 nt, Artificial Sequence
  derived and/or modified CDS sequence (opt2) from neuraminidase__InfluenzaA__ABL67377
augaaccccaaccagaagaucaucaccaucggcuccgccucccucaccaucgccaucaucugcuuccucauccagaucgccauccucgucaccaccgucacccuccacuucaagcagcacgagugcaacuccccccccaacaaccaggucaugcucugcgagcccaccaucaucgagcgcaacaucaccgagaucgucuaccucaccaacaccaccaucgagaaggagaucugccccaagcucgccgaguaccgcaacugguccaagccccagugcaacaucaccggcuucgcccccuucuccaaggacaacuccauccgccucuccgccggcggcgacaucugggucacccgcgagcccuacgucuccugcgaccccgacaagugcuaccaguucgcccucggccagggcaccacccucaacaacggccacuccaacgacaccguccacgaccgcacccccuaccgcacccuccucaugaacgagcucggcguccccuuccaccucggcacccgccaggucugcaucgccugguccuccuccuccugccacgacggcaaggccuggcuccacgucugcgucaccggcgacgacaagaacgccaccgccuccuucaucuacaacggccgccucgucgacuccaucuccuccugguccaagaagauccuccgcacccaggaguccgagugcgucugcaucaacggcaccugcaccgucgucaugaccgacggcuccgccuccggcaaggccgacaccaagauccucuucaucgaggagggcaagaucauccacaucuccacccucuccggcuccgcccagcacgucgaggagugcuccugcuacccccgcuaccccggcguccgcugcgucugccgcgacaacuggaagggcuccaaccgccccaucgucgacaucaacgucaaggacuacuccaucgucuccuccuacgucugcuccggccucgucggcgacaccccccgcaagaacgacuccuucuccuccucccacugccucgaccccaacaacgaggagggcggccacggcgucaagggcugggccuucgacgacggcaacgacgucuggaugggccgcaccaucuccgagaagcuccgcuccggcuacgagaccuucaaggucaucgagggcugguccaaccccaacuccaagcuccagaucaaccgccaggucaucgucgagcgcggcaaccgcuccggcuacuccggcaucuucuccgucgagggcaaguccugcaucaaccgcugcuucuacgucgagcucauccgcggccgcaaggaggagaccgaggucugguggaccuccaacuccaucgucgucuucugcggcaccuccggcaccuacggcaccggcuccuggcccgacggcgccgaccucaaccucaugcccaucuga

SEQ ID NO: 111666 - RNA, 1410 nt, Artificial Sequence; identical to SEQ ID NO: 110363
  derived and/or modified CDS sequence (opt2) from neuraminidase__InfluenzaA__ABL67388

SEQ ID NO: 111667 - RNA, 1410 nt, Artificial Sequence; identical to SEQ ID NO: 110363
  derived and/or modified CDS sequence (opt2) from neuraminidase__InfluenzaA__ABL67399

SEQ ID NO: 111668 - RNA, 1410 nt, Artificial Sequence; identical to SEQ ID NO: 110748
  derived and/or modified CDS sequence (opt2) from neuraminidase__InfluenzaA__ABL67410

SEQ ID NO: 111669 - RNA, 1410 nt, Artificial Sequence
  derived and/or modified CDS sequence (opt2) from neuraminidase__InfluenzaA__ABL67421
augaaccccaaccagaagaucaucaccaucggcuccaucucccucaccaucuccaccaucugcuucuucaugcagaucgccauccucaucaccaccgucacccuccacuucaagcaguacgaguucaacuccccccccaacaaccaggucaugcucugcgagcccaccaucaucgagcgcaacaucaccgagaucgucuaccucaccaacaccaccaucgagaaggagaucugccccaagcucgccgaguaccgcaacugguccaagccccagugcaacaucaccggcuucgcccccuucuccaaggacaacuccauccgccucuccgccggcggcgacaucugggucacccgcgagcccuacgucuccugcgaccccgacaagugcuaccaguucgcccucggccagggcaccacccucaacaacguccacuccaacgacaccguccacgaccgcacccccuaccgcacccuccucaugaacgagcucggcguccccuuccaccucggcaccaagcaggucugcaucgccugguccuccuccuccugccacgacggcaaggccuggcuccacgucugcgucaccggcgacgacaagaacgccaccgccuccuucaucuacaacggccgccucgucgacuccaucgucuccugguccaaggagauccuccgcacccaggaguccgagugcgucugcaucaacggcaccugcaccgucgucaugaccgacggcuccgccuccggcaaggccgacaccaagauccucuucaucgaggagggcaagaucguccacaccuccacccucuccggcuccgcccagcacgucgaggagugcuccugcuacccccgcuaccccggcguccgcugcgucugccgcgacaacuggaagggcuccaaccgccccaucgucgacaucaacaucaaggacuacuccaucgucuccuccuacgucugcuccggccucgucggcgacaccccccgcaagaacgacuccuccuccuccucccacugccucgaccccaacaacgaggagggcggccacggcgucaagggcugggccuucgacgacggcaacgacgucuggaugggccgcaccaucuccgagaagcuccgcuccggcuacgagaccuucaaggucaucgagggcugguccaaccccaacuccaagcuccagaucaaccgccaggucaucgucgaccgcggcaaccgcuccggcuacuccggcaucuucuccgucgagggcaaguccugcaucaaccgcugcuucuacgucgagcucauccgcggccgcaaggaggagaccgagguccucuggaccuccaacuccaucgucgucuucugcggcaccuccggcaccuacggcaccggcuccuggcccgacggcgccgacaucaaccucaugcccaucuga

SEQ ID NO: 111670 - RNA, 1350 nt, Artificial Sequence
  derived and/or modified CDS sequence (opt2) from neuraminidase__InfluenzaA__ABL67772
augaaccccaacaagaagaucaucaccaucggcuccaucugcauggucaccggcauggucucccucaugcuccagaucggcaaccucaucuccaucugggucucccacuccauccacaccggcaaccagcacaaggccgagcccaucuccaacaccaacuuccucaccgagaaggccgucgccuccgucaagcucgccggcaacuccucccucugccccaucaacggcugggccgucuacuccaaggacaacuccauccgcaucggcuccaagggcgacgucuucgucauccgcgagcccuucaucuccugcucccaccucgagugccgcaccuucuuccucacccagggcgcccuccucaacgacaagcacuccaacggcaccgucaaggaccgcuccccccaccgcacccucauguccugccccgucggcgaggcccccucccccuacaacucccgcuucgaguccgucgccugguccgccuccgccugccacgacggcaccuccuggcucaccaucggcaucuccggccccgacaacggcgccgucgccguccucaaguacaacggcaucaucaccgacaccaucaaguccuggcgcaacaacauccuccgcacccaggaguccgagugcgccugcgucaacggcuccugcuucaccgucaugaccgacggccccuccaacggccaggccucccacaagaucuucaagauggagaagggcaaggucgucaaguccgucgagcucgacgcccccaacuaccacuacgaggagugcuccugcuaccccgacgccggcgagaucaccugcgucugccgcgacaacuggcacggcuccaaccgccccugggucuccuucaaccagaaccucaaguaccagaucggcuacaucugcuccggcgucuucggcgacaacccccgccccaacgacggcaccggcuccugcggccccgucuccuccaacggcgccuacggcgucaagggcuucuccuucaaguacggcaacggcgucuggaucggccgcaccaaguccaccaacucccgcuccggcuucgagaugaucugggaccccaacggcuggaccgagaccgacuccuccuucuccgucaagcaggacaucgucgccaucaccgacugguccggcuacuccggcuccuucguccagcaccccgagcucaccggccucgacugcauccgccccugcuucugggucgagcucauccgcggccgccccaaggaguccaccaucuggaccuccggcuccuccaucuccuucugcggcgucaacuccgacaccgucggcugguccuggcccgacggcgccgagcuccccuucaccaucgacaaguga

SEQ ID NO: 111671 - RNA, 1350 nt, Artificial Sequence
  derived and/or modified CDS sequence (opt2) from neuraminidase__InfluenzaA__ABL67783
augaaccccaacaagaagaucaucaccaucggcuccaucugcauggucaccggcauggucucccucaugcuccagaucggcaaccucaucuccaucugggucucccacuccauccacaccggcaaccagcacaaggccgagcccaucuccaacaccaacuuccucaccgagaaggccgucgccuccgucaagcucgccggcaacuccucccucugccccaucaacggcugggccgucuacuccaaggacaacuccauccgcaucggcuccaagggcgacgucuucgucauccgcgagcccuucaucuccugcucccaccucgagugccgcaccuucuuccucacccagggcgcccuccucaacgacaagcacuccaacggcaccgucaaggaccgcuccccccaccgcacccucauguccugccccgucggcgaggcccccucccccuacaacucccgcuucgaguccgucgccugguccgccuccgccugccacgacggcaccuccuggcucaccaucggcaucuccggccccgacuccggcgccgucgccguccucaaguacaacggcaucaucaccgacaccaucaaguccuggcgcaacaacauccuccgcacccaggaguccgagugcgccugcgucaacggcuccugcuucaccgucaugaccgacggccccuccaacggccaggccucccacaagaucuucaagauggagaagggcaaggucgucaaguccgucgagcucgacgcccccaacuaccacuacgaggagugcuccugcuaccccgacgccggcgagaucaccugcgucugccgcgacaacuggcacggcuccaaccgccccugggucuccuucaaccagaaccucgaguaccagaucggcuacaucugcuccggcgucuucggcgacaacccccgccccaacgacggcaccggcuccugcggccccgucuccuccaacggcgccuacggcgucaagggcuucuccuucaaguacggcaacggcgucuggaucggccgcaccaaguccaccaacucccgcuccggcuucgagaugaucugggaccccaacggcuggaccgagaccgacuccuccuucuccgucaagcaggacaucgucgccaucaccgacugguccggcuacuccggcuccuucguccagcaccccgagcucaccggccucgacugcauccgccccugcuucugggucgagcucauccgcggccgccccaaggaguccaccaucuggaccuccggcuccuccaucuccuucugcggcgucaacuccgacaccgucggcugguccuggcccgacggcgccgagcuccccuucaccaucgacaaguga

SEQ ID NO: 111672 - RNA, 1350 nt, Artificial Sequence
  derived and/or modified CDS sequence (opt2) from neuraminidase__InfluenzaA__ABL67796
augaaccccaacaagaagaucaucaccaucggcuccaucugcauggucaccggcauggucucccucaugcuccagaucggcaaccucaucuccaucugggucucccacuccauccacaccggcaaccagcacaaggccgagcccaucuccaacaccaacuuccucaccgagaaggccgucgccuccgucaagcucgccggcaacuccucccucugccccaucaacggcugggccgucuacuccaaggacaacuccauccgcaucggcuccaagggcgacgucuucgucauccgcgagcccuucaucuccugcucccaccucgagugccgcaccuucuuccucacccagggcgcccuccucaacgacaagcacuccaacggcaccgucaaggaccgcuccccccaccgcacccucauguccugccccgucggcgaggcccccucccccuacaacucccgcuucgaguccgucgccugguccgccuccgccugccacgacggcaccuccuggcucaccaucggcaucuccggccccgacaacggcgccgucgccguccucaaguacaacggcaucaucaccgacaccaucaaguccuggcgcaacaacauccuccgcacccaggaguccgagugcgccugcgucaacggcuccugcuucaccgucaugaccgacggccccuccaacggccaggccucccacaagaucuucaagauggagaagggcaaggucgucaaguccgucgagcucgacgcccccaacuaccacuacgaggagugcuccugcuaccccgacgccggcgagaucaccugcgucugccgcgacaacuggcacggcuccaaccgccccugggucuccuucaaccagaaccucgaguaccagaucggcuacaucugcuccggcgucuucggcgacaacccccgccccaacgacggcaccggcuccugcggccccgucuccuacaacggcgccuacggcgucaagggcuucuccuucaaguacggcaacggcgucuggaucggccgcaccaaguccaccaacucccgcuccggcuucgagaugaucugggaccccaacggcuggaccgagaccgacuccuccuucuccgucaagcaggacaucgucgccaucaccgacugguccggcuacuccggcuccuucguccagcaccccgagcucaccggccucgacugcauccgccccugcuucugggucgagcucauccgcggccgccccaaggaguccaccaucuggaccuccggcuccuccaucuccuucugcggcgucaacuccgacaccgucggcugguccuggcccgacggcgccgagcuccccuucaccaucgacaaguga

SEQ ID NO: 111673 - RNA, 1350 nt, Artificial Sequence
  derived and/or modified CDS sequence (opt2) from neuraminidase__InfluenzaA__ABL67807
augaaccccaacaagaagaucaucaccaucggcuccaucugcauggucaccggcauggucucccucaugcuccagaucggcaaccucaucuccaucugggucucccacuccauccacaccggcaaccagcacaaggccgagcccaucuccaacaccaaccuccucaccgagaaggccgucgccuccgucaagcucgccggcaacuccucccucugccccaucgacggcugggccgucuacuccaaggacaacuccauccgcaucggcuccaagggcgacgucuucgucguccgcgagcccuucaucuccugcucccaccucgagugccgcaccuucuuccucacccagggcgcccuccucaacgacaagcacuccaacggcaccgucaaggaccgcuccccccaccgcacccucauguccugccccgucggcgaggcccccucccccuacaacucccgcuucgaguccgucgccugguccgccuccgccugccacgacggcaccuccuggcucaccaucggcaucuccggccccgacaacggcgccgucgccguccucaaguacaacggcaucaucaccgacaccaucaaguccuggcgcaacaacauccuccgcacccaggaguccgagugcgccugcgucaacggcuccugcuucaccgucaugaccgacggccccuccaacggccaggccucccacaagaucuucaagauggagaagggcaaggucgucaaguccgucgagcucgacgcccccaacuaccacuacgaggagugcuccugcuaccccgacgccggcgagaucaccugcgucugccgcgacaacuggcacggcuccaaccgccccugggucuccuucaaccagaaccucgaguaccagaucggcuacaucugcuccggcgucuucggcgacaacccccgccccaacgacggcgccggcuccugcggccccgucuccuccaacggcgccuacggcgucaagggcuucuccuucaaguacggcaacggcgucuggaucggccgcaccaaguccaccaacucccgcuccggcuucgagaugaucugggaccccaacggcuggaccgagaccgacuccuccuucuccgucaagcaggacaucgucgccaucaccgacugguccggcuacuccggcuccuucguccagcaccccgagcucaccggccucgacugcauccgccccugcuucugggucgagcucauccgcggccgccccaaggaguccaccaucuggaccuccggcuccuccaucuccuucugcggcgucaacuccgacaccgucggcugguccuggcccgacggcgccgagcuccccuucaccaucgacaaguga

SEQ ID NO: 111674 - RNA, 1350 nt, Artificial Sequence
  derived and/or modified CDS sequence (opt2) from neuraminidase__InfluenzaA__ABL67818
augaaccccaacaagaagaucaucaccaucggcuccaucugcauggucaccggcauggucucccucaugcuccagaucggcaaccucaucuccaucugggucucccacuccauccacaccggcaaccagcacaaggccgagcccaucuccaacaccaaccuccucaccgagaaggccgucgccuccgucaagcucgccggcaacuccucccucugccccaucgacggcugggccgucuacuccaaggacaacuccauccgcaucggcuccaagggcgacgucuucgucguccgcgagcccuucaucuccugcucccaccucgagugccgcaccuucuuccucacccagggcgcccuccucaacgacaagcacuccaacggcaccgucaaggaccgcuccccccaccgcacccucauguccugccccgucggcgaggcccccucccccuacaacucccgcuucgaguccgucgccugguccgccuccgccugccacgacggcaccuccuggcucaccaucggcaucuccggccccgacaacggcgccgucgccguccucaaguacaacggcaucaucaccgacaccaucaaguccuggcgcaacaacauccuccgcacccaggaguccgagugcgccugcgucaacggcuacugcuucaccgucaugaccgacggccccuccaacggccaggccucccacaagaucuucaagauggagaagggcaaggucgucaaguccgucgagcucgacgcccccaacuaccacuacgaggagugcuccugcuaccccgacgccggcgagaucaccugcgucugccgcgacaacuggcacggcuccaaccgccccugggucuccuucaaccagaaccucgaguaccagaucggcuacaucugcuccggcgucuucggcgacaacccccgccccaacgacggcgccggcuccugcggccccgucuccuccaacggcgccuacggcgucaagggcuucuccuucaaguacggcaacggcgucuggaucggccgcaccaaguccaccaacucccgcuccggcuucgagaugaucugggaccccaacggcuggaccgagaccgacuccuccuucuccgucaagcaggacaucgucgccaucaccgacugguccggcuacuccggcuccuucguccagcaccccgagcucaccggccucgacugcauccgccccugcuucugggucgagcucauccgcggccgccccaaggaguccaccaucuggaccuccggcuccuccaucuccuucugcggcgucaacuccgacaccgucggcugguccuggcccgacggcgccgagcuccccuucaccaucgacaaguga

SEQ ID NO: 111675 - RNA, 1350 nt, Artificial Sequence
  derived and/or modified CDS sequence (opt2) from neuraminidase__InfluenzaA__ABL67829
augaaccccaacaagaagaucaucaccaucggcuccaucugcauggucaccggcauggucucccucaugcuccagaucggcaaccucaucuccaucugggucucccacuccauccacaccggcaaccagcacaaggccgagcccaucuccaacaccaaccuccucaccgagaaggccgucgccuccgucaagcucgccggcaacuccucccucugccccaucaacggcugggccgucuacuccaaggacaacuccauccgcaucggcuccaagggcgacgucuucgucguccgcgagcccuucaucuccugcucccaccucgagugccgcaccuucuuccucacccagggcgcccuccucaacgacaagcacuccaacggcaccgucaaggaccgcuccccccaccgcacccucauguccugccccgucggcgaggcccccucccccuacaacucccgcuucgaguccgucgccugguccgccuccgccugccacgacggcaccuccuggcucaccaucggcaucuccggccccgacaacggcgccgucgccguccucaaguacaacggcaucaucaccgacaccaucaaguccuggcgcaacaacauccuccgcacccaggaguccgagugcgccugcgucaacggcuucugcuucaccgucaugaccgacggccccuccaacggccaggccucccacaagaucuucaagauggagaagggcaaggucgucaaguccgucgagcucgacgcccccaacuaccacuacgaggagugcuccugcuaccccgacgccggcgagaucaccugcgucugccgcgacaacuggcacggcuccaaccgccccugggucuccuucaaccagaaccucgaguaccagaucggcuacaucugcuccggcgucuucggcgacaacccccgccccaacgacggcgccggcuccugcggccccgucgccuccaacggcgccuacggcgucaagggcuucuccuucaaguacggcaacggcgucuggaucggccgcaccaaguccaccaacucccgcuccggcuucgagaugaucugggaccccaacggcuggaccgagaccgacuccuccuucuccgucaagcaggacaucgucgccaucaccgacugguccggcuacuccggcuccuucguccagcaccccgagcucaccggccucgacugcauccgccccugcuucugggucgagcucauccgcggccgccccaaggaguccaccaucuggaccuccggcuccuccaucuccuucugcggcgucaacuccgacaccgucggcugguccuggcccgacggcgccgagcuccccuucaccaucgacaaguga

SEQ ID NO: 111676 - RNA, 1410 nt, Artificial Sequence; identical to SEQ ID NO: 110748
  derived and/or modified CDS sequence (opt2) from neuraminidase__InfluenzaA__ABM22018

SEQ ID NO: 111677 - RNA, 1413 nt, Artificial Sequence; identical to SEQ ID NO: 111592
  derived and/or modified CDS sequence (opt2) from neuraminidase__InfluenzaA__ABM22029

SEQ ID NO: 111678 - RNA, 1410 nt, Artificial Sequence; identical to SEQ ID NO: 110750
  derived and/or modified CDS sequence (opt2) from neuraminidase__InfluenzaA__ABM22040

SEQ ID NO: 111679 - RNA, 1410 nt, Artificial Sequence; identical to SEQ ID NO: 111657
  derived and/or modified CDS sequence (opt2) from neuraminidase__InfluenzaA__ABM22062

SEQ ID NO: 111680 - RNA, 1410 nt, Artificial Sequence
  derived and/or modified CDS sequence (opt2) from neuraminidase__InfluenzaA__ABM22073
augaaccccaaccagaagaucaucaccaucggcuccgucucccucaccaucgccaccaucugcuuccucaugcagaucgccauccucgucaccaccgucacccuccacuucaagcaguacgagugcaacuccccccccaacaaccaggucaugcucugcgagcccaccaucaucgagcgcaacaucaccgagaucgucuaccucaccaacaccaccaucgagaaggagaucugccccaagcucgccgaguaccgcaacugguccaagccccagugcaacaucaccggcuucgcccccuucuccaaggacaacuccauccgccucuccgccggcggcgacaucugggucacccgcgagcccuacgucuccugcgaccccgacaagugcuaccaguucgcccucggccagggcaccacccucaacaacggccacuccaacgacaccguccacgaccgcacccccuaccgcacccuccucaugaacgagcucggcguccccuucaaccucggcacccgccaggucugcaucgccugguccuccuccuccugccacgacggcaaggccuggcuccacgucugcgucaccggcgacgacgagaacgccaccgccuccuucaucuacaacggcaagcucgucgacuccaucggcuccugguccaagaagauccuccgcacccaggaguccgagugcgucugcaucaacggcaccugcgccgucgucaugaccgacggcuccgccuccggcaaggccgacaccaagauccucuucaucgaggagggcaagaucguccacaucuccacccucuccggcuccgcccagcacgucgaggagugcuccugcuacccccgcuaccccggcguccgcugcgucugccgcgacaacuggaagggcuccaaccgccccaucgucgacaucaacgucaaggacuacuccaucgucuccuccuacgucugcuccggccucgucggcgacaccccccgcaagaacgacuccuucuccuccucccacugccucgaccccaacaacgaggagggcggccacggcgucaagggcugggccuucgacgacggcaacgacgucuggaugggccgcaccaucuccgagaagcuccgcuccggcuacgagaccuucaaggucaucgagggcugguccaagcccaacuccaagcuccagaccaaccgccaggucaucgucgagcgcggcaaccgcuccggcuacuccggcaucuucuccgucgagggcaaguccugcaucaaccgcugcuucuacgucgagcucauccgcggccgcaaggaggagaccgaggucugguggaccuccaacuccaucgucgucuucugcggcaccuccggcaccuacggcaccggcuccuggcccgacggcgccgacaucaaccucaugcccaucuga

SEQ ID NO: 111681 - RNA, 1410 nt, Artificial Sequence; identical to SEQ ID NO: 110627
  derived and/or modified CDS sequence (opt2) from neuraminidase__InfluenzaA__ABM22084

SEQ ID NO: 111682 - RNA, 1410 nt, Artificial Sequence
  derived and/or modified CDS sequence (opt2) from neuraminidase__InfluenzaA__ABM22095
augaaccccaaccagaagaucaucaccaucggcuccgucucccucaccaucgccaccaucugcuuccucaugcagaucgccauccucgucaccaccgucacccuccacuucaagcagcacgagugcaacuccccccccaacaaccaggccaugcucugcgagcccaccaucaucgagcgcaacaucaccgagaucguccaccucaccaacaccaccaucgagaaggagaucugccccaagcucgucgaguaccgcaacugguccaagccccagugcaacaucaccggcuucgcccccuucuccaaggacaacuccauccgccucuccgccggcggcgacaucugggucacccgcgagcccuacgucuccugcgaccccgacaagugcuaccaguucgcccucggccagggcaccacccucaacaacggccacuccaacgacaccguccacgaccgcacccccuaccgcacccuccucaugaacgagcucggcguccccuuccaccucggcacccgccaggucugcaucgccugguccuccuccuccugccacgacggcaaggccuggcuccacgucugcgucaccggcgacgacaagaacgccaccgccuccuucaucuacaacggccgccucgucgacuccaucggcuccugguccaagaagauccuccgcacccaggaguccgagugcgucugcaucaacggcaccugcaccgucgucaugaccgacggcuccgccuccggcaaggccgacaccaagauccucuucaucgaggagggcaagaucguccacaucuccacccucuccggcuccgcccagcacgucgaggagugcuccugcuacccccgcuaccccggcguccgcugcgucugccgcgacaacuggaagggcuccaaccgccccaucgucgacaucaacgucaaggacuacuccaucgucuccuccuacgucugcuccggccucgucggcgacaccccccgcaagaacgacuccuucuccuccucccacugccucgaccccaacaacgaggagggcggccacggcgucaagggcugggccuucgacgacggcaacgacgucuggaugggccgcaccaucuccgagaagcuccgcuccggcuacgagaccuucaaggucaucgagggcugguccaagcccaacuccaagcuccagaucaaccgccaggucaucgucgagcgcggcaaccgcuccggcuacuccggcaucuucuccgucgagggcaaguccugcaucaaccgcugcuucuacgucgagcucauccgcggccgcaaggaggagaccgaggucugguggaccuccaacuccaucgucgucuucugcggcaccuccggcaccuacggcaccggcuccuggcccgacggcgccgacaucaaccucaugcccaucuga

SEQ ID NO: 111683 - RNA, 1410 nt, Artificial Sequence; identical to SEQ ID NO: 110627
  derived and/or modified CDS sequence (opt2) from neuraminidase__InfluenzaA__ABM22106

SEQ ID NO: 111684 - RNA, 1410 nt, Artificial Sequence; identical to SEQ ID NO: 110627
  derived and/or modified CDS sequence (opt2) from neuraminidase__InfluenzaA__ABM22117

SEQ ID NO: 111685 - RNA, 1410 nt, Artificial Sequence; identical to SEQ ID NO: 111638
  derived and/or modified CDS sequence (opt2) from neuraminidase__InfluenzaA__ABM22128

SEQ ID NO: 111686 - RNA, 1410 nt, Artificial Sequence
  derived and/or modified CDS sequence (opt2) from neuraminidase__InfluenzaA__ABM22139
augaaccccaaccagaagaucaucaccaucggcuccgucucccucaccaucuccaccaucugcuucuucaugcagaucgccauccucaucaccaccgucacccuccacuucaagcaguacgaguucaacuccccccccaacaaccaggucaugcucugcgagcccaccaucaucgagcgcaacaucaccgagaucgucuaccucaccaacaccaccaucgagaaggagaucugccccaagcucgccgaguaccgcaacugguccaagccccagugcaacaucaccggcuucgcccccuucuccaaggacaacuccauccgccucuccgccggcggcgacaucugggucacccgcgagcccuacgucuccugcgaccccgacaagugcuaccaguucgcccucggccagggcaccacccucaacaacguccacuccaacgacaccguccacgaccgcacccccuaccgcacccuccucaugaacgagcucggcguccccuuccaccucggcaccaagcaggucugcaucgccugguccuccuccuccugccacgacggcaaggccuggcuccacgucugcgucaccggcgacgacaagaacgccaccgccuccuucaucuacaacggccgccucgucgacuccaucgucuccugguccaaggagauccuccgcacccaggaguccgagugcgucugcaucaacggcaccugcaccgucgucaugaccgacggcuccgccuccgagaaggccgacaccaagauccucuucaucgaggagggcaagaucguccacaccuccacccucuccggcuccgcccagcacgucgaggagugcuccugcuacccccgcuaccccggcguccgcugcgucugccgcgacaacuggaagggcuccaaccgccccaucgucgacaucaacaucaaggacuacuccaucgucuccuccuacgucugcuccggccucgucggcgacaccccccgcaagaacgacuccuccuccuccucccacugccucgaccccaacaacgaggagggcggccacggcgucaagggcugggccuucgacgacggcaacgacgucuggaugggccgcaccaucuccgagaagcuccgcuccggcuacgagaccuucaaggucaucgagggcugguccaaccccaacuccaagcuccagaucaaccgccaggucaucgucgaccgcggcaaccgcuccggcuacuccggcaucuucuccgucgagggcaaguccugcaucaaccgcugcuucuacgucgagcucauccgcggccgcaaggaggagaccgagguccucuggaccuccaacuccaucgucgucuucugcggcaccuccggcaccuacggcaccggcuccuggcccgacggcgccgacaucaaccucaugcccaucuga

SEQ ID NO: 111687 - RNA, 1410 nt, Artificial Sequence
  derived and/or modified CDS sequence (opt2) from neuraminidase__InfluenzaA__ABM22150
augaaccccaaccagaagaucaucaccaucggcuccgucucccucaccaucuccaccaucugcuucuucaugcagaucgccauccucaucaccaccgucacccuccacuucaagcaguacgaguucaacucccuccccaacaaccaggucaugcucugcgagcccaccaucaucgagcgcaacaucaccgagaucgucuaccucaccaacaccaccaucgagaaggagaucugccccgagcucgccgaguaccgcaacugguccaagccccagugcgacaucaccggcuucgcccccuucuccaaggacaacuccauccgccucuccgccggcggcgacaucugggucacccgcgagcccuacgucuccugcgaccccgacaagugcuaccaguucgcccucggccagggcaccacccucaacaacguccacuccaacgacaccguccacgaccgcacccccuaccgcacccuccucaugaacgagcucggcguccccuuccaccucggcaccaagcaggucugcaucgccugguccuccuccuccugccacgacggcaaggccuggcuccacgucugcgucaccggcgacgacaagaacgccaccgccuccuucaucuacaacggccgccucgucgacuccaucgucuccugguccaagaagauccuccgcacccaggaguccgagugcgucugcaucaacggcaccugcaccgucgucaugaccgacggcuccgccuccggcaaggccgacaccaagauccucuucaucgaggagggcaagaucguccacaccuccacccucuccggcuccgcccagcacgucgaggagugcuccugcuacccccgcuaccccggcguccgcugcgucugccgcgacaacuggaagggcuccaaccgccccaucgucgacaucaacaucaaggacuacuccaucgucuccuccuacgucugcuccggccucgucggcgacaccccccgcaagaacgacuccuccuccuccucccacugccucgaccccaacaacgaggagggcggccacggcgucaagggcugggccuucgacgacggcaacgacgucuggaugggccgcaccaucuccgagaagcuccgcuccggcuacgagaccuucaaggucaucgagggcugguccaaccccaacuccaagcuccagaucaaccgccaggucaucgucgaccgcggcaaccgcuccggcuacuccggcaucuucuccgucgagggcaaguccugcaucaaccgcugcuucuacgucgagcucauccgcggccgcaaggaggagaccgagguccucuggaccuccaacuccaucgucgucuucugcggcaccuccggcaccuacggcaccggcuccuggcccgacggcgccgacaucaaccucaugcccaucuga

SEQ ID NO: 111688 - RNA, 1413 nt, Artificial Sequence; identical to SEQ ID NO: 111095
  derived and/or modified CDS sequence (opt2) from neuraminidase__InfluenzaA__ABM22161

SEQ ID NO: 111689 - RNA, 1413 nt, Artificial Sequence; identical to SEQ ID NO: 111095
  derived and/or modified CDS sequence (opt2) from neuraminidase__InfluenzaA__ABM22172

SEQ ID NO: 111690 - RNA, 1413 nt, Artificial Sequence; identical to SEQ ID NO: 111095
  derived and/or modified CDS sequence (opt2) from neuraminidase__InfluenzaA__ABM22183

SEQ ID NO: 111691 - RNA, 1413 nt, Artificial Sequence; identical to SEQ ID NO: 111095
  derived and/or modified CDS sequence (opt2) from neuraminidase__InfluenzaA__ABM22194

SEQ ID NO: 111692 - RNA, 1413 nt, Artificial Sequence; identical to SEQ ID NO: 111095
  derived and/or modified CDS sequence (opt2) from neuraminidase__InfluenzaA__ABM22205

SEQ ID NO: 111693 - RNA, 1413 nt, Artificial Sequence; identical to SEQ ID NO: 111095
  derived and/or modified CDS sequence (opt2) from neuraminidase__InfluenzaA__ABM22216

SEQ ID NO: 111694 - RNA, 1413 nt, Artificial Sequence; identical to SEQ ID NO: 111095
  derived and/or modified CDS sequence (opt2) from neuraminidase__InfluenzaA__ABM22227

SEQ ID NO: 111695 - RNA, 1413 nt, Artificial Sequence; identical to SEQ ID NO: 111095
  derived and/or modified CDS sequence (opt2) from neuraminidase__InfluenzaA__ABM22238

SEQ ID NO: 111696 - RNA, 1413 nt, Artificial Sequence
  derived and/or modified CDS sequence (opt2) from neuraminidase__InfluenzaA__ABM22271
augaaccccaaccagaagaucaucaccaucggcuccaucuccaucgucaucggcaucaucucccucauccuccagaucggcaacaucaucuccaucugggccucccacuccauccagaccggcucccagaaccacaccggcaucugcaaccagcgcaucaucaccuacgagaacuccaccugggucaaccagaccuacgucaacaucaacaacaccaacgucgucgccggcaaggacaagaccuccaugacccucgccggcaacuccucccucugccccauccgcggcugggccaucuacaccaaggacaacuccauccgcaucggcuccaagggcgacgucuucgucauccgcgagcccuucaucuccugcucccaccucgagugccgcaccuucuuccucacccagggcgcccuccucaacgacaagcacuccaacggcaccgucaaggaccgcucccccuaccgcgcccucauguccugcccccucggcgaggcccccucccccuacaacucccgcuucgaguccgucgccugguccgccuccgccugccacgacggccucggcuggcucaccaucggcaucuccggccccgacaacggcgccgucgccguccucaaguacaacggcaucaucaccgagaccaucaaguccuggaagaagcgcauccuccgcacccaggaguccgagugcgucugcaugaacggcuccugcuucaccaucaugaccgacggccccuccaacggcgccgccuccuaccgcaucuucaagaucgagaagggccgcgucaccaaguccaucgagcucggcgcccccaacuaccacuacgaggagugcuccugcuaccccgacaccggcaccgucaugugcgucugccgcgacaacuggcacggcuccaaccgccccugggucuccuucaaccagaaccucgacuaccagaucggcuacaucugcuccggcgucuucggcgacaacccccgccccaaggacggcgagggcuccugcaaccccgucaccgucgacggcgccgacggcgucaagggcuucuccuaccgcuacggcaacggcgucuggaucggccgcaccaaguccaaccgccuccgcaagggcuucgagaugaucugggaccccaacggcuggaccgacaccgacuccgacuucuccaugaagcaggacaucgucgccaugaccgacugguccggcuacuccggcuccuucguccagcaccccgagcucaccggccucgacugcaugcgccccugcuucugggucgagcucguccgcggccucccccgcgagaacaccaccaucuggaccuccggcuccuccaucuccuucugcggcgucaacuccgacaccgccaacugguccuggcccgacggcgccgagcuccccuucaccaucgacaaguga

SEQ ID NO: 111697 - RNA, 1413 nt, Artificial Sequence; identical to SEQ ID NO: 111004
  derived and/or modified CDS sequence (opt2) from neuraminidase__InfluenzaA__ABM22282

SEQ ID NO: 111698 - RNA, 1410 nt, Artificial Sequence; identical to SEQ ID NO: 110379
  derived and/or modified CDS sequence (opt2) from neuraminidase__InfluenzaA__ABM22304

SEQ ID NO: 111699 - RNA, 1410 nt, Artificial Sequence; identical to SEQ ID NO: 110379
  derived and/or modified CDS sequence (opt2) from neuraminidase__InfluenzaA__ABM22315

SEQ ID NO: 111700 - RNA, 1410 nt, Artificial Sequence; identical to SEQ ID NO: 110379
  derived and/or modified CDS sequence (opt2) from neuraminidase__InfluenzaA__ABM22326

SEQ ID NO: 111701 - RNA, 1410 nt, Artificial Sequence; identical to SEQ ID NO: 110379
  derived and/or modified CDS sequence (opt2) from neuraminidase__InfluenzaA__ABM22337

SEQ ID NO: 111702 - RNA, 1410 nt, Artificial Sequence; identical to SEQ ID NO: 110382
  derived and/or modified CDS sequence (opt2) from neuraminidase__InfluenzaA__ABM22348

SEQ ID NO: 111703 - RNA, 1410 nt, Artificial Sequence; identical to SEQ ID NO: 110382
  derived and/or modified CDS sequence (opt2) from neuraminidase__InfluenzaA__ABM22359

SEQ ID NO: 111704 - RNA, 1410 nt, Artificial Sequence; identical to SEQ ID NO: 110382
  derived and/or modified CDS sequence (opt2) from neuraminidase__InfluenzaA__ABM22370

SEQ ID NO: 111705 - RNA, 1413 nt, Artificial Sequence; identical to SEQ ID NO: 110961
  derived and/or modified CDS sequence (opt2) from neuraminidase__InfluenzaA__ABM66867

SEQ ID NO: 111706 - RNA, 1413 nt, Artificial Sequence; identical to SEQ ID NO: 111095
  derived and/or modified CDS sequence (opt2) from neuraminidase__InfluenzaA__ABM66900

SEQ ID NO: 111707 - RNA, 1413 nt, Artificial Sequence; identical to SEQ ID NO: 111095
  derived and/or modified CDS sequence (opt2) from neuraminidase__InfluenzaA__ABM66911

SEQ ID NO: 111708 - RNA, 1410 nt, Artificial Sequence; identical to SEQ ID NO: 110382
  derived and/or modified CDS sequence (opt2) from neuraminidase__InfluenzaA__ABM66922

SEQ ID NO: 111709 - RNA, 1410 nt, Artificial Sequence; identical to SEQ ID NO: 110382
  derived and/or modified CDS sequence (opt2) from neuraminidase__InfluenzaA__ABM66933

SEQ ID NO: 111710 - RNA, 1410 nt, Artificial Sequence; identical to SEQ ID NO: 110382
  derived and/or modified CDS sequence (opt2) from neuraminidase__InfluenzaA__ABM66944

SEQ ID NO: 111711 - RNA, 1410 nt, Artificial Sequence; identical to SEQ ID NO: 110382
  derived and/or modified CDS sequence (opt2) from neuraminidase__InfluenzaA__ABM66955

SEQ ID NO: 111712 - RNA, 1410 nt, Artificial Sequence; identical to SEQ ID NO: 110382
  derived and/or modified CDS sequence (opt2) from neuraminidase__InfluenzaA__ABM66966

SEQ ID NO: 111713 - RNA, 1410 nt, Artificial Sequence; identical to SEQ ID NO: 110382
  derived and/or modified CDS sequence (opt2) from neuraminidase__InfluenzaA__ABM66977

SEQ ID NO: 111714 - RNA, 1410 nt, Artificial Sequence; identical to SEQ ID NO: 110382
  derived and/or modified CDS sequence (opt2) from neuraminidase__InfluenzaA__ABM66988

SEQ ID NO: 111715 - RNA, 1410 nt, Artificial Sequence; identical to SEQ ID NO: 110382
  derived and/or modified CDS sequence (opt2) from neuraminidase__InfluenzaA__ABM66999

SEQ ID NO: 111716 - RNA, 1410 nt, Artificial Sequence; identical to SEQ ID NO: 110382
  derived and/or modified CDS sequence (opt2) from neuraminidase__InfluenzaA__ABM67010

SEQ ID NO: 111717 - RNA, 1410 nt, Artificial Sequence; identical to SEQ ID NO: 110382
  derived and/or modified CDS sequence (opt2) from neuraminidase__InfluenzaA__ABM67021

SEQ ID NO: 111718 - RNA, 1413 nt, Artificial Sequence
  derived and/or modified CDS sequence (opt2) from neuraminidase__InfluenzaA__ABM67054
augaaccccaaccagaagaucaucaccaucggcuccaucuccaucgccaucggcaccaucucccucaugcuccagaucggcaacaugaucuccaucugggccucccacuccauccagaccggcucccagaaccacaccggcaucugcaaccagcgcaucaucaccuacgagaacuccaccugggucaaccacaccuacgucaacaucaacaacaccaacgucgucgccggcaaggacaagaccuccgucacccucgccggcaacuccucccucugcuccaucuccggcugggccaucuacaccaaggacaacuccauccgcaucggcuccaagggcgacgucuucgucauccgcgagcccuucaucuccugcucccaccucgagugccgcaccuucuuccucacccagggcgcccuccucaacgacaagcacuccaacggcaccgucaaggaccgcucccccuaccgcgcccucauguccugcccccucggcgaggcccccucccccuacaacuccaaguucgaguccgucgccugguccgccuccgccugccacgacggcaugggcuggcucaccaucggcaucuccggccccgacaacggcgccgucgccguccucaaguacaacggcaucaucaccgagaccaucaaguccuggaagaagcgcauccuccgcacccaggaguccgagugcgucugcgucaacggcuccugcuucaccaucaugaccgacggccccuccaacggcgccgccuccuacaagaucuucaagaucgagaagggcaaggucaccaaguccaucgagcucaacgcccccaacuuccacuacgaggagugcuccugcuaccccgacaccggcaccgucaugugcgucugccgcgacaacuggcacggcuccaaccgccccugggucuccuucaaccagaaccucgacuaccagaucggcuacaucugcuccggcgucuucggcgacaacccccgccccaaggacggcaagggcuccugcaaccccgucaccgucgacggcgccgacggcgucaagggcuucuccuacaaguacggcaacggcgucuggaucggccgcaccaaguccaaccgccuccgcaagggcuucgagaugaucugggaccccaacggcuggaccgacaccgacuccgacuucuccgucaagcaggacgucgucgccaucaccgacugguccggcuacuccggcuccuucguccagcaccccgagcucaccggccucgacugcauccgccccugcuucugggucgagcucguccgcggccucccccgcgagaacaccaccaucuggaccuccggcuccuccaucuccuucugcggcgucgacuccgacaccgccaacugguccuggcccgacggcgccgagcuccccuucaccaucgacaaguga

SEQ ID NO: 111719 - RNA, 1350 nt, Artificial Sequence
  derived and/or modified CDS sequence (opt2) from neuraminidase__InfluenzaA__ABM68048
augaaccccaaccagaagaucaucaccaucggcuccaucugcauggucaucggcaucgucucccucaugcuccagaucggcaacaucaucuccaucuggaucucccacuccauccagaccggcaaccagugccaggccggccccaucuccaacaccaaguuccucaccgagaaggccgucgccuccgucacccucgccggcaacuccucccucugccccaucuccggcugggccgucuacuccaaggacaacuccauccgcaucggcucccgcggcgacgucuucgucauccgcgaguccuucaucuccugcucccaccucgagugccgcaccuucuuccucacccagggcgcccuccucaacgacaagcacuccaacggcaccgucaaggaccgcuccccccaccgcacccucauguccugccccgucggcgaggcccccucccccuacaacucccgcuucgaguccgucgccugguccgccuccgccugccacgacggcaccuccuggcucaccaucggcaucuccggccccgacaacggcgccgucgccguccucaaguacaacggcaucaucaccgacaccaucaaguccuggcgcaacaacauccuccgcacccaggaguccgagugcgccugcgucaacggcuccugcuucaccgucaugaccgacggccccuccaacggccaggccuccuacaagaucuucaagauggagaagggcaaggucgucaaguccgucgagcucgacgcccccaacuaccacuacgaggagugcuccugcuaccccgacgccggcgagaucaccugcgucugccgcgacuccuggcacggcuccaaccgccccugggucuccuucaaccagaaccucgaguaccagaucggcuacaucugcuccggcgucuucggcgacaacccccgccccaacgacggcaccggcuccugcggccccgucucccccaacggcgccuacggcgucaagggcuucuccuucaaguacggcaacggcgucuggaucggccgcaccaaguccaccaacucccgcuccggcuucgagaugaucugggaccccaacggcuggaccggcaccgacuccuccuucuccgucaagcaggacaucgucgccaucaccgacugguccggcuacuccggcuccuucguccagcaccccgagcucaccggccucgacugcauccgccccugcuucugggucgagcucauccgcggccgccccaaggaguccaccaucuggaccuccggcuccuccaucuccuucugcggcgucaacuccgacaccgucuccugguccuggcccgacggcgccgagcuccccuucaccaucgacaaguga

SEQ ID NO: 111720 - RNA, 1350 nt, Artificial Sequence
  derived and/or modified CDS sequence (opt2) from neuraminidase__InfluenzaA__ABM68049
augaaccccaaccagaagaucaucaccaucggcuccaucugcauggucaucggcaucgucucccucaugcuccagaucggcaacaucaucuccaucuggaucucccacuccauccagaccggcaaccagugccaggccgagcccaucuccaacaccaaguuccucaccgagaaggccgucgccuccgucacccucgccggcaacuccucccucugccccaucuccggcugggccgucuacuccaaggacaacuccauccgcaucggcucccgcggcgacgucuucgucauccgcgagcccuucaucuccugcucccaccucgagugccgcaccuucuuccucacccagggcgcccuccucaacgacaagcacuccaacggcaccgucaaggaccgcuccccccaccgcacccucauguccugccccgucggcgaggcccccucccccuacaacucccgcuucgaguccgucgccugguccgccuccgccugccacgacggcaccuccuggcucaccaucggcaucuccggccccgacaacggcgccgucgccguccucaaguacaacggcaucaucaccgacaccaucaaguccuggcgcaacaacauccuccgcacccaggaguccgagugcgccugcgucaacggcuccugcuucaccgucaugaccgacggccccuccuccggccaggccuccuacaagaucuucaagauggagaagggcaaggucgucaaguccgucgagcucgacgcccccaacuaccacuacgaggagugcuccugcuaccccgacgccggcgagaucaccugcgucugccgcgacuccuggcacggcuccaaccgccccugggucuccuucaaccagaaccucgaguaccagaucggcuacaucugcuccggcgucuucggcgacaacccccgccccaacgacggcaccggcuccugcggccccgucucccccaacggcgccuacggcgucaagggcuucuccuucaaguacggcaacggcgucuggaucggccgcaccaaguccaccaacucccgcuccggcuucgagaugaucugggaccccaacggcuggaccggcaccgacuccuccuucuccgucaagcaggacaucgucgccaucaccgacugguccggcuacuccggcuccuucguccagcaccccgagcucaccggccucgacugcauccgccccugcuucugggucgagcucauccgcggccgccccaaggaguccaccaucuggaccuccggcuccuccaucuccuucugcggcgucaacuccgacaccgucuccugguccuggcccgacggcgccgagcuccccuucaccaucgacaaguga

SEQ ID NO: 111721 - RNA, 1350 nt, Artificial Sequence
  derived and/or modified CDS sequence (opt2) from neuraminidase__InfluenzaA__ABM90436
augaaccccaaccagaagaucaucaccaucggcuccaucugcauggucaucggcaucgucucccucaugcuccagaucggcaacaugaucuccaucugggucucccacuccauccagaagggcaaccagcaccaggccgaguccaucuccaacaccaacccccucaccgagaaggccgucgccuccgucacccucgccggcaacuccucccucugccccauccgcggcugggccguccacuccaaggacaacaacauccgcaucggcuccaagggcgacgucuucgucauccgcgagcccuucaucuccugcucccaccucgagugccgcaccuucuuccucacccagggcgcccuccucaacgacaagcacuccaacggcaccgucaaggaccgcuccccccaccgcacccucauguccugccccgucggcgaggcccccucccccuacaacucccgcuucgaguccgucgccugguccgccuccgccugccacgacggcaccuccuggcucaccaucggcaucuccggccccgacaacgaggccgucgccguccucaaguacaacggcaucaucaccgacaccaucaaguccuggcgcaacaacauccuccgcacccaggaguccgagugcgccugcgucaacggcuccugcuucaccgucaugaccgacggccccuccaacggccaggccuccuacaagaucuucaagaugaagaagggcaaggucgucaaguccgucgagcucgacgcccccaacuaccacuacgaggagugcuccugcuaccccgacgccggcgagaucaccugcgucugccgcgacaacuggcacggcuccaaccgccccugggucuccuucaaccagaaccucgaguaccagaucggcuacaucugcuccggcgucuucggcgacaacccccgccccaacgacggcaccggcuccugcggccccaugucccccaacggcgccuacggcgucaagggcuucuccuucaaguacggcaacggcgucuggaucggccgcaccaaguccaccaacucccgcuccggcuucgagaugaucugggaccccaacggcuggaccggcaccgacuccuccuucuccgucaagcaggacaucgucgccaucaccgacugguccggcuacuccggcuccuucguccagcaccccgagcucaccggccucgacugcauccgccccugcuucugggucgagcucauccgcggccgccccaaggaguccaccaucuggaccuccggcuccuccaucuccuucugcggcgucaacuccgacaccgucuccugguccuggcccgacggcgccgagcuccccuucaccaucgacaaguga

SEQ ID NO: 111722 - RNA, 1350 nt, Artificial Sequence; identical to SEQ ID NO: 111721
  derived and/or modified CDS sequence (opt2) from neuraminidase__InfluenzaA__ABM90447

SEQ ID NO: 111723 - RNA, 1350 nt, Artificial Sequence; identical to SEQ ID NO: 111721
  derived and/or modified CDS sequence (opt2) from neuraminidase__InfluenzaA__ABM90458

SEQ ID NO: 111724 - RNA, 1350 nt, Artificial Sequence; identical to SEQ ID NO: 111721
  derived and/or modified CDS sequence (opt2) from neuraminidase__InfluenzaA__ABM90469

SEQ ID NO: 111725 - RNA, 1350 nt, Artificial Sequence
  derived and/or modified CDS sequence (opt2) from neuraminidase__InfluenzaA__ABM90491
augaaccccaaccagaagaucaucaccaucggcuccaucugcauggucaucggcaucgucucccucaugcuccagaucggcaacaugaucuccaucugggucucccacuccauccagaagggcaaccagcaccaggccgaguccaucuccaacaccaacccccucaccgagaaggccgucgccuccgucacccucgccggcaacuccucccucugccccauccgcggcugggccguccacuccaaggacaacaacauccgcaucggcuccaagggcgacgucuucgucauccgcgagcccuucaucuccugcucccaccucgagugccgcaccuucuuccucacccagggcgcccuccucaacgacaagcacuccaacggcaccgucaaggaccgcuccccccaccgcacccucauguccugccccgucggcgaggcccccucccccuacaacucccgcuucgaguccgucgccugguccgccuccgccugccacgacggcaccuccuggcucaccaucggcaucuccggccccgacaacgaggccgucgccguccucaaguacaacggcaucaucaccgacaccaucaaguccuggcgcaacaacauccuccgcacccaggaguccgagugcgccugcgucaacggcuccugcuucaccgucaugaccgacggccccuccaacggccaggccuccuacaagaucuucaagaugaagaagggcaaggucaucaaguccgucgagcucgacgccaccaacuaccacuacgaggagugcuccugcuaccccgacgccggcgagaucaccugcgucugccgcgacaacuggcacggcuccaaccgccccugggucuccuucaaccagaaccucgaguaccagaucggcuacaucugcuccggcgucuucggcgacaacccccgccccaacgacggcaccggcuccugcggccccaugucccccaacggcgccuacggcgucaagggcuucuccuucaaguacggcaacggcgucuggaucggccgcaccaaguccaccaacucccgcuccggcuucgagaugaucugggaccccaacggcuggaccggcaccgacuccuccuucuccgucaagcaggacaucgucgccaucaccgacugguccggcuacuccggcuccuucguccagcaccccgagcucaccggccucgacugcauccgccccugcuucugggucgagcucauccgcggccgccccaaggaguccaccaucuggaccuccggcuccuccaucuccuucugcggcgucaacuccgacaccgucuccugguccuggcccgacggcgccgagcuccccuucaccaucgacaaguga

SEQ ID NO: 111726 - RNA, 1350 nt, Artificial Sequence; identical to SEQ ID NO: 111725
  derived and/or modified CDS sequence (opt2) from neuraminidase__InfluenzaA__ABM90502

SEQ ID NO: 111727 - RNA, 1350 nt, Artificial Sequence
  derived and/or modified CDS sequence (opt2) from neuraminidase__InfluenzaA__ABM90524
augaaccccaaccagaagaucaucaccaucggcuccaucugcauggucaucggcaucgucucccucaugcuccagaucggcaacaugaucuccaucugggucucccacuccauccagaccggcaaccagcaccaggccgaguccaucuccaacaccaacccccucaccgagaaggccgucgucuccgucacccucgccggcaacuccucccucugccccauccgcggcugggccguccacuccaaggacaacaacauccgcaucggcuccaagggcgacgucuucgucauccgcgagcccuucaucuccugcucccaccucgagugccgcaccuucuuccucacccagggcgcccuccucaacgacaagcacuccaacggcaccgucaaggaccgcuccccccaccgcacccucauguccugccccgucggcgaggcccccucccccuacaacucccgcuucgaguccgucgccugguccgccuccgccugccacgacggcaccuccuggcucaccaucggcaucuccggccccgacaacgaggccgucgccguccucaaguacaacggcaucaucaccgacaccaucaaguccuggcgcaacaacauccuccgcacccaggaguccgagugcgccugcgucaacggcuccugcuucaccgucaugaccgacggccccuccaacggccaggccuccuacaagaucuucaagauggagaagggcaaggucgucaaguccgucgagcucgacgcccccaacuaccacuacgaggagugcuccugcuaccccgacgccggcgagaucaccugcgucugccgcgacaacuggcacggcuccaaccgccccugggucuccuucaaccagaaccucgaguaccagaucggcuacaucugcuccggcgucuucggcgacaacccccgccccaacgacggcaccggcuccugcggccccaugucccccaacggcgccuacggcgucaagggcuucuccuucaaguacggcaacggcgucuggaucggccgcaccaaguccaccaacucccgcuccggcuucgagaugaucugggaccccaacggcuggaccggcaccgacuccuccuucuccgucaagcaggacaucgucgccaucaccgacugguccggcuacuccggcuccuucguccagcaccccgagcucaccggccucgacugcauccgccccugcuucugggucgagcucauccgcggccgccccaaggaguccaccaucuggaccuccggcuccuccaucuccuucugcggcgucaacuccgacaccgucuccugguccuggcccgacggcgccgagcuccccuucaccaucgacaaguga

SEQ ID NO: 111728 - RNA, 1350 nt, Artificial Sequence; identical to SEQ ID NO: 111727
  derived and/or modified CDS sequence (opt2) from neuraminidase__InfluenzaA__ABM90535

SEQ ID NO: 111729 - RNA, 1350 nt, Artificial Sequence; identical to SEQ ID NO: 111727
  derived and/or modified CDS sequence (opt2) from neuraminidase__InfluenzaA__ABM90546

SEQ ID NO: 111730 - RNA, 1413 nt, Artificial Sequence
  derived and/or modified CDS sequence (opt2) from neuraminidase__InfluenzaA__ABN50759
augaaccccaaccagaagaucaucaccaucggcuccaucugcauggccaucggcaucaucucccucauccuccagaucggcaacaucaucuccaucugggucucccacuccauccagaccggcucccagaaccacaccggcaucugcaaccagcgcaucaucaccuacgagaacuccaccugggucaaccagaccuacgucaacaucuccaacaccaacgucgucgccggcaaggacaccaccuccaugacccucgccggcaacuccucccucugccccauccgcggcugggccaucuacuccaaggacaacuccauccgcaucggcuccaagggcgacgucuucgucauccgcgagcccuucaucuccugcucccaccucgagugccgcaccuucuuccucacccagggcgcccuccucaacgacaagcacuccaacggcaccgucaaggaccgcucccccuaccgcgcccucauguccugccccaucggcgaggcccccucccccuacaacucccgcuucgaguccgucgccugguccgccuccgccugccacgacggcaugggcuggcucaccaucggcaucuccggccccgacgacggcgccgucgccguccucaaguacaacggcaucaucaccgagaccaucaaguccuggcgcaagcagauccuccgcacccaggaguccgagugcgucugcgucaacggcuccugcuucaccaucaugaccgacggccccuccgacggccaggccuccuaccgcaucuucaagaucgagaagggcaagaucaccaaguccaucgagcucgacgcccccaacucccacuacgaggagugcuccugcuaccccgacaccggcaccgucaugugcgucugccgcgacaacuggcacggcuccaaccgccccugggucuccuucaaccagaaccucgacuaccagaucggcuacaucugcuccggcgucuucggcgacaacccccgccccaaggacggcaagggcuccugcgaccccgucaacgucgacggcgccgacggcgucaagggcuucuccuaccgcuacggcaacggcgucuggaucggccgcaccaaguccaacuccucccgcaagggcuucgagaugaucugggaccccaacggcuggaccgacaccgacuccaacuuccucgucaagcaggacgucgucgccaugaccgacugguccggcuacuccggcuccuucguccagcaccccgagcucaccggccucgacugcauccgccccugcuucugggucgagcucauccgcggccgcccccgcgagaagaccaccaucuggaccuccggcuccuccaucuccuucugcggcgucaacuccgacaccgucaacugguccuggcccgacggcgccgagcuccccuucaccaucgacaaguga

SEQ ID NO: 111731 - RNA, 1410 nt, Artificial Sequence
  derived and/or modified CDS sequence (opt2) from neuraminidase__InfluenzaA__ABN50770
augaaccccaaccagaagaucaucaccaucggcuccgucucccucaccaucuccaccaucugcuucuucaugcagaucgccauccucaucaccaccgucacccuccacuucaagcaguacgaguucaacuccccccccaacaaccaggucaugcucugcgagcccaccaucaucgagcgcaacaucaccgagaucgucuaccucaccaacaccaccaucgagaaggagaucugccccaagcucgccgaguaccgcaacugguccaagccccagugcgacaucaccggcuucgcccccuucuccaaggacaacuccauccgccucuccgccggcggcgacaucugggucacccgcgagcccuacgucuccugcgaccccgacaagugcuaccaguucgcccucggccagggcaccacccucaacaacguccacuccaacgacaccguccacgaccgcacccccuaccgcacccuccucaugaacgagcucggcguccccuuccaccucggcaccaagcaggucugcaucgccugguccuccuccuccugccacgacggcaaggccuggcuccacgucugcgucaccggcgacgacaagaacgccaccgccuccuucaucuacaacggccgccucgucgacuccgucgucuccugguccaagaagauccuccgcacccaggaguccgagugcgucugcaucaacggcaccugcaccgucgucaugaccgacggcuccgccuccggcaaggccgacaccaagauccucuucaucgaggagggcaagaucguccacaccuccacccucuccggcuccgcccagcacgucgaggagugcuccugcuacccccgcuaccccggcguccgcugcgucugccgcgacaacuggaagggcuccaaccgccccaucgucgacaucaacaucaaggacuacuccaucgucuccuccuacgucugcuccggccucgucggcgacaccccccgcaagaacgacuccuccuccuccucccacugccucgaccccaacaacgaggagggcggccacggcgucaagggcugggccuucgacgacggcaacgacgucuggaugggccgcaccaucuccgagaagcuccgcuccggcuacgagaccuucaaggucaucgagggcugguccaaccccaacuccaagcuccagaucaaccgccaggucaucgucgaccgcggcaaccgcuccggcuacuccggcaucuucuccgucgagggcaaguccugcaucaaccgcugcuucuacgucgagcucauccgcggccgcaaggaggagaccgagguccucuggaccuccaacuccaucgucgucuucugcggcaccuccggcaccuacggcaccggcuccuggcccgacggcgccgacaucaaccucaugcccaucuga

SEQ ID NO: 111732 - RNA, 1413 nt, Artificial Sequence
  derived and/or modified CDS sequence (opt2) from neuraminidase__InfluenzaA__ABN50903
augaaccccaaccagaagaucaucaccaucggcuccaucugcauggccaucggcaucaucucccucauccuccagaucggcaacaucaucuccaucugggucucccacuccauccagaccggcucccagaaccacaccggcaucugcaaccagcgcaucaucaccuacgagaacuccaccugggucaaccagaccuacgucaacaucaacaacaccaacgucgucgccggcaaggacaccaccuccgucacccucgccggcaacuccucccucugccccguccgcggcugggccaucuacuccaaggacaacuccauccgcaucggcuccaagggcgacgucuucgucauccgcgagcccuucaucuccugcucccaccucgagugccgcaccuucuuccucacccagggcgcccuccucaacgacaagcacuccaacggcaccgucaaggaccgcucccccuaccgcgcccucauguccugccccaucggcgaggcccccucccccuacaacucccgcuucgaguccgucgccugguccgccuccgccugccacgacggcaugggcuggcucaccaucggcaucuccggccccgacgacggcgccgucgccguccucaaguacaacggcaucaucaccgagaccaucaaguccuggcgcaagcgcauccuccgcacccaggaguccgagugcgucugcgucaacggcuccugcuucaccaucaugaccgacggccccuccaacggccccgccuccuaccgcaucuucaagaucgagaagggcaagaucaccaaguccaucgagcucgacgcccccaacucccacuacgaggagugcuccugcuaccccgacaccggcaccgucaugugcgucugccgcgacaacuggcacggcuccaaccgccccugggucuccuucaaccagaaccucgacuaccagaucggcuacaucugcuccggcgucuucggcgacaacccccgccccaaggacggcaagggcuccugcggccccgucaccgucgacggcgccgacggcgucaagggcuucuccuaccgcuacggcaacggcgucuggaucggccgcaccaaguccaacuccucccgcaagggcuucgagaugaucugggaccccaacggcuggaccgacaccgacuccaacuuccucgucaagcaggacgucgucgccaugaccgacugguccggcuacuccggcuccuucauccagcaccccgagcucaccggccucgacugcaugcgccccugcuucugggucgagcucauccgcggccgcccccgcgagaagaccaccaucuggaccuccggcuccuccaucuccuucugcggcgucaacuccgacaccgucaacugguccuggcccgacggcgccgagcuccccuucaccaucgacaaguga

SEQ ID NO: 111733 - RNA, 1413 nt, Artificial Sequence; identical to SEQ ID NO: 111095
  derived and/or modified CDS sequence (opt2) from neuraminidase__InfluenzaA__ABN50920

SEQ ID NO: 111734 - RNA, 1413 nt, Artificial Sequence
  derived and/or modified CDS sequence (opt2) from neuraminidase__InfluenzaA__ABN50931
augaaccccaaccagaagaucaucaccaucggcuccaucugcauggccaucggcaucaucucccucauccuccagaucggcaacaucgucuccaucuggaucucccacuccauccagaccggcucccagaacuacaccggcaucugcaaccagcgcaucaucaccuacgagaacuccaccugggucaaccagaccuacgucaacaucaacaacaccaacgucgucgccggccaggacaccaccuccgucgcccucgccggcaacuccucccucugccccaucuccggcugggccaucuacuccaaggacaacuccauccgcaucggcuccaagggcgacgucuucgucauccgcgagcccuucaucuccugcucccaccucgagugccgcaccuucuuccucacccagggcgcccuccucaacgacaagcacuccaacggcaccgucaaggaccgcucccccuaccgcgcccucauguccugccccaucggcgaggcccccucccccuacaacucccgcuucgaguccgucgccugguccgccuccgccugccacgacggcaugggcuggcucaccaucggcaucuccggccccgacgacggcgccgucgccguccucaaguacaacggcaucaucaccgagaccaucaaguccuggcgcaagcgcauccuccgcacccaggaguccgagugcgucugcgucaacggcuccugcuucaccaucaugaccgacggccccaacaacggccccgccuccuacaagaucuucaagaucgagaagggcaagaucaccaaguccaucgagcucgacgcccccaacucccacuacgaggagugcuccugcuaccccgacgccggcaccgucaugugcgucugccgcgacaacuggcacggcuccaaccgccccugggucuccuucaaccagaaccucgacuaccagaucggcuacaucugcuccggcgucuucggcgacaacccccgccccaaggacggcaagggcuccugcggccccgucaccgucgacggcgccgacggcgucaagggcuucuccuaccgcuacggcaacggcgucuggaucggccgcaccaaguccaacuccucccgccgcggcuucgagaugaucugggaccccaacggcuggaccgacaccgacuccaaguuccucgucaagcaggacgucgucgccaucaccgacugguccggcuacuccggcuccuucguccagcaccccgagcucaccggccucgacugcaugcgccccugcuucugggucgagcucauccgcggccgcccccgcgagaacaccaccaucuggaccuccggcuccuccaucuccuucugcggcgucaacggcgacaccgccaacugguccuggcccgacggcgccgagcuccccuucaccaucgacaaguga

SEQ ID NO: 111735 - RNA, 1413 nt, Artificial Sequence
  derived and/or modified CDS sequence (opt2) from neuraminidase__InfluenzaA__ABN50943
augaaccccaaccagaagaucaucaccaucggcuccaucugcauggccaucggcaucaucucccucauccuccagaucggcaacaucgucuccaucuggaucucccacuccauccagaccggcucccagaacuacaccggcaucugcaaccagcgcaucaucaccuacgagaacuccaccugggucaaccagaccuacgucaacaucaacaacaccaacgucgucgccggccaggacaccaccuccgucgcccucgccggcaacuccucccucugccccaucuccggcugggccaucuacuccaaggacaacuccauccgcaucggcuccaagggcgacgucuucgucauccgcgagcccuucaucuccugcucccaccucgagugccgcaccuucuuccucacccagggcgcccuccucaacgacaagcacuccaacggcaccgucaaggaccgcucccccuaccgcgcccucauguccugccccaucggcgaggcccccucccccuacaacucccgcuucgaguccgucgccugguccgccuccgccugccacgacggcaugggcuggcucaccaucggcaucuccggccccgacgacggcgccgucgccguccucaaguacaacggcaucaucaccgagaccaucaaguccuggcgcaagcgcauccuccgcacccaggaguccgagugcgucugcgucaacggcuccugcuucaccaucaugaccgacggccccaacaacggccccgccuccuacaagaucuucaagaucgagaagggcaagaucaccaaguccaucgagcucgacgcccccaacucccacuacgaggagugcuccugcuaccccgacgccggcaccgucaugugcgucugccgcgacaacuggcacggcuccaaccgccccugggucuccuucaaccagaaccucgacuaccagaucggcuacaucugcuccggcgucuucggcgacaacccccgccccaaggacggcaagggcuccugcggccccgucaccgucgacggcgccgacggcgucaagggcuucuccuaccgcuacggcaacggcgucuggaucggccgcaccaaguccaacuccucccgccgcggcuucgagaugaucugggaccccaacggcuggaccgacaccgacuccaaguuccucgucaagcaggacgucgucgccaugaccgacugguccggcuacuccggcuccuucguccagcaccccgagcucaccggccucgacugcaugcgccccugcuucugggucgagcucauccgcggccgcccccgcgagaacaccaccaucuggaccuccggcuccuccaucuccuucugcggcgucaacggcgacaccgccaacugguccuggcccgacggcgccgagcuccccuucaccaucgacaaguga

SEQ ID NO: 111736 - RNA, 1413 nt, Artificial Sequence; identical to SEQ ID NO: 111004
  derived and/or modified CDS sequence (opt2) from neuraminidase__InfluenzaA__ABN50954

SEQ ID NO: 111737 - RNA, 1413 nt, Artificial Sequence; identical to SEQ ID NO: 111004
  derived and/or modified CDS sequence (opt2) from neuraminidase__InfluenzaA__ABN50965

SEQ ID NO: 111738 - RNA, 1413 nt, Artificial Sequence; identical to SEQ ID NO: 111004
  derived and/or modified CDS sequence (opt2) from neuraminidase__InfluenzaA__ABN50976

SEQ ID NO: 111739 - RNA, 1410 nt, Artificial Sequence; identical to SEQ ID NO: 110379
  derived and/or modified CDS sequence (opt2) from neuraminidase__InfluenzaA__ABN50987

SEQ ID NO: 111740 - RNA, 1410 nt, Artificial Sequence; identical to SEQ ID NO: 110382
  derived and/or modified CDS sequence (opt2) from neuraminidase__InfluenzaA__ABN50998

SEQ ID NO: 111741 - RNA, 1410 nt, Artificial Sequence
  derived and/or modified CDS sequence (opt2) from neuraminidase__InfluenzaA__ABN51013
augaaccccaaccagaagaucaucaccaucggcuccgucucccucaccaucuccaccaucugcuucuucaugcagaucgccauccucaucaccaccgucacccuccacuucaagcaguacgaguucaacuccccccccaacaaccaggucaugcucugcgagcccaccaucaucgagcgcaacaucaccgagaucgucuaccucaccaacaccaccaucgagaaggagaucugccccaagcucgccgaguaccgcaacugguccaagccccagugcaacaucaccggcuucgcccccuucuccaaggacaacuccauccgccucuccgccggcggcgacaucugggucacccgcgagcccuacgucuccugcgaccccgacaagugcuaccaguucgcccucggccagggcaccacccucaacaacguccacuccaacgacaccguccacgaccgcacccccuaccgcacccuccucaugaacgagcucggcguccccuuccaccucggcaccaagcaggucugcaucgccugguccuccuccuccugccacgacggcaaggccuggcuccacgucugcgucaccggcgacgacaagaacgccaccgccuccuucaucuacaacggccgccucgucgacuccaucgucuccugguccaaggagauccuccgcacccaggaguccgagugcgucugcaucaacggcaccugcaccgucgucaugaccgacggcuccgccuccggcaaggccgacaccaagauccucuucaucgaggagggcaagaucguccacaccuccacccucuccggcuccgcccagcacgucgaggagugcuccugcuacccccgcuaccccggcguccgcugcgucugccgcgacaacuggaagggcuccaaccgccccaucgucgacaucaacaucaaggacuacuccaucgucuccuccuacgucugcuccggccucgucggcgacaccccccgcaagaacgacuccuccuccuccucccucugccucgaccccaacaacgaggagggcggccacggcgucaagggcugggccuucgacgacggcaacgacgucuggaugggccgcaccaucuccgagaagcuccgcuccggcuacgagaccuucaaggucaucgagggcugguccaaccccaacuccaagcuccagaucaaccgccaggucaucgucgaccgcggcaaccgcuccggcuacuccggcaucuucuccgucgagggcaaguccugcaucaaccgcugcuucuacgucgagcucauccgcggccgcaaggaggagaccgagguccucuggaccuccaacuccaucgucgucuucugcggcaccuccggcaccuacggcaccggcuccuggcccgacggcgccgacaucaaccucaugcccaucuga

SEQ ID NO: 111742 - RNA, 1410 nt, Artificial Sequence
  derived and/or modified CDS sequence (opt2) from neuraminidase__InfluenzaA__ABN51024
augaaccccaaccagaagaucaucaccaucggcuccgucucccucaccgucuccaccaucugcuucuucaugcagaucgccauccucaucaccaccgucacccuccacuucaagcaguacgaguucaacuccccccccaacaaccaggucaugcucugcgagcccaccaucaucgagcgcaacaucaccgagaucgucuaccucaccaacaccaccaucgagaaggagaucugccccaagcucgccgaguaccgcaacugguccaagccccagugcaacaucaccggcuucgcccccuucuccaaggacaacuccauccgccucuccgccggcggcgacaucugggucacccgcgagcccuacgucuccugcgaccccgacaagugcuaccaguucgcccucggccagggcaccacccucaacaacguccacuccaacgacaccguccacgaccgcacccccuaccgcacccuccucaugaacgagcucggcguccccuuccaccucggcaccaagcaggucugcaucgccugguccuccuccuccugccacgacggcaaggccuggcuccacgucugcgucaccggcgacgacaagaacgccaccgccuccuucaucuacaacggccgccucgucgacuccaucgucuccugguccaaggagauccuccgcacccaggaguccgagugcgucugcaucaacggcaccugcaccgucgucaugaccgacggcuccgccuccggcaaggccgacaccaagauccucuucaucgaggagggcaagaucguccacaccuccacccucuccggcuccgcccagcacgucgaggagugcuccugcuacccccgcuaccccggcguccgcugcgucugccgcgacaacuggaagggcuccaaccgccccaucgucgacaucaacaucaaggacuacuccaucgucuccuccuacgucugcuccggccucgucggcgacaccccccgcaagaacgacuccuccuccuccucccacugccucgaccccaacaacgaggagggcggccacggcgucaagggcugggccuucgacgacggcaacgacgucuggaugggccgcaccaucuccgagaagcuccgcuccggcuacgagaccuucaaggucaucgagggcugguccaaccccaacuccaagcuccagaccaaccgccaggucaucgucgaccgcggcaaccgcuccggcuacuccggcaucuucuccgucgagggcaaguccugcaucaaccgcugcuucuacgucgagcucauccgcggccgcaaggaggagaccgagguccucuggaccuccaacuccaucgucgucuucugcggcaccuccggcaccuacggcaccggcuccuggcccgacggcgccgacaucaaccucaugcccaucuga

SEQ ID NO: 111743 - RNA, 1410 nt, Artificial Sequence
  derived and/or modified CDS sequence (opt2) from neuraminidase__InfluenzaA__ABN51035
augaaccccaaccagaagaucaucaccaucggcuccgucucccucaccaucuccaccaucugcuucuucaugcagaucgccauccucaucaccaccgucacccuccacuucaagcaguacgaguucaacuccccccccaacaaccaggucaugcucugcgagcccaccaucaucgagcgcaacaucaccgagaucgucuaccucaccaacaccaccaucgagaaggagaucugccccaagcucgccgaguaccgcaacugguccaagccccagugcgacaucaccggcuucgcccccuucuccaaggacaacuccauccgccucuccgccggcggcgacaucugggucacccgcgagcccuacgucuccugcgaccccgacaagugcuaccaguucgcccucggccagggcaccacccucaacaacguccacuccaacgacaccguccacgaccgcacccccuaccgcacccuccucaugaacgagcucggcguccccuuccaccucggcaccaagcaggucugcaucgccugguccuccuccuccugccacgacggcaaggccuggcuccacgucugcgucaccggcgacgacaagaacgccaccgccuccuucaucuacaacggccgccucgucgacuccgucgucuccugguccaaggacauccuccgcacccaggaguccgagugcgucugcaucaacggcaccugcaccgucgucaugaccgacggcuccgccuccggcaaggccgacaccaagauccucuucaucgaggagggcaagaucguccacaccuccacccucuccggcuccgcccagcacgucgaggagugcuccugcuacccccgcuaccccggcguccgcugcgucugccgcgacaacuggaagggcuccaaccgccccaucgucgacaucaacaucaagaacuacuccaucgucuccuccuacgucugcuccggccucgucggcgacaccccccgcaagaccgacuccuccuccuccucccacugccucgaccccaacaacgaggagggcggccacggcgucaagggcugggccuucgacgacggcaacgacgucuggaugggccgcaccaucuccgagaagcuccgccucggcuacgagaccuucaaggucaucgagggcugguccaaccccaacuccaagcuccagaucaaccgccaggucaucgucgaccgcggcaaccgcuccggcuacuccggcaucuucuccgucgagggcaaguccugcaucaaccgcugcuucuacgucgagcucauccgcggccgcaaggaggagaccgagguccucuggaccuccaacuccaucgucgucuucugcggcaccuccggcaccuacggcaccggcuccuggcccgacggcgccgacaucaaccucaugcccaucuga

SEQ ID NO: 111744 - RNA, 1410 nt, Artificial Sequence; identical to SEQ ID NO: 111743
  derived and/or modified CDS sequence (opt2) from neuraminidase__InfluenzaA__ABN51046

SEQ ID NO: 111745 - RNA, 1413 nt, Artificial Sequence
  derived and/or modified CDS sequence (opt2) from neuraminidase__InfluenzaA__ABN51069
augaaccccaaccagaagaucaucaccaucggcuccaucuccaucgccaucggcaucaucucccucauccuccagaucggcaacaucaucuccaucugggccucccacuccauccagaccggcucccagaaccacaccggcaucugcaaccagcgcaucaucaccuacgagaacuccaccugggucaaccagaccuacgucaacaucaacaacaccaacgucgucgccggcaaggacaagaccuccaugacccucgccggcaacuccucccucugccccauccgcggcugggccaucuacaccaaggacaacuccauccgcaucggcuccaagggcgacgucuucgucauccgcgagcccuucaucuccugcucccaccucgagugccgcaccuucuuccucacccagggcgcccuccucaacgacaagcacuccaacggcaccgucaaggaccgcucccccuaccgcgcccucauguccugcccccucggcgaggcccccucccccuacaacucccgcuucgaguccgucgccugguccgccuccgccugccacgacggccucggcuggcucaccaucggcaucuccggccccgacaacggcgccgucgccguccucaaguacaacggcaucaucaccgagaccaucaaguccuggaagaagcgcauccuccgcacccaggaguccgagugcgucugcaugaacggcuccugcuucaccaucaugaccgacggccccuccaacggcgccgccuccuaccgcaucuucaagaucgagaagggccgcgucaccaaguccaucgagcucgacgcccccaacuaccacuacgaggagugcuccugcuaccccgacaccggcaccgucaugugcgucugccgcgacaacuggcacggcuccaaccgccccugggucuccuucaaccagaaccucgacuaccagaucggcuacaucugcuccggcgucuucggcgacaacccccgccccaaggacggcgagggcuccugcaaccccgucaccgucgacggcgccgacggcgucaagggcuucuccuaccgcuacggcaacggcgucuggaucggccgcaccaaguccaaccgccuccgcaagggcuucgagauggucugggaccccaacggcuggaccgacaccgacuccgacuucuccaugaagcaggacaucgucgccaugaccgacugguccggcuacuccggcuccuucguccagcaccccgagcucaccggccucgacugcaugcgccccugcuucugggucgagcucguccgcggccucccccgcgagaacaccaccaucuggaccuccggcuccuccaucuccuucugcggcgucaacuccgacaccgccaacugguccuggcccgacggcgccgagcuccccuucaccaucgacaaguga

SEQ ID NO: 111746 - RNA, 1413 nt, Artificial Sequence
  derived and/or modified CDS sequence (opt2) from neuraminidase__InfluenzaA__ABN51080
augaaccccaaccagaagaucaucaccaucggcuccaucuccaucgccaucggcaucaucucccucaugcuccagaucggcaacaucaucuccaucugggccucccacuccauccagaccggcucccagaaccacaccggcgucugcaaccagcgcaucaucaccuacgagaacuccaccugggucaaccacaccuacgucaacaucaacaacaccaacgucaucgccgagaaggacaagaccuccgucacccucgccggcaacuccucccucugcuccaucuccggcugggccaucuacaccaaggacaacuccauccgcaucggcuccaagggcgacgucuucgucauccgcgagcccuucaucuccugcucccaccucgagugccgcaccuucuuccucacccagggcgcccuccucaacgacaagcacuccaacggcaccgucaaggaccgcucccccuaccgcgcccucauguccugcccccucggcgaggcccccucccccuacaacuccaaguucgaguccgucgccugguccgccuccgccugccacgacggcaugggcuggcucaccaucggcaucuccggccccgacaacggcgccgucgccguccucaaguacaacggcaucaucaccgagaccaucaaguccuggaagaagcagauccuccgcacccaggaguccgagugcgucugcgucaacggcuccugcuucaccaucaugaccgacggccccuccaacggcgccgccuccuacaagaucuucaagaucgagaagggcaaggucaccaaguccgucgagcucaacgcccccaacuuccacuacgaggagugcuccugcuaccccgacaccggcaccgucaugugcgucugccgcgacaacuggcacggcuccaaccgccccugggucuccuucaaccagaaccucgacuaccagaucggcuacaucugcuccggcgucuucggcgacaacccccgccccaaggacggcgagggcuccugcaaccccgucaccgucgacggcgccaacggcgucaagggcuucuccuacaaguacggcaacggcgucuggaucggccgcaccaaguccaaccgccuccgcaagggcuucgagaugaucugggaccccaacggcuggaccgacaccgacuccgacuucuccgucaagcaggacgucgucgccaucaccgacugguccggcuacuccggcuccuucguccagcaccccgagcucaccggccucgacugcauccgccccugcuucugggucgagcucguccgcggccuccccaaggagaacaccaccaucuggaccuccggcuccuccaucuccuucugcggcgucaacuccgacaccgccaacugguccuggcccgacggcgccgagcuccccuucaccaucgacaaguga

SEQ ID NO: 111747 - RNA, 1413 nt, Artificial Sequence; identical to SEQ ID NO: 110422
  derived and/or modified CDS sequence (opt2) from neuraminidase__InfluenzaA__ABN51091

SEQ ID NO: 111748 - RNA, 1410 nt, Artificial Sequence; identical to SEQ ID NO: 110131
  derived and/or modified CDS sequence (opt2) from neuraminidase__InfluenzaA__ABN51102

SEQ ID NO: 111749 - RNA, 1410 nt, Artificial Sequence; identical to SEQ ID NO: 110139
  derived and/or modified CDS sequence (opt2) from neuraminidase__InfluenzaA__ABN51113

SEQ ID NO: 111750 - RNA, 1410 nt, Artificial Sequence
  derived and/or modified CDS sequence (opt2) from neuraminidase__InfluenzaA__ABN51124
augaaccccaaccagaagaucaucaccaucggcuccgucucccucaccaucgccaccgucugcuuccucaugcagaucgccauccucgucaccaccgucacccuccacuucaagcaguacgagugcgacucccccgccuccaaccaggucaugcccugcgagcccaucaucaucgagcgcaacaucaccgagaucgucuaccucaacaacaccaccaucgagaaggagaucugccccaaggucgucgaguaccgcaacugguccaagccccagugccagaucaccggcuucgcccccuucuccaaggacaacuccauccgccucuccgccggcggcgacaucugggucacccgcgagcccuacgucuccugcgaccccggcaagugcuaccaguucgcccucggccagggcaccacccucgacaacaagcacuccaacgacaccauccacgaccgcgucccccaccgcacccuccucaugaacgagcucggcguccccuuccaccucggcacccgccaggucugcaucgccugguccuccuccuccugccacgacggcaaggccuggcuccacgucugcaucaccggcgacgacaagaacgccaccgccuccuucaucuacgacggccgccucgucgacuccaucggcuccuggucccagaacauccuccgcacccaggaguccgagugcgucugcaucaacggcaccugcaccgucgucaugaccgacggcuccgccuccggccgcgccgacacccgcauccucuucaucgaggagggcaagaucguccacaucuccccccucuccggcuccgcccagcacgucgaggagugcuccugcuacccccgcuaccccggcguccgcugcaucugccgcgacaacuggaagggcuccaaccgccccgucgucgacaucaacauggaggacuacuccaucgacuccuccuacgucugcuccggccucgucggcgacaccccccgcaacgacgaccgcuccuccaacuccaacugccgcaaccccaacaacgagcgcggcaaccagggcgucaagggcugggccuucgacaacggcgacgacgucuggaugggccgcaccaucuccaaggaccuccgcuccggcuacgagaccuucaaggucaucggcggcugguccacccccaacuccaagucccagaucaaccgccaggucaucgucgacuccgacaaccgcuccggcuacuccggcaucuucuccgucgagggcaaguccugcaucaaccgcugcuucuacgucgagcucauccgcggccgcaagcaggagacccgcgucugguggaccuccaacuccaucgucgucuucugcggcaccuccggcaccuacggcaccggcuccuggcccgacggcgccaacaucaacuucaugcccaucuga

SEQ ID NO: 111751 - RNA, 1410 nt, Artificial Sequence; identical to SEQ ID NO: 110139
  derived and/or modified CDS sequence (opt2) from neuraminidase__InfluenzaA__ABN51135

SEQ ID NO: 111752 - RNA, 1413 nt, Artificial Sequence; identical to SEQ ID NO: 110432
  derived and/or modified CDS sequence (opt2) from neuraminidase__InfluenzaA__ABN51146

SEQ ID NO: 111753 - RNA, 1410 nt, Artificial Sequence
  derived and/or modified CDS sequence (opt2) from neuraminidase__InfluenzaA__ABN51157
augaaccccaaccagaagaucaucaccaucggcuccgucucccucaccaucgccaccaucugcuuccucaugcagaucgccauccucgucaccaccgucacccuccacuucaagcaguacgagugcaacuccccccccaacaaccaggucaugcucugcgagcccaccaucaucgagcgcaacaucaccgagaucgucuaccucaccaacaccaccaucgagaaggagaucugccccaagcucgccgaguaccgcaacugguccaagccccagugcaacaucaccggcuucgcccccuucuccaaggacaacuccauccgccucuccgccggcggcgacaucugggucacccgcgagcccuacgucuccugcgaccccgacaagugcuaccaguucgcccucggccagggcaccacccucaacaacggccacuccaacgacaccguccacgaccgcacccccuaccgcacccuccucaugaacgagcucggcguccccuuccaccucggcacccgccaggucugcaucgccugguccuccuccuccugccacgacggcaaggccuggcuccacgucugcgucaccggcgacgacgagaacgccaccgccuccuucaucuacaacggccgccucgucgacuccaucggcuccugguccaagaagauccuccgcacccaggaguccgagugcgucugcaucaacggcaccugcaccgucgucaugaccgacggcuccgccuccggcaaggccgagaccaagauccucuucaucgaggagggcaagaucguccacaucuccacccucuccggcuccgcccagcacgucgaggagugcuccugcuacccccgcuaccccggcguccgcugcgucugccgcgacaacuggaagggcuccaaccgccccaucgucgacaucaacgucaaggacuacuccaucgucuccuccuacgucugcuccggccucgucggcgacaccccccgcaagaacgacuccuucuccuccucccacugccucgaccccaacaacgaggagggcggccacggcgucaagggcugggccuucgacgacggcaacgacgucuggaugggccgcaccaucuccgagaagcuccgcuccggcuacgagaccuucaaggucaucgagggcugguccaagcccaacuccaagcuccagaccaaccgccaggucaucgucgagcgcggcaaccgcuccggcuacuccggcaucuucuccgucgagggcaaguccugcaucaaccgcugcuucuacgucgagcucauccgcggccgcaaggaggagaccgaggucugguggaccuccaacuccaucgucgucuucugcggcaccuccggcaccuacggcaccggcuccuggcccgacggcgccgacaucaaccucaugcccaucuga

SEQ ID NO: 111754 - RNA, 1410 nt, Artificial Sequence; identical to SEQ ID NO: 111742
  derived and/or modified CDS sequence (opt2) from neuraminidase__InfluenzaA__ABN59393

SEQ ID NO: 111755 - RNA, 1365 nt, Artificial Sequence
  derived and/or modified CDS sequence (opt2) from neuraminidase__InfluenzaA__ABN59415
augaaccccaaccagaagaucaucaccaucggcuccaucugccucgucgucggccucaucucccucauccuccagaucggcaacaucaucuccaucuggaucucccacuccauccagaccggcucccagaaccacaccggcaucugcaaccagaacaucaucaccuacaagaacuccaccugggucaaggacaccaccuccgucauccucaccggcaacuccucccucugccccauccgcggcugggccaucuacuccaaggacaacuccauccgcaucggcuccaagggcgacgucuucgucauccgcgagcccuucaucuccugcucccaccucgagugccgcaccuucuuccucacccagggcgcccuccucaacgacaagcacuccuccggcaccgucaaggaccgcucccccuaccgcgcccucauguccugccccgucggcgaggcccccucccccuacaacucccgcuucgaguccgucgccugguccgccuccgccugccacgacggcaugggcuggcucaccaucggcaucuccggccccgacaacggcgccgucgccguccucaaguacaacggcaucaucaccgagaccaucaaguccuggcgcaagaagauccuccgcacccaggaguccgagugcgccugcgucaacggcuccugcuucaccaucaugaccgacggccccuccgacggccucgccuccuacaagaucuucaagaucgagaagggcaaggucaccaaguccaucgagcucaacgcccccaacucccacuacgaggagugcuccugcuaccccgacaccggcaaggucaugugcgucugccgcgacaacuggcacggcuccaaccgccccugggucuccuucgaccagaaccucgacuaccagaucggcuacaucugcuccggcgucuucggcgacaacccccgccccgaggacggcaccggcuccugcggccccgucuacgucgacggcgccaacggcgucaagggcuucuccuaccgcuacggcaacggcgucuggaucggccgcaccaagucccacuccucccgccacggcuucgagaugaucugggaccccaacggcuggaccgagaccgacuccaaguucuccguccgccaggacgucgucgccaugaccgacugguccggcuacuccggcuccuucguccagcaccccgagcucaccggccucgacugcaugcgccccugcuucugggucgagcucauccgcggccgccccaaggagaagaccaucuggaccuccgccuccuccaucuccuucugcggcgucaacuccgacaccgucgacugguccuggcccgacggcgccgagcuccccuucuccaucgacaaguga

SEQ ID NO: 111756 - RNA, 1413 nt, Artificial Sequence; identical to SEQ ID NO: 110987
  derived and/or modified CDS sequence (opt2) from neuraminidase__InfluenzaA__ABN59426

SEQ ID NO: 111757 - RNA, 1410 nt, Artificial Sequence; identical to SEQ ID NO: 110289
  derived and/or modified CDS sequence (opt2) from neuraminidase__InfluenzaA__ABO32659

SEQ ID NO: 111758 - RNA, 1410 nt, Artificial Sequence
  derived and/or modified CDS sequence (opt2) from neuraminidase__InfluenzaA__ABO32670
augaaccccaaccagaagaucaucaccaucggcuccgucucccucaccaucuccaccaucugcuucuucaugcagaucgccauccucgucaccaccgucacccuccacuucaagcaguacgagugcaacuccccccccaacaaccaggucaugcucugcgagcccaccaucaucgagcgcaacaucaccgagaucgucuaccucaccaacaccaccaucgagaaggagaucugccccaagcucgccgaguaccgcaacugguccaagccccagugcaacaucaccggcuucgcccccuucuccaaggacaacuccauccgccucuccgccggcggcgacaucugggucacccgcgagcccuacgucuccugcgaccccgacaagugcuaccaguucgcccucggccagggcaccacccucaacaacggccacuccaacgacaccguccacgaccgcacccccuaccgcacccuccucaugaacgagcucggcguccccuuccacaugggcaccaagcaggucugcaucgccugguccuccuccuccugccacgacggcaaggccuggcuccacgucugcgucaccggcgacgacgagaacgccaccgccuccuucaucuacaacggccgccucgucgacuccaucggcuccugguccaagaagauccuccgcacccaggaguccgagugcgucugcaucaacggcaccugcaccgucgucaugaccgacggcuccgccuccggcaaggccgacaccaagauccucuucaucgaggagggcaagaucguccacaccuccacccucuccggcuccgcccagcacgucgaggagugcuccugcuacccccgcuaccccggcguccgcugcgucugccgcgacaacuggaagggcuccaaccgccccaucgucgacaucaacaucaaggacuacuccaucgucuccuccuacgucugcuccggccucgucggcgacaccccccgcaagaacgacuccuccuccuccucccacugccucgaccccaacaacgaggagggcggccacggcgucaagggcugggccuucgacgacggcaacgacgucuggaugggccgcaccaucuccgagaagcuccgcuccggcuacgagaccuucaaggucaucgagggcugguccaagcccaacuccaagcuccagaucaaccgccaggucaucgucgaccgcggcaaccgcuccggcuacuccggcaucuucuccgucgagggcaaguccugcaucaaccgcugcuucuacgucgagcucauccgcggccgcaagcaggagaccgagguccucuggaccuccaacuccaucgucgucuucugcggcaccuccggcaccuacggcaccggcuccuggcccgacggcgccgacaucaaccucaugcccaucuga

SEQ ID NO: 111759 - RNA, 1413 nt, Artificial Sequence; identical to SEQ ID NO: 111610
  derived and/or modified CDS sequence (opt2) from neuraminidase__InfluenzaA__ABO32681

SEQ ID NO: 111760 - RNA, 1410 nt, Artificial Sequence
  derived and/or modified CDS sequence (opt2) from neuraminidase__InfluenzaA__ABO32695
augaaccccaaccagaagaucaucaccaucggcuccgucucccucaccaucuccaccaucugcuucuucaugcagaucgccauccucaucaccaccgucacccuccacuucaagcaguacgaguucaacuccccccccaacaaccaggucaugcucugcgagcccaccaucaucgagcgcaacaucaccgagaucgucuaccucaccaacaccaccaucgagaaggagaucugccccaagcucgccgaguaccgcaacugguccaagccccagugcaacaucaccggcuucgcccccuucuccaaggacaacuccauccgccucuccgccggcggcgacaucugggucacccgcgagcccuacgucuccugcgaccccgacaagugcuaccaguucgcccucggccagggcaccacccucaacaacguccacuccaacgacaccguccacgaccgcacccccuaccgcacccuccucaugaacgagcucggcguccccuuccaccucggcaccaagcaggucugcaucgccugguccuccuccuccugccacgacggcaaggccuggcuccacgucugcgucaccggcgacgacaagaacgccaccgccuccuucaucuacaacggccgccucgucgacuccaucgucuccugguccaaggagauccuccgcacccaggaguccgagugcgucugcaucaacggcaccugcaccgucgucaugaccgacggcuccgccuccggcaaggccgacaccaagauccucuucaucgaggagggcaagaucguccacaccuccacccucuccggcuccgcccagcacgucgaggagugcuccugcuacccccgcuaccccggcguccgcugcgucugccgcgacaacuggaagggcuccaaccgccccaucgucgacaucaacaucaaggacuacuccaucgucuccuccuacgucugcuccggccucgucggcgacaccccccgcaagaacgacuccuccuccuccucccacugcuccgaccccaacaacgaggagggcggccacggcgucaagggcugggccuucgacgacggcaacgacgucuggaugggccgcaccaucuccgagaagcuccgcuccggcuacgagaccuucaaggucaucgagggcugguccaaccccaacuccaagcuccagaucaaccgccaggucaucgucgaccgcggcaaccgcuccggcuacuccggcaucuucuccgucgagggcaaguccugcaucaaccgcugcuucuacgucgagcucauccgcggccgcaaggaggagaccgagguccucuggaccuccaacuccaucgucgucuucugcggcaccuccggcaccuacggcaccggcuccuggcccgacggcgccgacaucaaccucaugcccaucuga

SEQ ID NO: 111761 - RNA, 1410 nt, Artificial Sequence; identical to SEQ ID NO: 110766
  derived and/or modified CDS sequence (opt2) from neuraminidase__InfluenzaA__ABO32754

SEQ ID NO: 111762 - RNA, 1410 nt, Artificial Sequence; identical to SEQ ID NO: 110766
  derived and/or modified CDS sequence (opt2) from neuraminidase__InfluenzaA__ABO32765

SEQ ID NO: 111763 - RNA, 1410 nt, Artificial Sequence; identical to SEQ ID NO: 111638
  derived and/or modified CDS sequence (opt2) from neuraminidase__InfluenzaA__ABO32778

SEQ ID NO: 111764 - RNA, 1410 nt, Artificial Sequence
  derived and/or modified CDS sequence (opt2) from neuraminidase__InfluenzaA__ABO32793
augaaccccaaccagaagaucaucaccaucggcuccgucucccucaccaucuccaccaucugcuucuucaugcagaucgucauccucaucaccaccgucacccuccacuucaagcaguacgaguucaacuccccccccaacaaccaggucaugcucugcgagcccaccaucaucgagcgcaacaucaccgagaucgucuaccucaccaacaccaccaucgagaaggagaucugccccaagcucgccgaguaccgcaacugguccaagccccagugcgacaucaccggcuucgcccccuucuccaaggacaacuccauccgccucuccgccggcggcgacaucugggucacccgcgagcccuacgucuccugcgaccccgacaagugcuaccaguucgcccucggccagggcaccacccucaacaacguccacuccaacgacaccguccacgaccgcacccccuaccgcacccuccucaugaacgagcucggcguccccuuccaccucggcaccaagcaggucugcaucgccugguccuccuccuccugccacgacggcaaggccuggcuccacgucugcgucaccggcgacgacaagaacgccaccgccuccuucaucuacaacggccgccucgucgacuccaucgucuccugguccaaggagauccuccgcacccaggaguccgagugcgucugcaucaacggcaccugcaccgucgucaugaccgacggcuccgccuccggcaagaccgacaccaagauccucuucaucgaggagggcaagaucguccacaccuccacccucuccggcuccgcccagcacgucgaggagugcuccugcuacccccgcuaccccggcguccgcugcgucugccgcgacaacuggaagggcuccaaccgccccaucgucgacaucaacaucaaggacuacuccaucgucuccuccuacgucugcuccggccucgucggcgacaccccccgcaagaacgacuccuccuccuccucccacugccucgaccccaacaacgaggagggcggccacggcgucaagggcugggccuucgacgacggcaacgacgucuggaugggccgcaccaucuccgagaagcuccgcuccggcuacgagaccuucaaggucaucgagggcugguccaaccccaacuccaagcuccagaucaaccgccaggucaucgucgaccgcggcaaccgcuccggcuacuccggcaucuucuccgucgagggcaaguccugcaucaaccgcugcuucuacgucgagcucauccgcggccgcaaggaggagaccgagguccucuggaccuccaacuccaucgucgucuucugcggcaccuccggcaccuacggcaccggcuccuggcccgacggcgccgacaucaaccucaugcccaucuga

SEQ ID NO: 111765 - RNA, 1410 nt, Artificial Sequence; identical to SEQ ID NO: 110363
  derived and/or modified CDS sequence (opt2) from neuraminidase__InfluenzaA__ABO32806

SEQ ID NO: 111766 - RNA, 1410 nt, Artificial Sequence; identical to SEQ ID NO: 110750
  derived and/or modified CDS sequence (opt2) from neuraminidase__InfluenzaA__ABO32819

SEQ ID NO: 111767 - RNA, 1410 nt, Artificial Sequence; identical to SEQ ID NO: 110382
  derived and/or modified CDS sequence (opt2) from neuraminidase__InfluenzaA__ABO32830

SEQ ID NO: 111768 - RNA, 1410 nt, Artificial Sequence; identical to SEQ ID NO: 110748
  derived and/or modified CDS sequence (opt2) from neuraminidase__InfluenzaA__ABO32841

SEQ ID NO: 111769 - RNA, 1410 nt, Artificial Sequence; identical to SEQ ID NO: 110748
  derived and/or modified CDS sequence (opt2) from neuraminidase__InfluenzaA__ABO32852

SEQ ID NO: 111770 - RNA, 1410 nt, Artificial Sequence; identical to SEQ ID NO: 110748
  derived and/or modified CDS sequence (opt2) from neuraminidase__InfluenzaA__ABO32863

SEQ ID NO: 111771 - RNA, 1410 nt, Artificial Sequence; identical to SEQ ID NO: 111742
  derived and/or modified CDS sequence (opt2) from neuraminidase__InfluenzaA__ABO32874

SEQ ID NO: 111772 - RNA, 1410 nt, Artificial Sequence; identical to SEQ ID NO: 111742
  derived and/or modified CDS sequence (opt2) from neuraminidase__InfluenzaA__ABO32885

SEQ ID NO: 111773 - RNA, 1410 nt, Artificial Sequence; identical to SEQ ID NO: 111743
  derived and/or modified CDS sequence (opt2) from neuraminidase__InfluenzaA__ABO32896

SEQ ID NO: 111774 - RNA, 1410 nt, Artificial Sequence; identical to SEQ ID NO: 111743
  derived and/or modified CDS sequence (opt2) from neuraminidase__InfluenzaA__ABO32907

SEQ ID NO: 111775 - RNA, 1410 nt, Artificial Sequence
  derived and/or modified CDS sequence (opt2) from neuraminidase__InfluenzaA__ABO32918
augaaccccaaccagaagaucaucaccaucggcuccgucucccucaccaucuccaccaucugcuucuucaugcagaucgccauccucaucaccaccgucacccuccacuucaagcaguacgaguucaacuccccccccaacaaccaggucaugcucugcgagcccaccaucaucgagcgcaacaucaccgagaucgucuaccucaccaacaccaccaucgagaaggagaccugccccaagcucgccgaguaccgcaacugguccaagccccagugcaacaucaccggcuucgcccccuucuccaaggacaacuccauccgccucuccgccggcggcgacaucugggucacccgcgagcccuacgucuccugcgaccccgacaagugcuaccaguucgcccucggccagggcaccacccucaacaacguccacuccaacgacaccguccacgaccgcacccccuaccgcacccuccucaugaacgagcucggcguccccuuccaccucggcaccaagcaggucugcaucgccugguccuccuccuccugccacgacggcaaggccuggcuccacgucugcgucaccggcgacgacaagaacgccaccgccuccuucaucuacaacggccgccucgucgacuccaucgucuccugguccaaggagauccuccgcacccaggaguccgagugcgucugcaucaacggcaccugcaccgucgucaugaccgacggcuccgccuccggcaaggccgacaccaagauccucuucaucgaggagggcaagaucguccacaccuccacccucuccggcuccgcccagcacgucgaggagugcuccugcuacccccgcuaccccggcguccgcugcgucugccgcgacaacuggaagggcuccaaccgccccaucgucgacaucaacaucaaggacuacuccaucgucuccuccuacgucugcuccggccucgucggcgacaccccccgcaagaacgacuccuccuccuccucccacugccucgaccccaacaacgaggagggcggccacggcgucaagggcugggccuucgacgacggcaacgacgucuggaugggccgcaccaucuccgagaagcuccgcuccggcuacgagaccuucaaggucaucgagggcugguccaacuccaacuccaagcuccagaccaaccgccaggucaucgucgaccgcggcaaccgcuccggcuacuccggcaucuucuccgucgagggcaaguccugcaucaaccgcugcuucuacgucgagcucauccgcggccgcaaggaggagaccgagguccucuggaccuccaacuccaucgucgucuucugcggcaccuccggcaccuacggcaccggcuccuggcccgacggcgccgacaucaaccucaugcccaucuga

SEQ ID NO: 111776 - RNA, 1410 nt, Artificial Sequence; identical to SEQ ID NO: 111775
  derived and/or modified CDS sequence (opt2) from neuraminidase__InfluenzaA__ABO32929

SEQ ID NO: 111777 - RNA, 1410 nt, Artificial Sequence; identical to SEQ ID NO: 111775
  derived and/or modified CDS sequence (opt2) from neuraminidase__InfluenzaA__ABO32940

SEQ ID NO: 111778 - RNA, 1413 nt, Artificial Sequence
  derived and/or modified CDS sequence (opt2) from neuraminidase__InfluenzaA__ABO32951
augaaccccaaccagaagaucaucaccaucggcuccaucuccaucgccaucggcaucaucucccucaugcuccagaucggcaacaucaucuccaucugggccucccacuccauccagaccggcucccagaaccacaccggcgucugcaaccagcgcaucaucaccuacgagaacuccaccugggucaaccacaccuacgucaacaucaacaacaccaacgucaucgccggcaaggacaagaccuccgucacccucgccggcaacuccucccucugcuccaucuccggcugggccaucuacaccaaggacaacuccauccgcaucggcuccaagggcgacgucuucgucauccgcgagcccuucaucuccugcucccaccucgagugccgcaccuucuuccucacccagggcgcccuccucaacgacaagcacuccaacggcaccgucaaggaccgcucccccuaccgcgcccucauguccugcccccucggcgaggcccccucccccuacaacuccaaguucgaguccgucgccugguccgccuccgccugccacgacggcaugggcuggcucaccaucggcaucuccggccccgacaacggcgccgucgccguccucaaguacaacggcaucaucaccgagaccaucaaguccuggaagaagcagauccuccgcacccaggaguccgagugcgucugcgucaacggcuccugcuucaccaucaugaccgacggccccuccaacggcgccgccuccuacaagaucuucaagaucgagaagggcaaggucaccaaguccaucgagcucaacgcccccaacuuccacuacgaggagugcuccugcuaccccgacaccggcaccgucaugugcgucugccgcgacaacuggcacggcuccaaccgccccugggucuccuucaaccagaaccucgacuaccagaucggcuacaucugcuccggcgucuucggcgacaacccccgccccaaggacggcgagggcuccugcaaccccgucaccgucgacggcgccaacggcgucaagggcuucuccuacaaguacggcaacggcgucuggaucggccgcaccaaguccaaccgccuccgcaagggcuucgagaugaucugggaccccaacggcuggaccgacaccgacuccgacuucuccgucaagcaggacgucgucgccaucaccgacugguccggcuacuccggcuccuucguccagcaccccgagcucaccggccucgacugcauccgccccugcuucugggucgagcucguccgcggccucccccgcgagaacaccaccaucuggaccuccggcuccuccaucuccuucugcggcgucaacuccgacaccgccaacugguccuggcccgacggcgccgagcuccccuucaccaucgacaaguga

SEQ ID NO: 111779 - RNA, 1413 nt, Artificial Sequence
  derived and/or modified CDS sequence (opt2) from neuraminidase__InfluenzaA__ABO32962
augaaccccaaccagaagaucaucaccaucggcuccaucuccaucgccaucggcaucaucucccucaugcuccagaucggcaacaucaucuccaucugggccucccacuccauccagaccggcuccaagaaccacaccggcgucugcaaccagcgcaucaucaccuacgagaacuccaccugggucaaccacaccuacgucaacaucaacaacaccaacgucgucgccggcaaggacaagaccuccgucacccucgccggcaacuccucccucugcuccaucuccggcugggccaucuacaccaaggacaacuccauccgcaucggcuccaagggcgacgucuucgucauccgcgagcccuucaucuccugcucccaccucgagugccgcaccuucuuccucacccagggcgcccuccucaacgacaagcacuccaacggcaccgucaaggaccgcucccccuaccgcgcccucauguccugcccccucggcgaggcccccucccccuacaacuccaaguucgaguccgucgccugguccgccaacgccugccacgacggcaugggcuggcucaccaucggcaucuccggccccgacaacggcgccgucgccguccucaaguacaacggcaucaucaccgagaccaucaaguccuggaagaagcagauccuccgcacccaggaguccgagugcgucugcgucaacggcuccugcuucaccaucaugaccgacggccccuccaacggcgccgccuccuacaagaucuucaagaucaagaagggcaaggucaccaaguccaucgagcucaacgcccccaacuuccacuacgaggagugcuccugcuaccccgacaccggcaccgucaugugcgucugccgcgacaacuggcacggcuccaaccgccccugggucuccuucaaccagaaccucgacuaccagaucggcuacaucugcuccggcgucuucggcgacaacccccgccccaaggacggcgagggcuccugcaaccccgucaccgucgacggcgccaacggcgucaagggcuucuccuacaaguacggcaacggcgucuggaucggccgcaccaaguccaaccgccuccgcaagggcuucgagaugaucugggaccccaacggcuggaccgacaccgacuccgacuucuccguccgccaggacgucgucgccaucaccgacugguccggcuacuccggcuccuucguccagcaccccgagcucaccggccucgacugcauccgccccugcuucugggucgagcucguccgcggccucccccgcgagaacaccaccaucuggaccuccggcuccuccaucuccuucugcggcgucaacuccgacaccgccaacugguccuggcccgacggcgccgagcuccccuucaccaucgacaaguga

SEQ ID NO: 111780 - RNA, 1413 nt, Artificial Sequence; identical to SEQ ID NO: 110422
  derived and/or modified CDS sequence (opt2) from neuraminidase__InfluenzaA__ABO32973

SEQ ID NO: 111781 - RNA, 1413 nt, Artificial Sequence; identical to SEQ ID NO: 110987
  derived and/or modified CDS sequence (opt2) from neuraminidase__InfluenzaA__ABO32984

SEQ ID NO: 111782 - RNA, 1413 nt, Artificial Sequence; identical to SEQ ID NO: 110987
  derived and/or modified CDS sequence (opt2) from neuraminidase__InfluenzaA__ABO32995

SEQ ID NO: 111783 - RNA, 1413 nt, Artificial Sequence
  derived and/or modified CDS sequence (opt2) from neuraminidase__InfluenzaA__ABO33009
augaaccccaaccagaagaucaucaccaucggcuccaucugcauggccaucggcaugaucucccucauccuccagaucggcaacaucaucuccaucugggucucccacuccauccagaccggcucccagaaccacaccggcaucugcaaccagcgcaucaucaccuacgagaacuccaccugggucaaccagaccuacgucaacaucuccaacaccaacgucgucgccggcaaggacaccaccuccaugacccucgccggcaacuccucccucugccccauccgcggcugggccaucuacuccaaggacaacuccauccgcaucggcuccaagggcgacgucuucgucauccgcgagcccuucaucuccugcucccaccucgagugccgcaccuucuuccucacccagggcgcccuccucaacgacaagcacuccaacggcaccgucaaggaccgcucccccuaccgcgcccucauguccugccccaucggcgaggcccccucccccuacaacucccgcuucgaguccgucgccugguccgccuccgccugccacgacggcaugggcuggcucaccaucggcaucuccggccccgacgacggcgccgucgccguccucaaguacaacggcaucaucaccgagaccaucaaguccuggcgcaagcagauccuccgcacccaggaguccgagugcgucugcgucaacggcuccugcuucaccaucaugaccgacggccccuccgacggccccgccuccuaccgcaucuucaagaucgagaagggcaagaucaccaaguccaucgagcucgacgcccccaacucccacuacgaggagugcuccugcuaccccgacaccggcaccgucaugugcgucugccgcgacaacuggcacggcuccaaccgccccugggucuccuucaaccagaaccucgacuaccagaucggcuacaucugcuccggcgucuucggcgacaacccccgccccaaggacggcaagggcuccugcgaccccgucaacgucgacggcgccgacggcgucaagggcuucuccuaccgcuacggcaacggcgucuggaucggccgcaccaaguccaacuccucccgcaagggcuucgagaugaucugggaccccaacggcuggaccgacaccgacuccaacuuccucgucaagcaggacgucgucgccaugaccgacugguccggcuacuccggcuccuucguccagcaccccgagcucaccggccucgacugcaugcgccccugcuucugggucgagcucauccgcggccgcccccgcgagaagaccaccaucuggaccuccggcuccuccaucuccuucugcggcgucaacuccgacaccgucaacugguccuggcccgacggcgccgagcuccccuucaccaucgacaaguga

SEQ ID NO: 111784 - RNA, 1410 nt, Artificial Sequence; identical to SEQ ID NO: 111554
  derived and/or modified CDS sequence (opt2) from neuraminidase__InfluenzaA__ABO33039

SEQ ID NO: 111785 - RNA, 1410 nt, Artificial Sequence
  derived and/or modified CDS sequence (opt2) from neuraminidase__InfluenzaA__ABO33050
augaaccccaaccagaagaucaucaccaucggcuccgucucccucaccaucgccaccaucugcuuccucaugcagaucgccauccucgucaccaccgucacccuccacuucaagcaguacgagugcaacuccccccccaacaaccaggucaugcucugcgagcccaccaucaucgagcgcaacaucaccgagaucgucuaccucaccaacaccaccaucgagaaggagaucugccccaagcucgccgaguaccgcaacugguccaagccccagugcaacaucaccggcuucgcccccuucuccaaggacaacuccauccgccucuccgccggcggcgacaucugggucacccgcgagcccuacgucuccugcgaccccgacaagugcuaccaguucgcccucggccagggcaccacccucaacaacggccacuccaacgacaccguccacgaccgcacccccuaccgcacccuccucaugaacgagcucggcguccccuuccaccucggcaccaagcaggucugcaucgccugguccuccuccuccugccacgacggcaaggccuggcuccacgucugcgucaccggcgacgacgagaacgccaccgccuccuucaucuacaacggccgccucgucgacuccaucggcuccugguccaagaagauccuccgcacccaggaguccgagugcgucugcaucaacggcaccugcaccgucgucaugaccgacggcuccgccuccggcaaggccgacaccaagauccucuucaucgaggagggcaagaucguccacaccuccccccucuccggcuccgcccagcacgucgaggagugcuccugcuacccccgcuaccccggcguccgcugcgucugccgcgacaacuggaagggcuccaaccgccccaucgucgacaucaacgucaaggacuacuccaucgucuccuccuacgucugcuccggccucgucggcgacaccccccgcaagaacgacuccuccuccuccucccacugccucgaccccaacaacgaggagggcggccacggcgucaagggcugggccuucgacgacggcaacgacgucuggaugggccgcaccaucuccgagaagcuccgcuccggcuacgagaccuucaaggucaucgagggcugguccaagcccaacuccaagcuccagaucaaccgccaggucaucgucgaccgcggcaaccgcuccggcuacuccggcaucuucuccgucgagggcaaguccugcaucaaccgcugcuucuacgucgagcucauccgcggccgcaagcaggagaccgagguccucuggaccuccaacuccaucgucgucuucugcggcaccuccggcaccuacggcaccggcuccuggcccgacggcgccgacaucaaccucaugcccaucuga

SEQ ID NO: 111786 - RNA, 1410 nt, Artificial Sequence; identical to SEQ ID NO: 110766
  derived and/or modified CDS sequence (opt2) from neuraminidase__InfluenzaA__ABO33061

SEQ ID NO: 111787 - RNA, 1410 nt, Artificial Sequence
  derived and/or modified CDS sequence (opt2) from neuraminidase__InfluenzaA__ABO33072
augaaccccaaccagaagaucaucaccaucggcuccgucucccucaccaucgccaccaucugcuuccucaugcagaucgccauccucgucaccaccgucacccuccacuucaagcaguacgagugcggcucccccgccaacaaccaggucaugcccugcgagcccaucaucaucgagcgcaacaucaccgagaucgucuaccucaccaacaccaccaucgagaaggagaucugccccaagcucgucgaguaccgcaacugguccaagccccagugcaagaucaccggcuucgcccccuucuccaaggacaacuccauccgccucuccgccggcggcgacaucugggucacccgcgagcccuacgucuccugcgaccccggcaagugcuaccaguucgcccucggccagggcaccacccucgacaacaagcacuccaacgacaccauccacgaccgcaccccccaccgcacccuccucaugaacgagcucggcguccccuuccaccucggcacccgccaggucugcaucgccugguccuccuccuccugccacgacggcaaggccuggcuccacgucugcgucaccggcuacgacaagaacgccaccgccuccuucaucuacgacggccgccucgucgacuccaucggcuccugguccaagaacauccuccgcacccaggaguccgagugcgucugcaucaacggcaccugcaccgucgucaugaccgacggcuccgccuccgagcgcgccgacaccaagauccucuucaucgaggagggcaagaucguccacaucuccccccucuccggcuccgcccagcacgucgaggagugcuccugcuacccccgcuaccccggcguccgcugcgucugccgcgacaacuggaagggcuccaaccgccccgucgucgacaucaacgucaaggacuacuccaucgucuccuccuacgucugcuccggccucgucggcgacaccccccgcaagaacgaccgcuccuccuccuccuacugccgcaaccccaacaacgagaagggcaaccacggcgucaagggcugggccuucgacgacggcaacgacgucuggaugggccgcaccaucuccgaggagucccgcuccggcuacgagaccuucaaggucaucggcggcugguccacccccaacuccaagcuccagaucaaccgccaggucaucgucgacuccgacaaccgcuccggcuacuccggcaucuucuccgucgagggcaaguccugcaucaaccgcugcuucuacgucgagcucauccgcggccgcgagcaggagacccgcgucugguggaccuccaacuccaucgucgucuucugcggcaccuccggcaccuacggcaccggcuccuggcccgacggcgccgacaucaaccucaugcccaucuga

SEQ ID NO: 111788 - RNA, 1413 nt, Artificial Sequence; identical to SEQ ID NO: 111095
  derived and/or modified CDS sequence (opt2) from neuraminidase__InfluenzaA__ABO37991

SEQ ID NO: 111789 - RNA, 1413 nt, Artificial Sequence
  derived and/or modified CDS sequence (opt2) from neuraminidase__InfluenzaA__ABO38013
augaaccccaaccagaagaucaucaccaucggcuccaucuccaucgccaucggcaucaucucccucauccuccagaucggcaacaucaucuccaucugggccucccacuccauccagaccggcucccagaaccacaccggcaucugcaaccagcgcaucaucaccuacgagaacuccaccugggucaaccagaccuacgucaacaucaacaacaccaacgucgucgccggcaaggacaagaccuccaugacccucgccggcaacuccucccucugccccauccgcggcugggccaucuacaccaaggacaacuccauccgcaucggcuccaagggcgacgucuucgucauccgcgagcccuucaucuccugcucccaccucgagugccgcaccuucuuccucacccagggcgcccuccucaacgacaagcacuccaacggcaccgucaaggaccgcucccccuaccgcgcccucauguccugcccccucggcgaggcccccucccccuacaacucccgcuucgaguccgucgccugguccgccuccgccugccacgacggccucggcuggcucaccaucggcaucuccggccccgacaacggcgccgucgccguccucaaguacaacggcaucaucaccgagaccaucaaguccuggaagaagcgcauccuccgcacccaggaguccgagugcgucugcaugaacggcuccugcuucaccaucaugaccgacggccccuccaacggcgccgccuccuaccgcaucuucaagaucgagaagggccgcgucaccaaguccaucgagcucgacgcccccaacuaccacuacgaggagugcuccugcuaccccgacaccggcaccgucaugugcgucugccgcgacaacuggcacggcuccaaccgccccugggucuccuucaaccagaaccucgacuaccagaucggcuacaucugcuccggcgucuucggcgacaacccccgccccaaggacggcgagggcuccugcaaccccgucaccgucgacggcgccgacggcgucaagggcuucuccuaccgcuacggcaacggcgucuggaucggccgcaccaaguccaaccgccuccgcaagggcuacgagaugaucugggaccccaacggcuggaccgacaccgacuccgacuucuccaugaagcaggacaucgucgccaugaccgacugguccggcuacuccggcuccuucguccagcaccccgagcucaccggccucgacugcaugcgccccugcuucugggucgagcucguccgcggccucccccgcgagaacaccaccaucuggaccuccggcuccuccaucuccuucugcggcgucaacuccgacaccgccaacugguccuggcccgacggcgccgagcuccccuucaccaucgacaaguga

SEQ ID NO: 111790 - RNA, 1413 nt, Artificial Sequence
  derived and/or modified CDS sequence (opt2) from neuraminidase__InfluenzaA__ABO38024
augaaccccaaccagaagaucaucaccaucggcuccaucuccaucgccaucggcaucaucucccucaugcuccagaucggcaacaucaucuccaucugggccucccacuccauccagaccggcucccagaaccacaccggcaucugcaaccagcgcaucaucaccuacgagaacaacaccugggucaaccacaccuacgucaacaucaacaacaccaacaucgucgccggcaaggacaagaccuccgucacccucgccggcaacuccucccucugcuccaucuccggcugggccaucuacaccaaggacaacuccauccgcaucggcuccaagggcgacgucuucgucauccgcgagcccuucaucuccugcucccaccucgagugccgcaccuucuuccucacccagggcgcccuccucaacgacaagcacuccaacggcaccgucaaggaccgcucccccuaccgcgcccucauguccugcccccucggcgaggcccccucccccuacaacuccaaguucgaguccgucgccugguccgccuccgccugccacgacggcaugggcuggcucaccaucggcaucuccggccccgacaacggcgccgucgccguccucaaguacaacggcaucaucaccgagaccaucaaguccuggaagaagcgcauccuccgcacccaggaguccgagugcgucugcgucaacggcuccugcuucaccaucaugaccgacggccccuccaacggcgccgccuccuacaagaucuucaagaucgagaagggcaaggucaccaaguccaucgagcucaacgcccccaacuuccacuacgaggagugcuccugcuaccccgacaccggcaccgucaugugcgucugccgcgacaacuggcacggcuccaaccgccccugggucuccuucaaccagaaccucgacuaccagaucggcuacaucugcuccggcgucuucggcgacaacccccgccccaaggacggcgagggcuccugcaaccccgucaccgucgacggcgccgacggcgucaagggcuucuccuacaaguacggcaacggcgucuggaucggccgcaccaaguccaaccgccuccgcaagggcuucgagauggucugggaccccaacggcuggaccgacaccgacuccgacuucuccgucaagcaggacgucgucgccaucaccgacugguccggcuacuccggcuccuucguccagcaccccgagcucaccggccucgacugcauccgccccugcuucugggucgagcucguccgcggccucccccgcgagaacaccaccaucuggaccuccggcuccuccaucuccuucugcggcgucaacuccgacaccgccaacugguccuggcccgacggcgccgagcuccccuucaccaucgacaaguga

SEQ ID NO: 111791 - RNA, 1413 nt, Artificial Sequence
  derived and/or modified CDS sequence (opt2) from neuraminidase__InfluenzaA__ABO38035
augaaccccaaccagaagaucaucaccaucggcuccaucuccaucgccaucggcaucaucucccucaugcuccagaucggcaacaucaucuccaucugggccucccacuccauccagaccggcucccagaaccacaccggcaccugcaaccagcgcaucaucaccuacgagaacuccaccugggucaaccacaccuacgucaacaucaacaacaccaacgucgucgccggcaaggacaagaccuccgucacccucgccggcaacuccucccucugcuccaucuccggcugggccaucuacaccaaggacaacuccauccgcaucggcuccaagggcgacgucuucgucauccgcgagcccuucaucuccugcucccaccucgagugccgcaccuucuuccucacccagggcgcccuccucaacgacaagcacuccaacggcaccgucaaggaccgcucccccuaccgcgcccucauguccugcccccucggcgaggcccccucccccuacaacuccaaguucgaguccgucgccugguccgccuccgccugccacgacggcaugggcuggcucaccaucggcaucuccggccccgacaacggcgccgucgccguccucaaguacaacggcaucaucaccgagaccaucaaguccuggaagaagcgcauccuccgcacccaggaguccgagugcgucugcgucaacggcuccugcuucaccaucaugaccgacggccccuccaacggcgccgccuccuacaagaucuucaagaucgagaagggcaaggucaccaaguccaucgagcucaacgcccccaacuuccacuacgaggagugcuccugcuaccccgacaccggcaccgucaugugcgucugccgcgacaacuggcacggcuccaaccgccccugggucuccuucaaccagaaccucgacuaccagaucggcuacaucugcuccggcgucuucggcgacaacccccgccccaaggacggcgagggcuccugcaaccccgucaccgucgacggcgccgacggcgucaagggcuucuccuacaaguacggcaacggcgucuggaucggccgcaccaaguccaaccgccuccgcaagggcuucgaggucaucugggaccccaacggcuggaccgacaccgacuccgacuucuccgucaagcaggacgucgucgccaucaccgacugguccggcuacuccggcuccuucguccagcaccccgagcucaccggccucgacugcauccgccccugcuucugggucgagcucguccgcggcaugccccgcgagaacaccaccaucuggaccuccggcuccuccaucuccuucugcggcgucaacuccgacaccgccaacugguccuggcccgacggcgccgagcuccccuucaccaucgacaaguga

SEQ ID NO: 111792 - RNA, 1413 nt, Artificial Sequence; identical to SEQ ID NO: 110432
  derived and/or modified CDS sequence (opt2) from neuraminidase__InfluenzaA__ABO38046

SEQ ID NO: 111793 - RNA, 1413 nt, Artificial Sequence; identical to SEQ ID NO: 110987
  derived and/or modified CDS sequence (opt2) from neuraminidase__InfluenzaA__ABO38068

SEQ ID NO: 111794 - RNA, 1410 nt, Artificial Sequence; identical to SEQ ID NO: 110363
  derived and/or modified CDS sequence (opt2) from neuraminidase__InfluenzaA__ABO38079

SEQ ID NO: 111795 - RNA, 1410 nt, Artificial Sequence
  derived and/or modified CDS sequence (opt2) from neuraminidase__InfluenzaA__ABO38090
augaaccccaaccagaagaucaucaccaucggcuccgucucccucaccaucgccaccaucugcuuccucaugcagaucgccauccucgucaccaccgucacccuccacuucaagcaguacgagugcaacuccccccccaacaaccaggucaugcucugcgagcccaccaucaucgagcgcaacaucaccgagaucgucuaccucaccaacaccaccaucgagaaggagaucugccccaagcucgccgaguaccgcaacugguccaagccccagugcaacaucaccggcuucgcccccuucuccaaggacaacuccauccgccucuccgccggcggcgacaucugggucacccgcgagcccuacgucuccugcgaccccgacaagugcuaccaguucgcccucggccagggcaccacccucaacaacggccacuccaacgacaccguccacgagcgcacccccuaccgcacccuccucaugaacgagcucggcguccccuuccaccucggcaccaagcaggucugcaucgccugguccuccuccuccugccacgacggcaaggccuggcuccacgucugcgucaccggcgacgacgagaacgccaccgccuccuucaucuacaacggccgccucgucgacuccaucggcuccugguccaagaagauccuccgcacccaggaguccgagugcgucugcaucaacggcaccugcaccgucgucaugaccgacggcuccgccuccggcaaggccgacaccaagauccucuucaucgaggagggcaagaucguccacaccucccuccucuccggcuccgcccagcacgucgaggagugcuccugcuacccccgcuaccccggcguccgcugcgucugccgcgacaacuggaagggcuccaaccgccccaucgucgacaucaacgucaaggacuacuccaucgucuccuccuacgucugcuccggccucgucggcgacaccccccgcaagaacgacuccuccuccuccucccacugccucgaccccaacaacgaggagggcggccacggcgucaagggcugggccuucgacgacggcaacgacgucuggaugggccgcaccaucuccgagaagcuccgcuccggcuacgagaccuucaaggucaucgagggcugguccaagcccaacuccaagcuccagaucaaccgccaggucaucgucgaccgcggcaaccgcuccggcuacuccggcaucuucuccgucgagggcaaguccugcaucaaccgcugcuucuacgucgagcucauccgcggccgcaagcaggagaccgagguccucuggaccuccaacuccaucgucgucuucugcggcaccuccggcaccuacggcaccggcuccuggcccgacggcgccgacaucaaccucaugcccaucuga

SEQ ID NO: 111796 - RNA, 1410 nt, Artificial Sequence
  derived and/or modified CDS sequence (opt2) from neuraminidase__InfluenzaA__ABO38101
augaaccccaaccagaagaucaucaccaucggcuccgucucccucaccaucgccaccgucugcuuccucaugcagaucgccauccucgccaccaccgucacccuccacuucaagcagcacgagugcgacucccccgccuccaaccaggucaugcccugcgagcccaucaucaucgagcgcaacaucaccgagaucgucuaccucaacaacaccaccaucgagaaggagaucugccccgaggucgucgaguaccgcaacugguccaagccccagugccagaucaccggcuucgcccccuucuccaaggacaacuccauccgccucuccgccggcggcgacaucugggucacccgcgagcccuacgucuccugcgaccccggcaagugcuaccaguucgcccucggccagggcaccacccucgacaacaagcacuccaacggcaccauccacgaccgcaucccccaccgcacccuccucaugaacgagcucggcguccccuuccaccucggcaccaagcaggucugcgucgccugguccuccuccuccugccacgacggcaaggccuggcuccacgucugcgucaccggcgacgaccgcaacgccaccgccuccuucaucuacgacggccgccucgucgacuccaucggcuccuggucccagaacauccuccgcacccaggaguccgagugcgucugcaucaacggcaccugcaccgucgucaugaccgacggcuccgccuccggccgcgccgacacccgcauccucuucaucaaggagggcaagaucguccacaucuccccccucuccggcuccgcccagcacaucgaggagugcuccugcuacccccgcuaccccgacguccgcugcaucugccgcgacaacuggaagggcuccaaccgccccgucaucgacaucaacauggaggacuacuccaucgacuccuccuacgucugcuccggccucgucggcgacaccccccgcaacgacgacuccuccuccaacuccaacugccgcgaccccaacaacgagcgcggcaaccccggcgucaagggcugggccuucgacaacggcgacgacgucuggaugggccgcaccaucaacaaggacucccgcuccggcuacgagaccuucaaggucaucggcggcugguccacccccaacuccaagucccaggucaaccgccaggucaucgucgacaacaacaacugguccggcuacuccggcaucuucuccgucgagggcaaguccugcaucaaccgcugcuucuacgucgagcucauccgcggccgcccccaggagacccgcgucugguggaccuccaacuccaucgucgucuucugcggcaccuccggcaccuacggcaccggcuccuggcccgacggcgccaacaucaacuucaugcccaucuga

SEQ ID NO: 111797 - RNA, 1410 nt, Artificial Sequence
  derived and/or modified CDS sequence (opt2) from neuraminidase__InfluenzaA__ABO38233
augaaccccaaccagaagaucaucaccaucggcuccgucucccucaccaucgccaccaucugcuuccucaugcagaucgccauccucgucaccaccgucacccuccacuucaagcaguacgagugcgacucccccgccaacaaccaggucaugcccugcgagcccaucaucaucgagcgcaacaucaccgagaucgucuaccucaccaacaccaccaucgagaaggagaucugccccaagcucgucgaguaccgcaacugguccaagccccagugcaagaucaccggcuucgcccccuucuccaaggacaacuccauccgccucuccgccggcggcgacaucugggucacccgcgagcccuacgucuccugcgaccccggcaagugcuaccaguucgcccucggccagggcaccacccucgacaacaagcacuccaacgacaccauccacgaccgcaccccccaccgcacccuccucaugaacgagcucggcguccccuuccaccucggcacccgccaggucugcaucgccugguccuccuccuccugccacgacggcaaggccuggcuccacgucugcgucaccggcuacgacaagaacgccaccgccuccuucaucuacgacggccgccucgucgacuccaucggcuccugguccaagaacauccuccgcacccaggaguccgagugcgucugcaucaacggcaccugcaccgucgucaugaccgacggcuccgccuccgagcgcgccgacaccaagauccucuucaucgaggagggcaagaucguccacaucuccccccucuccggcuccgcccagcacgucgaggagugcuccugcuacccccgcuaccccggcguccgcugcgucugccgcgacaacuggaagggcuccaaccgccccgucgucgacaucaacgucaaggacuacuccaucgccuccuccuacgucugcuccggccucgucggcgacaccccccgcaagaacgaccgcuacuccuccuccuacugccgcaaccccaacaacgagaagggcaaccacggcgucaagggcugggccuucgacgacggcaacgacgucuggaugggccgcaccaucuccgacgagucccgcuccggcuacgagaccuucaaggucaucggcggcugguccacccccaacuccaagcuccagaucaaccgccaggucaucgucgacuccgacaaccgcuccggcuacuccggcaucuucuccgucgagggcaaguccugcaucaaccgcugcuucuacgucgagcucauccgcggccgcgagcaggagacccgcgucugguggaccuccaacuccaucgucgucuucugcggcaccuccggcaccuacggcaccggcuccuggcccgacggcgccgacaucaaccucaugcccaucuga

SEQ ID NO: 111798 - RNA, 1410 nt, Artificial Sequence; identical to SEQ ID NO: 111147
  derived and/or modified CDS sequence (opt2) from neuraminidase__InfluenzaA__ABO38244

SEQ ID NO: 111799 - RNA, 1410 nt, Artificial Sequence; identical to SEQ ID NO: 110363
  derived and/or modified CDS sequence (opt2) from neuraminidase__InfluenzaA__ABO38255

SEQ ID NO: 111800 - RNA, 1410 nt, Artificial Sequence; identical to SEQ ID NO: 110748
  derived and/or modified CDS sequence (opt2) from neuraminidase__InfluenzaA__ABO38277

SEQ ID NO: 111801 - RNA, 1410 nt, Artificial Sequence; identical to SEQ ID NO: 111775
  derived and/or modified CDS sequence (opt2) from neuraminidase__InfluenzaA__ABO38288

SEQ ID NO: 111802 - RNA, 1410 nt, Artificial Sequence
  derived and/or modified CDS sequence (opt2) from neuraminidase__InfluenzaA__ABO38299
augaaccccaaccagaagaucaucaccaucggcuccgucucccucaccaucgccaccgucugcuucaucaugcagaucgccauccucgccaccaccgucacccuccacuucaagcagcacgagugcgacucccccgccuccaaccaggucaugcccugcgagcccaucaucaucgagcgcaacaucaccgagaucgucuaccucaacaacaccaccaucgagaaggagaucugccccgaggccgucgaguaccgcaacugguccaagccccagugccagaucaccggcuucgcccccuucuccaaggacaacuccauccgccucuccgccggcggcgacaucugggucacccgcgagcccuacgucuccugcgaccccggcaagugcuaccaguucgcccucggccagggcaccacccucgacaacaagcacuccaacggcaccauccacgaccgcaucccccaccgcacccuccucaugaacgagcucggcguccccuuccaccucggcaccaagcaggucugcgucgccugguccuccuccuccugccacgacggcaaggccuggcuccacgucugcgucaccggcgacgaccgcaacgccaccgccuccuucaucuacgacggccgccucgucgacuccaucggcuccuggucccagaacauccuccgcacccaggaguccgagugcgucugcaucaacggcaccugcaccgucgucaugaccgacggcuccgccuccggccgcgccgacacccgcauccucuucaucaaggagggcaagaucguccacaucuccccccucuccggcuccgcccagcacgucgaggagugcuccugcuacccccgcuaccccgacguccgcugcaccugccgcgacaacuggaagggcuccaaccgccccgucaucgacaucaacauggaggacuacuccaucgacuccuccuacgucugcuccggccucgucggcgacaccccccgcaacgacgacuccuccuccaacuccaacugccgcgaccccaacaacgagcgcggcaaccccggcgucaagggcugggccuucgacaacggcgacgacgucuggaugggccgcaccaucaacaaggacucccgcuccggcuacgagaccuucaaggucaucggcggcugguccacccccaacuccaagucccaggucaaccgccaggucaucgucgacaacaacaacugguccggcuacuccggcaucuucuccgucgagggcaaguccugcaucaaccgcugcuucuacgucgagcucauccgcggccgcccccaggagacccgcgucugguggaccuccaacuccaucgucgucuucugcggcaccuccggcaccuacggcaccggcuccuggcccgacggcgccaacaucaacuucaugcccaucuga

SEQ ID NO: 111803 - RNA, 1410 nt, Artificial Sequence
  derived and/or modified CDS sequence (opt2) from neuraminidase__InfluenzaA__ABO38310
augaaccccaaccagaagaucaucaccaucggcuccgucucccucaccaucgccaccgucugcuuccucaugcagaucgccauccucgccaccaccgucacccuccacuucaagcagcacgagugcgacucccccaccuccaaccaggucaugcccugcgagcccaucaucaucgagcgcaacaucaccgagaucgucuaccucaacaacaccaccaucgagaaggagaucugccccgaggucgucgaguaccgcaacugguccaagccccagugccagaucaccggcuucgcccccuucuccaaggacaacuccauccgccucuccgccggcggcgacaucugggucacccgcgagcccuacgucuccugcgaccccggcaagugcuaccaguucgcccucggccagggcaccacccucgacaacaagcacuccaacggcaccauccacgaccgcaucccccaccgcacccuccucaugaacgagcucggcguccccuuccaccucggcaccaagcaggucugcgucgccugguccuccuccuccugccacgacggcaaggccuggcuccacgucugcgucaccggcgacgaccgcaacgccaccgccuccuucaucuacgacggccgccucgucgacuccaucggcuccuggucccagaacauccuccgcacccaggaguccgagugcgucugcaucaacggcaccugcaccgucgucaugaccgacggcuccgccuccggccgcgccgacacccgcauccucuucaucaaggagggcaagaucguccacaucuccccccucuccggcuccgcccagcacaucgaggagugcuccugcuacccccgcuaccccgacguccgcugcaucugccgcgacaacuggaagggcuccaaccgccccgucaucgacaucaacauggaggacuacuccaucgacuccuccuacgucugcuccggccucgucggcgacaccccccgcaacggcgacuccuccuccaacuccaacugccgcgaccccaacaacgagcgcggcaaccccggcgucaagggcugggccuucgacaacggcgacgacgucuggaugggccgcaccaucaacaaggagucccgcuccggcuacgagaccuucaaggucaucggcggcugguccacccccaacuccaagucccaggucaaccgccaggucaucgucgacaacaacaacugguccggcuacuccggcaucuucuccgucgagggcaaguccugcaucaaccgcugcuucuacgucgagcucauccgcggccgcccccaggagacccgcgucugguggaccuccaacuccaucgucgucuucugcggcaccuccggcaccuacggcaccggcuccuggcccgacggcgccaacaucaacuucaugcccaucuga

SEQ ID NO: 111804 - RNA, 1413 nt, Artificial Sequence; identical to SEQ ID NO: 110966
  derived and/or modified CDS sequence (opt2) from neuraminidase__InfluenzaA__ABO38332

SEQ ID NO: 111805 - RNA, 1413 nt, Artificial Sequence
  derived and/or modified CDS sequence (opt2) from neuraminidase__InfluenzaA__ABO38343
augaaccccaaccagaagaucaucaccaucggcuccaucugcaugaccaucggcaucaucucccucauccuccagaucggcaacaucaucuccaucugggucucccacuccauccagaccggcucccagaaccacaccggcaucugcaaccagcgcaucaucaccuacgagaacuccaccugggucaaccagaccuacgucaacaucaacaacaccaacgucgucgccggcaaggacaccaccuccgucacccucgccggcaacuccucccucugccccauccgcggcugggccaucuacuccaaggacaacuccauccgcaucggcuccaagggcgacgucuucgucauccgcgagcccuucaucuccugcucccaccucgagugccgcaccuucuuccucacccagggcgcccuccucaacgacaagcacuccaacggcaccgucaaggaccgcucccccuaccgcgcccucauguccugccccaucggcgaggcccccucccccuacaacucccgcuucgaguccgucgccugguccgccuccgccugccacgacggcaugggcuggcucaccaucggcaucuccggccccgacgacggcgccgucgccguccucaaguacaacggcaucaucaccgagaccaucaaguccuggcgcaagcgcauccuccgcacccaggaguccgagugcgucugcgucaacggcuccugcuucaccaucaugaccgacggccccuccaacggccccgccuccuaccgcaucuucaagaucgagaagggcaagaucaccaaguccaucgagcucgacgcccccaacucccacuacgaggagugcuccugcuaccccgacaccggcaccgucaugugcgucugccgcgacaacuggcacggcuccaaccgccccugggucuccuucaaccagaaccucgacuaccagaucggcuacaucugcuccggcgucuucggcgacaacccccgccccaaggacggcaagggcuccugcgaccccgucaccgucgacggcgccgacggcgucaagggcuucuccuaccgcuacggcaacggcgucuggaucggccgcaccaaguccaacuccucccgcaagggcuucgagaugaucugggaccccaacggcuggaccgacaccgacuccaacuuccucgucaagcaggacgucgucgccaugaccgacugguccggcuacuccggcuccuucguccagcaccccgagcucaccggccucgacugcaugcgccccugcuucugggucgagcucguccgcggccgcccccgcgagggcaccaccgucuggaccuccggcuccuccaucuccuucugcggcgucaacuccgacaccgccaacugguccuggcccgacggcgccgagcuccccuucaccaucgacaaguga

SEQ ID NO: 111806 - RNA, 1410 nt, Artificial Sequence
  derived and/or modified CDS sequence (opt2) from neuraminidase__InfluenzaA__ABO38354
augaaccccaaccagaagaucaucaccaucggcuccaucugcauggucgucggcaucaucucccucauccuccagaucggcaacaucaucuccaucuggaucucccacuccauccagaccggcucccagaaccacaccggcaucugcaaccagaacaucaucaccuacaagaacuccaccugggucaaccagaccuacgucaacaucuccaacaccaacgucgucgccggccaggacaccaccuccgucauccucaccggcaacuccucccucugccccauccgcggcugggccaucuacuccaaggacaacuccauccgcaucggcuccaagggcgacgucuucgucauccgcgagcccuucaucuccugcucccaccucgagugccgcaccuucuuccucacccagggcgcccuccucaacgaccgccacuccaacggcaccgucaaggaccgcucccccuaccgcgcccucauguccugccccgucggcgaggcccccucccccuacaacucccgcuucgaguccgucgccugguccgccuccgccugccacgacggcaugggcuggcucaccaucggcaucuccggccccgacaacggcgccgucgccguccucaaguacaacggcaucaucaccgagaccaucaaguccuggcgcaagaagauccuccgcacccaggaguccgagugcgccugcgucaacggcuccugcuucaccaucaugaccgacggccccuccaacggccucgccuccuacaagaucuucaagaucgagaagggcaaggucaccaaguccaucgagcucaacgcccccaacucccacuacgaggagugcuccugcuaccccgacaccggcaaggucaugugcgucugccgcgacaacuggcacggcuccaaccgccccugggucuccuucgaccagaaccucgacuaccagaucggcuacaucugcuccggcgucuucggcgacaacccccgccccaaggacggcaccggcuccugcggccccgucuacgucgacggcgccaacggcgucaagggcuucuccuaccgcuacggcaacggcgucuggaucggccgcaccaaguccaacuccucccgccacggcuucgagaugaucugggaccccaacggcuggaccgagaccgacuccaaguucuccguccgccaggacgucgucgccaugaccgacugguccggcuacuccggcuccuucguccagcaccccgagcucaccggccucgacugcaugcgccccugcuucugggucgagcucauccgcggccgccccaaggagaacaccaucuggaccuccggcuccuccaucuccuucugcggcgucaacuccgacaccgucgacugguccuggcccgacggcgccgagcuccccuucaccaucgacaaguga

SEQ ID NO: 111807 - RNA, 1413 nt, Artificial Sequence
  derived and/or modified CDS sequence (opt2) from neuraminidase__InfluenzaA__ABO38365
augaaccccaaccagaagaucaucaccaucggcuccaucugcauggccaucggcaucaucucccucauccuccagaugggcaacaucaucuccaucugggucucccacuccauccagaccggcucccagaaccacaccggcaucugcaaccagcgcaucaucaccuacgagaacuccaccugggucaaccagaccuacgucaacaucaacaacaccaacgucgucgccggcaaggacaccaccuccgucacccucgccggcaacuccucccucugccccauccgcggcugggccaucuacuccaaggacaacuccauccgcaucggcuccaagggcgacgucuucgucauccgcgagcccuucaucuccugcucccaccucgagugccgcaccuucuuccucacccagggcgcccuccucaacgacaagcacuccaacggcaccgucaaggaccgcucccccuaccgcgcccucauguccugccccaucggcgaggcccccucccccuacaacucccgcuucgaguccgucgccugguccgccuccgccugccacgacggcaugggcuggcucaccaucggcaucuccggccccgacgacggcgccgucgccguccucaaguacaacggcaucaucaccgagaccaucaaguccuggcgcaagcgcauccuccgcacccaggaguccgagugcgucugcgucaacggcuccugcuucaccaucaugaccgacggccccuccaacggccccgccuccuaccgcaucuucaagaucgagaagggcaagaucaccaaguccaucgagcucgacgcccccaacucccacuacgaggagugcuccugcuaccccgacaccggcaccgucaugugcgucugccgcgacaacuggcacggcuccaaccgccccugggucuccuucaaccagaaccucgacuaccagaucggcuacaucugcuccggcgucuucggcgacaacccccgccccaaggacggcaagggcuccugcgaccccgucaccgucgacggcgccgacggcgucaagggcuucuccuaccgcuacggcaacggcgucuggaucggccgcaccaaguccaacuccucccgcaagggcuucgagaugaucugggaccccaacggcuggaccgacaccgacuccaacuuccucgucaagcaggacgucgucgccaugaccgacugguccggcuacuccggcuccuucguccagcaccccgagcucaccggccucgacugcaugcgccccugcuucugggucgagcucauccgcggccgcccccgcgagaagaccaccaucuggaccuccggcuccuccaucuccuucugcggcgucaacuccgacaccgccaacugguccuggcccgacggcgccgagcuccccuucaccaucgacaaguga

SEQ ID NO: 111808 - RNA, 1410 nt, Artificial Sequence
  derived and/or modified CDS sequence (opt2) from neuraminidase__InfluenzaA__ABO38376
augaaccccaaccagaagaucaucaccaucggcuccaucugcauggucgucggcaucaucucccucauccuccagaucggcaacaucaucuccaucuggaucucccacuccauccagaccggcucccagaaccacaccggcaccugcaaccaguccaucaucaccuacaagaacuccaccugggucaaccagaccuacgucaacaucuccaacaccaacgucgucgccggcaaggacaccaccuccgucauccucgccggcaacuccucccucugccccauccgcggcugggccaucuacuccaaggacaacggcguccgcaucggcuccaagggcgacgucuucgucauccgcgagcccuucaucuccugcucccaccucgagugccgcaccuucuuccucacccagggcgcccuccucaacgacaagcacuccaacggcaccgucaaggaccgcucccccuaccgcgcccucauguccugccccgucggcgaggcccccucccccuacaacucccgcuucgaguccgucgccugguccgccuccgccugccacgacggcaugggcuggcucaccaucggcaucuccggccccgacgacggcgccgucgccguccucaaguacaacggcaucaucaccgagaccaucaaguccuggcgcaaggagauccuccgcacccaggaguccgagugcgccugcgucaacggcuccugcuucaccaucaugaccgacggccccuccggcggccccgccuccuacaagaucuucaagaucgagaagggcaaggucaccaaguccaucgagcucgacgcccccaacucccacuacgaggagugcuccugcuaccccgacaccggcaaggucaugugcgucugccgcgacaacuggcacggcuccaaccgccccugggucuccuucgaccagaaccucgacuaccagaugggcuacaucugcuccggcgucuucggcgacaacccccgccccaaggacggcaagggcaacugcggccccgucuacgucgacggcgccaacggcgucaagggcuucuccuaccgcuacggcaacggcgucuggaucggccgcaccaaguccaacuccucccgccagggcuucgagaugaucugggaccccaacggcuggaccgagaccgacuccaacuucuucgucaagcaggacgucgucgccgucaccgacugguccggcuacuccggcuccuucguccagcaccccgagcucaccggccucgacugcaugcgccccugcuucugggucgagcucauccgcggccgccccaaggagaagaccaucuggaccuccggcuccuccaucuccuucugcggcgucaacuccgacaccgucgacugguccuggcccgacggcgccgagcuccccuucaccaucgacaaguga

SEQ ID NO: 111809 - RNA, 1410 nt, Artificial Sequence
  derived and/or modified CDS sequence (opt2) from neuraminidase__InfluenzaA__ABO38387
augaaccccaaccagaagaucaucaccaucggcuccaucugcauggucgucggcaucaucucccucauccuccagaucggcaacaucaucuccaucuggaucucccacuccauccagaccggcucccagaaccacaccggcaucugcaaccaguccaucaucaccuacaagaacuccaccugggucaaccagaccuacgucaacaucuccaacaccaacgucgucgccggccaggacaccaccuccgucauccucaccggcaacuccucccucugccccauccgcggcugggccaucuacuccaaggacaacggcauccgcaucggcuccaagggcgacgucuucgucauccgcgagcccuucaucuccugcucccaccucgagugccgcaccuucuuccucacccagggcgcccuccucaacgacaagcacuccaacggcaccgucaaggaccgcucccccuaccgcgcccucauguccugccccgucggcgaggcccccucccccuacaacucccgcuucgaguccgucgccugguccgccuccgccugccacgacggcaugggcuggcucaccaucggcaucuccggccccgacaacgaggccgucgccguccucaaguacaacggcaucaucaccgagaccaucaaguccuggcgcaagaagauccuccgcacccaggaguccgagugcgccugcgucaacggcuccugcuucaccaucaugaccgacggccccuccgacggccucgccuccuacaagaucuucaagaucgagaagggcaaggucaccaaguccaucgagcucaacgcccccaacucccacuacgaggagugcuccugcuaccccgacaccggcaaggucaugugcgucugccgcgacaacuggcacggcuccaaccgccccugggucuccuucgaccagaaccucgacuaccagaucggcuacaucugcuccggcgucuucggcgacaacccccgccccaaggacggcaccggcuccugcggccccgucuacgucgacggcgccaacggcgucaagggcuucuccuaccgcuacggcaacggcgucuggaucggccgcaccaaguccaccuccucccgccacggcuucgagaugaucugggaccccaacggcuggaccgagaccgacuccaaguucuccguccgccaggacgucgucgccaugaccgacugguccggcuacuccggcuccuucguccagcaccccgagcucaccggccucgacugcaugcgccccugcuucugggucgagcucauccgcggccagcccaaggagaagaccaucuggaccuccggcuccuccaucuccuucugcggcgucaacuccgacaccgucgacugguccuggcccgacggcgccgagcuccccuucaccaucgacaaguga

SEQ ID NO: 111810 - RNA, 1413 nt, Artificial Sequence
  derived and/or modified CDS sequence (opt2) from neuraminidase__InfluenzaA__ABO38398
augaaccccaaccagaagaucaucaccaucggcuccaucugcauggccaucggcaucaucucccucauccuccagaucggcaacaucgucuccaucuggaucucccacuccauccagaccggcucccagaacuacaccggcaucugcaaccagcgcaucaucaccuacgagaacuccaccugggucaaccagaccuacgucaacaucaacaacaccaacgucgucgccggccaggacaccaccuccgucgcccucgccggcaacuccucccucugccccaucuccggcugggccaucuacuccaaggacaacuccauccgcaucggcuccaagggcgacgucuucgucauccgcgagcccuucaucuccugcucccaccucgagugccgcaacuucuuccucacccagggcgcccuccucaacgacaagcacuccaacggcaccgucaaggaccgcucccccuaccgcgcccucauguccugccccaucggcgaggcccccucccccuacaacucccgcuucgaguccgucgccugguccgccuccgccugccacgacggcaugggcuggcucaccaucggcaucuccggccccgacgacggcgccgucgccguccucaaguacaacggcaucaucaccgagaccaucaaguccuggcgcaagcgcauccuccgcacccaggaguccgagugcgucugcgucaacggcuccugcuucaccaucaugaccgacggccccaacaacggccccgccuccuacaagaucuucaagaucgagaagggcaagaucaccaaguccaucgagcucgacgcccccaacucccacuacgaggagugcuccugcuaccccgacgccggcaccgucaugugcgucugccgcgacaacuggcacggcuccaaccgccccugggucuccuucaaccagaaccucgacuaccagaucggcuacaucugcuccggcgucuucggcgacaacccccgccccaaggacggcaagggcuccugcgaccccgucaccgucgacggcgccgacggcgucaagggcuucuccuaccgcuacggcaacggcgucuggaucggccgcaccaaguccaacuccucccgccgcggcuucgagaugaucugggaccccaacggcuggaccgacaccgacuccaaguuccucgucaagcaggacgucgucgccaugaccgacugguccggcuacuccggcuccuucguccagcaccccgagcucaccggccucgacugcaugcgccccugcuucugggucgagcucauccgcggccgcccccgcgagaacaccaccaucuggaccuccggcuccuccaucuccuucugcggcgucaacggcgacaccgccaacugguccuggcccgacggcgccgagcuccccuucaccaucgacaaguga

SEQ ID NO: 111811 - RNA, 1410 nt, Artificial Sequence; identical to SEQ ID NO: 110289
  derived and/or modified CDS sequence (opt2) from neuraminidase__InfluenzaA__ABO38420

SEQ ID NO: 111812 - RNA, 1410 nt, Artificial Sequence
  derived and/or modified CDS sequence (opt2) from neuraminidase__InfluenzaA__ABO38715
augaaccccaaccagaagaucaucaccaucggcuccgucucccucaccaucgccaccgucugcuuccucaugcagaucgccauccucgucaccaccgucacccuccacuucaagcagcacgagugcgacucccccgccuccaaccaggucaugcccugcgagcccaucaucaucgagcgcaacaucaccgagaucgucuaccucaacaacaccaccaucgagaaggagaccugccccaaggucgucgaguaccgcuccugguccaagccccagugcaagaucaccggcuucgcccccuucuccaaggacaacuccauccgccucuccgccggcggcgacaucugggucacccgcgagcccuacgucuccugcgaccccggcaagugcuaccaguucgcccucggccagggcaccacccucgacaacaagcacuccaacgacaccauccacgaccgcaucccccaccgcacccuccucaugaacgagcucggcguccccuuccaccucggcacccgccaggucugcaucgccugguccuccuccuccugccacgacggcaaggccuggcuccacgucugcgucaccggcgacgacaagaacgccaccgccuccuucaucuacgacggccgccucgucgacuccaucggcuccuggucccagaacauccuccgcacccaggaguccgagugcgucugcaucaacggcaccugcaccgucgucaugaccgacggcuccgccuccggccgcgccgacacccgcauccucuucaucgaggagggcaagaucguccacaucuccccccucuccggcuccgcccagcacgucgaggagugcuccugcuacccccgcuaccccgacguccgcugcaucugccgcgacaacuggaagggcuccaaccgccccaucgucgacaucaacauggaggacuacuccaucgacuccuccuacgucugcuccggccucgucggcgacaccccccgcaacgacgaccgcuccuccaacuccaacugccgcaaccccaacaacgagcgcggcaaccagggcgucaagggcugggccuucgacaacggcgacgacgucuggaugggccgcaccaucuccaaggaccuccgcuccggcuacgagaccuucaaggucaucggcggcugguccacccccaacuccaagucccagaucaaccgccaggucaucgucgacuccgacaaccgcuccggcuacuccggcaucuucuccgucgagggcaaguccugcaucaaccgcugcuucuacgucgagcucauccgcggccgcaagcaggagacccgcgucugguggaccuccaacuccaucgucgucuucugcggcaccuccggcaccuacggcaccggcuccuggcccgacggcgccaacaucaacuucaugcccaucuga

SEQ ID NO: 111813 - RNA, 1410 nt, Artificial Sequence; identical to SEQ ID NO: 111812
  derived and/or modified CDS sequence (opt2) from neuraminidase__InfluenzaA__ABO38726

SEQ ID NO: 111814 - RNA, 1413 nt, Artificial Sequence
  derived and/or modified CDS sequence (opt2) from neuraminidase__InfluenzaA__ABO44049
augaaccccaaccagaagaucaucaccaucggcuccaucuccaucgccaucggcaucaucucccucaugcuccagaucggcaacaucaucuccaucugggccucccacuccauccagaccggcucccagaaccacaccggcaucugcaaccagcgcaucaucaccuacgagaacuccaccugggucaaccacaccuacgucaacaucaacaacaccaacgucgucgccggcaaggacaagaccuccgucacccucgccggcaacuccucccucugcuccaucuccggcugggccaucuacaccaaggacaacuccauccgcaucggcuccaagggcgacgucuucgucauccgcgagcccuucaucuccugcucccaccucgagugccgcaccuucuuccucacccagggcgcccuccucaacgacaagcacuccaacggcaccgucaaggaccgcucccccuaccgcgcccucauguccugcccccucggcgaggcccccucccccuacaacuccaaguucgaguccgucgccugguccgccuccgccugccacgacggcaugggcuggcucaccaucggcaucuccggccccgacaacggcgccgucgccguccucaaguacaacggcaucaucaccgagaccaucaaguccuggaagaagcgcauccuccgcacccaggaguccgagugcgucugcgucaacggcuccugcuucaccaucaugaccgacggccccuccaacggcgccgccuccuacaagaucuucaagaucgagaagggcaaggucaccaaguccaucgagcucaacgcccccaacuuccacuacgaggagugcuccugcuaccccgacaccggcaccgucaucugcgucugccgcgacaacuggcacggcuccaaccgccccugggucuccuucaaccagaaccucgacuaccagaucggcuacaucugcuccggcgucuucggcgacaacccccgccccaaggacggcgagggcuccugcaaccccgucaccgucgacggcgccgacggcgucaagggcuucuccuacaaguacggcaacggcgucuggaucggccgcaccaaguccaaccgccuccgcaagggcuucgagaugaucugggaccccaacggcuggaccgacaccgacuccaacuucuccgucaagcaggacgucgucgccaucaccgacugguccggcuacuccggcuccuucguccagcaccccgagcucaccggccucgacugcauccgccccugcuucugggucgagcucguccgcggccucccccgcgagaacaccaccaucuggaccuccggcuccuccaucuccuucugcggcgucaacuccgacaccgccaacugguccuggcccgacggcgccgagcuccccuucaccaucgacaaguga

SEQ ID NO: 111815 - RNA, 1410 nt, Artificial Sequence
  derived and/or modified CDS sequence (opt2) from neuraminidase__InfluenzaA__ABO44060
augaaccccaaccagaagaucaucaccaucggcuccgucucccucaccaucgccaccgucugcuuccucaugcagaucgccauccucgucaccaccgucacccuccacuucaagcagcacgagugcgacucccccgccuccaaccaggucaugcccugcgagcccaucaucaucgagcgcaacaucaccgagaucgucuaccucaacaacaccaccaucgagaaggagaucugccccaaggucgucgaguaccgcaacugguccaagccccagugcaagaucaccggcuucgcccccuucuccaaggacaacuccauccgccucuccgccggcggcgacaucugggucacccgcgagcccuacgucuccugcgaccccggcaagugcuaccaguucgcccucggccagggcaccacccucgacaacaagcacuccaacgacaccauccacgaccgcaucccccaccgcacccuccucaugaacgagcucggcguccccuuccaccucggcacccgccaggucugcaucgccugguccuccuccuccugccacgacggcaaggccuggcuccacgucugcgucaccggcgacgacaagaacgccaccgccuccuucaucuacgacggccgccucgucgacuccaucggcuccuggucccagaacauccuccgcacccaggaguccgagugcgucugcaucaacggcaccugcaccgucgucaugaccgacggcuccgccuccggccgcgccgacaccaagauccucuucaucgaggagggcaagaucguccacaucuccccccucuccggcuccgcccagcacgucgaggagugcuccugcuacccccgcuaccccgacguccgcugcaucugccgcgacaacuggaagggcuccaaccgccccgucgucgacaucaacauggaggacuacuccaucgacuccuccuacgucugcuccggccucgucggcgacaccccccgcaacgacgaccgcuccuccaacuccaacugccgcaaccccaacaacgagcgcggcaaccagggcgucaagggcugggccuucgacaacggcgacgacgucuggaugggccgcaccaucuccaaggaccuccgcuccggcuacgagaccuucaaggucaucggcggcugguccacccccaacuccaagucccagaucaaccgccaggucaucgucgacuccgacaaccgcuccggcuacuccggcaucuucuccgucgagggcaaguccugcaucaaccgcugcuucuacgucgagcucauccgcggccgcaagcaggagacccgcgucugguggaccuccaacuccaucgucgucuucugcggcaccuccggcaccuacggcaccggcuccuggcccgacggcgccaacaucaaccucaugcccaucuga

SEQ ID NO: 111816 - RNA, 1410 nt, Artificial Sequence
  derived and/or modified CDS sequence (opt2) from neuraminidase__InfluenzaA__ABO44071
augaaccccaaccagaagaucaucaccaucggcuucgucuuccucaccaucgccaccgucugcuuccucaugcagaucgccauccucgucaccaccgucacccuccacuucaagcaguacgagugcgacucccccgccuccaaccaggucaugcccugcgagcccaucaucaucgagcgcaacaucaccgagaucgucuaccucaacaacaccaccaucgagaaggagaucugccccaaggucgucgaguaccgcaacugguccaagccccagugccagaucaccggcuucgcccccuucuccaaggacaacuccauccgccucuccgccggcggcgacaucugggucacccgcgagcccuacgucuccugcgaccacggcaagugcuaccaguucgcccucggccagggcaccacccucgacaacaagcacuccaacgacaccauccacgaccgcaucccccaccgcacccuccucaugaacgagcucggcguccccuuccaccucggcacccgccaggucugcaucgccugguccuccuccuccugccacgacggcaaggccuggcuccacgucugcaucaccggcgacgacaagaacgccaccgccuccuucaucuacgacggccgccucgucgacuccaucggcuccuggucccagaacauccuccgcacccaggaguccgagugcgucugcaucaacggcaccugcaccgucgucaugaccgacggcuccgccuccggccgcgccgacacccgcauccucuucaucgaggagggcaagaucguccacaucuccccccucuccggcuccgcccagcacgucgaggagugcuccugcuacccccgcuaccccggcguccgcugcaucugccgcgacaacuggaagggcuccaaccgccccgucgucgacaucaacauggaggacuacuccaucgacuccuccuacgucugcuccggccucgucggcgacaccccccgcaacgacgaccgcuccuccaacuccaacugcaagaaccccaacaacgagcgcggcaaccagggcgucaagggcugggccuucgacaacggcgacgacgucuggaugggccgcaccaucuccaaggaccuccgcuccggcuacgagaccuucaaggucaucggcggcugguccacccccaacuccaagucccagaucaaccgccaggucaucgucgacuccgacaaccgcuccggcuacuccggcaucuucuccgucgagggcaaguccugcaucaaccgcugcuucuacgucgagcucauccgcggccgcaagcaggagacccgcgucugguggaccuccaacuccaucgucgucuucugcggcaccuccggcaccuacggcaccggcuccuggcccgacggcgccaacaucaacuucaugcccaucuga

SEQ ID NO: 111817 - RNA, 1410 nt, Artificial Sequence; identical to SEQ ID NO: 110382
  derived and/or modified CDS sequence (opt2) from neuraminidase__InfluenzaA__ABO44082

SEQ ID NO: 111818 - RNA, 1410 nt, Artificial Sequence
  derived and/or modified CDS sequence (opt2) from neuraminidase__InfluenzaA__ABO44093
augaaccccaaccagaagaucaucaccaucggcuccgucucccucaccaucgccaccgucugcuuccucaugcagaucgccauccucgccaccaccgucacccuccacuucaagcagcacgagugcgacucccccgccuccaaccaggucaugcccugcgagcccaucaucaucgagcgcaacaucaccgagaucgucuaccucaacaacaccaccaucgagaaggagaucugccccgaggucgucgaguaccgcaacugguccaagccccagugccagaucaccggcuucgcccccuucuccaaggacaacuccauccgccucuccgccggcggcgacaucugggucacccgcgagcccuacgucuccugcgaccccggcaagugcuaccaguucgcccucggccagggcaccacccucgacaacaagcacuccaacggcaccauccacgaccgcaucccccaccgcacccuccucaugaacgagcucggcguccccuuccaccucggcaccaagcaggucugcgucgccugguccuccuccuccugccacgacggcaaggccuggcuccacgucugcgucaccggcgacgaccgcaacgccaccgccuccuucaucuacgacggccgccucgucgacuccaucggcuccuggucccagaacauccuccgcacccaggaguccgagugcgucugcaucaacggcaccugcaccgucgucaugaccgacggcuccgccuccggccgcgccgacacccgcauccucuucaucaaggagggcaagaucguccacaucuccccccucuccggcuccgcccagcacaucgaggagugcuccugcuacccccgcuaccccgacguccgcugcaucugccgcgacaacuggaagggcuccaaccgccccguccucgacaucuccauggaggacuacuccaucgacuccuccuacgucugcuccggccucgucggcgacaccccccgcaacgacgacuccuccuccaacuccaacugccgcgaccccaacaacgagcgcggcaaccccggcgucaagggcugggccuucgacaacggcgacgacgucuggaugggccgcaccaucuccaaggaccuccgcuccggcuacgagaccuucaaggucaucggcggcugguccacccccaacuccaagucccaggucaaccgccaggucaucgucgacaacaacaacugguccggcuacuccggcaucuucuccgucgagggcaaguccugcaucaaccgcugcuucuacgucgagcucauccgcggccgcucccaggagacccgcgucugguggaccuccaacuccaucgucgucuucugcggcaccuccggcaccuacggcaccggcuccuggcccgacggcgccaacaucaacuucaugcccaucuga

SEQ ID NO: 111819 - RNA, 1410 nt, Artificial Sequence
  derived and/or modified CDS sequence (opt2) from neuraminidase__InfluenzaA__ABO44104
augaaccccaaccagaagaucaucaccaucggcuccgccucccucaccaucgccaccgucugcuuccucaugcagaucgccauccucgucaccaccgucacccuccacuucaagcagcacgagugcgacucccccgccuccaaccaggucaugcccugcgagcccaucaucaucgagcgcaacaucaccgagaucgucuaccucaacaacaccaccaucgagaaggagaucugccccaaggucgucgaguaccgcaacugguccaagccccagugcaagaucaccggcuucgcccccuucuccaaggacaacuccauccgccucuccgccggcggcgacaucugggucacccgcgagcccuacgucuccugcgaccccggcaagugcuaccaguucgcccucggccagggcaccacccucgacaacaagcacuccaacgacaccauccacgaccgcaucccccaccgcacccuccucaugaacgagcucggcguccccuuccaccucggcacccgccaggucugcaucgccugguccuccuccuccugccacgacggcaaggccuggcuccacgucugcgucaccggcgacgacaagaacgccaccgccuccuucaucuacgacggccgccucgucgacuccaucggcuccuggucccagaacauccuccgcacccaggaguccgagugcgucugcaucaacggcaccugcaccgucgucaugaccgacggcuccgccuccggccgcgccgacacccgcauccucuucaucgaggagggcaagaucguccacaucuccccccucuccggcuccgcccagcacgucgaggagugcuccugcuacccccgcuaccccgacguccgcugcaucugccgcgacaacuggaagggcuccaaccgccccgucgucgacaucaacauggaggacuacuccaucgacuccuccuacgucugcuccggccucgucggcgacaccccccgcaacgacgaccgcuccuccaacuccaacugccgcaaccccaacaacgagaagggcaaccagggcgucaagggcugggccuucgacaacggcgacgacgucuggaugggccgcaccaucuccaaggaccuccgcuccggcuacgagaccuucaaggucaucggcggcugguccacccccaacuccaagucccagaucaaccgccaggucaucgucgacuccgacaaccgcuccggcuacuccggcaucuucuccgucgagggcaaguccugcaucaaccgcugcuucuacgucgagcucauccgcggccgcaagcaggagacccgcgucugguggaccuccaacuccaucgucgucuucugcggcaccuccggcaccuacggcaccggcuccuggcccgacggcgccaacaucaaccucaugcccaucuga

SEQ ID NO: 111820 - RNA, 1413 nt, Artificial Sequence
  derived and/or modified CDS sequence (opt2) from neuraminidase__InfluenzaA__ABO44126
augaaccccaaccagaagaucaucaccaucggcuccaucugcauggccaucggcaucaucucccucauccuccagaucggcaacaucgucuccaucuggaucucccacuccauccagaccggcucccagaacuacaccggcaucugcaaccagcgcaucaucaccuacgagaacuccaccugggucaaccagaccuacgucaacaucaacaacaccaacgucgucgccggccaggacaccaccuccgucgcccucgccggcaacuccucccucugccccaucuccggcugggccaucuacuccaaggacaacuccauccgcaucggcuccaagggcgacgucuucgucauccgcgagcccuucaucuccugcucccaccucgagugccgcaccuucuuccucacccagggcgcccuccucaacgacaagcacuccaacggcaccgucaaggaccgcucccccuaccgcgcccucauguccugccccaucggcgaggcccccucccccuacaacucccgcuucgaguccgucgccugguccgccuccgccugccacgacggcaugggcuggcucaccaucggcaucuccggccccgacgacggcgccgucgccguccucaaguacaacggcaucaucaccgagaccaucaaguccuggcgcaagcgcauccuccgcacccaggaguccgagugcgucugcgucaacggcuccugcuucaccaucaugaccgacggccccaacaacggccccgccuccuacaagaucuucaagaucgagaagggcaagaucaccaaguccaucgagcucaacgcccccaacucccacuacgaggagugcuccugcuaccccgacgccggcaccgucaugugcgucugccgcgacaacuggcacggcuccaaccgccccugggucuccuucaaccagaaccucgacuaccagaucggcuacaucugcuccggcgucuucggcgacaacccccgccccaaggacggcaagggcuccugcggccccgucaccgucgacggcgccgacggcgucaagggcuucuccuaccgcuacggcaacggcgucuggaucggccgcaccaaguccaacuccucccgccgcggcuucgagaugaucugggaccccaacggcuggaccgacaccgacuccaaguuccucgucaagcaggacgucgucgccaucaccgacugguccggcuacuccggcuccuucguccagcaccccgagcucaccggccucgacugcaugcgccccugcuucugggucgagcucauccgcggccgcccccgcgagaacaccaccaucuggaccuccggcuccuccaucuccuucugcggcgucaacggcgacaccgccaacugguccuggcccgacggcgccgagcuccccuucaccaucgacaaguga

SEQ ID NO: 111821 - RNA, 1413 nt, Artificial Sequence
  derived and/or modified CDS sequence (opt2) from neuraminidase__InfluenzaA__ABO52228
augaaccccaaccagaagaucaucaccaucggcuccaucuccaucgccaucggcaucaucucccucauccuccagaucggcaacaucaucuccaucugggccucccacuccauccagaccggcucccagaaccacaccggcaucugcaaccagcgcaucaucaccuacgagaacuccaccugggucaaccagaccuacgucaacaucaacaacaccaacgucgucgccggcaaggacaagaccuccaugacccucgccggcaacuccucccucugccccauccgcggcugggccaucuacaccaaggacaacuccauccgcaucggcuccaagggcgacgucuucgucauccgcgagcccuucaucuccugcucccaccucgagugccgcaccuucuuccucacccagggcgcccuccucaacgacaagcacuccaacggcaccgucaaggaccgcucccccuaccgcgcccucauguccugcccccucggcgaggcccccucccccuacaacuccaaguucgaguccgucgccugguccgccuccgccugccacgacggccucggcuggcucaccaucggcaucuccggccccgacaacggcgccgucgccguccucaaguacaacggcaucaucaccgagaccaucaaguccuggaagaagcgcauccuccgcacccaggaguccgagugcgucugcaugaacggcuccugcuucaccaucaugaccgacggccccuccaacggcgccgccuccuaccgcaucuucaagaucgagaagggccgcgucaccaaguccaucgagcucgacgcccccaacuaccacuacgaggagugcuccugcuaccccgacaccggcaccgucaugugcgucugccgcgacaacuggcacggcuccaaccgccccugggucuccuucaaccagaaccucgacuaccagaucggcuacaucugcuccggcgucuucggcgacaacccccgccccaaggacggcgagggcuccugcaaccccgucaccgucgacggcgccgacggcgucaagggcuucuccuaccgcuacggcaacggcgucuggaucggccgcaccaaguccaaccgccuccgcaagggcuucgagaugaucugggaccccaacggcuggaccgacaccgacuccgacuucuccaugaagcaggacaucgucgccaugaccgacugguccggcuacuccggcuccuucguccagcaccccgagcucaccggccucgacugcaugcgccccugcuucugggucgagcucguccgcggccucccccgcgagaacaccaccaucuggaccuccggcuccuccaucuccuucugcggcgucaacuccgacaccgccaacugguccuggcccgacggcgccgagcuccccuucaccaucgacaaguga

SEQ ID NO: 111822 - RNA, 1410 nt, Artificial Sequence
  derived and/or modified CDS sequence (opt2) from neuraminidase__InfluenzaA__ABO52239
augaaccccaaccagaagaucaucaccaucggcuccgucucccucaccaucgccaccgucugcuucaucaugcagaucgccauccucgccaccaccgucacccuccacuucaagcagcacgagugcgacucccccgccuccaaccaggucaugcccugcgagcccaucaucaucgagcgcaacaucaccgagaucgucuaccucaacaacaccaccaucgagaaggagaucugccccgaggccgucgaguaccgcaacugguccaagccccagugccagaucaccggcuucgcccccuucuccaaggacaacuccauccgccucuccgccggcggcgacaucugggucacccgcgagcccuacgucuccugcgaccccggcaagugcuaccaguucgcccucggccagggcaccacccucgacaacaagcacuccaacggcaccauccacgaccgcaucccccaccgcacccuccucaugaacgagcucggcguccccuuccaccucggcaccaagcaggucugcgucgccugguccuccuccuccugccacgacggcaaggccuggcuccacgucugcgucaccggcgacgacaagaacgccaccgccuccuucaucuacgacggccgccucgucgacuccaucggcuccuggucccagaacauccuccgcacccaggaguccgagugcgucugcaucaacggcaccugcaccgucgucaugaccgacggcuccgccuccggccgcgccgacacccgcauccucuucaucaaggagggcaagaucguccacaucuccccccucuccggcuccgcccagcacgucgaggagugcuccugcuacccccgcuaccccgacguccgcugcaucugccgcgacaacuggaagggcuccaaccgccccgucaucgacaucaacauggaggacuacuccaucgacuccuccuacgucugcuccggccucgucggcgacaccccccgcaacgacgacuccuccuccaacuccaacugccgcgaccccaacaacgagcgcggcaaccccggcgucaagggcugggccuucgacaacggcgacgacgucuggaugggccgcaccaucaacaaggacucccgcuccggcuacgagaccuucaaggucaucggcggcugguccacccccaacuccaagucccaggucaaccgccaggucaucgucgacaacaacaacugguccggcuacuccggcaucuucuccgucgagggcaaguccugcaucaaccgcugcuucuacgucgagcucauccgcggccgcccccaggagacccgcgucugguggaccuccaacuccaucgucgucuucugcggcaccuccggcaccuacggcaccggcuccuggcccgacggcgccaacaucaacuucaugcccaucuga

SEQ ID NO: 111823 - RNA, 1410 nt, Artificial Sequence; identical to SEQ ID NO: 111819
  derived and/or modified CDS sequence (opt2) from neuraminidase__InfluenzaA__ABO52250

SEQ ID NO: 111824 - RNA, 1413 nt, Artificial Sequence
  derived and/or modified CDS sequence (opt2) from neuraminidase__InfluenzaA__ABO52261
augaaccccaaccagaagaucaucaccaucggcuccaucugcauggccaucggcaucaucucccucauccuccagaucggcaacaucaucuccaucugggucucccacuccauccagaccggcucccagaaccacaccggcaucugcaaccagcgcaucaucaccuacgagaacuccaccugggucaaccagaccuacgucaacaucaacaacaccaacgucgucgccggcaaggacaccaccuccgucacccucgccggcaacuccucccucugccccauccgcggcugggccaucuacuccaaggacaacuccauccgcaucggcuccaagggcgacgucuucgucauccgcgagcccuucaucuccugcucccaccucgagugccgcaccuucuuccucacccagggcgcccuccucaacgacaagcacuccaacggcaccgucaaggaccgcucccccuaccgcgcccucauguccugccccaucggcgaggcccccucccccuacaacucccgcuucgaguccgucgccugguccgccuccgccugccacgacggcaugggcuggcucaccaucggcaucuccggccccgacgacggcgccgucgccguccucaaguacaacggcaucaucaccgagaccaucaaguccuggcgcaagcgcauccuccgcacccaggaguccgagugcgucugcgucaacggcuccugcuucaccaucaugaccgacggccccuccaacggccccgccuccuaccgcaucuucaagaucgagaagggcaagaucaccaaguccaucgagcucgacgcccccaacucccacuacgaggagugcuccugcuaccccgacaccggcaccgucaugugcgucugccgcgacaacuggcacggcuccaaccgccccugggucuccuucaaccagaaccucgacuaccagaucggcuacaucugcuccggcgucuucggcgacaacccccgccccaaggacggcaagggcuccugcgaccccgucaccgucgacggcgccgacggcgucaagggcuucuccuaccgcuacggcaacggcgucuggaucggccgcaccaaguccaacuccucccgcaagggcuucgagaugaucugggaccccgacggcuggaccgacaccgacuccaacuuccucgucaagcaggacgucgucgccaugaccgacugguccggcuacuccggcuccuucguccagcaccccgagcucaccggccucgacugcauccgccccugcuucugggucgagcucauccgcggccgcccccgcgagaagaccaccaucuggaccuccggcuccuccaucuccuucugcggcgucaacuccgacaccgucaacugguccuggcccgacggcgccgagcuccccuucaccaucgacaaguga

SEQ ID NO: 111825 - RNA, 1413 nt, Artificial Sequence
  derived and/or modified CDS sequence (opt2) from neuraminidase__InfluenzaA__ABO52283
augaaccccaaccagaagaucaucaccaucggcuccaucugcaugaccaucggcaccaucucccucauccuccagaucggcaacaucaucuccaucuggaucucccacuccauccagaccggcucccagaaccacaccggcaucugcaaccagcgcaucaucaccuacgagaacaacaccugggucaaccagaccuacgucaacaucuccaacaccaacgucgucgccggcaaggacaccaccuccaugauccucgccggcaacuccucccucugccccauccgcggcugggccaucuacuccaaggacaacuccauccgcaucggcuccaagggcgacgucuucgucauccgcgagcccuucaucuccugcucccaccucgagugccgcaccuucuuccucacccagggcgcccuccucaacgacaagcacuccaacggcaccgucaaggaccgcucccccuaccgcgcccucauguccugccccaucggcgaggcccccucccccuacaacucccgcuucgaguccgucgccugguccgccuccgccugccacgacggcaugggcuggcucaccaucggcaucuccggccccgacgacggcgccgucgccguccucaaguacaacggcaucaucaccgagaucaucaaguccuggcgcaagcagauccuccgcacccaggaguccgagugcgucugcgucaacggcuccugcuucaccaucaugaccgacggccccuccgacggccccgccuccuaccgcaucuucaagaucgagaagggcaagaucaccaaguccaucgagcucgacgcccccaacucccacuacgaggagugcuccugcuaccccgacaccggcaaggucaugugcgucugccgcgacaacuggcacggcuccaaccgccccugggucuccuucaaccagaaccucgacuaccagaucggcuacaucugcuccggcgucuucggcgacaacccccgccccaaggacggcaagggcuccugcgaccccgucaacgucgacggcgccgacggcgucaagggcuucuccuaccgcuacggcgacggcgucuggaucggccgcaccaaguccaacuccucccgcaagggcuucgagaugaucugggaccccaacggcuggaccgacaccgacgacaacuuccucgucaagcaggacgucgucgccaugaccgacugguccggcuacuccggcuccuucguccagcaccccgagcucaccggccucgacugcaugcgccccugcuucugggucgagcucauccgcggccgcccccgcgagaagaccaccaucuggaccuccggcuccuccaucuccuucugcggcgucaacuccgacaccgucaacugguccuggcccgacggcgccgagcuccccuucaccaucgacauguga

SEQ ID NO: 111826 - RNA, 1410 nt, Artificial Sequence; identical to SEQ ID NO: 111554
  derived and/or modified CDS sequence (opt2) from neuraminidase__InfluenzaA__ABO52294

SEQ ID NO: 111827 - RNA, 1410 nt, Artificial Sequence
  derived and/or modified CDS sequence (opt2) from neuraminidase__InfluenzaA__ABO52316
augaaccccaaccagaagaucaucaccaucggcuccgucucccucaccaucgccaccaucugcuuccucaugcagaucgccauccucgucaccaccgucacccuccacuucaagcaguacgagugcgacucccccgccaacaaccagaucaugcccugcgagcccaccaucaucgagcgcaacaucaccgagaucgucuaccucaccaacaucaccaucgagaaggagaucugccccaagcucgucgaguaccgcaacugguccaagccccagugcaagaucaccggcuucgcccccuucuccaaggacaacuccauccgccucuccgccggcggcgacaucugggucacccgcgagcccuacgucuccugcgaccccucccgcugcuaccaguucgcccucggccagggcaccacccucgacaacaagcacuccaacgacaccauccacgaccgcaccccccaccgcacccuccucaugaacgagcucggcguccccuuccaccucggcacccgccaggucugcaucgccugguccuccuccuccugccacgacggcaaggccuggcuccacgucugcgucaccggcuacgacaagaacgccaccgccuccuucaucuacgacggccgccucgucgacuccaucggcuccuggucccagaacauccuccgcacccaggaguccgagugcgucugcaucaacggcaccugcaccgucgucaugaccgacggcuccgccuccggccgcgccgacaccaagauccucuucaucgaggagggcaagaucguccacaucuccccccucuccggcuccgcccagcacgucgaggagugcuccugcuacccccgcuaccccggcguccgcugcaucugccgcgacaacuggaagggcuccaaccgccccgucgucgacaucaacgucaaggacuacuccaucgacuccuccuacgucugcuccggccucgucggcgacaccccccgcaagaacgaccgcuccuccaacuccuacugccgcaaccccaacaacgagaagggcaaccacggcgucaagggcugggccuucgacgacggcaacgacgucuggaugggccgcaccaucuccgaggacucccgcuccggcuacgagaccuucaaggucaucggcggcugguccacccccaacuccaagcuccagaucaaccgccaggucaucgucgacuccgacaaccgcuccggcuacuccggcaucuucuccgucgagggcaaguccugcaucaaccgcugcuucuacgucgagcucauccgcggccgcgagcaggagacccgcgucugguggaccuccaacuccaucgucgucuucugcggcaccuccggcaccuacggcgccggcuccuggcccgacggcgccgacaucaaccucaugcccaucuga

SEQ ID NO: 111828 - RNA, 1410 nt, Artificial Sequence; identical to SEQ ID NO: 110150
  derived and/or modified CDS sequence (opt2) from neuraminidase__InfluenzaA__ABO52327

SEQ ID NO: 111829 - RNA, 1410 nt, Artificial Sequence
  derived and/or modified CDS sequence (opt2) from neuraminidase__InfluenzaA__ABO52338
augaaccccaaccagaagaucaucaccaucggcuccgucucccucaccaucgccaccaucugcuuccucaugcagaucgccauccucgucaccaccgucacccuccacuucaagcaguacgagugcgacucccccgccaacaaccaggucaugcccugcgagcccaucaucaucgagcgcaacaucaccgagaucgucuaccucaccaacaccaccaucgagaaggagaucugccccaagcucgucgaguaccgcaacugguccaagccccagugcaagaucaccggcuucgcccccuucuccaaggacaacuccauccgccucuccgccggcggcgacaucugggucacccgcgagcccuacgucuccugcgaccccggcaagugcuaccaguucgcccucggccagggcaccacccucgacaacaagcacuccaacgacaccauccacgaccgcaccccccaccgcacccuccucaugaacgagcucggcguccccuuccaccucggcacccgccaggucugcaucgccugguccuccuccuccugccacgacggcaaggccuggcuccacgucugcgucaccggcuacgacaagaacgccaccgccuccuucaucuacgacggccgccucgucgacuccaucggcuccugguccaagaacauccuccgcacccaggaguccgagugcgucugcaucaacggcaccugcaccgucgucaugaccgacggcuccgccuccggccgcgccgacaccaagauccucuucaucgaggagggcaagaucguccacaucuccccccucuccggcuccgcccagcacgucgaggagugcuccugcuacccccgcuaccccggcguccgcugcaucugccgcgacaacuggaagggcuccaaccgccccgucgucgacaucaacgucaaggacuacuccaucgacuccuccuacgucugcuccggccucgucggcgacaccccccgcaacaacgaccgcuccuccuccuccuacugccgcaaccccaacaacgagaagggcaaccacggcgucaagggcugggccuucgacgacggcaacgacgucuggaugggccgcaccaucuccgaggacucccgcuccggcuacgagaccuucaaggucaucggcggcugguccacccccaacuccaagcuccagaucaaccgccaggucaucgucgacuccgacaaccgcuccggcuacuccggcaucuucuccgucgagggcaaguccugcaucaaccgcugcuucuacgucgagcucauccgcggccgcgagcaggagacccgcgucugguggaccuccaacuccaucgucgucuucugcggcaccuccggcaccuacggcaccggcuccuggcccgacggcgccgacaucaaccucaugcccaucuga

SEQ ID NO: 111830 - RNA, 1410 nt, Artificial Sequence
  derived and/or modified CDS sequence (opt2) from neuraminidase__InfluenzaA__ABO52349
augaaccccaaccagaagaucaucaccaucggcuccgucucccucaccaucgccaccaucugcuuccucaugcagaucgccauccucgucaccaccgucacccuccacuucaagcaguacgagugcgacucccccgccaacaaccaggucaugcccugcgagcccaucaucaucgagcgcaacgucaccgagaucgucuaccucaccaacaccaccaucgagaaggagaucugccccaagcucgucgaguaccgcaacugguccaagccccagugcaagaucaccggcuucgcccccuucuccaaggacaacuccauccgccucuccgccggcggcgacaucugggucacccgcgagcccuacgucuccugcgaccccggcaagugcuaccaguucgcccucggccagggcaccacccucgacaacaagcacuccaacgacaccauccacgaccgcacccccuaccgcacccuccucaugaacgagcucggcguccccuuccaccucggcacccgccaggucugcaucgccugguccuccuccuccugccacgacggcaaggccuggcuccacgucugcgucaccggcuacgacaagaacgccaccgccuccuucaucuacgacggccgccucgucgacuccaucggcuccugguccaagaacauccuccgcacccaggaguccgagugcgucugcaucaacggcaccugcaccgucgucaugaccgacggcuccgccuccgagcgcgccgacaccaagauccucuucaucgaggagggcaagaucauccacaucuccccccucuccggcuccgcccagcacgucgaggagugcuccugcuacccccgcuaccccggcguccgcugcaucugccgcgacaacuggaagggcuccaaccgccccgucgucgacaucaacaugcgcgacuacuccaucgucuccuccuacgucugcuccggccucgucggcgacaccccccgcaagaacgaccgcuccuccuccuccuacugccgcaaccccaacaacgagaagggcaaccacggcgucaagggcugggccuucgacgacggcaacgacgucuggaugggccgcaccaucuccgaggagucccgcuccggcuacgagaccuucaaggucaucggcggcugguccacccccaacuccaagcuccagaucaaccgccaggucaucgucgacuccaacaaccgcuccggcuacuccggcaucuucuccgucgagggcaaguccugcaucaaccgcugcuucuacgucgagcucauccgcggccgcgagcaggagacccgcgucugguggaccuccaacuccaucgucgucuucugcggcaccuccggcaccuacggcaccggcuccuggcccgacggcgccgacaucaaccucaugcccaucuga

SEQ ID NO: 111831 - RNA, 1410 nt, Artificial Sequence
  derived and/or modified CDS sequence (opt2) from neuraminidase__InfluenzaA__ABO52360
augaaccccaaccagaagaucaucaccaucggcuccgucucccucaccaucgccaccgucugcuuccucaugcagaucgccauccucgucaccaccgucacccuccacuucaagcaguacgagugcgacucccccgccuccaaccaggucaugcccugcgagcccaucaucaucgagcgcaacaucaccgagaucgucuaccucaacaacaccaccaucgagaaggagaucugccccaaggucgucgaguaccgcaacugguccaagccccagugccagaucaccggcuucgcccccuucuccaaggacaacuccauccgccucuccgccggcggcgacaucugggucacccgcgagcccuacgucuccugcgaccacggcaagugcuaccaguucgcccucggccagggcaccacccucgacaacaagcacuccaacgacaccauccacgaccgcaucccccaccgcacccuccucaugaacgagcucggcguccccuuccaccucggcacccgccaggucugcaucgccugguccuccuccuccugccacgacggcaaggccuggcuccacgucugcaucaccggcgacgacaagaacgccaccgccuccuucaucuacgacggccgccucgucgacuccaucggcuccuggucccagaacauccuccgcacccaggaguccgagugcgucugcaucaacggcaccugcaccgucgucaugaccgacggcuccgccuccggccgcgccgacacccgcauccucuucaucgaggagggcaagaucguccacaucuccccccucuccggcuccgcccagcacgucgaggagugcuccugcuacccccgcuaccccggcguccgcugcaucugccgcgacaacuggaagggcuccaaccgccccgucgucgacaucaacauggaggacuacuccaucgacuccuccuacgucugcuccggccucgucggcgacaccccccgcaacgacgaccgcuccuccaacuccaacugccgcaaccccaacaacgagcgcggcaaccagggcgucaagggcugggccuucgacaacggcaacgacgucuggaugggccgcaccaucuccaaggaccuccgcuccggcuacgagaccuucaaggucaucggcggcugguccacccccaacuccaagucccagaucaaccgccaggucaucgucgacuccgacaaccgcuccggcuacuccggcaucuucuccgucgagggcaaguccugcaucaaccgcugcuucuacgucgagcucauccgcggccgcaagcaggagacccgcgucugguggaccuccaacuccaucgucgucuucugcggcaccuccggcaccuacggcaccggcuccuggcccgacggcgccaacaucaacuucaugcccaucuga

SEQ ID NO: 111832 - RNA, 1410 nt, Artificial Sequence
  derived and/or modified CDS sequence (opt2) from neuraminidase__InfluenzaA__ABO52371
augaaccccaaccagaagaucaucaccaucggcuccgucucccucaccaucgccaccgucugcuuccucaugcagaucgccauccucgucaccaccgucacccuccacuuccgccaguacgagugcgacucccccgccaacaaccaggucaugcccugcgagcccaucaucaucgagcgcaacaucaccgagaucgucuaccucaacaacaccaccaucgagaaggagaucugccccaagcucgucgaguaccgcaacugguccaagccccagugcaagaucaccggcuucgcccccuucuccaaggacaacuccauccgccucuccgccggcggcgacaucugggucacccgcgagcccuacgucuccugcgaccccggcaagugcuaccaguucgcccucggccagggcaccacccucgacaacaagcacuccaacgacaccauccacgaccgcaucccccaccgcacccuccucaugaacgagcucggcguccccuuccaccucggcacccgccaggucugcaucgccugguccuccuccuccugccacgacggcaaggccuggcuccacgucugcgucaccggcgacgacaagaacgccaccgccuccuucaucuacgacggcaagcucgucgacuccaucggcuccuggucccagaacauccuccgcacccaggaguccgagugcgucugcaucaacggcaccugcaccgucgucaugaccgacggcuccgccuccggccgcgccgacacccgcauccucuucaucgaggagggcaagaucguccacaucuccccccucuccggcuccgcccagcacgucgaggagugcuccugcuacccccgcuaccccggcguccgcugcaucugccgcgacaacuggaagggcuccaaccgccccgucgucgacaucaacgucgaggacuacuccaucgacuccuccuacgucugcuccggccucgucggcgacaccccccgcaacaacgaccgcuccggcaacuccaacugccgcaaccccaacaacgagcgcggcaaccacggcgucaagggcugggccuucgacgacggcaacgacgucuggaugggccgcaccaucaacaaggaccuccgcuccggcuacgagaccuucaaggucaucggcggcugguccacccccaacuccaagucccagaucaaccgccaggucaucgucgacuccgacaaccgcuccggcuacuccggcaucuucuccgucgagggcaaguccugcaucaaccgcugcuucuacgucgagcucauccgcggccgcgagcaggagacccgcgucugguggaccuccaacuccaucgucgucuucugcggcaccuccggcaccuacggcaccggcuccuggcccgacggcgccgacaucaaccucaugcccaucuga

SEQ ID NO: 111833 - RNA, 1413 nt, Artificial Sequence
  derived and/or modified CDS sequence (opt2) from neuraminidase__InfluenzaA__ABO52800
augaaccccaaccagaagaucaucaccaucggcuccaucugcaugaccaucggcaucaucucccucauccuccagaucggcaacaucaucuccaucugggucucccacuccauccagaccggcucccagaaccacaccggcaucugcaaccagcgcaucaucaccuacgagaacuccaccugggucaaccagaccuacgucaacaucaacaacaccaacgucgucgccggcaaggacaccaccuccgucacccucgccggcaacuccucccucugccccauccgcggcugggccaucuacuccaaggacaacuccauccgcaucggcuccaagggcgacgucuucgucauccgcgagcccuucaucuccugcucccaccucgagugccgcaccuucuuccucacccagggcgcccuccucaacgacaagcacuccaacggcaccgucaaggaccgcucccccuaccgcgcccucauguccugccccaucggcgaggcccccucccccuacaacucccgcuucgaguccgucgccugguccgccuccgccugccacgacggcaugggcuggcucaccaucggcaucuccggccccgacgacggcgccgucgccguccucaaguacaacggcaucaucaccgagaccaucaaguccuggcgcaagcgcauccuccgcacccaggaguccgagugcgucugcgucaacggcuccugcuucaccaucaugaccgacggccccuccaacggccccgccuccuaccgcaucuucaagaucgagaagggcaagaucaccaaguccaucgagcucgacgcccccaacucccacuacgaggagugcuccugcuaccccgacaccggcaccgucaugugcgucugccgcgacaacuggcacggcuccaaccgccccugggucuccuucaaccagaaccucgacuaccagaucggcuacaucugcuccggcgucuucggcgacaacccccgccccaaggacggcaagggcuccugcgaccccgucaccgucgacggcgccgacggcgucaagggcuucuccuaccgcuacggcaacggcgucuggaucggccgcaccaaguccaacuccucccgcaagggcuucgagaugaucugggaccccaacggcuggaccgacaccgacuccaacuuccucgucaagcaggacgucgucgccaugaccgacugguccggcuacuccggcuccuucguccagcaccccgagcucaccggccucgacugcaugcgccccugcuucugggucgagcucauccgcggccgcccccgcgagcgcaccaccaucuggaccuccggcuccuccaucuccuucugcggcgucaacuccgacaccgccaacugguccuggcccgacggcgccgagcuccccuucaccaucgacaaguga

SEQ ID NO: 111834 - RNA, 1413 nt, Artificial Sequence; identical to SEQ ID NO: 110864
  derived and/or modified CDS sequence (opt2) from neuraminidase__InfluenzaA__ABP49220

SEQ ID NO: 111835 - RNA, 1413 nt, Artificial Sequence
  derived and/or modified CDS sequence (opt2) from neuraminidase__InfluenzaA__ABP49319
augaaccccaaccagaagaucaucaccaucggcuccaucugcauggccaucggcaucaucucccucauccuccagaucggcaacaucaucuccaucugggucucccacuccauccagaccggcucccagaaccacaccggcaucugcaaccagcgcaucaucaccuacgagaacaacaccugggucaaccagaccuacgucaacaucuccaacaccaacgucgucgccggcaaggacaccaccuccaugauccucgccggcaacuccucccucugccccauccgcggcugggccaucuacuccaaggacaacuccauccgcaucggcuccaagggcgacgucuucgucauccgcgagcccuucaucuccugcucccaccucgagugccgcaccuucuuccucacccagggcgcccuccucaacgacaagcacuccaacggcaccgucaaggaccgcucccccuaccgcgcccucauguccugccccaucggcgaggcccccucccccuacaacucccgcuucgaguccgucgccugguccgccuccgccugccacgacggcaugggcuggcucaccaucggcaucuccggccccgacgacggcgccgucgccguccucaaguacaacggcaucaucaccgagaccaucaaguccuggcgcaagcagauccuccgcacccaggaguccgagugcgucugcgucaacggcuccugcuucaccaucaugaccgacggccccuccgacggccccgccuccuaccgcaucuucaagaucgagaagggcaagaucaccaaguccaucgagcucgacgcccccaacucccacuacgaggagugcuccugcuaccccgacaccggcaaggucaugugcgucugccgcgacaacuggcacggcuccaaccgccccugggucuccuucaaccagaaccucgacuaccagaucggcuacaucugcuccggcgucuucggcgacaacccccgccccaaggacggcaagggcuccugcgaccccgucaacgucgacggcgccgacggcgucaagggcuucuccuaccgcuacggcaacggcgucuggaucggccgcaccaaguccaacuccucccgcaagggcuucgagaugaucugggaccccaacggcuggaccgacaccgacggcaacuuccucgucaagcaggacgucgucgccaugaccgacugguccggcuacuccggcuccuucguccagcaccccgagcucaccggccucgacugcaugcgccccugcuucugggucgagcucauccgcggccgcccccgcgagaagaccaccaucuggaccuccggcuccuccaucuccuucugcggcgucaacuccgacaccgucaacugguccuggcccgacggcgccgagcuccccuucaccaucgacaaguga

SEQ ID NO: 111836 - RNA, 1410 nt, Artificial Sequence
  derived and/or modified CDS sequence (opt2) from neuraminidase__InfluenzaA__ABP49330
augaaccccaaccagaagaucaucaccaucggcuccaucugcauggucgucggcaucaucucccucauccuccagaucggcaacaucaucuccaucuggaucucccacuccauccagaccggcucccagaaccacaccggcaucugcaaccaguccaucaucaccuacaagaacuccaccugggucaaccagaccuacgucaacaucuccaacaccaacgucgucgccggcaagggcaccacccccgucauccucgccggcaacuccucccucugccccauccgcggcugggccaucuacuccaaggacaacggcauccgcaucggcuccaagggcgacgucuucgucauccgcgagcccuucaucuccugcucccaccucgagugccgcaccuucuuccucacccagggcgcccuccucaacgacaagcacuccaacggcaccgucaaggaccgcucccccuaccgcgcccucauguccugccccgucggcgaggcccccucccccuacaacucccgcuucgaguccgucgccugguccgccugcgccugccacgacggcaugggcuggcucaccaucggcaucuccggccccgacgacgaggccgucgccguccucaaguacaacggcaucaucaccgagaccaucaaguccuggcgcaagaagauccuccgcacccaggaguccgagugcgucugcgucaacggcuccugcuucaccaucaugaccgacggccccuccgacggccccgccuccuacaagaucuucaagaucgagaagggcaaggucaccaaguccaucgagcucgacgcccccaacucccacuacgaggagugcuccugcuaccccgacaccggcaaggucaugugcgucugccgcgacaacuggcacggcuccaaccgccccugggucuccuucgaccagaaccucgacuaccagaucggcuacaucugcuccggcgucuucggcgacaacccccgccccaaggacggcaagggcuccugcggccccgucuacgucgacggcgccaacggcgucaagggcuucuccuaccgcuacggcaacggcgucuggaucggccgcaucaaguccaacuccucccgccagggcuucgagaugaucugggaccccaacggcuggaccgagaccgacuccuccuucuucgucaagcaggacgucgucgccaugaccgacugguccggcuacuccggcuccuucguccagcaccccgagcucaccggccucgacugcaugcgccccugcuucugggucgagcucauccgcggccgccccaaggagaagaccaucuggaccuccggcuccuccaucuccuucugcggcgucaacuccgacaccgucgacugguccuggcccgacggcgccgagcuccccuucaccaucgacaaguga

SEQ ID NO: 111837 - RNA, 1413 nt, Artificial Sequence
  derived and/or modified CDS sequence (opt2) from neuraminidase__InfluenzaA__ABP49352
augaaccccaaccagaagaucaucaccaucggcuccaucugcaugaccaucggcaucaucucccucauccuccagaucggcaacaucaucuccaucugggucucccacuccauccagaccggcucccagaaccacaccggcaucugcaaccagcgcaucaucaccuacgagaacuccaccugggucaaccagaccuacgucaacaucaacaacaccaacgucgucgccggcaaggacaccaccuccgucgcccucgccggcaacuccucccucugccccauccgcggcugggccaucuacuccaaggacaacuccauccgcaucggcuccaagggcgacgucuucgucauccgcgagcccuucaucuccugcucccaccucgagugccgcaccuucuuccucacccagggcgcccuccucaacgacaagcacuccaacggcaccgucaaggaccgcucccccuaccgcgcccucauguccugccccaucggcgaggcccccucccccuacaacucccgcuucgaguccgucgccugguccgccuccgccugccacgacggcaugggcuggcucaccaucggcaucuccggccccgacgacggcgccgucgccguccucaaguacaacggcaucaucaccgagaccaucaaguccuggcgcaagcgcauccuccgcacccaggaguccgagugcgucugcgucaacggcuccugcuucaccaucaugaccgacggccccuccgacggccccgccuccuaccgcaucuucaagaucgagaagggcaagaucaccaaguccaucgagcucgacgcccccaacucccacuacgaggagugcuccugcuaccccgacaccggcaccgucaugugcgucugccgcgacaacuggcacggcuccaaccgccccugggucuccuucaaccagaaccucgacuaccagaucggcuacaucugcuccggcgucuucggcgacaacccccgccccaaggacggcaagggcuccugcggccccgucaccgucgacggcgccgacggcgucaagggcuucuccuacaaguacggcaacggcgucuggaucggccgcaccaaguccaacuccucccgcaagggcuucgagaugaucugggaccccaacggcuggaccgacaccgacuccaacuuccucgucaagcaggacgucgucgccaugaccgacugguccggcuacuccggcuccuucguccagcaccccgagcucaccggccucgacugcaugcgccccugcuucugggucgagcucauccgcggccgcccccgcgagcgcaccaccaucuggaccuccggcuccuccaucuccuucugcggcgucgacuccgacaccgccaacugguccuggcccgacggcgccgagcuccccuucaccaucgacaaguga

SEQ ID NO: 111838 - RNA, 1413 nt, Artificial Sequence; identical to SEQ ID NO: 111734
  derived and/or modified CDS sequence (opt2) from neuraminidase__InfluenzaA__ABP49363

SEQ ID NO: 111839 - RNA, 1410 nt, Artificial Sequence; identical to SEQ ID NO: 110766
  derived and/or modified CDS sequence (opt2) from neuraminidase__InfluenzaA__ABP49374

SEQ ID NO: 111840 - RNA, 1413 nt, Artificial Sequence
  derived and/or modified CDS sequence (opt2) from neuraminidase__InfluenzaA__ABP49385
augaaccccaaccagaagaucaucaccaucggcuccaucuccgucgccaucggcaucaucaaccucacccuccagaucggcaacaucaucuccaucugggccucccacuccauccagaccggcucccagaacuacaccggcaucugcaaccagcgcaucaucaccuacgagaaccgcaccugggucaaccagaccuacgucaacaucaacaacaccaacgucgucgccggcaaggacaagaccuccaugacccucgccggcaacuccucccucugccccauccgcggcugggccaucuacaccaaggacaacuccauccgcaucggcuccaagggcgacgucuucgucauccgcgagcccuucaucuccugcucccaccucgagugccgcaccuucuuccucacccagggcgcccuccucaacgacaagcacuccaacggcaccaucaaggaccgcucccccuuccgcgcccucauguccugcccccucggcgaggcccccucccccuacaacucccgcuucgaguccgucgccugguccgccuccgccugccacgacggccucggcuggcucaccaucggcaucuccggccccgacaacggcgccgucgccguccucaaguacaacggcaucaucaccgagaccaucaaguccuggaagaagcagauccuccgcacccaggaguccgagugcgucugcgucaacggcuccugcuucaccaucaugaccgacggccccuccaaccgcgccgccuccuaccgcaucuucaagaucgagaagggccgcgucaccaaguccaucgagcucgacgcccccaacuaccacuacgaggagugcuccugcuaccccgacaccggcaccgucaugugcgucugccgcgacaacuggcacggcuccaaccgccccugggucuccuucaaccagaaccucgacuaccagaucggcuacaucugcuccggcgucuucggcgacaacccccgccccaaggacggcgagggcuccugcaaccccgucaccgucgacggcgccgacggcgucaagggcuucuccuaccgcuacggcaacggcgucuggaucggccgcaccaaguccaaccgccuccgcaagggcuucgagaugaucugggaccccaacggcuggaccgacaccgacuccgacuucuccaugaagcaggacgucgucgccaugaccgacugguccggcuacuccggcuccuucguccagcaccccgagcucaccggccucgacugcaugcgccccugcuucugggucgagcucguccgcggccucccccgcgagaacaccaccaucuggaccuccggcuccuccaucuccuucugcggcgucaacuccgagaccgccaacugguccuggcccgacggcgccgagcuccccuucaccaucgacaaguga

SEQ ID NO: 111841 - RNA, 1413 nt, Artificial Sequence; identical to SEQ ID NO: 110422
  derived and/or modified CDS sequence (opt2) from neuraminidase__InfluenzaA__ABP49396

SEQ ID NO: 111842 - RNA, 1410 nt, Artificial Sequence
  derived and/or modified CDS sequence (opt2) from neuraminidase__InfluenzaA__ABP49407
augaaccccaaccagaagaucaucaccaucggcuccgucucccucaccaucuccaccaucugcuucuucaugcagaucgccauccucaucaccaccgucacccuccacuucaagcaguacgaguucaacuccccccccaacaaccaggucaugcucugcgagcccaccaucaucgagcgcaacaucaccgagaucgucuaccucaccaacaccaccaucgagaaggagaucugccccaagcucgccgaguaccgcaacugguccaagccccagugcgacaucaccggcuucgcccccuucuccaaggacaacuccauccgccucuccgccggcggcgacaucugggucacccgcgagcccuacgucuccugcgaccccgacaagugcuaccaguucgcccucggccagggcaccacccucaacaacguccacuccaacgacaccguccacgaccgcacccccuaccgcacccuccucauguccgagcucggcguccccuuccaccucggcaccaagcaggucugcaucgccugguccuccuccuccugccacgacggcaaggccuggcuccacgucugcgucaccggcgacgacaagaacgccaccgccuccuucaucuacaacggccgccucgucgacuccaucgucuccugguccaaggagauccuccgcacccaggaguccgagugcgucugcaucaacggcaccugcaccgucgucaugaccgacggcuccgccuccggcaaggccgacaccaagauccucuucaucgaggagggcaagaucguccacaccuccacccucuccggcuccgcccagcacgucgaggagugcuccugcuacccccgcuaccccggcguccgcugcgucugccgcgacaacuggaagggcuccaaccgccccaucgucgacaucaacaucaaggacuacuccaucgucuccuccuacgucugcuccggccucgucggcgacaccccccgcaagaacgacuccuccuccuccucccacugccucgaccccaacaacgaggagggcggccacggcgucaagggcugggccuucgacgacggcaacgacgucuggaugggccgcaccaucuccgagaagcuccgcuccggcuacgagaccuucaaggucaucgagggcugguccaaccccaacuccaagcuccagaucaaccgccaggucaucgucgaccgcggcaaccgcuccggcuacuccggcaucuucuccgucgagggcaagaucugcaucaaccgcugcuucuacgucgagcucauccgcggccgcaaggaggagaccgagguccucuggaccuccaacuccaucgucgucuucugcggcaccuccggcaccuacggcaccggcuccuggcccgacggcgccgacaucaaccucaugcccaucuga

SEQ ID NO: 111843 - RNA, 1410 nt, Artificial Sequence; identical to SEQ ID NO: 110766
  derived and/or modified CDS sequence (opt2) from neuraminidase__InfluenzaA__ABP49418

SEQ ID NO: 111844 - RNA, 1410 nt, Artificial Sequence; identical to SEQ ID NO: 110766
  derived and/or modified CDS sequence (opt2) from neuraminidase__InfluenzaA__ABP49429

SEQ ID NO: 111845 - RNA, 1410 nt, Artificial Sequence
  derived and/or modified CDS sequence (opt2) from neuraminidase__InfluenzaA__ABP49440
augaaccccaaccagaagaucaucaccaucggcuccgucucccucaccaucgccaccgucugcuuccucauccagaucgccauccucgccaccaccgucacccuccacuucaagcagcacgagugcgacucccccgccuccaaccaggucaugcccugcgagcccaucaucaucgagcgcaacaucaccgagaucgucuaccucaacaacaccaccaucgagaaggagaucugccccgaggucgucgaguaccgcaacugguccaagccccagugccagaucaccggcuucgcccccuucuccaaggacaacuccauccgccucuccgccggcggcgacaucugggucacccgcgagcccuacgucuccugcgaccccggcaagugcuaccaguucgcccucggccagggcaccacccucgacaacaagcacuccaacggcaccauccacgaccgcaucccccaccgcacccuccucaugaacgagcucggcguccccuuccaccucggcaccaagcaggucugcgucgccugguccuccuccuccugccacgacggcaaggccuggcuccacgucugcgucaccggcgacgaccgcaacgccaccgccuccuucaucuacgacggccgccucgucgacuccaucggcuccuggucccagaacauccuccgcacccaggaguccgagugcgucugcaucaacggcaccugcaccgucgucaugaccgacggcuccgccuccggccgcgccgacacccgcauccucuucaucaaggagggcaagaucguccacaucuccccccucuccggcuccgcccagcacaucgaggagugcuccugcuacccccgcuaccccgacguccgcugcaucugccgcgacaacuggaagggcuccaaccgccccgucaucgacaucaacauggaggacuacuccaucgacuccuccuacgucugcuccggccucgucggcgacaccccccgcaacgacgacuccuccuccaacuccaacugccgcgaccccaacaacgagcgcggcaaccccggcgucaagggcugggccuucgacaacggcgacgacgucuggaugggccgcaccaucuccaaggacucccgcuccggcuacgagaccuucaaggucaucggcggcugguccacccccaacuccaagucccaggccaaccgccaggucaucgucgacaagaacaacugguccggcuacuccggcaucuucuccgucgagggcaaguccugcaucaaccgcugcuucuacgucgagcucauccgcggccgcccccaggagacccgcgucugguggaccuccaacuccaucgucgucuucugcggcaccuccggcaccuacggcaccggcuccuggcccgacggcgccaacaucaacuucaugcccaucuga

SEQ ID NO: 111846 - RNA, 1413 nt, Artificial Sequence; identical to SEQ ID NO: 110987
  derived and/or modified CDS sequence (opt2) from neuraminidase__InfluenzaA__ABP49451

SEQ ID NO: 111847 - RNA, 1410 nt, Artificial Sequence
  derived and/or modified CDS sequence (opt2) from neuraminidase__InfluenzaA__ABP49462
augaaccccaaccagaagaucaucaccaucggcuccgucucccucaccaucgccaccgucugcuucaucaugcagaucgccauccucgccaccaccgucacccuccacuucaagcagcacgagugcgacucccccgccuccaaccaggucaugcccugcgagcccaucaucaucgagcgcaacaucaccgagaucgucuaccucaacaacaccaccaucgagaaggagaucugccccgaggccgucgaguaccgcaacugguccaagccccagugccagaucaccggcuucgcccccuucuccaaggacaacuccauccgccucuccgccggcggcgacaucugggucacccgcgagcccuacgucuccugcgaccccggcaagugcuaccaguucgcccucggccagggcaccacccucgacaacaagcacuccaacggcaccauccacgaccgcaucccccaccgcacccuccucaugaacgagcucggcguccccuuccaccucggcaccaagcaggucugcgucgccugguccuccuccuccugccacgacggcaaggccuggcuccacgucugcgucaccggcgacgaccgcaacgccaccgccuccuucaucuacgacggccgccucgucgacuccaucggcuccuggucccagaacauccuccgcacccaggaguccgagugcgucugcaucaacggcaccugcaccgucgucaugaccgacggcuccgccuccggccgcgccgacacccgcauccucuucaucaaggagggcaagaucguccacaucuccccccucuccggcuccgcccagcacaucgaggagugcuccugcuacccccgcuaccccgacguccgcugcaucugccgcgacaacuggaagggcuccaaccgccccgucaucgacaucaacauggaggacuacuccaucgacuccuccuacgucugcuccggccucgucggcgacaccccccgcaacgacgacuccuccuccaacuccaacugccgcgaccccaacaacgagcgcggcaaccccggcgucaagggcugggccuucgacaacggcgacgacgucuggaugggccgcaccaucaacaaggacucccgcuccggcuacgagaccuucaaggucaucggcggcugguccacccccaacuccaagucccaggucaaccgccaggucaucgucgacaacaacaacugguccggcuacuccggcaucuucuccgucgagggcaaguccugcaucaaccgcugcuucuacgucgagcucauccgcggccgcccccaggagacccgcgucugguggaccuccaacuccaucgucgucuucugcggcaccuccggcaccuacggcaccggcuccuggcccgacggcgccaacaucaacuucaugcccaucuga

SEQ ID NO: 111848 - RNA, 1410 nt, Artificial Sequence; identical to SEQ ID NO: 111796
  derived and/or modified CDS sequence (opt2) from neuraminidase__InfluenzaA__ABP49473

SEQ ID NO: 111849 - RNA, 1410 nt, Artificial Sequence
  derived and/or modified CDS sequence (opt2) from neuraminidase__InfluenzaA__ABP49495
augaaccccaaccagaagaucaucaccaucggcuccgucucccucaccaucgccaccaucugcuuccucaugcagaucgccauccucgucaccaccgucacccuccacuucaagcaguacgagugcgacucccccgccaacaaccaggucaugcccugcgagcccaucaucaucgagcgcaacaucaccgagaucgucuaccucaccaacaccaccaucgagaaggagaucugccccaagcucgucgaguaccgcaacugguccaagccccagugcaagaucaccggcuucgcccccuucuccaaggacaacuccauccgccucuccgccggcggcgacaucugggucacccgcgagcccuacgucuccugcgaccccggcaagugcuaccaguucgcccucggccagggcaccacccucgacaacaagcacuccaacgacaccauccacgaccgcaccccccaccgcacccuccucaugaacgagcucggcguccccuuccaccucggcacccgccaggucugcaucgccugguccuccuccuccugccacgacggcaaggccuggcuccacgucugcgucaccggcuacgacaagaacgccaccgccuccuucaucuacgacggccgccucgucgacuccaucggcuccuggucccagaacauccuccgcacccaggaguccgagugcgucugcaucaacggcaccugcaccgucgucaugaccgacggcuccgccuccggccgcgccgacaccaagauccucuucaucgaggagggcaagaucguccacaccuccccccucuccggcuccgcccagcacgucgaggagugcuccugcuacccccgcuaccccggcguccgcugcaucugccgcgacaacuggcgcggcuccaaccgccccgucgucgacaucaacgucaaggacuacuccaucgacuccuccuacgucugcuccggccucgucggcgacaccccccgcaacaacgaccgcuccuccuccuccuacugccgcaaccccaacaacgagaagggcacccacggcgucaagggcugggccuucgacgacggcaacgacgucuggaugggccgcaccaucuccgaggacucccgcuccggcuacgagaccuucaaggucaucggcggcugguccacccccaacuccaagcuccagaucaaccgccaggucaucgucgacuccgacaaccgcuccggcuacuccggcaucuucuccgucgagggcaaguccugcaucaaccgcugcuucuacgucgagcucauccgcggccgcgagcaggagacccgcgucugguggaccuccaacuccaucgucgucuucugcggcaccuccggcaccuacggcaccggcuccuggcccgacggcgccgacaucaaccucaugcccaucuga

SEQ ID NO: 111850 - RNA, 1410 nt, Artificial Sequence; identical to SEQ ID NO: 110139
  derived and/or modified CDS sequence (opt2) from neuraminidase__InfluenzaA__ABP49506

SEQ ID NO: 111851 - RNA, 1410 nt, Artificial Sequence; identical to SEQ ID NO: 110131
  derived and/or modified CDS sequence (opt2) from neuraminidase__InfluenzaA__ABP49517

SEQ ID NO: 111852 - RNA, 1413 nt, Artificial Sequence
  derived and/or modified CDS sequence (opt2) from neuraminidase__InfluenzaA__ABQ01314
augaaccccaaccagaagaucaucaccaucggcuccaucugcauggccaucggcaccaucucccucauccuccagaucggcaacaucaucuccaucugggucucccacuccauccagaccggcucccagaaccacaccggcaucugcaaccagcgcaucaucaccuacgagaacaacaccugggucaaccagaccuacgucaacaucuccaacaccaacgucgucgccggcaaggacaccaccuccaugauccucgccggcaacuccucccucugccccauccgcggcugggccaucuacuccaaggacaacuccauccgcaucggcuccaagggcgacgucuucgucauccgcgagcccuucaucuccugcucccaccucgagugccgcaccuucuuccucacccagggcgcccuccucaacgacaagcacuccaacggcaccgucaaggaccgcucccccuaccgcgcccucauguccugccccaucggcgaggcccccucccccuacaacucccgcuucgaguccgucgccugguccgccuccgccugccacgacggcaugggcuggcucaccaucggcaucuccggccccgacgacggcgccgucgccguccucaaguacaacggcaucaucaccgagaucaucaaguccuggcgcaagcagauccuccgcacccaggaguccgagugcgucugcgucaacggcuccugcuucaccaucaugaccgacggccccuccgacggccccgccuccuaccgcaucuucaagaucgagaagggcaagaucaccaaguccaucgagcucgacgcccccaacucccacuacgaggagugcuccugcuaccccgacaccggcaaggucaugugcgucugccgcgacaacuggcacggcuccaaccgccccugggucuccuucaaccagaaccucgacuaccagaucggcuacaucugcuccggcgucuucggcgacaacccccgccccaaggacggcaagggcuccugcgaccccgucaacgucgacggcgccgacggcgucaagggcuucuccuaccgcuacggcaacggcgucuggaucggccgcaccaaguccaacuccucccgcaagggcuucgagaugaucugggaccccaacggcuggaccgacaccgacggcaacuuccucgucaagcaggacgucgucgccaugaccgacugguccggcuacuccggcuccuucguccagcaccccgagcucaccggccucgacugcaugcgccccugcuucugggucgagcucauccgcggccgcccccgcgagaagaccaccaucuggaccuccggcuccuccaucuccuucugcggcgucaacuccgacaccgucaacugguccuggcccgacggcgccgagcuccccuucaccaucgacaaguga

SEQ ID NO: 111853 - RNA, 1413 nt, Artificial Sequence
  derived and/or modified CDS sequence (opt2) from neuraminidase__InfluenzaA__ABQ01325
augaaccccaaccagaagaucaucaccaucggcuccaucugcauggccaucggcaucaucucccucauccuccagaucggcaacaucaucuccaucugggucucccacuccauccagaccggcucccagaaccacaccggcaucugcaaccagcgcaucaucaccuacgagaacuccaccugggucaaccagaccuacgucaacaucuccaacaccaacgucgucgccggcaaggacaccaccuccaugacccucgccggcaacuccucccucugccccauccgcggcugggccaucuacuccaaggacaacuccauccgcaucggcuccaagggcgacgucuucgucauccgcgagcccuucaucuccugcucccaccucgagugccgcaccuucuuccucacccagggcgcccuccucaacgacaagcacuccaacggcaccgucaaggaccgcucccccuaccgcgcccucauguccugccccaucggcgaggcccccucccccuacaacucccgcuucgaguccgucgccugguccgccuccgccugccacgacggcaugggcuggcucaccaucggcaucuccggccccgacgacggcgccgucgccguccucaaguacaacggcaucaucaccgagaccaucaaguccuggcgcaagcagauccuccgcacccaggaguccgagugcgucugcgucaacggcuccugcuucaccaucaugaccgacggccccuccgacggccaggccuccuaccgcaucuucaagaucgagaagggcaagaucaccaaguccaucgagcucgacgcccccaacucccacuacgaggagugcuccugcuaccccgacaccggcaccgucaugugcgucugccgcgacaacuggcacggcuccaaccgccccugggucuccuucaaccagaaccucgacuaccagaucggcuacaucugcuccggcgucuucggcgacaacccccgccccaaggacggcaagggcuccugcgaccccgucaacgucgacggcgccgacggcgucaagggcuucuccuaccgcuacggcaacggcgucuggaucggccgcaccaaguccaacuccucccgcaagggcuucgagaugaucugggaccccaacggcuggaccgacaccgacuccaacuuccucgucaagcaggacgucgucgccaugaccgacugguccggcuacuccggcuccuucguccagcaccccgagcucaccggccucgacugcaugcgccccugcuucugggucgagcucauccgcggccgcccccgcgagaagaccaccaucuggaccuccggcuccuccaucuccuucugcggcgucaacuccgacaccgucaacugguccuggcccgacggcgccgagcuccccuucaccaucgacaaguga

SEQ ID NO: 111854 - RNA, 1410 nt, Artificial Sequence; identical to SEQ ID NO: 110766
  derived and/or modified CDS sequence (opt2) from neuraminidase__InfluenzaA__ABQ01336

SEQ ID NO: 111855 - RNA, 1410 nt, Artificial Sequence; identical to SEQ ID NO: 110766
  derived and/or modified CDS sequence (opt2) from neuraminidase__InfluenzaA__ABQ01347

SEQ ID NO: 111856 - RNA, 1410 nt, Artificial Sequence
  derived and/or modified CDS sequence (opt2) from neuraminidase__InfluenzaA__ABQ01358
augaaccccaaccagaagaucaucaccaucggcuccgucucccucaccaucgccaccgucugcuuccucaugcagaucgccauccucgccaccaccgucacccuccacuucaagcagcacgagugcaacucccccgccuccaaccaggucaugcccugcgagcccaucaucaucgagcgcaacaucaccgagaucgucuaccucaacaacaccaccaucgagaaggagaucugccccgaggucgucgaguaccgcaacugguccaagccccagugccagaucaccggcuucgcccccuucuccaaggacaacuccauccgccucuccgccggcggcgacaucugggucacccgcgagcccuacgucuccugcgaccccggcaagugcuaccaguucgcccucggccagggcaccacccucgacaacaagcacuccaacggcaccauccacgaccgcaucccccaccgcacccuccucaugaacgagcucggcguccccuuccaccucggcaccaagcaggucugcgucgccugguccuccuccuccugccacgacggcaaggccuggcuccacgucugcgucaccggcgacgaccgcaacgccaccgccuccuucaucuacgacggccgccucgaggacuccaucggcuccuggucccagaacauccuccgcacccaggaguccgagugcgucugcaucaacggcaccugcaccgucgucaugaccgacggcaacgccuccggccgcgccgacacccgcauccucuucaucaaggagggcaagaucguccacaucuccccccucuccggcuccgcccagcacaucgaggagugcuccugcuacccccgcuaccccgacguccgcugcaucugccgcgacaacuggaagggcuccaaccgccccguccucgacaucuccauggaggacuacuccaucgacuccuccuacgucugcuccggccucgucggcgacaccccccgcaacgacgacuccuccuccaacuccaacugccgcgaccccaacaacgagcgcggcaaccccggcgucaagggcugggccuucgacaacggcgacgacgucuggaugggccgcaccaucuccaaggaccuccgcuccggcuacgagaccuucaaggucaucggcggcugguccacccccaacuccaagucccaggucaaccgccaggucaucgucgacaacaacaacugguccggcuacuccggcaucuucuccgucgagggcaaguccugcaucaaccgcugcuucuacgucgagcucauccgcggccgcucccaggagacccgcgucugguggaccuccaacuccaucgucgucuucugcggcaccuccggcaccuacggcaccggcuccuggcccgacggcgccaacaucaacuucaugcccaucuga

SEQ ID NO: 111857 - RNA, 1410 nt, Artificial Sequence
  derived and/or modified CDS sequence (opt2) from neuraminidase__InfluenzaA__ABQ01369
augaaccccaaccagaagaucaucaccaucggcuccgucucccucaccaucgccaccaucugcuucgucaugcagaucgccauccucgucaccaccgucacccuccacuucaagcaguacgagugcgacucccccgccaacaaccaggucaugcccugcgagcccaucaucaucgagcgcaacaucaccgagaucgucuaccucaccaacaccaccaucgagaaggagaucugccccaagcucgucgaguaccgcaacugguccaagccccagugcaagaucaccggcuucgcccccuucuccaaggacaacuccauccgccucuccgccggcggcgacaucugggucacccgcgagcccuacgucuccugcgaccccggcaagugcuaccaguucgcccucggccagggcaccacccucgacaacaagcacuccaacgacaccauccacgaccgcaccccccaccgcacccuccucaugaacgagcucggcguccccuuccaccucggcacccgccaggucugcaucgccugguccuccuccuccugccacgacggcaaggccuggcuccacgucugcgucaccggcuacgacaagaacgccaccgccuccuucaucuacgacggccgccucgucgacuccaucggcuccuggucccagaacauccuccgcacccaggaguccgagugcgucugcaucaacggcaccugcaccgucgucaugaccgacggcuccgccuccggccgcgccgacaccaagauccucuucaucgaggagggcaagaucguccacaccuccccccucuccggcuccgcccagcacgucgaggagugcuccugcuacccccgcuaccccggcguccgcugcaucugccgcgacaacuggaagggcuccaaccgccccgucgucgacaucaacgucaaggacuacuccaucgacuccuccuacgucugcuccggccucgucggcgacaccccccgcaagaacgaccgcuccuccuccuccuacugccgcaaccccaacaacgagaagggcacccacggcgucaagggcugggccuucgacgacggcaacgacgucuggaugggccgcaccaucuccgaggacucccgcuccggcuacgagaccuucaaggucaucggcggcugguccacccccaacuccaagcuccagaucaaccgccaggucaucgucgacuccgacaaccgcuccggcuacuccggcaucuucuccgucgagggcaaguccugcaucaaccgcugcuucuacgucgagcucauccgcggccgcgagcaggagacccgcgucugguggaccuccaacuccaucgucgucuucugcggcaccuccggcaccuacggcaccggcuccuggcccgacggcgccgacaucaaccucaugcccaucuga

SEQ ID NO: 111858 - RNA, 1410 nt, Artificial Sequence
  derived and/or modified CDS sequence (opt2) from neuraminidase__InfluenzaA__ABQ44386
augaaccccaaccagaagaucaucaccaucggcuccgucucccucaccaucgccaccaucugcuuccucaugcagaucgccauccucgucaccaccgucacccuccacuucaagcaguacgagugcaacuccccccccaacaaccaggucaugcucugcgagcccaccaucaucgagcgcaacaucaccgagaucgucuaccucaccaacaccaccaucgagaaggagaucugccccaagcucgccgaguaccgcaacugguccaagccccagugcaacaucaccggcuucgcccccuucuccaaggacaacuccauccgccucuccgccggcggcgacaucugggucacccgcgagcccuacgucuccugcgaccccgacaagugcuaccaguucgcccucggccagggcaccacccucaacaacggccacuccaacgacaccguccacgaccgcacccccuaccgcacccuccucaugaacgagcucggcguccccuuccaccucggcaccaagcaggucugcaucgccugguccuccuccuccugccacgacggcaaggccuggcuccacgucugcgucaccggcgacgacgagaacgccaccgccuccuucaucuacaacggccgccucgucgacuccaucggcuccugguccaagaagauccuccgcacccaggaguccgagugcgucugcaucaacggcaccugcaccgucgucaugaccgacggcuccgccuccggcaaggccgacaccaagauccucuucaucgaggagggcaagaucguccacaccuccucccucuccggcuccgcccagcacgucgaggagugcuccugcuacccccgcuaccccggcguccgcugcgucugccgcgacaacuggaagggcuccaaccgccccaucgucgacaucaacgucaaggacuacuccaucgucuccuccuacgucugcuccggccucgucggcgacaccccccgcaagaacgacuccuccuccuccucccacugccucgaccccaacaacgaggagggcggccacggcgucaagggcugggccuucgacgacggcaacgacgucuggaugggccgcaccaucuccgagaagcuccgcuccggcuacgagaccuucaaggucaucgagggcugguccaagcccaacuccaagcuccagaucaaccgccaggucaucgucgaccgcggcaaccgcuccggcuacuccggcaucuucuccgucgaguccaaguccugcaucaaccgcugcuucuacgucgagcucauccgcggccgcaagcaggagaacgagguccucuggaccuccaacuccaucgucgucuucugcggcaccuccggcaccuacggcaccggcuccuggcccgacggcgccgacaucaaccucaugcccaucuga

SEQ ID NO: 111859 - RNA, 1410 nt, Artificial Sequence; identical to SEQ ID NO: 110750
  derived and/or modified CDS sequence (opt2) from neuraminidase__InfluenzaA__ABQ44408

SEQ ID NO: 111860 - RNA, 1413 nt, Artificial Sequence
  derived and/or modified CDS sequence (opt2) from neuraminidase__InfluenzaA__ABQ44419
augaaccccaaccagaagaucaucaccaucggcuccaucugcauggccaucggcaucaucucccucauccuccagaucggcaacaucgucuccaucuggaucucccacuccauccagaacggcucccagaacuacaccggcaucugcaaccagcgcaucaucaccuacgagaacuccaccugggucaaccagaccuacgucaacaucaacaacaccaacgucgucgccggccaggacaccaccuccgucgcccucgccggcaacuccucccucugccccaucuccggcugggccaucuacuccaaggacaacuccauccgcaucggcuccaagggcgacgucuucgucauccgcgagcccuucaucuccugcucccaccucgagugccgcaccuucuuccucacccagggcgcccuccucaacgacaagcacuccaacggcaccgucaaggaccgcucccccuaccgcgcccucauguccugccccaucggcgaggcccccucccccuacaacucccgcuucgaguccgucgccugguccgccuccgccugccacgacggcaugggcuggcucaccaucggcaucuccggccccgacgacggcgccgucgccguccucaaguacaacggcaucaucaccgagaccaucaaguccuggcgcaagcgcauccuccgcacccaggaguccgagugcgucugcgucaacggcuccugcuucaccaucaugaccgacggccccaacaacggccccgccuccuacaagaucuucaagaucgagaagggcaagaucaccaaguccaucgagcucgacgcccccaacucccacuacgaggagugcuccugcuaccccgacgccggcaccgucaugugcgucugccgcgacaacuggcacggcuccaaccgccccugggucuccuucaaccagaaccucgacuaccagaucggcuacaucugcuccggcgucuucggcgacaacccccgccccaaggacggcaagggcuccugcggccccgucaccgucgacggcgccgacggcgucaagggcuucuccuaccgcuacggcaacggcgucuggaucggccgcaccaaguccaacuccucccgccgcggcuucgagaugaucugggaccccaacggcuggaccgacaccgacuccaaguuccucgucaagcaggacgucgucgccaugaccgacugguccggcuacuccggcuccuucguccagcaccccgagcucaccggccucgacugcaugcgccccugcuucugggucgagcucauccgcggccgcccccgcgagaacaccaccaucuggaccuccggcuccuccaucuccuucugcggcgucaacggcgacaccgccaacugguccuggcccgacggcgccgagcuccccuucaccaucgacaaguga

SEQ ID NO: 111861 - RNA, 1410 nt, Artificial Sequence; identical to SEQ ID NO: 110382
  derived and/or modified CDS sequence (opt2) from neuraminidase__InfluenzaA__ABQ44430

SEQ ID NO: 111862 - RNA, 1410 nt, Artificial Sequence; identical to SEQ ID NO: 111812
  derived and/or modified CDS sequence (opt2) from neuraminidase__InfluenzaA__ABQ44441

SEQ ID NO: 111863 - RNA, 1410 nt, Artificial Sequence; identical to SEQ ID NO: 111796
  derived and/or modified CDS sequence (opt2) from neuraminidase__InfluenzaA__ABQ44463

SEQ ID NO: 111864 - RNA, 1413 nt, Artificial Sequence
  derived and/or modified CDS sequence (opt2) from neuraminidase__InfluenzaA__ABQ44474
augaaccccaaccagaagaucaucaccaucggcuccaucugcaugaccaucggcaccaucucccucauccuccagaucggcaacaucaucuccaucugggucucccacuccauccagaccggcucccagaaccacaccggcaucugcaaccagcgcaucaucaccuacgagaacaacaccugggucaaccagaccuacgucaacaucuccaacaccaacgucgucgccggcaaggacaccaccuccaugauccucgccggcaacuccucccucugccccauccgcggcugggccaucuacuccaaggacaacuccauccgcaucggcuccaagggcgacgucuucgucauccgcgagcccuucaucuccugcucccaccucgagugccgcaccuucuuccucacccagggcgcccuccucaacgacaagcacuccaacggcaccgucaaggaccgcucccccuaccgcgcccucauguccugccccaucggcgaggcccccucccccuacaacucccgcuucgaguccgucgccugguccgccuccgccugccacgacggcaugggcuggcucaccaucggcaucuccggccccgacgacggcgccgucgccguccucaaguacaacggcaucaucaccgagaucaucaaguccuggcgcaagcagauccuccgcacccaggaguccgagugcgucugcgucaacggcuccugcuucaccaucaugaccgacggccccuccgacggccccgccuccuaccgcaucuucaagaucgagaagggcaagaucaccaaguccaucgagcucgacgcccccaacucccacuacgaggagugcuccugcuaccccgacaccggcaaggucaugugcgucugccgcgacaacuggcacggcuccaaccgccccugggucuccuucaaccagaaccucgacuaccagaucggcuacaucugcuccggcgucuucggcgacaacccccgccccaaggacggcaagggcuccugcgaccccgucaacgucgacggcgccgacggcgucaagggcuucuccuaccgcuacggcaacggcgucuggaucggccgcaccaaguccaacuccucccgcaagggcuucgagaugaucugggaccccaacggcuggaccgacaccgacggcaacuuccucgucaagcaggacgucgucgccaugaccgacugguccggcuacuccggcuccuucguccagcaccccgagcucaccggccucgacugcaugcgccccugcuucugggucgagcucauccgcggccgcccccgcgagaagaccaccaucuggaccuccggcuccuccaucuccuucugcggcgucaacuccgacaccgucaacugguccuggcccgacggcgccgagcuccccuucaccaucgacaaguga

SEQ ID NO: 111865 - RNA, 1410 nt, Artificial Sequence; identical to SEQ ID NO: 110131
  derived and/or modified CDS sequence (opt2) from neuraminidase__InfluenzaA__ABR15800

SEQ ID NO: 111866 - RNA, 1413 nt, Artificial Sequence; identical to SEQ ID NO: 111852
  derived and/or modified CDS sequence (opt2) from neuraminidase__InfluenzaA__ABR15811

SEQ ID NO: 111867 - RNA, 1413 nt, Artificial Sequence; identical to SEQ ID NO: 110864
  derived and/or modified CDS sequence (opt2) from neuraminidase__InfluenzaA__ABR15910

SEQ ID NO: 111868 - RNA, 1410 nt, Artificial Sequence; identical to SEQ ID NO: 110190
  derived and/or modified CDS sequence (opt2) from neuraminidase__InfluenzaA__ABR15932

SEQ ID NO: 111869 - RNA, 1410 nt, Artificial Sequence
  derived and/or modified CDS sequence (opt2) from neuraminidase__InfluenzaA__ABR15943
augaaccccaaccagaagaucaucaccaucggcuccgucucccucaccaucgccaccaucugcuuccucaugcagaucgccauccucgucaccaccgucacccuccacuuccgccaguacgagugcaacuccccccccaacaaccaggucaugcucugcgagcccaccaucaucgagcgcaacaucaccgagaucgucuaccucaccaacaccaccaucgagaaggagaucugccccaagcucgccgaguaccgcaacugguccaagccccagugcaacaucaccggcuucgcccccuucuccaaggacaacuccauccgccucuccgccggcggcgacaucugggucacccgcgagcccuacgucuccugcgaccccgacaagugcuaccaguucgcccucggccagggcaccacccucaacaacggccacuccaacgacaccguccacgaccgcacccccuaccgcacccuccucaugaacgagcucggcguccccuuccaccucggcacccgccaggucugcaucgccugguccuccuccuccugccacgacggcaaggccuggcuccacgucugcgucaccggcgacgacgagaacgccaccgccuccuucaucuacaacggccgccucgucgacuccaucggcuccugguccaagaagauccuccgcacccaggaguccgagugcgucugcaucaacggcaccugcaccgucgucaugaccgacggcuccgccuccggcaaggccgacaccaagauccucuucaucgaggagggcaagaucguccacaucuccacccucuccggcuccgcccagcacgucgaggagugcuccugcuacccccgcuaccccggcguccgcugcgucugccgcgacaacuggaagggcuccaaccgccccaucgucgacaucaacgucaaggacuacuccaucgucuccuccuacgucugcuccggccucgucggcgacaccccccgcaagaacgacuccuucuccuccucccacugccucgaccccaacaacgaggagggcggccacggcgucaagggcugggccuucgacgacggcaacgacgucuggaugggccgcaccaucuccgagaagcuccgcuccggcuacgagaccuucaaggucaucgagggcugguccaagcccaacuccaagcuccagaccaaccgccaggucaucgucgagcgcggcaaccgcuccggcuacuccggcaucuucuccgucgagggcaaguccugcaucaaccgcugcuucuacgucgagcucauccgcggccgcaaggaggagaccgaggucugguggaccuccaacuccaucgucgucuucugcggcaccuccggcaccuacggcaccggcuccuggcccgacggcgccgacaucaaccucaugcccaucuga

SEQ ID NO: 111870 - RNA, 1410 nt, Artificial Sequence
  derived and/or modified CDS sequence (opt2) from neuraminidase__InfluenzaA__ABR15954
augaaccccaaccagaagaucaucaccaucggcuccgucucccucaccaucgccaccaucugcuuccucaugcagaucgccauccucgucaccaccgucacccuccacuucaagcaguacgagugcaacuccccccccaacaaccaggucaugcucugcgagcccaccaucaucgagcgcaacaucaccgagaucgucuaccucaccaacaccaccaucgagaaggagaucugccccaagcucgccgaguaccgcaacugguccaagccccagugcaacaucaccggcuucgcccccuucuccaaggacaacuccauccgccucuccgccggcggcgacaucugggucacccgcgagcccuacgucuccugcgaccccgacaagugcuaccaguucgcccucggccagggcaccacccucaacaacggccacuccaacgacaccguccacgaccgcacccccuaccgcacccuccucaugaacgagcucggcguccccuuccaccucggcacccgccaggucugcaucgccugguccuccuccuccugccacgacggcaaggccuggcuccacgucugcgucaccggcgacgacgagaacgccaccgccuccuucaucuacaacggccgccucgucgacuccaucggcuccugguccaagaagauccuccgcacccaggaguccgagugcgucugcaucaacggcaccugcaccgucgucaugaccgacggcuccgccuccggcaaggccgacaccaagauccucuucaucgaggagggcaagaucguccacaucuccacccucuccggcuccgcccagcacgucgaggagugcuccugcuacccccgcuaccccggcguccgcugcgucugccgcgacaacuggaagggcuccaaccgccccaucgucgacaucaacgucaaggacuacuccaucgucuccuccuacgucugcuccggccucgucggcgacaccccccgcaagaacaacuccuucuccuccucccacugccucgaccccaacaacgaggagggcggccacggcgucaagggcugggccuucgacgacggcaacgacgucuggaugggccgcaccaucuccgagaagcuccgcuccggcuacgagaccuucaaggucaucgagggcugguccaagcccaacuccaagcuccagaccaaccgccaggucaucgucgagcgcggcaaccgcuccggcuacuccggcaucuucuccgucgagggcaaguccugcaucaaccgcugcuucuacgucgagcucauccgcggccgcaaggaggagaccgaggucugguggaccuccaacuccaucgucgucuucugcggcaccuccggcaccuacggcaccggcuccuggcccgacggcgccgacaucaaccucaugcccaucuga

SEQ ID NO: 111871 - RNA, 1410 nt, Artificial Sequence; identical to SEQ ID NO: 110190
  derived and/or modified CDS sequence (opt2) from neuraminidase__InfluenzaA__ABR15965

SEQ ID NO: 111872 - RNA, 1410 nt, Artificial Sequence
  derived and/or modified CDS sequence (opt2) from neuraminidase__InfluenzaA__ABR22243
augaaccccaaccagaagaucaucaccaucggcuccgucucccucaccaucgccaccaucugcuuccucaugcagaucgccauccucgucaccaccgucacccuccacuucaagcaguacgagugcaacuccccccccaacaaccaggucaugcucugcgagcccaccaucaucgagcgcaacaucaccgagaucgucuaccucaccaacaccaccaucgagaaggagaucugccccaagcucgccgaguaccgcaacugguccaagccccagugcaacaucaccggcuucgcccccuucuccaaggacaacuccauccgccucuccgccggcggcgacaucugggucacccgcgagcccuacgucuccugcgaccccgacaagugcuaccaguucgcccucggccagggcaccacccucaacaacggccacuccaacgacaccguccacgaccgcacccccuaccgcacccuccucaugaacgagcucggcguccccuuccaccucggcaccaagcaggucugcaucgccugguccuccuccuccugccacgacggcaaggccuggcuccacgucugcgucaccggcgacgacgagaacgccaccgccuccuucaucuacaacggccgccucgucgacuccaucggcuccugguccaagaagauccuccgcacccaggaguccgagugcgucugcaucaacggcaccugcaccgucgucaugaccgacggcuccgccuccggcaaggccgacaccaagauccucuucaucgaggagggcaagaucguccacaccuccccccucuccggcuccgcccagcacgucgaggagugcuccugcuacccccgcuaccccggcguccgcugcgucugccgcgacaacuggaagggcuccaaccgccccaucgucgacaucaacgucaaggacuacuccaucgucuccuccuacgucugcuccggccucgucggcgacaccccccgcaagaccgacuccuccuccuccucccacugccucgaccccaacaacgaggagggcggccacggcgucaagggcugggccuucgacgacggcaacgacgucuggaugggccgcaccaucuccgagaagucccgcuccggcuacgagaccuucaaggucaucgagggcugguccaagcccaacuccaagcuccagaucaaccgccaggucaucgucgaccgcggcaaccgcuccggcuacuccggcaucuucuccgucgagggcaaguccugcaucaaccgcugcuucuacgucgagcucauccgcggccgcaagcaggagaccgagguccucuggaccuccaacuccaucgucgucuucugcggcaccuccggcaccuacggcaccggcuccuggcccgacggcgccgaccucaaccucaugcccaucuga

SEQ ID NO: 111873 - RNA, 1410 nt, Artificial Sequence; identical to SEQ ID NO: 110766
  derived and/or modified CDS sequence (opt2) from neuraminidase__InfluenzaA__ABR28518

SEQ ID NO: 111874 - RNA, 1410 nt, Artificial Sequence; identical to SEQ ID NO: 110612
  derived and/or modified CDS sequence (opt2) from neuraminidase__InfluenzaA__ABR28595

SEQ ID NO: 111875 - RNA, 1413 nt, Artificial Sequence
  derived and/or modified CDS sequence (opt2) from neuraminidase__InfluenzaA__ABR28771
augaaccccaaccagaagaucaucaccaucggcuccaucuccaucgccaucggcaucaucucccucaugcuccagaucggcaacaucaucuccaucugggccucccacuccauccagaccggcucccagaaccacaccggcaucugcaaccagcgcaucaucaccuacgagaacuccaccugggucaaccacaccuacgucaacaucaacaacaccaacgucgucgccggcaaggacaagaccuccgucacccucgccggcaacuccucccucugcuccaucuccggcugggccaucuacaccaaggacaacuccauccgcaucggcuccaagggcgacgucuucgucauccgcgagcccuucaucuccugcucccaccucgagugccgcaccuucuuccucacccagggcgcccuccucaacgacaagcacuccaacggcaccgucaaggaccgcucccccuaccgcgcccucauguccugcccccucggcgaggcccccucccccuacaacuccaaguucgaguccgucgccugguccgccuccgccugccacgacggcaugggcuggcucaccaucggcaucuccggccccgacaacggcgccgucgccguccucaaguacaacggcaucaucaccgagaccaucaaguccuggaagaagcgcauccuccgcacccaggaguccgagugcgucugcgucaacggcuccugcuucaccaucaugaccgacggccccuccaacggcgccgccuccuacaagaucuucaagaucgagaagggcaaggucaccaagucccgcgagcucaacgcccccaacuuccacuacgaggagugcuccugcuaccccgacaccggcaccgucaugugcgucugccgcgacaacuggcacggcuccaaccgccccugggucuccuucaaccagaaccucgacuaccagaucggcuacaucugcuccggcgucuucggcgacaacccccgccccaaggacggcgagggcuccugcaaccccgucaccgucgacggcgccgacggcgucaagggcuucuccuacaaguacggcaacggcgucuggaucggccgcaccaaguccaaccgccuccgcaagggcuucgagaugaucugggaccccaacggcuggaccgacaccgacuccaacuucuccgucaagcaggacgucgucgccaucaccgacugguccggcuacuccggcuccuucguccagcaccccgagcucaccggccucgacugcauccgccccugcuucugggucgagcucguccgcggccucccccgcgagaacaccaccaucuggaccuccggcuccuccaucuccuucugcggcgucaacuccgacaccgccaacugguccuggcccgacggcgccgagcuccccuucaccaucgacaaguga

SEQ ID NO: 111876 - RNA, 1413 nt, Artificial Sequence
  derived and/or modified CDS sequence (opt2) from neuraminidase__InfluenzaA__ABR28782
augaaccccaaccagaagaucaucaccaucggcuccaucuccaucgccaucggcauccucucccucaugcuccagaucggcaacaucaucuccaucugggccucccacuccauccagaccggcucccagaaccacaccggcaucugcaaccagcgcaucaucaccuacgagaacuccaccugggucaaccacaccuacgucaacaucaacaacaccaacgucgucgccggcaaggacaagaccuccgucacccucgccggcaacuccucccucugcuccaucuccggcugggccaucuacaccaaggacaacuccauccgcaucggcuccaagggcgacgucuucgucauccgcgagcccuucaucuccugcucccaccucgagugccgcaccuucuuccucacccagggcgcccuccucaacgacaagcacuccaacggcaccgucaaggaccgcucccccuaccgcgcccucauguccugcccccucggcgaggcccccucccccuacaacuccaaguucgaguccgucgccugguccgccuccgccugccacgacggcaugggcuggcucaccaucggcaucuccggccccgacaacggcgccgucgccguccucaaguacaacggcaucaucaccgagaccaucaaguccuggaagaagcgcauccuccgcacccaggaguccgagugcgucugcgucaacggcuccugcuucaccaucaugaccgacggccccuccaacggcgccgccuccuacaagaucuucaagaucgagaagggcaaggucaccaaguccaucgagcucaacgcccccaacuuccacuacgaggagugcuccugcuaccccgacaccggcaccgucaugugcgucugccgcgacaacuggcacggcuccaaccgccccugggucuccuucaaccagaaccucgacuaccagaucggcuacaucugcuccggcgucuucggcgacaacccccgccccaaggacggcgagggcuccugcaaccccgucaccgucgacggcgccgacggcgucaagggcuucuccuacaaguacggcaacggcgucuggaucggccgcaccaaguccaaccgccuccgcaagggcuucgagaugaucugggaccccaacggcuggaccgacaccgacuccaacuucuccgucaagcaggacgucgucgccaucaccgacugguccggcuacuccggcuccuucguccagcaccccgagcucaccggccucgacugcauccgccccugcuucugggucgagcucguccgcggccucccccgcgagaacaccaccaucuggaccuccggcuccuccaucuccuucugcggcgucaacuccgacaccgccaacugguccuggcccgacggcgccgagcuccccuucaccaucgacaaguga

SEQ ID NO: 111877 - RNA, 1410 nt, Artificial Sequence; identical to SEQ ID NO: 110880
  derived and/or modified CDS sequence (opt2) from neuraminidase__InfluenzaA__ABR28793

SEQ ID NO: 111878 - RNA, 1413 nt, Artificial Sequence; identical to SEQ ID NO: 110864
  derived and/or modified CDS sequence (opt2) from neuraminidase__InfluenzaA__ABR28804

SEQ ID NO: 111879 - RNA, 1410 nt, Artificial Sequence; identical to SEQ ID NO: 110766
  derived and/or modified CDS sequence (opt2) from neuraminidase__InfluenzaA__ABR28815

SEQ ID NO: 111880 - RNA, 1410 nt, Artificial Sequence; identical to SEQ ID NO: 110190
  derived and/or modified CDS sequence (opt2) from neuraminidase__InfluenzaA__ABR28826

SEQ ID NO: 111881 - RNA, 1413 nt, Artificial Sequence; identical to SEQ ID NO: 110432
  derived and/or modified CDS sequence (opt2) from neuraminidase__InfluenzaA__ABR28837

SEQ ID NO: 111882 - RNA, 1413 nt, Artificial Sequence
  derived and/or modified CDS sequence (opt2) from neuraminidase__InfluenzaA__ABR28848
augaaccccaaccagaagaucaucaccaucggcuccaucuccaucgccaucggcaucaucucccucaugcuccagaucggcaacaucaucuccaucugggccucccacuccauccagaccggcucccagaaccacaccggcgucugcaaccagcgcaucaucaccuacgagaacuccaccugggucaaccacaccuacgucaacaucaacaacaccaacgucaucgucggcaaggacaagaccuccgucacccucgccggcaacuccucccucugcuccaucuccggcugggccaucuacaccaaggacaacuccauccgcaucggcuccaagggcgacgucuucgucauccgcgagcccuucaucuccugcucccaccucgagugccgcaccuucuuccucacccagggcgcccuccucaacgacaagcacuccaacggcaccgucaaggaccgcucccccuaccgcgcccucauguccugcccccucggcgaggcccccucccccuacaacuccaaguucgaguccgucgccugguccgccuccgccugccacgacggcaugggcuggcucaccaucggcaucuccggccccgacaacggcgccgucgccguccucaaguacaacggcaucaucaccgagaccaucaaguccuggaagaagcagauccuccgcacccaggaguccgagugcgucugcgucaacggcuccugcuucaccaucaugaccgacggccccuccaacggcgccgccuccuacaagaucuucaagaucgagaagggcaagaucaccaaguccaucgagcucaacgcccccaacuuccacuacgaggagugcuccugcuaccccgacaccggcaccgucaugugcgucugccgcgacaacuggcacggcuccaaccgccccugggucuccuucaaccagaaccucgacuaccagaucggcuacaucugcuccggcgucuucggcgacaacccccgccccaaggacggcgagggcuccugcaaccccgucaccgucgacggcgccaacggcgucaagggcuucuccuacaaguacggcaacggcgucuggaucggccgcaccaaguccaaccgccuccgcaagggcuucgagauggucugggaccccaacggcuggaccgacaccgacuccgacuucuccgucaagcaggacgucgucgccaucaccgacugguccggcuacuccggcuccuucguccagcaccccgagcucaccggccucaacugcauccgccccugcuucugggucgagcucguccgcggccuccccaaggagaacaccaccaucuggaccuccggcuccuccaucuccuucugcggcgucaacuccgacaccgccaacugguccuggcccgacggcgccgagcuccccuucaccaucgacaaguga

SEQ ID NO: 111883 - RNA, 1410 nt, Artificial Sequence
  derived and/or modified CDS sequence (opt2) from neuraminidase__InfluenzaA__ABR28859
augaaccccaaccagaagaucaucaccaucggcuccgucucccucaccaucgccaccaucugcuuccucaugcagaucgccauccucgucaccaccgucacccuccacuucaagcaguacgagugcaacuccccccccaacaaccaggucaugcucugcgagcccaccaucaucgagcgcaacaucaccgagaucgucuaccucaccaacaccaccaucgagaaggagaucugccccaagcucgccgaguaccgcaacugguccaagccccagugcaacaucaccggcuucgcccccuucuccaaggacaacuccauccgccucuccgccggcggcgacaucugggucacccgcgagcccuacgucuccugcgaccccgacaagugcuaccaguucgcccucggccagggcaccacccucaacaacggccacuccaacgacaccguccacggccgcacccccuaccgcacccuccucaugaacgagcucggcguccccuuccaccucggcacccgccaggucugcaucgccugguccuccuccuccugccacgacggcaaggccuggcuccacgucugcgucaccggcgacgacgagaacgccaccgccuccuucaucuacaacggccgccucgucgacuccaucggcuccugguccaagaagauccuccgcacccaggaguccgagugcgucugcaucaacggcaccugcaccgucgucaugaccgacggcuccgccuccggcaaggccgacaccaagauccucuucaucgaggagggcaagaucguccacaucuccacccucuccggcuccgcccagcacgucgaggagugcuccugcuacccccgcuaccccggcguccgcugcgucugccgcgacaacuggaagggcuccaaccgccccaucgucgacaucaacgucaaggacuacuccaucgucuccuccuacgucugcuccggccucgucggcgacaccccccgcaagaacgacuccuucuccuccucccacugccucgaccccaacaacgaggagggcggccacggcgucaagggcugggccuucgacgacggcaacgacgucuggaugggccgcaccaucuccgagaagcuccgcuccggcuacgagaccuucaaggucaucgagggcugguccaagcccaacuccaagcuccagaucaaccgccaggucaucgucgagcgcggcaaccgcuccggcuacuccggcaucuucuccgucgagggcaaguccugcaucaaccgcugcuucuacgucgagcucauccgcggccgcaaggaggagaccgaggucugguggaccuccaacuccaucgucgucuucugcggcaccuccggcaccuacggcaccggcuccuggcccgacggcgccgacaucaaccucaugcccaucuga

SEQ ID NO: 111884 - RNA, 1410 nt, Artificial Sequence
  derived and/or modified CDS sequence (opt2) from neuraminidase__InfluenzaA__ABR28870
augaaccccaaccagaagaucaucaccaucggcuccgucucccucaccaucgccaccaucugcuuccucaugcagaucgccauccucgucaccaccgucacccuccacuucaagcaguacgagugcaacuccccccccaacaaccaggucaugcucugcgagcccaccaucaucgagcgcaacaucaccgagaccgucuaccucaccaacaccaccaucgagaaggagaucugccccaagcucgccgaguaccgcaacugguccaagccccagugcaacaucaccggcuucgcccccuucuccaaggacaacuccauccgccucuccgccggcggcgacaucugggucacccgcgagcccuacgucuccugcgaccccgacaagugcuaccaguucgcccucggccagggcaccacccucaacaacggccacuccaacgacaccguccacgaccgcacccccuaccgcacccuccucaugaacgagcucggcguccccuuccaccucggcacccgccaggucugcaucgccugguccuccuccuccugccacgacggcaaggccuggcuccacgucugcgucaccggcgacgacgagaacgccaccgccuccuucaucuacaacggccgccucgucgacuccaucggcuccugguccaagaagauccuccgcacccaggaguccgagugcgucugcaucaacggcaccugcaccgucgucaugaccgacggcuccgccuccggcaaggccgacaccaagauccucuucaucgaggagggcaagaucguccacaucuccacccucuccggcuccgcccagcacgucgaggagugcuccugcuacccccgcuaccccggcguccgcugcgucugccgcgacaacuggaagggcuccaaccgccccaucgucgacaucaacgucaaggacuacuccaucgucuccuccuacgucugcuccggccucgucggcgacaccccccgcaagaacgacuccuucuccuccucccacugccucgaccccaacaacgaggagggcggccacggcgucaagggcugggccuucgacgacggcaacgacgucuggaugggccgcaccaucuccgagaagcuccgcuccggcuacgagaccuucaaggucaucgagggcugguccaagcccaacuccaagcuccagaucaaccgccaggucaucgucgagcgcggcaaccgcuccggcuacuccggcaucuucuccgucgagggcaaguccugcaucaaccgcugcuucuacgucgagcucauccgcggccgcaaggaggagaccgaggucugguggaccuccaacuccaucgucgucuucugcggcaccuccggcaccuacggcaccggcuccuggcccgacggcgccgacaucaaccucaugcccaucuga

SEQ ID NO: 111885 - RNA, 1410 nt, Artificial Sequence
  derived and/or modified CDS sequence (opt2) from neuraminidase__InfluenzaA__ABR28881
augaaccccaaccagaagaucaucaccaucggcuccgucucccucaccaucgccaccgucugcuuccucaugcagaucgccauccucgucaccaccgucacccuccacuucaagcaguacgagugcaacuccccccccaacaaccaggucaugcucugcgagcccaccaucaucgagcgcaacaucaccgagaucgucuaccucaccaacaccaccaucgagaaggagaucugccccaagcucgccgaguaccgcaacugguccaagccccagugcaacaucaccggcuucgcccccuucuccaaggacaacuccauccgccucuccgccggcggcgacaucugggucacccgcgagcccuacgucuccugcgaccccgacaagugcuaccaguucgcccucggccagggcaccacccucaacaacggccacuccaacgacaccguccacgaccgcacccccuaccgcacccuccucaugaacgagcucggcguccccuuccaccucggcacccgccaggucugcaucgccugguccuccuccuccugccacgacggcaaggccuggcuccacgucugcgucaccggcgacgacgagaacgccaccgccuccuucaucuacaacggccgccucgucgacuccaucggcuccugguccaagaagauccuccgcacccaggaguccgagugcgucugcaucaacggcaccugcaccgucgucaugaccgacggcuccgccuccggcaaggccgacaccaagauccucuucaucgaggagggcaagaucguccacaucuccacccucuccggcuccgcccagcacgucgaggagugcuccugcuacccccgcuaccccggcguccgcugcgucugccgcgacaacuggaagggcuccaaccgccccaucgucgacaucaacgucaaggacuacuccaucgucuccuccuacgucugcuccggccucgucggcgacaccccccgcaagaacgacuccuucuccuccucccacugccucgaccccaacaacgaggagggcggccacggcgucaagggcugggccuucgacgacggcaacgacgucuggaugggccgcaccaucuccgagaagcuccgcuccggcuacgagaccuucaaggucaucgagggcugguccaagcccaacuccaagcuccagaccaaccgccaggucaucgucgagcgcggcaaccgcuccggcuacuccggcaucuucuccgucgagggcaaguccugcaucaaccgcugcuucuacgucgagcucauccgcggccgcaaggaggagaccgaggucugguggaccuccaacuccaucgucgucuucugcggcaccuccggcaccuacggcaccggcuccuggcccgacggcgccgacaucaaccucaugcccaucuga

SEQ ID NO: 111886 - RNA, 1410 nt, Artificial Sequence; identical to SEQ ID NO: 110750
  derived and/or modified CDS sequence (opt2) from neuraminidase__InfluenzaA__ABR28892

SEQ ID NO: 111887 - RNA, 1413 nt, Artificial Sequence; identical to SEQ ID NO: 110422
  derived and/or modified CDS sequence (opt2) from neuraminidase__InfluenzaA__ABR28903

SEQ ID NO: 111888 - RNA, 1410 nt, Artificial Sequence
  derived and/or modified CDS sequence (opt2) from neuraminidase__InfluenzaA__ABR28925
augaaccccaaccagaagaucaucaccaucggcuccgucucccucaccaucuccaccaucugcuucuucaugcagaucgccauccucaucaccaccgucacccuccacuucaagcaguacgaguucaacuccccccccaacaaccaggucaugcucugcgagcccaccaucaucgagcgcaacaucaccgagaucgucuaccucaccaacaccaccaucgagaaggagaucugccccaagcucgccgaguaccgcaacugguccaagccccagugcgacaucaccggcuucgcccccuucuccaaggacaacuccauccgccucuccgccggcggcgacaucugggucacccgcgagcccuacgucuccugcgaccccgacaagugcuaccaguucgcccucggccagggcaccacccucaacaacguccacuccaacgacaccguccacgaccgcacccccuaccgcacccuccucaugaacgagcucggcguccccuuccaccucggcaccaagcaggucugcaucgccugguccuccuccuccugccacgacggcaaggccuggcuccacgucugcgucaccggcgacgacaagaacgccaccgccuccuucaucuacaacggccgccucgucgacuccaucgucuccugguccaaggagguccuccgcacccaggaguccgagugcgucugcaucaacggcaccugcaccgucgucaugaccgacggcuccgccuccggcaaggccgacaccaagauccucuucaucgaggagggcaagaucguccacaccuccacccucuccggcuccgcccagcacgucgaggagugcuccugcuacccccgcuaccccggcguccgcugcgucugccgcgacaacuggaagggcuccaaccgccccaucgucgacaucaacaucaaggacuacuccaucgucuccuccuacgucugcuccggccucgucggcgacaccccccgcaagaacgacuccuccuccuccucccacugccucgaccccaacaacgaggagggcggccacggcgucaagggcugggccuucgacgacggcaacgacgucuggaugggccgcaccaucuccgagaagcuccgcuccggcuacgagaccuucaaggucaucgagggcugguccaaccccaacuccaagcuccagaucaaccgccaggucaucgucgaccgcggcaaccgcuccggcuacuccggcaucuucuccgucgagggcaaguccugcaucaaccgcugcuucuacgucgagcucauccgcggccgcaaggaggagaccgagguccucuggaccuccaacuccaucgucgucuucugcggcaccuccggcaccuacggcaccggcuccuggcccgacggcgccgacaucaaccucaugcccaucuga

SEQ ID NO: 111889 - RNA, 1410 nt, Artificial Sequence
  derived and/or modified CDS sequence (opt2) from neuraminidase__InfluenzaA__ABR88082
auggaccccaaccagaagaucaucaccaucggcuccgucucccucaccaucuccaccaucugcuucuucaugcagaccgccauccucaucaccaccgucacccuccacuucaagcaguacgaguucaacuccccccccaacaaccaggucaugcucugcgagcccaccaucaucgagcgcaacaucaccgagaucgucuaccucaccaacaccaucaucgagaaggagaucugccccaagcucgccgaguaccgcaacugguccaagccccagugcgacaucaccggcuucgcccccuucuccaaggacaacuccauccgccucuccgccggcggcgacaucugggucacccgcgagcccuacgucuccugcgaccccgacaagugcuaccaguucgcccucggccagggcaccacccucaacaacguccacuccaacgacaccguccacgaccgcacccccuaccgcacccuccucaugaacgagcucggcguccccuuccaccucggcaccaagcaggucugcaucgccugguccuccuccuccugccacgacggcaaggccuggcuccacgucugcgucaccggcgacgacaagaacgccaccgccuccuucaucuacaacggccgccucgucgacuccgucgucuccugguccaaggacauccuccgcacccaggaguccgagugcgucugcaucaacggcaccugcaccgucgucaugaccgacggcuccgccuccggcaaggccgacaccaagauccucuucaucgaggagggcaagaucguccacaccuccacccucuccggcuccgcccagcacgucgaggagugcuccugcuacccccgcuaccccggcguccgcugcgucugccgcgacaacuggaagggcuccaaccgccccaucgucgacaucaacaucaagaacuacuccaucgucuccuccuacgucugcuccggccucgucggcgacaccccccgcaagaccgacuccuccuccuccucccacugccucgaccccaacaacgaggagggcggccacggcgucaagggcugggccuucgacgacggcaacgacgucuggaugggccgcaccaucuccgagaagcuccgccucggcuacgagaccuucaaggucaucgagggcugguccaaccccaacuccaagcuccagaucaaccgccaggucaucgucgaccgcggcaaccgcuccggcuacuccggcaucuucuccgucgagggcaaguccugcaucaaccgcugcuucuacgucgagcucauccgcggccgcaaggaggagaccgagguccucuggaccuccaacuccaucgucgucuucugcggcaccuccggcaccuacggcaccggcuccuggcccgacggcgccgacaucaaccucaugcccaucuga

SEQ ID NO: 111890 - RNA, 1413 nt, Artificial Sequence
  derived and/or modified CDS sequence (opt2) from neuraminidase__InfluenzaA__ABS00324
augaaccccaaccagaagaucaucaccaucggcuccaucugcauggccaucggcaucaucucccucauccuccagaucggcaacaucgucuccaucuggaucucccacuccauccagaccggcucccagaacuacaccggcaucugcaaccagcgcaucaucaccuacgagaacuccaccugggucaaccagaccuacgucaacaucaacaacaccaacgucgucgccggccaggacaccaccuccgucgcccucgccggcaacuccucccucugccccaucuccggcugggccaucuacuccaaggacaacuccauccgcaucggcuccaagggcgacgucuucgucauccgcgagcccuucaucuccugcucccaccucgagugccgcaccuucuuccucacccagggcgcccuccucaacgacaagcacuccaacggcaccgucaaggaccgcucccccuaccgcgcccucauguccugccccaucggcgaggcccccucccccuacaacucccgcuucgaguccgucgccugguccgccuccgccugccacgacggcaugggcuggcucaccaucggcaucuccggccccgacgacggcgccgucgccguccucaaguacaacggcaucaucaccgagaccaucaaguccuggcgcaagcgcauccuccgcacccaggaguccgagugcgucugcgucaacggcuccugcuucaccaucaugaccgacggccccaacaacggccccgccuccuacaagaucuucaagaucgagaagggcaagaucaccaaguccaucgagcucgacgcccccaacucccacuacgaggagugcuccugcuaccccgacgccggcaccgucaugugcgucugccgcgacaacuggcgcggcuccaaccgccccugggucuccuucaaccagucccucgacuaccagaucggcuacaucugcuccggcgucuucggcgacaacccccgccccaaggacggcaagggcuccugcgaccccgucaccgucgacggcgccgacggcgucaagggcuucuccuaccgcuacggcaacggcgucuggaucggccgcaccaaguccaacuccucccgccgcggcuucgagaugaucugggaccccaacggcuggaccgacaccgacuccaaguuccucgucaagcaggacgucgucgccaugaccgacugguccggcuacuccggcuccuucguccagcaccccgagcucaccggccucgacugcaugcgccccugcuucugggucgagcucauccgcggccgcccccgcgagaacaccaccaucuggaccuccggcuccuccaucuccuucugcggcgucaacggcgacaccgccaacugguccuggcccgacggcuccgagcuccccuucaccaucgacaaguga

SEQ ID NO: 111891 - RNA, 1410 nt, Artificial Sequence; identical to SEQ ID NO: 110150
  derived and/or modified CDS sequence (opt2) from neuraminidase__InfluenzaA__ABS49902

SEQ ID NO: 111892 - RNA, 1410 nt, Artificial Sequence
  derived and/or modified CDS sequence (opt2) from neuraminidase__InfluenzaA__ABS49913
augaaccccaaccagaagaucaucaccaucggcuccgucucccucaccaucgccaccgucugcuuccucaugcagaucgccauccucgucaccaccgucacccuccacuuccgccaguacgagugcgacucccccaccaacaaccaggucaugcccugcgagcccaucaucaucgagcgcaacaucaccgagaucgucuaccucaacaacaccaccaucgagaaggagaucugccccaagcucgucgaguaccgcaacugguccaagccccagugcaagaucaccggcuucgcccccuucuccaaggacaacuccauccgccucuccgccggcggcgacaucugggucacccgcgagcccuacgucuccugcgaccccggcaagugcuaccaguucgcccucggccagggcaccacccucgacaacaagcacuccaacgacaccauccacgaccgcaucccccaccgcacccuccucaugaacgagcucggcguccccuuccaccucggcacccgccaggucugcaucgccugguccuccuccuccugccacgacggcaaggccuggcuccacgucugcgucaccggcgacgacaagaacgccaccgccuccuucaucuacgacggccgccucgucgacuccaucggcuccuggucccagaacauccuccgcacccaggaguccgagugcgucugcaucaacggcaccugcaccgucgucaugaccgacggcuccgccuccggccgcgccgacacccgcauccucuucaucgaggagggcaagaucguccacaucuccccccucuccggcuccgcccagcacgucgaggagugcuccugcuacccccgcuaccccggcguccgcugcaucugccgcgacaacuggaagggcuccaaccgccccgucgucgacaucaacgucgaggacuacuccaucgacuccuccuacgucugcuccggccucgucggcgacaccccccgcaacaacgaccgcuccuccaacuccaacugccgcaaccccaacaacgagcgcggcaaccacggcgucaagggcugggccuucgacgacggcaacgacgucuggaugggccgcaccaucuccaaggaccuccgcuccggcuacgagaccuucaaggucaucggcggcugguccacccccaacuccaagucccagaucaaccgccaggucaucgucgacuccgacaaccgcuccggcuacuccggcaucuucuccgucgagggcaaguccugcaucaaccgcugcuucuacgucgagcucauccgcggccgcgagcaggagacccgcgucugguggaccuccaacuccaucgucgucuucugcggcaccuccggcaccuacggcaccggcuccuggcccgacggcgccgacaucaaccucaugcccaucuga

SEQ ID NO: 111893 - RNA, 1410 nt, Artificial Sequence; identical to SEQ ID NO: 110880
  derived and/or modified CDS sequence (opt2) from neuraminidase__InfluenzaA__ABS49968

SEQ ID NO: 111894 - RNA, 1413 nt, Artificial Sequence; identical to SEQ ID NO: 111876
  derived and/or modified CDS sequence (opt2) from neuraminidase__InfluenzaA__ABS49979

SEQ ID NO: 111895 - RNA, 1413 nt, Artificial Sequence
  derived and/or modified CDS sequence (opt2) from neuraminidase__InfluenzaA__ABS49990
augaaccccaaccagaagaucaucaccaucggcuccaucuccaucgccaucggcaucaucucccucaugcuccagaucggcaacaucaucuccaucugggccucccacuccauccagaccggcucccagaaccacaccggcaucugcaaccagcgcaucaucaccuacgagaacuccaccugggucaaccacaccuacgucaacaucaacaacaccaacgucgucgccggcaaggacaagaccuccgucauccucgccggcaacuccucccucugcuccaucuccggcugggccaucuacaccaaggacaacuccauccgcaucggcuccaagggcgacgucuucgucauccgcgagcccuucaucuccugcucccaccucgagugccgcaccuucuuccucacccagggcgcccuccucaacgacaagcacuccaacggcaccgucaaggaccgcucccccuaccgcgcccucauguccugcccccucggcgaggcccccucccccuacaacuccaaguucgaguccgucgccugguccgccuccgccugccacgacggcaugggcuggcucaccaucggcaucuccggccccgacaacggcgccgucgccguccucaaguacaacggcaucaucaccgagaccaucaaguccuggaagaagcgcauccuccgcacccaggaguccgagugcgucugcgucaacggcuccugcuucaccaucaugaccgacggccccuccaacggcgccgccuccuacaagaucuucaagaucgagaagggcaaggucaccaaguccaucgagcucaacgcccccaacuuccacuacgaggagugcuccugcuaccccgacaccggcaccgucaugugcgucugccgcgacaacuggcacggcuccaaccgccccugggucuccuucaaccagaaccucgacuaccagaucggcuacaucugcuccggcgucuucggcgacaacccccgccccaaggacggcgagggcuccugcaaccccgucaccgucgacggcgccgacggcgucaagggcuucuccuacaaguacggcaacggcgucuggaucggccgcaccaaguccaaccgccuccgcaagggcuucgagaugaucugggaccccaacggcuggaccgacaccgacuccaacuucuccgucaagcaggacgucgucgccaucaccgacugguccggcuacuccggcuccuucguccagcaccccgagcucaccggccucgacugcauccgccccugcuucugggucgagcucguccgcggccucccccgcgagaacaccaccaucuggaccuccggcuccuccaucuccuucugcggcgucaacuccgacaccgccaacugguccuggcccgacggcgccgagcuccccuucaccaucgacaaguga

SEQ ID NO: 111896 - RNA, 1410 nt, Artificial Sequence; identical to SEQ ID NO: 110766
  derived and/or modified CDS sequence (opt2) from neuraminidase__InfluenzaA__ABS50001

SEQ ID NO: 111897 - RNA, 1410 nt, Artificial Sequence; identical to SEQ ID NO: 110766
  derived and/or modified CDS sequence (opt2) from neuraminidase__InfluenzaA__ABS50012

SEQ ID NO: 111898 - RNA, 1410 nt, Artificial Sequence
  derived and/or modified CDS sequence (opt2) from neuraminidase__InfluenzaA__ABS50023
augaaccccaaccagaagaucaucaccaucggcuccgucucccucaccaucgccaccaucugcuuccucaugcagaucgccguccucgucaccaccgucacccuccacuucaagcaguacgagugcaaccccccccccaacaaccaggucaugcucugcgagcccaccaucaucgagcgcaacaucaccgagaucgucuaccucaccaacaccaccaucgagaaggagaucugccccaagcucgccgaguaccgcaacugguccaagccccagugcaacaucaccggcuucgcccccuucuccaaggacaacuccauccgccucuccgccggcggcgacaucugggucacccgcgagcccuacgucuccugcgaccccgacaagugcuaccaguucgcccucggccagggcaccacccucaacaacggccacuccaacgacaucguccacgaccgcacccccuaccgcacccuccucaugaacgagcucggcguccccuuccaccucggcaccaagcaggucugcaucgccugguccuccuccuccugccacgacggcaaggccuggcuccacgucugcgucaccggcgacgacgagaacgccaccgccuccuucaucuacaacggccgccucgucgacuccaucggcuccugguccaagaagauccuccgcacccaggaguccgagugcgucugcaucaacggcaccugcaccgucgucaugaccgacggcuccgccuccggcaaggccgacaccaagauccucuucaucgaggagggcaagaucguccacaccucccuccucuccggcuccgcccagcacgucgaggagugcuccugcuacccccgcuaccccggcguccgcugcgucugccgcgacaacuggaagggcuccaaccgccccaucgucgacaucaacgucaaggacuacuccaucgucuccuccuacgucugcuccggccucgucggcgacaccccccgcaagaacgacuccuccuccuccucccacugccucgaccccaacaacgaggagggcggccacggcgucaagggcugggccuucgacgacggcaacgacgucuggaugggccgcaccaucuccgagaagcuccgcuccggcuacgagaccuucaaggucaucgagggcugguccaagcccaacuccaagcuccagaucaaccgccaggucaucgucgaccgcggcaaccgcuccggcuacuccggcaucuucuccgucgagggcaaguccugcaucaaccgcugcuucuacgucgagcucauccgcggccgcaagcaggagaccgagguccucuggaccuccaacuccaucgucgucuucugcggcaccuccggcaccuacggcaccggcuccuggcccgacggcgccgacaucaaccucaugcccaucuga

SEQ ID NO: 111899 - RNA, 1410 nt, Artificial Sequence; identical to SEQ ID NO: 110766
  derived and/or modified CDS sequence (opt2) from neuraminidase__InfluenzaA__ABS50034

SEQ ID NO: 111900 - RNA, 1410 nt, Artificial Sequence
  derived and/or modified CDS sequence (opt2) from neuraminidase__InfluenzaA__ABS50045
augaaccccaaccagaagaucaucaccaucggcuccgucucccucaccaucgccaccaucugcuuccucaugcagaccgccauccucgucaccaccgucacccuccacuucaagcaguacgagugcaacuccccccccaacaaccaggucaugcucugcgagcccaccaucaucgagcgcaacaucaccgagaucgucuaccucaccaacaccaccaucgagaaggagaucugccccaagcucgccgaguaccgcaacugguccaagccccagugcaacaucaccggcuucgcccccuucuccaaggacaacuccauccgccucuccgccggcggcgacaucugggucacccgcgagcccuacgucuccugcgaccccgacaagugcuaccaguucgcccucggccagggcaccacccucaacaacggccacuccaacgacaccauccacgaccgcacccccuaccgcacccuccucaugaacgagcucggcguccccuuccaccucggcacccgccaggucugcaucgccugguccuccuccuccugccacgacggcaaggccuggcuccacgucugcgucaccggcgacgacgagaacgccaccgccuccuucaucuacaacggccgccucgucgacuccaucggcuccugguccaagaagauccuccgcacccaggaguccgagugcgucugcaucaacggcaccugcaccgucgucaugaccgacggcuccgccuccggcaaggccgacaccaagauccucuucaucgaggagggcaagaucguccacaucuccacccucuccggcuccgcccagcacgucgaggagugcuccugcuacccccgcuaccccggcguccgcugcgucugccgcgacaacuggaagggcuccaaccgccccaucgucgacaucaacgucaaggacuacuccaucgucuccuccuacgucugcuccggccucgucggcgacaccccccgcaagaacgacuccuucuccuccucccacugccucgaccccaacaacgaggagggcggccacggcgucaagggcugggccuucgacgacggcaacgacgucuggaugggccgcaccaucuccgagaagcuccgcuccggcuacgagaccuucaaggucaucgagggcugguccaagcccaacuccaagcuccagaucaaccgccaggucaucgucgagcgcggcaaccgcuccggcuacuccggcaucuucuccgucgagggcaaguccugcaucaaccgcugcuucuacgucgagcucauccgcggccgcaaggaggagaccgaggucugguggaccuccaacuccaucgucgucuucugcggcaccuccggcaccuacggcaccggcuccuggcccgacggcgccgacaucaaccucaugcccaucuga

SEQ ID NO: 111901 - RNA, 1410 nt, Artificial Sequence; identical to SEQ ID NO: 110190
  derived and/or modified CDS sequence (opt2) from neuraminidase__InfluenzaA__ABS50056

SEQ ID NO: 111902 - RNA, 1410 nt, Artificial Sequence; identical to SEQ ID NO: 110216
  derived and/or modified CDS sequence (opt2) from neuraminidase__InfluenzaA__ABS50067

SEQ ID NO: 111903 - RNA, 1410 nt, Artificial Sequence; identical to SEQ ID NO: 110750
  derived and/or modified CDS sequence (opt2) from neuraminidase__InfluenzaA__ABS50078

SEQ ID NO: 111904 - RNA, 1413 nt, Artificial Sequence
  derived and/or modified CDS sequence (opt2) from neuraminidase__InfluenzaA__ABS71644
augaagcccaaccagaagaucaucaccaucggcuccaucuccaucgccaucggcaucaucucccucauccuccagaucggcaacaucaucuccaucugggccucccacuccauccagaccgagucccagaaccacaccggcaucugcaaccagcgcaucaucaccuacgagaacuccaccugggucaacaacaccuacgucaacaucaacaacaccaacgucgucgccgagaaggacaagaccuccgucacccucgccggcaacuccucccucugcuccaucuccggcugggccaucuacaccaaggacaacuccauccgcaucggcuccaagggcgacgucuucgucauccgcgagcccuucaucuccugcucccaccucgagugccgcaccuucuuccucacccagggcgcccuccucaacgacaagcacuccaacggcaccgucaaggaccgcucccccuaccgcgcccucauguccugcccccucggcgaggcccccucccccuacaacucccgcuucgaguccgucgccugguccgccuccgccugccacgacggcaugggcuggcucaccaucggcaucuccggccccgacaacggcgccgucgccguccucaaguacaacggcaucaucaccgagaccaucaaguccuggaagaagcgcauccuccgcacccaggaguccgagugcgucugcaugaacggcuccugcuucaccaucaugaccgacggccccuccaacggcgccgccuccuacaagaucuucaagaucgagaagggcaaggucaccaagaccauggagcucaacgcccccaacuuccacuacgaggagugcuccugcuaccccgacaccggcaccgucaugugcgucugccgcgacaacuggcacggcuccaaccgccccugggucuccuucaaccagaaccucgacuaccagaucggcuacaucugcuccggcgucuucggcgacaacccccgccccaaggacggcgagggcuccugcaaccccgucaccgucgacggcgccgacggcgucaagggcuucuccuacaaguacggcaacggcgucuggaugggccgcaccaaguccaaccgccuccgcaagggcuucgagaugaucugggaccccaacggcuggaccaacaccgacuccgacuucuccgucaagcaggacgucgucgccaucaccgacugguccggcuacuccggcuccuucguccagcaccccgagcucaccggccucgacugcauccgccccugcuucugggucgagcucguccgcggccucccccgcgagaacaccaccaucuggaccuccggcuccuccaucuccuucugcggcgucaacuccggcaccgccaacugguccuggcccgacggcgccgagcuccccuucaccaucgacaaguga

SEQ ID NO: 111905 - RNA, 1413 nt, Artificial Sequence
  derived and/or modified CDS sequence (opt2) from neuraminidase__InfluenzaA__ABS71646
augaaccccaaccagaagaucaucaccaucggcuccaucuccaucgccaucggcaucaucucccucauccuccagaucggcaacaucaucuccaucugggccucccacuccauccagaccgagucccagaaccacaccggcaucugcaaccagcgcaucaucaccuacgagaacuccaccugggucaacaacaccuacgucaacaucaacaacaccaacgucgucgccgagaaggacaagaccuccgucacccucgccggcaacuccucccucugcuccaucuccggcugggccaucuacaccaaggacaacuccauccgcaucggcuccaagggcgacgucuucgucauccgcgagcccuucaucuccugcucccaccucgagugccgcaccuucuuccucacccagggcgcccuccucaacgacaagcacuccaacggcaccgucaaggaccgcucccccuaccgcgcccucauguccugcccccucggcgaggcccccucccccuacaacucccgcuucgaguccgucgccugguccgccuccgccugccacgacggcaugggcuggcucaccaucggcaucuccggccccgacaacggcgccgucgccguccucaaguacaacggcaucaucaccgagaccaucaaguccuggaagaagcgcauccuccgcacccaggaguccgagugcgucugcaugaacggcuccugcuucaccaucaugaccgacggccccuccaacggcgccgccuccuacaagaucuucaagaucgagaagggcaaggucaccaagaccauggagcucaacgcccccaacuuccacuacgaggagugcuccugcuaccccgacaccggcaccgucaugugcgucugccgcgacaacuggcacggcuccaaccgccccugggucuccuucaaccagaaccucgacuaccagaucggcuacaucugcuccggcgucuucggcgacaacccccgccccaaggacggcgagggcuccugcaaccccgucaccgucgacggcgccgacggcgucaagggcuucuccuacaaguacggcaacggcgucuggaugggccgcaccaaguccaaccgccuccgcaagggcuucgagaugaucugggaccccaacggcuggaccaacaccgacuccgacuucuccgucaagcaggacgucgucgccaucaccgacugguccggcuacuccggcuccuucguccagcaccccgagcucaccggccucgacugcauccgccccugcuucugggucgagcucguccgcggccucccccgcgagaacaccaccaucuggaccuccggcuccuccaucuccuucugcggcgucaacuccggcaccgccaacugguccuggcccgacggcgccgagcuccccuucaccaucgacaaguga

SEQ ID NO: 111906 - RNA, 1413 nt, Artificial Sequence
  derived and/or modified CDS sequence (opt2) from neuraminidase__InfluenzaA__ABS71647
augaaccccaaccagaagaucaucaccaucggcuccaucuccaucgccaucggcaucaucucccucauccuccagaucggcaacaucaucuccaucugggccucccacuccauccagaccgagucccagaaccacaccggcaucugcaaccagcgcaucaucaccuacgagaacuccaccugggucaacaacaccuacgucaacaucaacaacaccaacgucgucgccgagaaggacaagaccuccgucacccucgccggcaacuccucccucugcuccaucuccggcugggccaucuacaccaaggacaacuccauccgcaucggcuccaagggcgacgucuucgucauccgcgagcccuucaucuccugcucccaccucgagugccgcaccuucuuccucacccagggcgcccuccucaacgacaagcacuccaacggcaccgucaaggaccgcucccccuaccgcgcccucauguccugcccccucggcgaggcccccucccccuacaacucccgcuucgaguccgucgccugguccgccuccgccugccacgacggcaugggcuggcucaccaucggcaucuccggccccgacaacggcgccgucgccguccucaaguacaacggcaucaucaccgagaccaucaaguccuggcgcaagcgcauccuccgcacccaggaguccgagugcgucugcaugaacggcuccugcuucaccaucaugaccgacggccccuccaacggcgccgccuccuacaagaucuucaagaucgagaagggcaaggucaccaagaccauggagcucaacgcccccaacuuccacuacgaggagugcuccugcuaccccgacaccggcaccgucaugugcgucugccgcgacaacuggcacggcuccaaccgccccugggucuccuucaaccagaaccucgacuaccagaucggcuacaucugcuccggcgucuucggcgacaacccccgccccaaggacggcgagggcuccugcaaccccgucaccgucgacggcgccgacggcgucaagggcuucuccuacaaguacggcaacggcgucuggaugggccgcaccaaguccaaccgccuccgcaagggcuucgagaugaucugggaccccaacggcuggaccaacaccgacuccgacuucuccgucaagcaggacgucgucgccaucaccgacugguccggcuacuccggcuccuucguccagcaccccgagcucaccggccucgacugcauccgccccugcuucugggucgagcucguccgcggccucccccgcgagaacaccaccaucuggaccuccggcuccuccaucuccuucugcggcgucaacuccggcgccgccaacugguccuggcccgacggcgccgagcuccccuucaccaucgacaaguga

SEQ ID NO: 111907 - RNA, 1413 nt, Artificial Sequence
  derived and/or modified CDS sequence (opt2) from neuraminidase__InfluenzaA__ABS71648
augaaccccaaccagaagaucaucaccaucggcuccaucuccaucgccaucggcaucaucucccucauccuccagaucggcaacaucaucuccaucugggccucccacuccauccagaccggcaaccagaaccacaccggcaucugcaaccagcgcaucaucaccuacgagaacuccaccugggucaacaacaccuacgucaacaucaacaacaccaacgucgucgccgagaaggacaagaccuccgucacccucgccggcaacuccucccucugcuccaucuccggcugggccaucuacaccaaggacaacuccauccgcaucggcuccaagggcgacgucuucgucauccgcgagcccuucaucuccugcucccaccucgagugccgcaccuucuuccucacccagggcgcccuccucaacgacaagcacuccaacggcaccgucaaggaccgcucccccuaccgcgcccucauguccugcccccucggcgaggcccccucccccuacaacucccgcuucgaguccgucgccugguccgccuccgccugccacgacggcaugggcuggcucaccaucggcaucuccggccccgacaacggcgccgucgccguccucaaguacaacggcaucaucaccgagaccaucaaguccuggaagaagcgcauccuccgcacccaggaguccgagugcgucugcaugaacggcuccugcuucaccaucaugaccgacggccccuccaacggcgccgccuccuacaagaucuucaagaucgagaagggcaaggucaccaagaccaucgagcucaacgcccccaacuuccacuacgaggagugcuccugcuaccccgacaccggcaccgucaugugcgucugccgcgacaacuggcacggcuccaaccgccccugggucuccuucaaccagaaccucgacuaccagaucggcuacaucugcuccggcgucuucggcgacaacccccgccccaaggacggcgagggcuccugcaaccccgucaccgucgacggcgccgacggcgucaagggcuucuccuacaaguacggcaacggcgucuggaucggccgcaccaaguccaaccgccuccgcaagggcuucgagaugaucugggaccccaacggcuggaccaacaccgacuccgacuucuccgucaagcaggacgucgucgccaucaccgacugguccggcuacuccggcuccuucguccagcaccccgagcucaccggccucgacugcauccgccccugcuucugggucgagcucguccgcggccuccccaaggagaacaccaccaucuggaccuccggcuccuccaucuccuucugcggcgucaacuccggcaccgccaacugguccuggcccgacggcgccgagcuccccuucaccaucgacaaguga

SEQ ID NO: 111908 - RNA, 1413 nt, Artificial Sequence
  derived and/or modified CDS sequence (opt2) from neuraminidase__InfluenzaA__ABS71649
augaaccccaaccagaagaucaucaccaucggcuccaucuccaucgccaucggcaucaucucccucaugcuccagaucggcaacaucaucuccaucugggccucccacuccauccagaccggcucccagaaccacaccggcaucugcaaccagcgcaucaucaccuacgagaacuccaccugggucaaccacaccuacgucaacaucaacaacaccaacgucgucgccgagaaggacaagaccuccgucacccucgccggcaacuccucccucugcuccaucuccggcugggccaucuacaccaaggacaacuccauccgcaucggcuccaagggcgacgucuucgucauccgcgagcccuucaucuccugcucccaccucgagugccgcaccuucuuccucacccagggcgcccuccucaacgacaagcacuccaacggcaccgucaaggaccgcucccccuaccgcgcccucauguccugcccccucggcgaggcccccucccccuacaacuccaaguucgaguccgucgccugguccgccuccgccugccacgacggcaugggcuggcucaccaucggcaucuccggccccgacaacggcgccgucgccguccucaaguacaacggcaucaucaccggcaccaucaaguccuggaagaagcagauccuccgcacccaggaguccgagugcgucugcaugaacggcuccugcuucaccaucaugaccgacggccccuccaaccgcgccgccuccuacaagaucuucaagaucgagaagggcaaggucaccaaguccaucgagcucaacgcccccaacuuccacuacgaggagugcuccugcuaccccgacaccggcaucgucaugugcgucugccgcgacaacuggcacggcuccaaccgccccugggucuccuucaaccagaaccucgacuaccagaucggcuacaucugcuccggcgucuucggcgacaacccccgccccaaggacggcgagggcuccugcaaccccgucaccgucgacggcgccgacggcgucaagggcuucuccuacaaguacgacaacggcgucuggaucggccgcaccaaguccaaccgccuccgcaagggcuucgagaugaucugggaccccaacggcuggaccaacaccgacuccgacuucuccgucaagcaggacgucgucgccaucaccgacugguccggcuacuccggcuccuucguccagcaccccgagcucaccggccucgacugcauccgccccugcuucugggucgagcucguccgcggccucccccgcgagaacaccaccaucuggaccuccggcuccuccaucuccuucugcggcgucaacuccgacaccgccaacugguccuggcccgacggcgccgagcuccccuucaccaucgacaaguga

SEQ ID NO: 111909 - RNA, 1413 nt, Artificial Sequence
  derived and/or modified CDS sequence (opt2) from neuraminidase__InfluenzaA__ABS71651
augaaccccaaccagaagaucaucaccaucggcuccaucuccaucgccaucggcaucaucucccucaugcuccagaucggcaacaucaucuccaucugggccucccacuccauccagaccggcucccagaaccacaccggcaucugcaaccagcgcaucaucaccuacgagaacaacaccugggucaaccacaccuacgucaacaucaacaacaccaacgucgucgccggcaaggacaagaccuccgucacccucgccggcaacuccucccucugcuccgucuccggcugggccaucuacaccaaggacaacuccauccgcaucggcuccaagggcgacgucuucgucauccgcgagcccuucaucuccugcucccaccucgagugccgcaccuucuuccucacccagggcgcccuccucaacgacaagcacuccaacggcaccgucaaggaccgcucccccuaccgcgcccucauguccugcccccucggcgaggcccccucccccuacaacuccaaguucgaguccgucgccugguccgccuccgccugccacgacggcaugggcuggcucaccaucggcaucuccggccccgacaacggcgccgucgccguccucaaguacaacggcaucaucaccggcaccaucaaguccuggaagaagcgcauccuccgcacccaggaguccgagugcgucugcaugaacggcuccugcuucaccaucaugaccgacggccccuccaacggcgccgccuccuacaagaucuucaagaucgagaagggcaaggucaccaaguccaucgagcucaacgcccccuccuuccacuacgaggagugcuccugcuaccccgacaccggcaccgucaugugcgucugccgcgacaacuggcacggcuccaaccgccccugggucuccuucaaccagaaccucgacuaccagaucggcuacaucugcuccggcgucuucggcgacaacccccgccccaaggacggcgagggcuccugcaaccccgucaccgucgacggcgccgacggcgucaagggcuucuccuacaaguacggcaacggcgucuggcucggccgcaccaaguccaaccgccuccgcaagggcuucgagaugaucugggaccccaacggcuggaccaacaccgacuccgacuucuccgucaagcaggacgucgucgccaucaccgacugguccggcuacuccggcuccuucguccagcaccccgagcucaccggccucgacugcauccgccccugcuucugggucgagcucguccgcggccucccccgcgagaacaccaccaucuggaccuccggcuccuccaucuccuucugcggcgucaacuccaacaccgccaacugguccuggcccgacggcgccgagcuccccuucaccaucgacaaguga

SEQ ID NO: 111910 - RNA, 1413 nt, Artificial Sequence
  derived and/or modified CDS sequence (opt2) from neuraminidase__InfluenzaA__ABS71652
augaaccccaaccagaagaucaucaccaucggcuccaucuccaucgccaucggcaucaucucccucaugcuccagaucggcaacaucaucuccaucugggccucccacuccauccagaccggcucccagaaccacaccggcaucugcaaccagcgcaucaucaccuacgagaacaacaccugggucaaccacaccuacgucaacaucaacaacaccaacgucgucgccggcaaggacaagaccuccgucacccucgccggcaacuccucccucugcuccgucuccggcugggccaucuacaccaaggacaacuccauccgcaucggcuccaagggcgacgucuucgucauccgcgagcccuucaucuccugcucccaccucgagugccgcaccuucuuccucacccagggcgcccuccucaacgacaagcacuccaacggcaccgucaaggaccgcucccccuaccgcgcccucauguccugcccccucggcgaggcccccucccccuacaacuccaaguucgaguccgucgccugguccgccuccgccugccacgacggcaugggcuggcucaccaucggcaucuccggccccgacaacggcgccgucgccguccucaaguacaacggcaucaucaccgagaccaucaaguccuggaagaagcgcauccuccgcacccaggaguccgagugcgucugcaugaacggcuccugcuucaccaucaugaccgacggccccuccaacggcgccgccuccuacaagaucuucaagaucgagaagggcaaggucaccaaguccaucgagcucaacgcccccuccuuccacuacgaggagugcuccugcuaccccgacaccggcaccgucaugugcgucugccgcgacaacuggcacggcuccaaccgccccugggucuccuucaaccagaaccucgacuaccagaucggcuacaucugcuccggcgucuucggcgacaacccccgccccaaggacggcgagggcuccugcaaccccgucaccgucgacggcgccgacggcgucaagggcuucuccuacaaguacggcaacggcgucuggaucggccgcaccaaguccaaccgccuccgcaagggcuucgagaugaucugggaccccaacggcuggaccaacaccgacuccgacuucuccgucaagcaggacgucgucgccaucaccgacugguccggcuacuccggcuccuucguccagcaccccgagcucaccggccucgacugcauccgccccugcuucugggucgagcucguccgcggccucccccgcgagaacaccaccaucuggaccuccggcuccuccaucuccuucugcggcgucaacuccaacaccgccaacugguccuggcccgacggcgccgagcuccccuucaccaucgacaaguga

SEQ ID NO: 111911 - RNA, 1413 nt, Artificial Sequence
  derived and/or modified CDS sequence (opt2) from neuraminidase__InfluenzaA__ABS71653
augaaccccaaccagaagaucaucaccaucggcuccaucuccaucgccaucggcaucaucucccucaugcuccagaucggcaacaucaucuccaucugggccucccacuccauccagaccggcucccagaaccacaccggcaucugcaaccagcgcaucaucaccuacgagaacuccaccugggucaaccacaccuacgucaacaucaacaacaccaacgucgucgccggcaaggacaagaccuccgucacccucgccggcaacuccucccucugcuccaucuccggcugggccaucuacaccaaggacaacuccauccgcaucggcuccaagggcgacgucuucgucauccgcgagcccuucaucuccugcucccaccucgagugccgcaccuucuuccucacccagggcgcccuccucaacgacaagcacuccaacggcaccgucaaggaccgcucccccuaccgcgcccucaugaucugcccccucggcgaggcccccucccccuacaacuccaaguucgaguccgucgccugguccgccuccgccugccacgacggcaugggcuggcucaccaucggcaucuccggccccgacaacggcgccgucgccguccucaaguacaacggcaucaucaccgagaccaucaaguccuggaagaagcgcauccuccgcacccaggaguccgagugcgucugcgucaacggcuccugcuucaccaucaugaccgacggccccuccaacggcgccgccuccuacaagaucuucaagaucgagaagggcaaggucaccaagucccgcgagcucaacgcccccaacuuccacuacgaggagugcuccugcuaccccgacaucggcaccgucaugugcgucugccgcgacaacuggcacggcuccaaccgccccugggucuccuucaaccagaaccucgacuaccagaucggcuacaucugcuccggcgucuucggcgacaacccccgccccaaggacggcaagggcuccugcaaccccgucaccgccgacggcgccgacggcgucaagggcuucuccuacaaguacggcaacggcgucuggaucggccgcaccaaguccaaccgccuccgcaagggcuucgagaugaucugggaccccaacggcuggaccgacaccgacuccgacuucuccgucaagcaggacgucgucgccaucaccgacugguccggcuacuccggcuccuucguccagcaccccgagcucaccggccucgacugcauccgccccugcuucugggucgagcucguccgcggccucccccgcgagaacaccaccaucuggaccuccggcuccuccaucuccuucugcggcgucgacuccgacaccgccaacugguccuggcccgacggcgccgagcuccccuucaccaucgacaaguga

SEQ ID NO: 111912 - RNA, 1410 nt, Artificial Sequence
  derived and/or modified CDS sequence (opt2) from neuraminidase__InfluenzaA__ABS71655
augaaccccaucaagaagaucaucaccaucggcuccgucucccucaccaucuccaccaucugcuucuucaugcagaucgccauccucaucaccaccgucacccuccacuucaagcaguacgaguucaacuccccccccaacaaccaggucaugcucugcgagcccaccaucaucgagcgcaacaucaccgagaucgucuaccucaccaacaccaccaucgagaaggagaucugccccaagcucgccgaguaccgcaacugguccaagccccagugcaacaucaccggcuucgcccccuucuccaaggacaacuccauccgccucuccgccggcggcgacaucugggucacccgcgagcccuacgucuccugcgaccccgacaagugcuaccaguucgcccucggccagggcaccacccucaacaacguccacuccaacgacaccguccacgaccgcacccccuaccgcacccuccucaugaacgagcucggcguccccuuccaccucggcaccaagcaggucugcaucgccugguccuccuccuccugccacgacggcaaggccuggcuccacgucugcgucaccggcgacgacaagaacgccaccgccuccuucaucuacaacggccgccucgucgacuccaucgucuccugguccaaggagauccuccgcacccaggaguccgagugcgucugcaucaacggcaccugcaccgucgucaugaccgacggcuccgccuccggcaaggccgacaccaagauccucuucaucgaggagggcaagaucguccacaccuccacccucuccggcuccgcccagcacgucgaggagugcuccugcuacccccgcuaccccggcguccgcugcgucugccgcgacaacuggaagggcuccaaccgccccaucgucgacaucaacaucaaggacuacuccaucgucuccuccuacgucugcuccggccucgucggcgacaccccccgcaagaacgacuccuccuccuccucccacugccucgaccccaacaacgaggagggcggccacggcgucaagggcugggccuucgacgacggcaacgacgucuggaugggccgcaccaucuccgagaagcuccgcuccggcuacgagaccuucaaggucaucgagggcugguccaaccccaacuccaagcuccagaucaaccgccaggucaucgucgaccgcggcaaccgcuccggcuacuccggcaucuucuccgucgagggcaaguccugcaucaaccgcugcuucuacgucgagcucauccgcggccgcaaggaggagaccgagguccucuggaccuccaacuccaucgucgucuucugcggcaccuccggcaccuacggcaccggcuccuggcccgacggcgccgacaucaaccucaugcccaucuga

SEQ ID NO: 111913 - RNA, 1410 nt, Artificial Sequence
  derived and/or modified CDS sequence (opt2) from neuraminidase__InfluenzaA__ABS71657
augaaccccaaccagaagaucaucaccaucggcuccgucucccucaccaucuccaccaucugcuucuucaugcagaucgccauccucaucaccaccgucacccuccacuucaagcaguacgaguucuccuccccccccaacaaccaggucaugcucugcgagcccaccaucaucgagcgcaacaucaccgagaucgucuaccucaccaacaccaccaucgagaaggagaucugccccaagcucgccgaguaccgcaacugguccaagccccagugcgacaucaccggcuucgcccccuucuccaaggacaacuccauccgccucuccgccggcggcgacaucugggucacccgcgagcccuacgucuccugcgaccccgacaagugcuaccaguucgcccucggccagggcaccacccucaacaacguccacuccaacgacaccguccacgaccgcacccccuaccgcacccuccucaugaacgagcucggcguccccuuccaccucggcaccaagcaggucugcaucgccugguccuccuccuccugccacgacggcaaggccuggcuccacgucugcgucaccggcgacgacaagaacgccaccgccuccuucaucuacaacggccgccucgucgacuccaucgucuccugguccaaggagauccuccgcacccaggaguccgagugcgucugcaucaacggcaccugcaccgucgucaugaccgacggcuccgccuccggcaaggccgacaccaagauccucuucaucgaggagggcaagaucguccacaccuccacccucuccggcuccgcccagcacgucgaggagugcuccugcuacccccgcuaccccggcguccgcugcgucugccgcgacaacuggaagggcuccaaccgccccaucgucgacaucaacaucaaggacuacuccaucgucucccgcuacgucugcuccggccucgucggcgacaccccccgcaagaacgacuccuccuccuccucccacugccucgaccccaacaacgaggagggcggccacggcgucaagggcugggccuucgacgacggcaacgacgccuggaugggccgcaccaucuccgagaagucccgcuccggcuacgagaccuucaaggucaucgagggcugguccaaccccaacuccaagcuccagaucaaccgccaggucaucgucgaccgcggcaaccgcuccggcuacuccggcaucuucuccgucgagggcaaguccugcaucaaccgcugcuucuacgucgagcucauccgcggccgcaaggaggagaccgagguccucuggaccuccaacuccaucgucgucuucugcggcaccuccggcaccuacggcaccggcuccuggcccgacggcgccgacaucaaccucaugcccaucuga

SEQ ID NO: 111914 - RNA, 1410 nt, Artificial Sequence
  derived and/or modified CDS sequence (opt2) from neuraminidase__InfluenzaA__ABS71659
augaaccccaucaagaagaucaucaccaucggcuccgucucccucaccaucuccaccaucugcuucuucaugcagaucgccauccucaucaccaccgucacccuccacuucaagcaguacgaguucuccuccccccccaacaaccaggucaugcucugcgagcccaccaucaucgagcgcaacaucaccgagaucgucuaccucaccaacaccaccaucgagaaggagaucugccccaagcucgccgaguaccgcaacugguccaagccccagugcgacaucaccggcuucgcccccuucuccaaggacaacuccauccgccucuccgccggcggcgacaucugggucacccgcgagcccuacgucuccugcgaccccgacaagugcuaccaguucgcccucggccagggcaccacccucaacaacguccacuccaacgacaccguccacgaccgcacccccuaccgcacccuccucaugaacgagcucggcguccccuuccaccucggcaccaagcaggucugcaucgccugguccuccuccuccugccacgacggcaaggccuggcuccacgucugcgucaccggcgacgacaagaacgccaccgccuccuucaucuacaacggccgccucgucgacuccaucgucuccugguccaaggagauccuccgcacccaggaguccgagugcgucugcaucaacggcaccugcaccgucgucaugaccgacggcuccgccuccggcaaggccgacaccaagauccucuucaucgaggagggcaagaucguccacaccuccacccucuccggcuccgcccagcacgucgaggagugcuccugcuacccccgcuaccccggcguccgcugcgucugccgcgacaacuggaagggcuccaaccgccccaucgucgacaucaacaucaaggacuacuccaucgucucccgcuacgucugcuccggccucgucggcgacaccccccgcaagaacgacuccuccuccuccucccacugccucgaccccaacaacgaggagggcggccacggcgucaagggcugggccuucgacgacggcaacgacgucuggaugggccgcaccaucggcgagaagucccgcuccggcuacgagaccuucaaggucaucgagggcugguccaaccccaacuccaagcuccagaucaaccgccaggucaucgucgaccgcggcaaccgcuccggcuacuccggcaucuucuccgucgagggcaaguccugcaucaaccgcugcuucuacgucgagcucauccgcggccgcaaggaggagaccgagguccucuggaccuccaacuccaucgucgucuucugcggcaccuccggcaccuacggcaccggcuccuggcccgacggcgccgacaucaaccacaugcccaucuga

SEQ ID NO: 111915 - RNA, 1410 nt, Artificial Sequence
  derived and/or modified CDS sequence (opt2) from neuraminidase__InfluenzaA__ABS71660
augaaccccaucaagaagaucaucaccaucggcuccgucucccucaccaucuccaccaucugcuucuucaugcagaucgccauccucaucaccaccgucacccuccacuucaagcaguacgaguucuccuccccccccaacaaccaggucaugcucugcgagcccaccaucaucgagcgcaacaucaccgagaucgucuaccucaccaacaccaccaucgagaaggagaucugccccaagcucgccgaguaccgcaacugguccaagccccagugcgacaucaccggcuucgcccccuucuccaaggacaacuccauccgccucuccgccggcggcgacaucugggucacccgcgagcccuacgucuccugcgaccccgacaagugcuaccaguucgcccucggccagggcaccacccucaacaacguccacuccaacgacaccguccacgaccgcacccccuaccgcacccuccucaugaacgagcucggcguccccuuccaccucggcaccaagcaggucugcaucgccugguccuccuccuccugccacgacggcaaggccuggcuccacgucugcgucaccggcgacgacaagaacgccaccgccuccuucaucuacaacggccgccucgucgacuccaucgucuccugguccaaggagauccuccgcacccaggaguccgagugcgucugcaucaacggcaccugcaccgucgucaugaccgacggcuccgccuccggcaaggccgacaccaagauccucuucaucgaggagggcaagaucguccacaccuccacccucuccggcuccgcccagcacgucgaggagugcuccugcuacccccgcuaccccggcguccgcugcgucugccgcgacaacuggaagggcuccaaccgccccaucgucgacaucaacaucaaggacuacuccaucgucucccgcuacgucugcuccggccucgucggcgacaccccccgcaagaacgacuccuccuccuccucccacugccucgaccccaacaacgaggagggcggccacggcgucaagggcugggccuucgacgacggcaacgacgucuggaugggccgcaccaucuccgagaagucccgcuccggcuacgagaccuucaaggucaucgagggcugguccaaccccaacuccaagcuccagaucaaccgccaggucaucgucgaccgcggcaaccgcuccggcuacuccggcaucuucuccgucgagggcaaguccugcaucaaccgcugcuucuacgucgagcucauccgcggccgcaaggaggagaccgagguccucuggaccuccaacuccaucgucgucuucugcggcaccuccggcaccuacggcaccggcuccuggcccgacggcgccgacaucaaccucaugcccaucuga

SEQ ID NO: 111916 - RNA, 1410 nt, Artificial Sequence
  derived and/or modified CDS sequence (opt2) from neuraminidase__InfluenzaA__ABS71661
auguaccccaucaagaagaucaucaccaucggcuccgucucccucaccaucuccaccaucugcuucuucaugcagaucgccauccucaucaccaccgucacccuccacuucaagcaguacgaguucuccuccccccccaacaaccaggucaugcucugcgagcccaccaucaucgagcgcaacaucaccgagaucgucuaccucaccaacaccaccaucgagaaggagaucugccccaagcucgccgaguaccgcaacugguccaagccccagugcgacaucaccggcuucgcccccuucuccaaggacaacuccauccgccucuccgccggcggcgacaucugggucacccgcgagcccuacgucuccugcgaccccgacaagugcuaccaguucgcccucggccagggcaccacccucaacaacguccacuccaacgacaccguccacgaccgcacccccuaccgcacccuccucaugaacgagcucggcguccccuuccaccucggcaccaagcaggucugcaucgccugguccuccuccuccugccacgacggcaaggccuggcuccacgucugcgucaccggcgacgacaagaacgccaccgccuccuucaucuacaacggccgccucgucgacuccaucgucuccugguccaaggagauccuccgcacccaggaguccgagugcgucugcaucaacggcaccugcaccgucgucaugaccgacggcuccgccuccggcaaggccgacaccaagauccucuucaucgaggagggcaagaucguccacaccuccacccucuccggcuccgcccagcacgucgaggagugcuccugcuacccccgcuaccccggcguccgcugcgucugccgcgacaacuggaagggcuccaaccgccccaucgucgacaucaacaucaaggacuacuccaucgucucccgcuacgucugcuccggccucgucggcgacaccccccgcaagaacgacuccuccuccuccucccacugccucgaccccaacaacgaggagggcggccacggcgucaagggcugggccuucgacgacggcaacgacgucuggaugggccgcaccaucuccgagaagucccgcuccggcuacgagaccuucaaggucaucgagggcugguccaaccccaacuccaagcuccagaucaaccgccaggucaucgucgaccgcggcaaccgcuccggcuacuccggcaucuucuccgucgagggcaaguccugcaucaaccgcugcuucuacgucgagcucauccgcggccgcaaggaggagaccgagguccucuggaccuccaacuccaucgucgucuucugcggcaccuccggcaccuacggcaccggcuccuggcccgacggcgccgacaucaaccucaugcccaucuga

SEQ ID NO: 111917 - RNA, 1410 nt, Artificial Sequence
  derived and/or modified CDS sequence (opt2) from neuraminidase__InfluenzaA__ABS71662
augaaccccaucaagaagaucaucaccaucggcuccgucucccucaccaucuccaccaucugcuucuucaugcagaucgccauccucaucaccaccgucacccuccacuucaagcaguacgaguucaacuccccccccaacaaccaggucaugcucugcgagcccaccaucaucgagcgcaacaucaccgagaucgucuaccucaccaacaccaccaucgagaaggagaucugccccaagcucgccgaguaccgcaacugguccaagccccagugcgacaucaccggcuucgcccccuucuccaaggacaacuccauccgccucuccgccggcggcgacaucugggucacccgcgagcccuacgucuccugcgaccccgacaagugcuaccaguucgcccucggccagggcaccacccucaacaacguccacuccaacgacaccguccgcgaccgcacccccuaccgcacccuccucaugaacgagcucggcguccccuuccaccucggcaccaagcaggucugcaucgccugguccuccuccuccugccacgacggcaaggccuggcuccacgucugcaucaccggcgacgacaagaacgccaccgccuccuucaucuacaacggccgccucgucgacuccaucgucuccugguccaaggagauccuccgcacccaggaguccgagugcgucugcaucaacggcaccugcaccgucgucaugaccgacggcuccgccuccggcaaggccgacaccaagauccucuucaucgaggagggcaagaucguccacaccuccacccucuccggcuccgcccagcacgucgaggagugcuccugcuacccccgcuaccccggcguccgcugcgucugccgcgacaacuggaagggcuccaaccgccccaucgucgacaucaacaucaaggaccacuccaucgucuccuccuacgucugcuccggccucgucggcgacaccccccgcaagaacgacuccuccuccuccucccacugccucgaccccaacaacgaggagggcggccacggcgucaagggcugggccuucgacgacggcaacgacgucuggaugggccgcaccaucuccgagaagucccgccucggcuacgagaccuucaaggucaucgagggcugguccaaccccaacuccaagcuccagaucaaccgccaggucaucgucgaccgcggcaaccgcuccggcuacuccggcaucuucuccgucgagggcaaguccugcaucaaccgcugcuucuacgucgagcucauccgcggccgcaaggaggagaccgagguccucuggaccuccaacuccaucgucgucuucugcggcaccuccggcaccuacggcaccggcuccuggcccgacggcgccgacaucaaccucaugcccaucuga

SEQ ID NO: 111918 - RNA, 1410 nt, Artificial Sequence
  derived and/or modified CDS sequence (opt2) from neuraminidase__InfluenzaA__ABS71663
auguaccccaucaagaagaucaucaccaucggcuccgucucccucaccaucuccaccaucugcuucuucaugcagaucgccauccucaucaccaccgucacccuccacuucaagcaguacgaguucaacuccccccccaacaaccaggucaugcucugcgagcccaccaucaucgagcgcaacaucaccgagaucgucuaccucaccaacaccaccaucgagaaggagaucugccccaagcucgccgaguaccgcaacugguccaagccccagugcgacaucaccggcuucgcccccuucuccaaggacaacuccauccgccucuccgccggcggcgacaucugggucacccgcgagcccuacgucuccugcgaccccgacaagugcuaccaguucgcccucggccagggcaccacccucaacaacguccacuccaacgacaccguccgcgaccgcacccccuaccgcacccuccucaugaacgagcucggcguccccuuccaccucggcaccaagcaggucugcaucgccugguccuccuccuccugccacgacggcaaggccuggcuccacgucugcaucaccggcgacgaccagaacgccaccgccuccuucaucuacaacggccgccucgucgacuccaucgucuccugguccaaggagauccuccgcacccaggaguccgagugcgucugcaucaacggcaccugcaccgucgucaugaccgacggcuccgccuccggcaaggccgacaccaagauccucuucaucgaggagggcaagaucguccacaccuccacccucuccggcuccgcccagcacgucgaggagugcuccugcuacccccgcuaccccggcguccgcugcgucugccgcgacaacuggaagggcuccaaccgccccaucgucgacaucaacaucaaggaccacuccaucgucuccuccuacgucugcuccggccucgucggcgacaccccccgcaagaacgacuccuccuccuccucccacugccucgaccccaacaacgaggagggcggccacggcgucaagggcugggccuucgacgacggcaacgacgucuggaugggccgcaccaucuccgagaagucccgccucggcuacgagaccuucaaggucaucgagggcugguccaaccccaacuccaagcuccagaugaaccgccaggucaucgucgaccgcggcaaccgcuccggcuacuccggcaucuucuccgucgagggcaaguccugcaucaaccgcugcuucuacgucgagcucauccgcggccgcaaggaggagaccgagguccucuggaccuccaacuccaucgucgucuucugcggcaccuccggcaccuacggcaccggcuccuggcccgacggcgccgacaucaaccucaugcccaucuga

SEQ ID NO: 111919 - RNA, 1410 nt, Artificial Sequence
  derived and/or modified CDS sequence (opt2) from neuraminidase__InfluenzaA__ABU40956
augaaccccaaccagaagaucaucaccaucggcuccgucucccucaccaucuccaccaucugcuucuucaugcagaucgccauccucaucaccaccgucacccuccacuucaagcaguacgaguucaacuccccccccaacaaccaggucaugcucugcgagcccaccaucaucgagcgcaacaucaccgagaucgucuaccucaccaacaccaccaucgagaaggagaucugccccaagcucgccgaguaccgcaacugguccaagccccagugcgacaucaccggcuucgcccccuucuccaaggacaacuccauccgccucuccgccggcggcgacaucugggucacccgcgagcccuacgucuccugcgaccccgacaacugcuaccaguucgcccucggccagggcaccacccucaacaacguccacuccaacgacaccguccgcgaccgcacccccuaccgcacccuccucaugaacgagcucggcguccccuuccaccucggcaccaagcaggucugcaucgccugguccuccuccuccugccacgacggcaaggccuggcuccacgucugcaucaccggcgacgacaagaacgccaccgccuccuucaucuacaacggccgccucgucgacuccaucgucuccugguccaaggagauccuccgcacccaggaguccgagugcgucugcaucaacggcaccugcaccgucgucaugaccgacggcuccgccuccggcaaggccgacaccaagauccucuucaucgaggagggcaagaucguccacaccuccacccucuccggcuccgcccagcacgucgaggagugcuccugcuacccccgcuaccccggcguccgcugcgucugccgcgacaacuggaagggcuccaaccgccccaucaucgacaucaacaucaaggaccacuccaucgucuccuccuacgucugcuccggccucgucggcgacaccccccgcaagaacgacuccuccuccuccucccacugccucgaccccaacaacgaggagggcggccacggcgucaagggcugggccuucgacgacggcaacgacgucuggaugggccgcaccaucuccgagaagucccgccucggcuacgagaccuucaaggucaucgagggcugguccaaccccaaguccaagcuccagaucaaccgccaggucaucgucgaccgcggcaaccgcuccggcuacuccggcaucuucuccgucgagggcaaguccugcaucaaccgcugcuucuacgucgagcucauccgcggccgcaaggaggagaccgagguccucuggaccuccaacuccaucgucgucuucugcggcaccuccggcaccuacggcaccggcuccuggcccgacggcgccgacaucaaccucaugcccaucuga

SEQ ID NO: 111920 - RNA, 1410 nt, Artificial Sequence
  derived and/or modified CDS sequence (opt2) from neuraminidase__InfluenzaA__ABU50651
augaaccccaaccagaagaucaucaccaucggcuccgucucccucaccaucuccaccaucugcuucuucaugcagaucgccauccucaucaccaccgucacccuccacuucaagcaguacgaguucaacuccccccccaacaaccaggucaugcucugcgagcccaccaucaucgagcgcaacaucaccgagaucgucuaccucaccaacaccaccaucgagaaggagaucugccccaagcucgccgaguaccgcaacugguccaagccccagugcgacaucaccggcuucgcccccuucuccaaggacaacuccauccgccucuccgccggcggcgacaucugggucacccgcgagcccuacgucuccugcgaccccgacaagugcuaccaguucgcccucggccagggcaccacccucaacaacguccacuccaacgacaccguccgcgaccgcacccccuaccgcacccuccucaugaacgagcucggcguccccuuccaccucggcaccaagcaggucugcaucgccugguccuccuccuccugccacgacggcaaggccuggcuccacgucugcaucaccggcgacgacaagaacgccaccgccuccuucaucuacaacggccgccucgucgacuccaucgucuccugguccaaggagauccuccgcacccaggaguccgagugcgucugcaucaacggcaccugcaccgucgucaugaccgacggcuccgccuccggcaaggccgacaccaagauccucuucaucgaggagggcaagaucguccacaccuccacccucuccggcuccgcccagcacgucgaggagugcuccugcuacccccgcuaccccggcguccgcugcgucugccgcgacaacuggaagggcuccaaccgccccaucgucgacaucaacaucaaggaccacuccaucgucuccuccuacgucugcuccggccucgucggcgacaccccccgcaagaacgacuccuccuccuccucccacugccucgaccccaacaacgaggagggcggccacggcgucaagggcugggccuucgacgacggcaacgacgucuggaugggccgcaccaucuccgagaagucccgccucggcuacgagaccuucaaggucaucgagggcugguccaaccccaaguccaagcuccagaucaaccgccaggucaucgucgaccgcggcaaccgcuccggcuacuccggcaucuucuccgucgagggcaaguccugcaucaaccgcugcuucuacgucgagcucauccgcggccgcaaggaggagaccgagguccucuggaccuccaacuccaucgucgucuucugcggcaccuccggcaccuacggcaccggcuccuggcccgacggcgccgacaucaaccucaugcccaucuga

SEQ ID NO: 111921 - RNA, 1410 nt, Artificial Sequence
  derived and/or modified CDS sequence (opt2) from neuraminidase__InfluenzaA__ABU80180
augaaccccaaccagaagaucaucaccaucggcuccgucucccucaccaucgccaccaucugcuuccucaugcagaucgccauccucgucaccaccgucacccuccacuucaagcaguacgagugcaacuccuuccccaacaaccaggucaugcucugcgagcccaccaucaucgagcgcaacaucaccgagaucgucuaccucaccaacaccaccaucgagaaggagaucugccccaagcucgccgaguaccgcaacugguccaagccccagugcaacaucaccggcuucgcccccuucuccaaggacaacuccauccgccucuccgccggcggcgacaucugggucacccgcgagcccuacgucuccugcgaccccgacaagugcuaccaguucgcccucggccagggcaccacccucaacaacggccacuccaacgacaccguccacgaccgcacccccuaccgcacccuccucaugaacgagcucggcguccccuuccaccucggcaccaagcaggucugcaucgccugguccuccuccuccugccacgacggcaaggccuggcuccacgucugcgucaccggcgacgacgagaacgccaccgccuccuucaucuacaacggccgccucgucgacuccaucggcuccugguccaagaagauccuccgcacccaggaguccgagugcgucugcaucaacggcaccugcaccgucgucaugaccgacggcuccgccuccggcaaggccgacaccaagauccucuucaucgaggagggcaagaucguccacaccuccucccucuccggcuccgcccagcacgucgaggagugcuccugcuacccccgcuaccccggcguccgcugcgucugccgcgacaacuggaagggcuccaaccgccccaucgucgacaucaacgucaaggacuacuccaucgucuccuccuacgucugcuccggccucgucggcgacaccccccgcaagaacgacuccuccuccuccucccacugccucgaccccaacaacgaggagggcggccacggcgucaagggcugggccuucgacgacggcaacgacgucuggaugggccgcaccaucuccgagaagcuccgcuccggcuacgagaccuucaaggucaucgagggcugguccaagcccaacuccaagcuccagaucaaccgccaggucaucgucgaccgcggcaaccgcuccggcuacuccggcaucuucuccgucgagggcaaguccugcaucaaccgcugcuucuacgucgagcucauccgcggccgcaagcaggagaccgagguccucuggaccuccaacuccaucgucgucuucugcggcaccuccggcaccuacggcaccggcuccuggcccgacggcgccgacaucaaccucaugcccaucuga

SEQ ID NO: 111922 - RNA, 1413 nt, Artificial Sequence; identical to SEQ ID NO: 110864
  derived and/or modified CDS sequence (opt2) from neuraminidase__InfluenzaA__ABU80301

SEQ ID NO: 111923 - RNA, 1413 nt, Artificial Sequence
  derived and/or modified CDS sequence (opt2) from neuraminidase__InfluenzaA__ABU80312
augaacaccaaccagaagaucaucaccaucggcuccaucuccaucgccaucggcaucaucucccucaugcuccagaucggcaacaucaucuccaucugggccucccacuccauccagaccggcucccagaaccacaccggcaucugcaaccagcgcaucaucaccuacgagaacuccaccugggucaaccacaccuacgucaacaucaacaacaccaacgucgucgccggcaaggacaagaccuccgucacccucgccggcaacuccucccucugcuccaucuccggcugggccaucuacaccaaggacaacuccauccgcaucggcuccaagggcgacgucuucgucaugcgcgagcccuucaucuccugcucccaccucgagugccgcaccuucuuccucacccagggcgcccuccucaacgacaagcacuccaacggcaccgucaaggaccgcucccccuaccgcgcccucauguccugcccccucggcgaggcccccucccccuacaacuccaaguucgaguccgucgccugguccgccuccgccugccacgacggcaugggcuggcucaccaucggcaucuccggccccgacaacggcgccgucgccguccucaaguacaacggcaucaucaccgagaccaucaaguccuggaagaagcgcauccuccgcacccaggaguccgagugcgucugcgucaacggcuccugcuucaccaucaugaccgacggccccuccaacggcgccgccuccuacaagaucuucaagaucgagaagggcaaggucaccaaguccaucgagcucaacgcccccaacuuccacuacgaggagugcuccugcuaccccgacaccggcaccgucaugugcgucugccgcgacaacuggcacggcuccaaccgccccugggucuccuucaaccagaaccucgacuaccagaucggcuacaucugcuccggcgucuucggcgacaacccccgccccaaggacggcgagggcuccugcaaccccgucaccgucgacggcgccgacggcgucaagggcuucuccuacaaguacggcaacggcgucuggaucggccgcaccaaguccaaccgccuccgcaagggcuucgagaugaucugggaccccaacggcuggaccgacaccgacuccaacuucuccgucaagcaggacgucgucgccaucaccgacugguccggcuacuccggcuccuucguccagcaccccgagcucaccggccucgacugcauccgccccugcuucugggucgagcucguccgcggccucccccgcgagaacaccaccaucuggaccuccggcuccuccaucuccuucugcggcgucaacuccgacaccgccaacugguccuggcccgacggcgccgagcuccccuucaccaucgacaaguga

SEQ ID NO: 111924 - RNA, 1410 nt, Artificial Sequence; identical to SEQ ID NO: 110766
  derived and/or modified CDS sequence (opt2) from neuraminidase__InfluenzaA__ABU80323

SEQ ID NO: 111925 - RNA, 1410 nt, Artificial Sequence
  derived and/or modified CDS sequence (opt2) from neuraminidase__InfluenzaA__ABU80334
augaaccccaaccagaagaucaucaccaucggcuccgucucccucaccaucgccaccaucugcuuccucaugcagaucgccauccucgucaccaccgucacccuccacuucaagcaguacgagugcaacuccccccccaacaaccaggucaugcucugcgagcccaccaucaucgagcgcaacaucaccgagaucgucuaccucaccaacaccaccaucgagaaggagaucugccccaagcucgccgaguaccgcaacugguccaagccccagugcaacaucaccggcuucgcccccuucuccaaggacaacuccauccgccucuccgccggcggcgacaucugggucacccgcgagcccuacgucuccugcgaccccgacaagugcuaccaguucgcccucggccagggcaccacccucaacaacggccacuccaacgacaccguccacgaccgcacccccuaccgcacccuccucaugaacgagcucggcguccccuuccaccucggcacccgccaggucugcaucgccugguccuccuccuccugccacgacggcaaggccuggcuccacgucugcgucaccggcgacgacgagaacgccaccgccuccuucaucuacaacggccgccucgucgacuccaucggcuccugguccaagaagacccuccgcacccaggaguccgagugcgucugcaucaacggcaccugcaccgucgucaugaccgacggcuccgccuccggcaaggccgacaccaagauccucuucaucgaggagggcaagaucauccacaucuccacccucuccggcuccgcccagcacgucgaggagugcuccugcuacccccgcuaccccggcguccgcugcgucugccgcgacaacuggaagggcuccaaccgccccaucgucgacaucaacgucaaggacuacuccaucgucuccuccuacgucugcuccggccucgucggcgacaccccccgcaagaacgacuccuucuccuccucccacugccucgaccccaacaacgaggagggcggccacggcgucaagggcugggccuucgacgacggcaacgacgucuggaugggccgcaccaucuccgagaagcuccgcuccggcuacgagaccuucaaggucaucgagggcugguccaagcccaacuccaagcuccagaucaaccgccaggucaucgucgagcgcggcaaccgcuccggcuacuccggcaucuucuccgucgagggcaaguccugcaucaaccgcugcuucuacgucgagcucauccgcggccgcaaggaggagaccgaggucugguggaccuccaacuccaucgucgucuucugcggcaccuccggcaccuacggcaccggcuccuggcccgacggcgccgacaucaaccucaugcccaucuga

SEQ ID NO: 111926 - RNA, 1410 nt, Artificial Sequence; identical to SEQ ID NO: 110190
  derived and/or modified CDS sequence (opt2) from neuraminidase__InfluenzaA__ABU92762

SEQ ID NO: 111927 - RNA, 1410 nt, Artificial Sequence
  derived and/or modified CDS sequence (opt2) from neuraminidase__InfluenzaA__ABU92764
augaaccccaaccagaagaucaucaccaucggcuccgucucccucaccaucgccaccaucugcuuccucaugcagaucgccauccucgucaccaccgucacccuccacuucaagcaguacgagugcaacuccccccccaacaaccaggucaugcucugcgagcccaccaucauggagcgcaacaucaccgagaucgucuaccucaccaacaccaccaucgagaaggagaucugccccaagcucgccgaguaccgcaacugguccaagccccagugcaacgucaccggcuucgcccccuucuccaaggacaacuccauccgccucuccgccggcggcgacaucugggucacccgcgagcccuacgucuccugcgaccccgacaagugcuaccaguucgcccucggccagggcaccacccucaacaacggccacuccaacgacaccguccacgaccgcacccccuaccgcacccuccucaugaacgagcucggcguccccuuccaccucggcacccgccaggucugcaucgccugguccuccuccuccugccacgacggcaaggccuggcuccacgucugcgucaccggcgacgacgagaacgccaccgccuccuucaucuacaacggccgccucgucgacuccaucggcuccugguccaagaagauccuccgcacccaggaguccgagugcgucugcaucaacggcaccugcaccgucgucaugaccgacggcuccgccuccggcaaggccgacaccaagauccucuucaucgaggagggcaagaucguccacaucuccacccucuccggcuccgcccagcacgucgaggagugcuccugcuacccccgcuaccccggcguccgcugcgucugccgcgacaacuggaagggcuccaaccgccccaucgucgacaucaacgucaaggacuacuccaucgucuccuccuacgucugcuccggccucgucggcgacaccccccgcaagaacgacuccuucuccuccucccacugccucgaccccaacaacgaggagggcggccacggcgucaagggcugggccuucgacgacggcaacgacgucuggaugggccgcaccaucuccgagaagcuccgcuccggcuacgagaccuucaaggucaucgagggcugguccaagcccaacuccaagcuccagaucaaccgccaggucaucgucgagcgcggcaaccgcuccggcuacuccggcaucuucuccgucgagggcaaguccugcaucaaccgcugcuucuacgucgagcucauccgcggcaagaaggaggagaccgaggucugguggaccuccaacuccaucgucgucuucugcggcaccuccggcaccuacggcaccggcuccuggcccgacggcgccgacaucaaccucaugcccaucuga

SEQ ID NO: 111928 - RNA, 1410 nt, Artificial Sequence; identical to SEQ ID NO: 110190
  derived and/or modified CDS sequence (opt2) from neuraminidase__InfluenzaA__ABU92765

SEQ ID NO: 111929 - RNA, 1410 nt, Artificial Sequence; identical to SEQ ID NO: 110190
  derived and/or modified CDS sequence (opt2) from neuraminidase__InfluenzaA__ABU92766

SEQ ID NO: 111930 - RNA, 1410 nt, Artificial Sequence; identical to SEQ ID NO: 110190
  derived and/or modified CDS sequence (opt2) from neuraminidase__InfluenzaA__ABU92767

SEQ ID NO: 111931 - RNA, 1410 nt, Artificial Sequence; identical to SEQ ID NO: 110190
  derived and/or modified CDS sequence (opt2) from neuraminidase__InfluenzaA__ABU92768

SEQ ID NO: 111932 - RNA, 1410 nt, Artificial Sequence; identical to SEQ ID NO: 110097
  derived and/or modified CDS sequence (opt2) from neuraminidase__InfluenzaA__ABU92769

SEQ ID NO: 111933 - RNA, 1410 nt, Artificial Sequence; identical to SEQ ID NO: 110289
  derived and/or modified CDS sequence (opt2) from neuraminidase__InfluenzaA__ABU92770

SEQ ID NO: 111934 - RNA, 1410 nt, Artificial Sequence
  derived and/or modified CDS sequence (opt2) from neuraminidase__InfluenzaA__ABU92771
augaaccccaaccagaagaucaucaccaucggcuccgucucccucaccaucgccaccaucugcuuccucaugcagaucgccauccucgucaccaccgucacccuccacuucaagcaguacgagugcaacuccccccccaacaaccaggucaugcucugcgagcccaccaucaucgagcgcaacaucaccgagaucgucuaccucaccaacaccaccaucgagaaggagaucugccccaagcucgccgaguaccgcaacugguccaagccccagugcaacaucaccggcuucgcccccuucuccaaggacaacuccauccgccucuccgccggcggcgacaucugggucacccgcgagcccuacgucuccugcgaccccaacaagugcuaccaguucgcccucggccagggcaccacccucaacaacggccacuccaacgacaccguccacgaccgcacccccuaccgcacccuccucaugaacgagcucggcguccccuuccaccucggcaccaagcaggucugcaucgccugguccuccuccuccugccacgacggcaaggccuggcuccacgucugcgucaccggcgacgacgagaacgccaccgccuccuucaucuacaacggccgccucgucgacuccaucggcuccugguccaagaagauccuccgcacccaggaguccgagugcgucugcaucaacggcaccugcaccgucgucaugaccgacggcuccgccuccggcaaggccgacaccaagauccucuucaucgaggagggcaagaucguccacaccucccuccucuccggcuccgcccagcacgucgaggagugcuccugcuacccccgcuaccccggcguccgcugcgucugccgcgacaacuggaagggcuccaaccgccccaucgucgacaucaacgucaaggacuacuccaucgucuccuccuacgucugcuccggccucgucggcgacaccccccgcaagaacgacuccuccuccuccucccacugccucgaccccaacaacgaggagggcggccacggcgucaagggcugggccuucgacgacggcaacgacgucuggaugggccgcaccaucuccgagaagcuccgcuccggcuacgagaccuucaaggucaucgagggcugguccaagcccaacuccaagcuccagaucaaccgccaggucaucgucgaccgcggcaaccgcuccggcuacuccggcaucuucuccgucgagggcaaguccugcaucaaccgcugcuucuacgucgagcucauccgcggccgcaagcaggagaccgagguccucuggaccuccaacuccaucgucgucuucugcggcaccuccggcaccuacggcaccggcuccuggcccgacggcgccgacaucaaccucaugcccaucuga

SEQ ID NO: 111935 - RNA, 1410 nt, Artificial Sequence
  derived and/or modified CDS sequence (opt2) from neuraminidase__InfluenzaA__ABU92772
augaaccccaaccagaagaucaucaccaucggcuccgucucccucaccaucgccaccaucugcuuccucaugcagaucgccauccucgucaccaccgucacccuccacuucaagcaguacgagugcaacuccccccccaacaaccaggucaugcucugcgagcccaccaucaucgagcgcaacaucaccgagaucgucuaccucaccaacaccaccaucgagaaggagaucugccccaagcucgccgaguaccgcaacugguccaagccccagugcaacaucaccggcuucgcccccuucuccaaggacaacuccauccgccucuccgccggcggcgacaucugggucacccgcgagcccuacgucuccugcgaccccgacaagugcuaccaguucgcccucggccagggcaccacccucaacaacggccacuccaacgacaccguccacgaccgcacccccuaccgcacccuccucaugaacgagcucggcguccccuuccaccucggcacccgccaggucugcaucgccugguccuccuccuccugccacgacggcaaggccuggcuccacgucugcgucaccggcgacgacgagaacgccaccgccuccuucaucuacaacggccgccucgucgacuccaucggcuccugguccaagaacauccuccgcacccaggaguccgagugcgucugcaucaacggcaccugcaccgucgucaugaccgacggcuccgccuccggcaaggccgacaccaagauccucuucaucgaggagggcaagaucguccacaucuccacccucuccggcuccgcccagcacgucgaggagugcuccugcuacccccgcuaccccggcguccgcugcgucugccgcgacaacuggaagggcuccaaccgccccaucgucgacaucaacgucaaggacuacuccaucgucuccuccuacgucugcuccggccucgucggcgacaccccccgcaagaacgacuccuucuccuccucccacugccucgaccccaacaacgaggagggcggccacggcgucaagggcugggccuucgacgacggcaacgacgucuggaugggccgcaccaucuccgagaagcuccgcuccggcuacgagaccuucaaggucaucgagggcugguccaagcccaacuccaagcuccagaucaaccgccaggucaucgucgagcgcggcaaccgcuccggcuacuccggcaucuucuccgucgagggcaaguccugcaucaaccgcugcuucuacgucgagcucauccgcggccgcaaggaggagaccgaggucugguggaccuccaacuccaucgucgucuucugcggcaccuccggcaccuacggcaccggcuccuggcccgacggcgccgacaucaaccucaugcccaucuga

SEQ ID NO: 111936 - RNA, 1410 nt, Artificial Sequence
  derived and/or modified CDS sequence (opt2) from neuraminidase__InfluenzaA__ABU92773
augaaccccaaccagaagaucaucaccaucggcuccgucucccucaccaucgccaccaucugcuuccucaugcagaucgccauccucgucaccaccgucacccuccacuucaagcaguacgagugcaacuccccccccaacaaccaggucaugcucugcgagcccaccaucaucgagcgcaacaucaccgagaccgucuaccucaccaacaccaccaucgagaaggagaucugccccaagcucgccgaguaccgcaacugguccaagccccagugcaacaucaccggcuucgcccccuucuccaaggacaacuccauccgccucuccgccggcggcgacaucugggucacccgcgagcccuacgucuccugcgaccccgacaagugcuaccaguucgcccucggccagggcaccacccucaacaacggccacuccaacgacaccguccacgaccgcacccccuaccgcacccuccucaugaacgagcucggcguccccuuccaccucggcacccgccaggucugcaucgccugguccuccuccuccugccacgacggcaaggccuggcuccacgucugcgucaccggcgacgacgagaacgccaccgccuccuucaucuacaacggccgccucgucgacuccaucggcuccugguccaagaagauccuccgcacccaggaguccgagugcgucugcaucaacggcaccugcaccgucgucaugaccgacggcuccgccuccggcaaggccgacaccaagauccucuucaucgaggagggcaagaucguccacaucuccacccucuccggcuccgcccagcacgucgaggagugcuccugcuacccccgcuaccccggcguccgcugcgucugccgcgacaacuggaagggcuccaaccgccccaucgucgacaucaacgucaaggacuacuccaucgucuccuccuacgucugcuccggccucgucggcgacaccccccgcaagaacgacuccuucuccuccucccacugccucgaccccaacaacgaggagggcggccacggcgucaagggcugggccuucgacgacggcaacgacgucuggaugggccgcaccaucuccgagaagcuccgcuccggcuacgagaccuucaaggucaucgagggcugguccaagcccaacuccaagcuccagaccaaccgccaggucaucgucgagcgcggcaaccgcuccggcuacuccggcaucuucuccgucgagggcaaguccugcaucaaccgcugcuucuacgucgagcucauccgcggccgcaaggaggagaccgaggucugguggaccuccaacuccaucgucgucuucugcggcaccuccggcaccuacggcaccggcuccuggcccgacggcgccgacaucaaccucaugcccaucuga

SEQ ID NO: 111937 - RNA, 1410 nt, Artificial Sequence
  derived and/or modified CDS sequence (opt2) from neuraminidase__InfluenzaA__ABU92774
augaaccccaaccgcaagaucaucaccaucggcuccgucucccucaccaucgccaccaucugcuuccucaugcagaucgccauccucgucaccaccgucacccuccacuucaagcaguacgagugcaacuccccccccaacaaccaggucaugcucugcgagcccaccaucaucgagcgcaacaucaccgagaccgucuaccucaccaacaccaccaucgagaaggagaucugccccaagcucgccgaguaccgcaacugguccaagccccagugcaacaucaccggcuucgcccccuucuccaaggacaacuccauccgccucuccgccggcggcgacaucugggucacccgcgagcccuacgucuccugcgaccccgacaagugcuaccaguucgcccucggccagggcaccacccucaacaacggccacuccaacgacaccguccacgaccgcacccccuaccgcacccuccucaugaacgagcucggcguccccuuccaccucggcacccgccaggucugcaucgccugguccuccuccuccugccacgacggcaaggccuggcuccacgucugcgucaccggcgacgacgagaacgccaccgccuccuucaucuacaacggccgccucgucgacuccaucggcuccugguccaagaagauccuccgcacccaggaguccgagugcgucugcaucaacggcaccugcaccgucgucaugaccgacggcuccgccuccggcaaggccgacaccaagauccucuucaucgaggagggcaagaucguccacaucuccacccucuccggcuccgcccagcacgucgaggagugcuccugcuacccccgcuaccccggcguccgcugcgucugccgcgacaacuggaagggcuccaaccgccccaucgucgacaucaacgucaaggacuacuccaucgucuccuccuacgucugcuccggccucgucggcgacaccccccgcaagaacgacuccuucuccuccucccacugccucgaccccaacaacgaggagggcggccacggcgucaagggcugggccuucgacgacggcaacgacgucuggaugggccgcaccaucuccgagaagcuccgcuccggcuacgagaccuucaaggucaucgagggcugguccaagcccaacuccaagcuccagaccaaccgccaggucaucgucgagcgcggcaaccgcuccggcuacuccggcaucuucuccgucgagggcaaguccugcaucaaccgcugcuucuacgucgagcucauccgcggccgcaaggaggagaccgaggucugguggaccuccaacuccaucgucgucuucugcggcaccuccggcaccuacggcaccggcuccuggcccgacggcgccgacaucaaccucaugcccaucuga

SEQ ID NO: 111938 - RNA, 1410 nt, Artificial Sequence
  derived and/or modified CDS sequence (opt2) from neuraminidase__InfluenzaA__ABU92775
augaaccccaaccagaagaucaucaccaucggcuccgucucccucaccaucgccaccaucugcuuccucaugcagaucgccauccucgucaccaccgucacccuccacuucaagcaguacgagugcaacuccccccccaacaaccaggucaugcucugcgagcccaccaucaucgagcgcaacaucaccgagaucgucuaccucaccaacaccaccaucgagaaggagaucugccccaagcucgccgaguaccgcaacugguccaagccccagugcaacaucaccggcuucgcccccuucuccaaggacaacuccauccgccucuccgccggcggcgacaucugggucacccgcgagcccuacgucuccugcgaccccgacaagugcuaccaguucgcccucggccagggcaccacccucaacaacggccacuccaacgacaccguccacgaccgcacccccuaccgcacccuccucaugaacgagcucggcguccccuuccaccucggcacccgccaggucugcaucgccugguccuccuccuccugccacgacggcaaggccuggcuccacgucugcgucaccggcgacgacaagaacgccaccgccuccuucaucuacaacggccgccucgucgacuccaucggcuccugguccaagaagauccuccgcacccaggaguccgagugcgucugcaucaacggcaccugcaccgucgucaugaccgacggcuccgccuccggcaaggccgacaccaagauccucuucaucgaggagggcaagaucguccacaucuccacccucuccggcuccgcccagcacgucgaggagugcuccugcuacccccgcuaccccggcguccgcugcgucugccgcgacaacuggaagggcuccaaccgccccaucgucgacaucaacgucaaggacuacuccaucgucuccuccuacgucugcuccggccucgucggcgacaccccccgcaagaacgacuccuucuccuccucccacugccucgaccccaacaacgaggagggcggccacggcgucaagggcugggccuucgacgacggcaacgacgucuggaugggccgcaccaucuccgagaagcuccgcuccggcuacgagaccuucaaggucaucgagggcugguccaagcccaacuccaagcuccagaucaaccgccaggucaucgucgagcgcggcaaccgcuccggcuacuccggcaucuucuccgucgagggcaaguccugcaucaaccgcugcuucuacgucgagcucauccgcggccgcaaggaggagaccgaggucugguggaccuccaacuccaucgucgucuucugcggcaccuccggcaccuacggcaccggcuccuggcccgacggcgccgacaucaaccucaugcccaucuga

SEQ ID NO: 111939 - RNA, 1410 nt, Artificial Sequence; identical to SEQ ID NO: 110363
  derived and/or modified CDS sequence (opt2) from neuraminidase__InfluenzaA__ABU92777

SEQ ID NO: 111940 - RNA, 1410 nt, Artificial Sequence
  derived and/or modified CDS sequence (opt2) from neuraminidase__InfluenzaA__ABU92778
augaaccccaaccagaagaucaucaccaucggcuccgucucccucaccaucuccaccaucugcuucuucaugcagaucgccauccucaucaccaccgucacccuccacuucaagcaguacgaguucaacuccccccccaacaaccaggucaugcucugcgagcccaccaucaucgagcgcaacaucaccgagaucgucuaccucaccaacaccaccaucgagaaggaggucugccccaagcucgccgaguaccgcaacugguccaagccccagugcaacaucaccggcuucgcccccuucuccaaggacaacuccauccgccucuccgccggcggcgacaucugggucacccgcgagcccuacgucuccugcgaccccgacaagugcuaccaguucgcccucggccagggcaccacccucaacaacguccacuccaacgacaccguccacgaccgcacccccuaccgcacccuccucaugaacgagcucggcguccccuuccaccucggcaccaagcaggucugcaucgccugguccuccuccuccugccacgacggcaaggccuggcuccacgucugcgucaccggcgacgacaagaacgccaccgccuccuucaucuacaacggccgccucgucgacuccaucgucuccugguccaaggagauccuccgcacccaggaguccgagugcgucugcaucaacggcaccugcaccgucgucaugaccgacggcuccgccuccggcaaggccgacaccaagauccucuucaucgaggagggcaagaucguccacaccuccacccucuccggcuccgcccagcacgucgaggagugcuccugcuacccccgcuaccccggcguccgcugcgucugccgcgacaacuggaagggcuccaaccgccccaucgucgacaucaacaucaaggacuacuccaucgucuccuccuacgucugcuccggccucgucggcgacaccccccgcaagaacgacuccuccuccuccucccacugccucgaccccaacaacgaggagggcggccacggcgucaagggcugggccuucgacgacggcaacgacgucuggaugggccgcaccaucuccgagaagcuccgcuccggcuacgagaccuucaaggucaucgagggcugguccaaccccaacuccaagcuccagaucaaccgccaggucaucgucgaccgcggcaaccgcuccggcuacuccggcaucuucuccgucgagggcaaguccugcaucaaccgcugcuucuacgucgagcucauccgcggccgcaaggaggagaccgagguccucuggaccuccaacuccaucgucgucuucugcggcaccuccggcaccuacggcaccggcuccuggcccgacggcgccgacaucaaccucaugcccaucuga

SEQ ID NO: 111941 - RNA, 1410 nt, Artificial Sequence; identical to SEQ ID NO: 110261
  derived and/or modified CDS sequence (opt2) from neuraminidase__InfluenzaA__ABU92779

SEQ ID NO: 111942 - RNA, 1410 nt, Artificial Sequence; identical to SEQ ID NO: 110261
  derived and/or modified CDS sequence (opt2) from neuraminidase__InfluenzaA__ABU92780

SEQ ID NO: 111943 - RNA, 1410 nt, Artificial Sequence; identical to SEQ ID NO: 110261
  derived and/or modified CDS sequence (opt2) from neuraminidase__InfluenzaA__ABU92781

SEQ ID NO: 111944 - RNA, 1410 nt, Artificial Sequence
  derived and/or modified CDS sequence (opt2) from neuraminidase__InfluenzaA__ABU92782
augaaccccaaccagaagaucaucaccaucggcuccgucucccucaccaucgccgccaucugcuuccucaugcagaucgccauccucgucaccaccgucacccuccacuucaagcagcacgagugcaacuccccccccaacaaccaggucaugcucugcgagcccaccaucaucgagcgcaacaucaccgagaucgucuaccucaccaacaccaccaucgagaaggagaucugccccaagcucgccgaguaccgcaacugguccaagccccagugcaacaucaccggcuucgcccccuucuccaaggacaacuccauccgccucuccgccggcggcgacaucugggucacccgcgagcccuacgucuccugcgaccccgacaagugcuaccaguucgcccucggccagggcaccacccucaacaacggccacuccaacgacaccguccacgaccgcacccccuaccgcacccuccucaugaacgagcucggcguccccuuccaccucggcacccgccaggucugcaucgccugguccuccuccuccugccacgacggcaaggccuggcuccacgucugcgucaccggcgacgacaagaacgccaccgccuccuucaucuacaacggccgccucgucgacuccaucggcuccugguccaagaagauccuccgcacccaggaguccgagugcgucugcaucaacggcaccugcaccgucgucaugaccgacggcuccgccuccggcaaggccgacaccaagauccucuucaucgaggagggcaagaucguccacaucuccacccucuccggcuccgcccagcacgucgaggagugcuccugcuacccccgcuaccccggcguccgcugcgucugccgcgacaacuggaagggcuccaaccgccccaucgucgacaucaacgucaaggacuacuccaucgucuccuccuacgucugcuccggccucgucggcgacaccccccgcaagaacgacuccuucuccuccucccacugccucgaccccaacaacgaggagggcggccacggcgucaagggcugggccuucgacgacggcaacgacgucuggaugggccgcaccaucuccgagaagcuccgcuccggcuacgagaccuucaaggucaucgagggcugguccaagcccaacuccaagcuccagaucaaccgccaggucaucgucgagcgcggcaaccgcuccggcuacuccggcaucuucuccgucgagggcaaguccugcaucaaccgcugcuucuacgucgagcucauccgcggccgccgcgaggagaccgaggucugguggaccuccaacuccaucgucgucuucugcggcaccuccggcaccuacggcaccggcuccuggcccgacggcgccgacaucaaccucaugcccaucuga

SEQ ID NO: 111945 - RNA, 1410 nt, Artificial Sequence; identical to SEQ ID NO: 110261
  derived and/or modified CDS sequence (opt2) from neuraminidase__InfluenzaA__ABU92783

SEQ ID NO: 111946 - RNA, 1410 nt, Artificial Sequence; identical to SEQ ID NO: 110261
  derived and/or modified CDS sequence (opt2) from neuraminidase__InfluenzaA__ABU92784

SEQ ID NO: 111947 - RNA, 1410 nt, Artificial Sequence; identical to SEQ ID NO: 110261
  derived and/or modified CDS sequence (opt2) from neuraminidase__InfluenzaA__ABU92785

SEQ ID NO: 111948 - RNA, 1410 nt, Artificial Sequence; identical to SEQ ID NO: 110261
  derived and/or modified CDS sequence (opt2) from neuraminidase__InfluenzaA__ABU92786

SEQ ID NO: 111949 - RNA, 1410 nt, Artificial Sequence
  derived and/or modified CDS sequence (opt2) from neuraminidase__InfluenzaA__ABU92787
augaaccccaaccagaagaucaucaccaucggcuccgucucccucaccaucgccgccaucugcuuccucaugcagaucgccauccucgucaccaccgucacccuccacuucaagcagcacgagugcaacuccccccccaacaaccaggucaugcucugcgagcccaccaucaucgagcgcaacaucaccgagaucgucuaccucaccaacaccaccaucgagaaggagaucugccccaagcucgccgaguaccgcaacugguccaagccccagugcaacaucaccggcuucgcccccuucuccaaggacaacuccauccgccucuccgccggcggcgacaucugggucacccgcgagcccuacgucuccugcgaccccgacaagugcuaccaguucgcccucggccagggcaccacccucaacaacggccacuccaacgacaccguccacgaccgcacccccuaccgcacccuccucaugaacgagcucggcguccccuuccaccucggcacccgccaggucugcaucgccugguccuccuccuccugccacgacggcaaggccuggcuccacgucugcgucaccggcgacgacaagaacgccaccgccuccuucaucuacaacggccgccucgucgacuccaucggcuccugguccaagaagauccuccgcacccaggaguccgagugcgucugcaucaacggcaccugcaccgucgucaugaccgacggcuccgccuccggcaaggccgacaccaagauccucuucaucgaggagggcaagaucguccacaucuccacccucuccggcuccgcccagcacgucgaggagugcuccugcuacccccgccaccccggcguccgcugcgucugccgcgacaacuggaagggcuccaaccgccccaucgucgacaucaacgucaaggacuacuccaucgucuccuccuacgucugcuccggccucgucggcgacaccccccgcaagaacgacuccuucuccuccucccacugccucgaccccaacaacgaggagggcggccacggcgucaagggcugggccuucgacgacggcaacgacgucuggaugggccgcaccaucuccgagaagcuccgcuccggcuacgagaccuucaaggucaucgagggcugguccaagcccaacuccaagcuccagaucaaccgccaggucaucgucgagcgcggcaaccgcuccggcuacuccggcaucuucuccgucgagggcaaguccugcaucaaccgcugcuucuacgucgagcucauccgcggccgcaaggaggagaccgaggucugguggaccuccaacuccaucgucgucuucugcggcaccuccggcaccuacggcaccggcuccuggcccgacggcgccgacaucaaccucaugcccaucuga

SEQ ID NO: 111950 - RNA, 1410 nt, Artificial Sequence
  derived and/or modified CDS sequence (opt2) from neuraminidase__InfluenzaA__ABU92789
augaaccccaaccagaagaucaucaccaucggcuccgucucccucaccaucuccaccaucugcuucuucaugcagaucgccauccucaucaccaccgucacccuccacuucaagcaguacgaguucaaccccccccccaacaaccaggucaugcucugcgagcccaccaucaucgagcgcaacaucaccgagaucgucuaccucaccaacaccaccaucgagaaggagaucugccccaagcucgccgaguaccgcaacugguccaagccccagugcuccaucaccggcuucgcccccuucuccaaggacaacuccauccgccucuccgccggcggcgacaucugggucacccgcgagcccuacgucuccugcgaccccgacaagugcuaccaguucgcccucggccagggcaccacccucaacaacguccacuccaacgacaccguccacgaccgcacccccuaccgcacccuccucaugaacgagcucggcguccccuuccaccucggcaccaagcaggucugcaucgccugguccuccuccuccugccacgacggcaaggccuggcuccacgucugcgucaccggcgacgacaagaacgccaccgccuccuucaucuacaacggccgccucgucgacuccaucgucuccugguccaaggagauccuccgcacccaggaguccgagugcgucugcaucaacggcaccugcaccgucgucaugaccgacggcuccgccuccggcaaggccgacaccaagauccucuucaucgaggagggcaagaucguccacaccuccacccucuccggcuccgcccagcacgucgaggagugcuccugcuacccccgcuaccccggcguccgcugcgucugccgcgacaacuggaagggcuccaaccgccccaucgucgacaucaacaucaaggacuacuccaucgucuccuccuacgucugcuccggccucgucggcgacaccccccgcaagaacgacuccuccuccuccucccacugccucgaccccaacaacgaggagggcggccacggcgucaagggcugggccuucgacgacggcaacgacgucuggaugggccgcaccaucuccgagaagucccgcuccggcuacgagaccuucaaggucaucgagggcugguccaaccccaacuccaagcuccagaucaaccgccaggucaucgucgaccgcggcaaccgcuccggcuacuccggcaucuucuccgucgagggcaaguccugcaucaaccgcugcuucuacgucgagcucauccgcggccgcaaggaggagaccgagguccucuggaccuccaacuccaucgucgucuucugcggcaccuccggcaccuacggcaccggcuccuggcccgacggcgccgacaucaaccucaugcccaucuga

SEQ ID NO: 111951 - RNA, 1410 nt, Artificial Sequence; identical to SEQ ID NO: 110363
  derived and/or modified CDS sequence (opt2) from neuraminidase__InfluenzaA__ABU92790

SEQ ID NO: 111952 - RNA, 1410 nt, Artificial Sequence
  derived and/or modified CDS sequence (opt2) from neuraminidase__InfluenzaA__ABU92791
augaaccccaaccagaagaucaucaccaucggcuccgucucccucaccaucuccaccaucugcuucuucaugcagaucgccauccucaucaccaccgucacccuccacuucaagcaguacgaguucaacuccccccccaacaaccaggucaugcucugcgagcccaccaucaucgagcgcaacaucaccgagaucgucuaccucaccaacaccaccaucgagaaggagaucugccccaagcucgccgaguaccgcaacugguccaagccccagugcgacaucaccggcuucgcccccuucuccaaggacaacuccauccgccucuccgccggcggcgacaucugggucacccgcgagcccuacgucuccugcgaccccgacaagugcuaccaguucgcccucggccagggcaccacccucaacaacguccacuccaacgacaccguccacgaccgcacccccuaccgcacccuccucaugaacgagcucggcguccccuuccaccucggcaccaagcaggucugcaucgccugguccuccuccuccugccacgacggcaaggccuggcuccacgucugcgucaccggcgacgacaagaacgccaccgccuccuucaucuacaacggccgccucgucgacuccaucgucuccugguccaagaagauccuccgcacccaggaguccgagugcgucugcaucaacggcaccugcaccgucgucaugaccgacggcuccgccuccggcaaggccgacaccaagauccucuucaucgaggagggcaagaucguccacaccuccacccucuccggcuccgcccagcacgucgaggagugcuccugcuacccccgcuaccccggcguccgcugcgucugccgcgacaacuggaagggcuccaaccgccccaucgucgacaucaacaucaaggacuacuccaccgucuccuccuacgucugcuccggccucgucggcgacaccccccgcaagaacgacuccuccuccuccucccacugccucgaccccaacaacgaggagggcggccacggcgucaagggcugggccuucgacgacggcaacgacgucuggaugggccgcaccaucuccgagaagcuccgcuccggcuacgagaccuucaaggucaucgagggcugguccaaccccaacuccaagcuccagaucaaccgccaggucaucgucgaccgcggcaaccgcuccggcuacuccggcaucuucuccgucgagggcaaguccugcaucaaccgcugcuucuacgucgagcucauccgcggccgcaaggaggagaccgagguccucuggaccuccaacuccaucgucgucuucugcggcaccuccggcaccuacggcaccggcuccuggcccgacggcgccgacaucaaccucaugcccaucuga

SEQ ID NO: 111953 - RNA, 1410 nt, Artificial Sequence
  derived and/or modified CDS sequence (opt2) from neuraminidase__InfluenzaA__ABU92792
augaaccccaaccagaagaucaucaccaucggcuccgucucccucaccaucuccaccaucugcuucuucaugcagaucgccauccucaucaccaccgucacccuccacuucaagcaguacgucuucaacuccccccccaacaaccaggucaugcucugcgagcccaccaucaucgagcgcaacaucaccgagaucgucuaccucaccaacaccaccaucgagaaggagaucugccccaagcucgccgaguaccgcaacugguccaagccccagugcgacaucaccggcuucgcccccuucuccaaggacaacuccauccgccucuccgccggcggcgacaucugggucacccgcgagcccuacgucuccugcgaccccgacaagugcuaccaguucgcccucggccagggcaccacccucaacaacguccacuccaacgacaccguccacgaccgcacccccuaccgcacccuccucaugaacgagcucggcguccccuuccaccucggcaccaagcaggucugcaucgccugguccuccuccuccugccacgacggcaaggccuggcuccacgucugcgucaccggcgacgacaagaacgccaccgccuccuucaucuacaacggccgccucgucgacuccgucgucuccugguccaaggacauccuccgcacccaggaguccgagugcgucugcaucaacggcaccugcaccgucgucaugaccgacggcuccgccuccggcaaggccgacaccaagauccucuucaucgaggagggcaagaucguccacaccuccacccucuccggcuccgcccagcacgucgaggagugcuccugcuacccccgcuaccccggcguccgcugcgucugccgcgacaacuggaagggcuccaaccgccccaucgucgacaucaacaucaagaacuacuccaucgucuccuccuacgucugcuccggccucgucggcgacaccccccgcaagaccgacuccuccuccuccucccacugccucgaccccaacaacgaggagggcggccacggcgucaagggcugggccuucgacgacggcaacgacgucuggaugggccgcaccaucuccgagaagcuccgccucggcuacgagaccuucaaggucaucgagggcugguccaaccccaacuccaagcuccagaucaaccgccaggucaucgucgaccgcggcaaccgcuccggcuacuccggcaucuucuccgucgagggcaaguccugcaucaaccgcugcuucuacgucgagcucauccgcggccgcaaggaggagaccgagguccucuggaccuccaacuccaucgucgucuucugcggcaccuccggcaccuacggcaccggcuccuggcccgacggcgccgacaucaaccucaugcccaucuga

SEQ ID NO: 111954 - RNA, 1410 nt, Artificial Sequence; identical to SEQ ID NO: 110843
  derived and/or modified CDS sequence (opt2) from neuraminidase__InfluenzaA__ABU92793

SEQ ID NO: 111955 - RNA, 1410 nt, Artificial Sequence; identical to SEQ ID NO: 111950
  derived and/or modified CDS sequence (opt2) from neuraminidase__InfluenzaA__ABU92794

SEQ ID NO: 111956 - RNA, 1410 nt, Artificial Sequence; identical to SEQ ID NO: 110261
  derived and/or modified CDS sequence (opt2) from neuraminidase__InfluenzaA__ABU92795

SEQ ID NO: 111957 - RNA, 1410 nt, Artificial Sequence; identical to SEQ ID NO: 110261
  derived and/or modified CDS sequence (opt2) from neuraminidase__InfluenzaA__ABU92796

SEQ ID NO: 111958 - RNA, 1410 nt, Artificial Sequence
  derived and/or modified CDS sequence (opt2) from neuraminidase__InfluenzaA__ABU92797
augaaccccaaccagaagaucaucaccaucggcuccgucucccucaccaucgccgccaucugcuuccucaugcagaucgccauccucgucaccaccgucacccuccacuucaagcagcacgagugcaacuccccccccaacaaccaggucaugcucugcgagcccaccaucaucgagcgcaacaucaccgagaucgucuaccucaccaacaccaccaucgagaaggagaucugccccaagcucgccgaguaccgcaacugguccaagccccagugcaacaucaccggcuucgcccccuucuccaaggacaacuccauccgccucuccgccggcggcgacaucugggucacccgcgagcccuacgucuccugcgaccccgacaagugcuaccaguucgcccucggccagggcaccacccucaacaacggccacuccaacgacaccguccacgaccgcacccccuaccgcacccuccucaugaacgagcucggcguccccuuccaccucggcacccgccaggucugcaucgccugguccuccuccuccugccacgacggcaaggccuggcuccacgucugcgucaccggcgacgacaagaacgccaccgccuccuucaucuacaacggccgccucgucgacuccaucggcuccugguccaagcgcauccuccgcacccaggaguccgagugcgucugcaucaacggcaccugcaccgucgucaugaccgacggcuccgccuccggcaaggccgacaccaagauccucuucaucgaggagggcaagaucguccacaucuccacccucuccggcuccgcccagcacgucgaggagugcuccugcuacccccgcuaccccggcguccgcugcgucugccgcgacaacuggaagggcuccaaccgccccaucgucgacaucaacgucaaggacuacuccaucgucuccuccuacgucugcuccggccucgucggcgacaccccccgcaagaacgacuccuucuccuccucccacugccucgaccccaacaacgaggagggcggccacggcgucaagggcugggccuucgacgacggcaacgacgucuggaugggccgcaccaucaacgagaagcuccgcuccggcuacgagaccuucaaggucaucgagggcugguccaagcccaacuccaagcuccagaucaaccgccaggucaucgucgagcgcggcaaccgcuccggcuacuccggcaucuucuccgucgagggcaaguccugcaucaaccgcugcuucuacgucgagcucauccgcggccgcaaggaggagaccgaggucugguggaccuccaacuccaucgucgucuucugcggcaccuccggcaccuacggcaccggcuccuggcccgacggcgccgacaucaaccucaugcccaucuga

SEQ ID NO: 111959 - RNA, 1410 nt, Artificial Sequence; identical to SEQ ID NO: 110261
  derived and/or modified CDS sequence (opt2) from neuraminidase__InfluenzaA__ABU92798

SEQ ID NO: 111960 - RNA, 1410 nt, Artificial Sequence; identical to SEQ ID NO: 110261
  derived and/or modified CDS sequence (opt2) from neuraminidase__InfluenzaA__ABU92799

SEQ ID NO: 111961 - RNA, 1410 nt, Artificial Sequence; identical to SEQ ID NO: 110261
  derived and/or modified CDS sequence (opt2) from neuraminidase__InfluenzaA__ABU92800

SEQ ID NO: 111962 - RNA, 1410 nt, Artificial Sequence
  derived and/or modified CDS sequence (opt2) from neuraminidase__InfluenzaA__ABU92801
augaaccccaaccagaagaucaucaccaucggcuccgucucccucaccaucgccgccaucugcuuccucaugcagaucgccauccucgucaccaccgucacccuccacuucaagcagcacgagugcaacuccccccccaacaaccaggucaugcucugcgagcccaccaucaucgagcgcaacaucaccgagaucguccaccucaccaacaccaccaucgagaaggagaucugccccaagcucgccgaguaccgcaacugguccaagccccagugcaacaucaccggcuucgcccccuucuccaaggacaacuccauccgccucuccgccggcggcgacaucugggucacccgcgagcccuacgucuccugcgaccccgacaagugcuaccaguucgcccucggccagggcaccacccucaacaacggccacuccaacgacaccguccacgaccgcacccccuaccgcacccuccucaugaacgagcucggcguccccuuccaccucggcacccgccaggucugcaucgccugguccuccuccuccugccacgacggcaaggccuggcuccacgucugcgucaccggcgacgacaagaacgccaccgccuccuucaucuacaacggccgccucgucgacuccaucggcuccugguccaagaagauccuccgcacccaggaguccgagugcgucugcaucaacggcaccugcaccgucgucaugaccgacggcuccgccuccggcaaggccgacaccaagauccucuucaucgaggagggcaagaucguccacaucuccacccucuccggcuccgcccagcacgucgaggagugcuccugcuacccccgcuaccccggcguccgcugcgucugccgcgacaacuggaagggcuccaaccgccccaucgucgacaucaacgucaaggacuacuccaucgucuccuccuacgucugcuccggccucgucggcgacaccccccgcaagaacgacuccuucuccuccucccacugccucgaccccaacaacgaggagggcggccacggcgucaagggcugggccuucgacgacggcaacgacgucuggaugggccgcaccaucuccgagaagcuccgcuccggcuacgagaccuucaaggucaucgagggcugguccaagcccaacuccaagcuccagaucaaccgccaggucaucgucgagcgcggcaaccgcuccggcuacuccggcaucuucuccgucgagggcaaguccugcaucaaccgcugcuucuacgucgagcucauccgcggccgcaaggaggagaccgaggucugguggaccuccaacuccaucgucgucuucugcggcaccuccggcaccuacggcaccggcuccuggcccgacggcgccgacaucaaccucaugcccaucuga

SEQ ID NO: 111963 - RNA, 1410 nt, Artificial Sequence; identical to SEQ ID NO: 110261
  derived and/or modified CDS sequence (opt2) from neuraminidase__InfluenzaA__ABU92802

SEQ ID NO: 111964 - RNA, 1410 nt, Artificial Sequence; identical to SEQ ID NO: 110261
  derived and/or modified CDS sequence (opt2) from neuraminidase__InfluenzaA__ABU92804

SEQ ID NO: 111965 - RNA, 1410 nt, Artificial Sequence
  derived and/or modified CDS sequence (opt2) from neuraminidase__InfluenzaA__ABU92805
augaaccccaaccagaagaucaucaccaucggcuccgucucccucaccaucuccaccaucugcuucuucaugcagaucgccauccucaucaccaccgucacccuccacuucaagcaguacgaguucaacuccccccccaacaaccaggucaugcucugcgagcccaccaucaucgagcgcaacaucaccgagaucgucuaccucaccaacaccaccaucgagaaggagaucugccccaagcucgccgaguaccgcaacugguccaagccccagugcaacaucaccggcuucgcccccuucuccaaggacaacuccauccgccucuccgccggcggcgacaucugggucacccgcgagcccuacgucuccugcgaccccgacaagugcuaccaguucgcccucggccagggcaccacccucaacaacguccacuccaacgacaccguccacgaccgcacccccuaccgcacccuccucaugaacgagcucggcguccccuuccaccucggcaccaagcaggucugcaucgccugguccuccuccuccugccacgacggcaaggccuggcuccacgucugcgucaccggcgacgacgagaacgccaccgccuccuucaucuacaacggccgccucgucgacuccaucgucuccugguccaagaagauccuccgcacccaggaguccgagugcgucugcaucaacggcaccugcaccgucgucaugaccgacggcuccgccuccggcaaggccgacaccaagauccucuucaucgaggagggcaagaucguccacaccuccacccucuccggcuccgcccagcacgucgaggagugcuccugcuacccccgcuaccccggcguccgcugcgucugccgcgacaacuggaagggcuccaaccgccccaucgucgacaucaacaucaaggacuacuccaucgucuccuccuacgucugcuccggccucgucggcgacaccccccgcaagaacgacuccuccuccuccucccacugccucgaccccaacaacgaggagggcggccacggcgucaagggcugggccuucgacgacggcaacgacgucuggaugggccgcaccaucuccgagaagcuccgcuccggcuacgagaccuucaaggucaucgagggcugguccaaccccaacuccaagcuccagaucaaccgccaggucaucgucgaccgcggcaaccgcuccggcuacuccggcaucuucuccgucgagggcaaguccugcaucaaccgcugcuucuacgucgagcucauccgcggccgcaagcaggagaccgagguccucuggaccuccaacuccaucgucgucuucugcggcaccuccggcaccuacggcaccggcuccuggcccgacggcgccgacaucaaccucaugcccaucuga

SEQ ID NO: 111966 - RNA, 1410 nt, Artificial Sequence; identical to SEQ ID NO: 111965
  derived and/or modified CDS sequence (opt2) from neuraminidase__InfluenzaA__ABU92806

SEQ ID NO: 111967 - RNA, 1410 nt, Artificial Sequence
  derived and/or modified CDS sequence (opt2) from neuraminidase__InfluenzaA__ABU92808
augaaccccaaccagaagaucaucaccaucggcuccgucucccucaccaucgccaccaucugcuuccucaugcagaucaccauccucgucaccaccgucacccuccacuucaagcaguacgagugcaacuccccccccaacaaccaggucaugcucugcgagcccaccaucaucgagcgcaacaucaccgagaucgucuaccucaccaacaccaccaucgagaaggagaucugccccaagcucgccgaguaccgcaacugguccaagccccagugcaacaucaccggcuucgcccccuucuccaaggacaacuccauccgccucuccgccggcggcgacaucugggucacccgcgagcccuacgucuccugcgaccccgacaagugcuaccaguucgcccucggccagggcaccacccucaacaacggccacuccaacgacaccguccacgaccgcacccccuaccgcacccuccucaugaacgagcucggcguccccuuccaccucggcacccgccaggucugcaucgccugguccuccuccuccugccacgacggcaaggccuggcuccacgucugcgucaccggcgacgacaagaacgccaccgccuccuucaucuacaacggccgccucgucgacuccaucggcuccugguccaagaagauccuccgcacccaggaguccgagugcgucugcaucaacggcaccugcaccgucgucaugaccgacggcuccgccuccggcaaggccgacaccaagauccucuucaucgaggagggcaagaucauccacaucuccacccucuccggcuccgcccagcacgucgaggagugcuccugcuacccccgcuaccccggcguccgcugcgucugccgcgacaacuggaagggcuccaaccgccccaucgucgacaucaacgucaaggacuacuccaucgucuccuccuacgucugcuccggccucgucggcgacaccccccgcaagaacgacuccuccuccuccucccacugccucgaccccaacaacgaggagggcggccacggcgucaagggcugggccuucgacgacggcaacgacgucuggaugggccgcaccaucuccgagaagcuccgcuccggcuacgagaccuucaaggucaucgagggcugguccaagcccaacuccaagcuccagaucaaccgccaggucaucgucgagcgcggcaaccgcuccggcuacuccggcaucuucuccgucgagggcaaguccugcaucaaccgcugcuucuacgucgagcucauccgcggccgcaaggaggagaccgaggucugguggaccuccaacuccaucgucgucuucugcggcaccuccggcaccuacggcaccggcuccuggcccgacggcgccgacaucaaccucaugcccaucuga

SEQ ID NO: 111968 - RNA, 1410 nt, Artificial Sequence
  derived and/or modified CDS sequence (opt2) from neuraminidase__InfluenzaA__ABU92809
augaaccccaaccagaagaucaucaccaucggcuccgucucccucaccaucuccaccaucugcuucuucaugcagaucgccauccucaucaccaccgucacccuccacuucaagcaguacgaguucaacuccccccccaacaaccaggucaugcucugcgagcccaccaucaucgagcgcaacaucaccgagaucgucuaccucaccaacaccaccaucgagaaggagaucugccccaagcucgccgaguaccgcaacugguccaagccccagugcaacaucaccggcuucgcccccuucuccaaggacaacuccauccgccucuccgccggcggcgacaucugggucacccgcgagcccuacgucuccugcgaccccgacaagugcuaccaguucgcccucggccagggcaccacccucaacaacguccacuccaacgacaccguccacgaccgcacccccuaccgcacccuccucaugaacgagcucggcguccccuuccaccucggcaccaagcaggucugcaucgccugguccuccuccuccugccacgacggcaaggccuggcuccacgucugcgucaccggcgacgacaagaacgccaccgccuccuucaucuacaacggccgccucgucgacuccaucgucuccugguccaaggagauccuccgcacccaggaguccgagugcgucugcaucaacggcaccugcaccgucgucaugaccgacggcuccgccuccggcaaggccgacaccaagauccucuucaucgaggagggcaagaucguccacaccuccacccucuccggcuccgcccagcacgucgaggagugcuccugcuacccccgcuaccccggcguccgcugcgucugccgcgacaacuggaagggcuccaaccgccccaucgucgacaucaacaucaaggacuacuccaucgucuccuccuacgucugcuccggccucgucggcgacaccccccgcaagaacgacuccuccuccuccggccacugccucgaccccaacaacgaggagggcggccacggcgucaagggcugggccuucgacgacggcaacgacgucuggaugggccgcaccaucuccgagaagcuccgcuccggcuacgagaccuucaaggucaucgagggcugguccaaccccaacuccaagcuccagaucaaccgccaggucaucgucgaccgcggcaaccgcuccggcuacuccggcaucuucuccgucgagggcaaguccugcaucaaccgcugcuucuacgucgagcucauccgcggccgcaaggaggagaccgacguccucuggaccuccaacuccaucgucgucuucugcggcaccuccggcaccuacggcaccggcuccuggcccgacggcgccgacaucaaccucaugcccaucuga

SEQ ID NO: 111969 - RNA, 1410 nt, Artificial Sequence
  derived and/or modified CDS sequence (opt2) from neuraminidase__InfluenzaA__ABU92810
augaaccccaaccagaagaucaucaccaucggcuccgucucccucaccaucgccgccaucugcuuccucaugcagaucgccauccucgucaccaccgucacccuccacuucaagcagcacgagugcaacuccccccccaacaaccaggucaugcucugcgagcccaccaucaucgagcgcaacaucaccgagaucgucuaccucaccaacaccaccaucgagaaggagaucugccccaagcucgccgaguaccgcaacugguccaagccccagugcaacaucaccggcuucgcccccuucuccaaggacaacuccauccgccucuccgccggcggcgacaucugggucacccgcgagcccuacgucuccugcgaccccgacaagugcuaccaguucgcccucggccagggcaccacccucaacaacggccacuccaacgacaccguccacgaccgcacccccuaccgcacccuccucaugaacgagcucggcguccccuuccaccucggcacccgccaggucugcaucgccugguccuccuccuccugccacgacggcaaggccuggcuccacgucugcgucaccggcgacgacaagaacgccaccgccuccuucaucuacaacggccgccucgucgacuccaucggcuccugguccaagaagauccuccgcacccaggaguccgagugcgucugcaucaacggcaccugcaccgucgucaugaccgacggcuccgccuccggcaaggccgacaccaagauccucuucaucgaggagggcaagaucguccacaucuccacccucuccggcuccgcccagcacgucgaggagugcuccugcuacccccgcuaccccggcguccgcugcgucugccgcgacaacuggaagggcuccaaccgccccaucgucgacaucaacgucaaggacuacuccaucgucuccuccuacgucugcuccggccucgucggcgacaccccccgcaagaacgacuccuucuccuccucccacugccucgaccccaacaacgaggagggcggccacggcgucaagggcugggccuucgacgacggcaacgacgucuggaugggccgcaccaucuccgagaagcuccgcuccggcuacgagaccuucaaggucaucgagggcugguccaagcccaacuccaagcuccagaucaaccgccaggucaucgucgagggcggcaaccgcuccggcuacuccggcaucuucuccgucgagggcaaguccugcaucaaccgcugcuucuacgucgagcucauccgcggccgcaaggaggagaccgaggucugguggaccuccaacuccaucgucgucuucugcggcaccuccggcaccuacggcaccggcuccuggcccgacggcgccgacaucaaccucaugcccaucuga

SEQ ID NO: 111970 - RNA, 1410 nt, Artificial Sequence
  derived and/or modified CDS sequence (opt2) from neuraminidase__InfluenzaA__ABU92811
augaaccccaaccagaagaucaucaccaucggcuccgucucccucaccaucgccgccaucugcuuccucaugcagaucgccauccucgucaccaccgucacccuccacuucaagcagcacgagugcaacuccccccccaacaaccaggucaugcucugcgagcccaccaugaucgagcgcaacaucaccgagaucgucuaccucaccaacaccaccaucgagaaggagaucugccccaagcucgccgaguaccgcaacugguccaagccccagugcaacaucaccggcuucgcccccuucuccaaggacaacuccauccgccucuccgccgucggcgacaucugggucacccgcgagcccuacgucuccugcgaccccgacaagugcuaccaguucgcccucggccagggcaccacccucaacaacggccacuccaacgacaccguccacgaccgcacccccuaccgcacccuccucaugaacgagcucggcguccccuuccaccucggcacccgccaggucugcaucgccugguccuccuccuccugccacgacggcaaggccuggcuccacgucugcgucaccggcgacgacaagaacgccaccgccuccuucaucuacaacggccgccucgucgacuccaucggcuccugguccaagaagauccuccgcacccaggaguccgagugcgucugcaucaacggcaccugcaccgucgucaugaccgacggcuccgccuccggcaaggccgacaccaagauccucuucaucgaggagggcaagaucguccacaucuccacccucuccggcuccgcccagcacgucgaggagugcuccugcuacccccgcuaccccggcguccgcugcgucugccgcgacaacuggaagggcuccaaccgccccaucgucgacaucaacgucaaggacuacuccaucgucuccuccuacgucugcuccggccucgucggcgacaccccccgcaagaacgacuccuucuccuccucccacugccucgaccccaacaacgaggagggcggccacggcgucaagggcugggccuucgacgacggcaacgacgucuggaugggccgcaccaucuccgagaagcuccgcuccggcuacgagaccuucaaggucaucgagggcugguccaagcccaacuccaagcuccagaucaaccgccaggucaucgucgagcgcggcaaccgcuccggcuacuccggcaucuucuccgucgagggcaaguccugcaucaaccgcugcuucuacgucgagcucauccgcggccgcaaggaggagaccgaggucugguggaccuccaacuccaucgucgucuucugcggcaccuccggcaccuacggcaccggcuccuggcccgacggcgccgacaucaaccucaugcccaucuga

SEQ ID NO: 111971 - RNA, 1410 nt, Artificial Sequence; identical to SEQ ID NO: 110261
  derived and/or modified CDS sequence (opt2) from neuraminidase__InfluenzaA__ABU92814

SEQ ID NO: 111972 - RNA, 1410 nt, Artificial Sequence; identical to SEQ ID NO: 110750
  derived and/or modified CDS sequence (opt2) from neuraminidase__InfluenzaA__ABU92815

SEQ ID NO: 111973 - RNA, 1410 nt, Artificial Sequence; identical to SEQ ID NO: 110261
  derived and/or modified CDS sequence (opt2) from neuraminidase__InfluenzaA__ABU92816

SEQ ID NO: 111974 - RNA, 1410 nt, Artificial Sequence
  derived and/or modified CDS sequence (opt2) from neuraminidase__InfluenzaA__ABU92817
augaaccccaaccagaagaucaucaccaucggcuccgucucccucaccaucgccgccaucugcuuccucaugcagaucgccauccucgucaccaccgucacccuccacuucaagcagcacgagugcaacuccccccccaacaaccaggucaugcucugcgagcccaccaucaucgagcgcaacaucaccgagaucgucuaccucaccaacaccaccaucgagaaggagaucugccccaagcucgccgaguaccgcaacugguccaagccccagugcaacaucaccggcuucgcccccuucuccaaggacaacuccauccgccucuccgccggcggcgacaucugggucacccgcgagcccuacgucuccugcgaccccgacaagugcuaccaguucgcccucggccagggcaccacccucaacaacggccacuccaacgacaccguccacgaccgcacccccuaccgcacccuccucaugaacgagcucggcguccccuuccaccucggcacccgccaggucugcaucgccugguccuccuccuccugccacgacggcaaggccuggcuccacgucugcgucaccggcgacgacaagaacgccaccgccuccuucaucuacaacggccgccucgucgacuccaucggcuccugguccaagaagauccuccgcacccaggaguccgagugcgucugcaucaacggcaccugcaccgucgucaugaccgacggcuccgccuccggcaaggccgacaccaagauccucuucaucgaggagggcaagaucguccacaucuccacccucuccggcuccgcccagcacgucgaggagugcuccugcuacccccgcuaccccggcguccgcugcgucugccgcgacaacuggaagggcuccaaccgccccaucgucgacaucaacgucaaggacuacuccaucgucuccuccuacgucugcuccggccucgucggcgacaccccccgcaagaacgacuccuucuccuccucccacugccucgaccccaacaacgaggagggcggccacggcgucaagggcugggccuucgacgacggcaacgacgucuggaugggccgcaccaucuccgagaagcuccgcuccggcuacgagaccuucaaggucaucgagggcugguccaagcccaacuccaagcuccagaucaaccgccaggucaucgucgagcgcggcaaccgcuccggcuacuccggcaucuucuccgucgaguccaaguccugcaucaaccgcugcuucuacgucgagcucauccgcggccgcaaggaggagaccgaggucugguggaccuccaacuccaucgucgucuucugcggcaccuccggcaccuacggcaccggcuccuggcccgacggcgccgacaucaaccucaugcccaucuga

SEQ ID NO: 111975 - RNA, 1410 nt, Artificial Sequence; identical to SEQ ID NO: 110261
  derived and/or modified CDS sequence (opt2) from neuraminidase__InfluenzaA__ABU92818

SEQ ID NO: 111976 - RNA, 1410 nt, Artificial Sequence; identical to SEQ ID NO: 110261
  derived and/or modified CDS sequence (opt2) from neuraminidase__InfluenzaA__ABU92819

SEQ ID NO: 111977 - RNA, 1410 nt, Artificial Sequence; identical to SEQ ID NO: 110261
  derived and/or modified CDS sequence (opt2) from neuraminidase__InfluenzaA__ABU92821

SEQ ID NO: 111978 - RNA, 1410 nt, Artificial Sequence; identical to SEQ ID NO: 110261
  derived and/or modified CDS sequence (opt2) from neuraminidase__InfluenzaA__ABU92822

SEQ ID NO: 111979 - RNA, 1410 nt, Artificial Sequence; identical to SEQ ID NO: 110173
  derived and/or modified CDS sequence (opt2) from neuraminidase__InfluenzaA__ABU92823

SEQ ID NO: 111980 - RNA, 1410 nt, Artificial Sequence
  derived and/or modified CDS sequence (opt2) from neuraminidase__InfluenzaA__ABU92824
augaaccccaaccagaagaucaucaccaucggcuccgucucccucaccaucgccgccaucugcuuccucaugcagaucgccauccucgucaccaccgucacccuccacuucaagcagcacgagugcaacuccccccccaacaaccaggucaugcucugcgagcccaccaucaucgagcgcaacaucaccgagaucgucuaccucaccaacaccaccaucgagaaggagaucugccccaagcucgccgaguaccgcaacugguccaagccccagugcaacaucaccggcuucgcccccuucuccaaggacaacuccauccgccucuccgccggcggcgacaucugggucacccgcgagcccuacgucuccugcgaccccgacaagugcuaccaguucgcccucggccagggcaccacccucaacaacggccacuccaacgacaccguccacgaccgcacccccuaccgcacccuccucaugaacgagcucggcguccccuuccaccucggcacccgccaggucugcaucgccugguccuccuccuccugccacgacggcaaggccuggcuccacgucugcgucaccggcgacgacaagaacgccaccgccuccuucaucuacaacggccgccucgucgacuccaucggcuccugguccaagaagauccuccgcacccaggaguccgagugcgucugcaucaacggcaccugcaccgucgucaugaccgacggcuccgccuccggcaaggccgacaccaagauccucuucaucgaggagggcaagaucguccacaucuccacccucuccggcuccgcccagcacgucgaggagugcuccugcuacccccgcuaccccggcguccgcugcgucugccgcgacaacuggaagggcuccaaccgccccaucgucgacaucaacgucaaggacuacuccaucgucuccuccuacgucugcuccggccucgucggcgacaccccccgccgcaacgacuccuucuccuccucccacugccucgaccccaacaacgaggagggcggccacggcgucaagggcugggccuucgacgacggcaacgacgucuggaugggccgcaccaucuccgagaagcuccgcuccggcuacgagaccuucaaggucaucgagggcugguccaagcccaacuccaagcuccagaucaaccgccaggucaucgucgagcgcggcaaccgcuccggcuacuccggcaucuucuccgucgagggcaaguccugcaucaaccgcugcuucuacgucgagcucauccgcggccgcaaggaggagaccgaggucugguggaccuccaacuccaucgucgucuucugcggcaccuccggcaccuacggcaccggcuccuggcccgacggcgccgacaucaaccucaugcccaucuga

SEQ ID NO: 111981 - RNA, 1410 nt, Artificial Sequence
  derived and/or modified CDS sequence (opt2) from neuraminidase__InfluenzaA__ABU92825
augaaccccaaccagaagaucaucaccaucggcuccgucucccucaccaucuccaccaucugcuucuucaugcagaucgccauccucaucaccaccgucacccuccacuucaagcaguacgaguucaacuccccccccaacaaccaggucaugcucugcgagcccaccaucaucgagcgcaacaucaccgagaucgucuaccucaccaacaccaccaucgagaaggagaucugccccaagcucgccgaguaccgcaacugguccaagccccagugcgacaucaccggcuucgcccccuucuccaaggacaacuccauccgccucuccgccggcggcgacaucugggucacccgcgagcccuacgucuccugcgaccccaacaagugcuaccaguucgcccucggccagggcaccacccucaacaacguccacuccaacgacaccguccacgaccgcacccccuaccgcacccuccucaugaacgagcucggcguccccuuccaccucggcaccaagcaggucugcaucgccugguccuccuccuccugccacgacggcaaggccuggcuccacgucugcgucaccggcgacgacaagaacgccaccgccuccuucaucuacaacggccgccucgucgacuccaucgucuccugguccaagaagauccuccgcacccaggaguccgagugcgucugcaucaacggcaccugcaccgucgucaugaccgacggcuccgccuccggcaaggccgacaccaagauccucuucaucgaggagggcaagaucguccacaccuccacccucuccggcuccgcccagcacgucgaggagugcuccugcuacccccgcuaccccggcguccgcugcgucugccgcgacaacuggaagggcuccaaccgccccaucgucgacaucaacaucaaggacuacuccaucgucuccuccuacgucugcuccggccucgucggcgacaccccccgcaagaacgacuccuccuccuccucccacugccucgaccccaacaacgaggagggcggccacggcgucaagggcugggccuucgacgacggcaacgacgucuggaugggccgcaccaucuccgagaagucccgcuccggcuacgagaccuucaaggucaucgagggcugguccaaccccaacuccaagcuccagaucaaccgccaggucaucgucgaccgcggcaaccgcuccggcuacuccggcaucuucuccgucgagggcaaguccugcaucaaccgcugcuucuacgucgagcucauccgcggccgcaaggaggagaccgagguccucuggaccuccaacuccaucgucgucuucugcggcaccuccggcaccuacggcaccggcuccuggcccgacggcgccgacaucaaccucaugcccaucuga

SEQ ID NO: 111982 - RNA, 1410 nt, Artificial Sequence; identical to SEQ ID NO: 111981
  derived and/or modified CDS sequence (opt2) from neuraminidase__InfluenzaA__ABU92826

SEQ ID NO: 111983 - RNA, 1410 nt, Artificial Sequence; identical to SEQ ID NO: 110261
  derived and/or modified CDS sequence (opt2) from neuraminidase__InfluenzaA__ABU92827

SEQ ID NO: 111984 - RNA, 1410 nt, Artificial Sequence; identical to SEQ ID NO: 110261
  derived and/or modified CDS sequence (opt2) from neuraminidase__InfluenzaA__ABU92828

SEQ ID NO: 111985 - RNA, 1410 nt, Artificial Sequence; identical to SEQ ID NO: 110750
  derived and/or modified CDS sequence (opt2) from neuraminidase__InfluenzaA__ABU92829

SEQ ID NO: 111986 - RNA, 1410 nt, Artificial Sequence
  derived and/or modified CDS sequence (opt2) from neuraminidase__InfluenzaA__ABU92830
augaaccccaaccagaagaucaucaccaucggcuccgucucccucaccaucgccgccaucugcuuccucaugcagaucgccauccucgucaccaccgucacccuccacuucaagcagcacgagugcaacuccccccccaacaaccaggucaugcucugcgagcccaccaucaucgagcgcaacaucaccgagaucgucuaccucaccaacaccaccaucgagaaggagaucugccccaagcucgccgaguaccgcaacugguccaagccccagugcaacaucaccggcuucgcccccuucuccaaggacaacuccauccgccucuccgccggcggcgacaucugggucacccgcgagcccuacgucuccugcgaccccgacaagugcuaccaguucgcccucggccagggcaccacccucaacaacggccacuccaacgacaccguccacgaccgcacccccuaccgcacccuccucaugaacgagcucggcguccccuuccaccucggcacccgccaggucugcaucgccugguccuccuccuccugccacgacggcaaggccuggcuccacgucugcgucaccggcgacgacaagaacgccaccgccuccuucaucuacaacggccgccucgucgacuccaucggcuccugguccaagaagauccuccgcacccaggaguccgagugcgucugcaucaacggcaccugcaccgucgucaugaccgacggcuccgccuccggcaaggccgacaccaagauccucuucaucgaggagggcaagaucguccacaucuccacccucuccggcuccgcccagcacgucgaggagugcuccugcuacccccgcuaccccggcguccgcugcgucugccgcgacaacuggaagggcuccaaccgccccaucgucgacaucaacgucaaggacuacuccaucgucuccuccuacgucugcuccggccucgucggcgacaccccccgcaagaacgacuccuucuccuccucccgcugccucgaccccaacaacgaggagggcggccacggcgucaagggcugggccuucgacgacggcaacgacgucuggaugggccgcaccaucuccgagaagcuccgcuccggcuacgagaccuucaaggucaucgagggcugguccaagcccaacuccaagcuccagaucaaccgccaggucaucgucgagcgcggcaaccgcuccggcuacuccggcaucuucuccgucgagggcaaguccugcaucaaccgcugcuucuacgucgagcucauccgcggccgcaaggaggagaccgaggucugguggaccuccaacuccaucgucgucuucugcggcaccuccggcaccuacggcaccggcuccuggcccgacggcgccgacaucaaccucaugcccaucuga

SEQ ID NO: 111987 - RNA, 1410 nt, Artificial Sequence; identical to SEQ ID NO: 110261
  derived and/or modified CDS sequence (opt2) from neuraminidase__InfluenzaA__ABU92831

SEQ ID NO: 111988 - RNA, 1410 nt, Artificial Sequence; identical to SEQ ID NO: 110261
  derived and/or modified CDS sequence (opt2) from neuraminidase__InfluenzaA__ABU92832

SEQ ID NO: 111989 - RNA, 1410 nt, Artificial Sequence; identical to SEQ ID NO: 110261
  derived and/or modified CDS sequence (opt2) from neuraminidase__InfluenzaA__ABU92833

SEQ ID NO: 111990 - RNA, 1410 nt, Artificial Sequence
  derived and/or modified CDS sequence (opt2) from neuraminidase__InfluenzaA__ABU92834
augaaccccaaccagaagaucaucaccaucggcuccgucucccucaccaucgccgccaucugcuuccucaugcacaucgccauccucgucaccaccgucacccuccacuucaagcagcacgagugcaacuccccccccaacaaccaggucaugcucugcgagcccaccaucaucgagcgcaacaucaccgagaucgucuaccucaccaacaccaccaucgagaaggagaucugccccaagcucgccgaguaccgcaacugguccaagccccagugcaacaucaccggcuucgcccccuucuccaaggacaacuccauccgccucuccgccggcggcgacaucugggucacccgcgagcccuacgucuccugcgaccccgacaagugcuaccaguucgcccucggccagggcaccacccucaacaacggccacuccaacgacaccguccacgaccgcacccccuaccgcacccuccucaugaacgagcucggcguccccuuccaccucggcacccgccaggucugcaucgccugguccuccuccuccugccacgacggcaaggccuggcuccacgucugcgucaccggcgacgacgagaacgccaccgccuccuucaucuacaacggccgccucgucgacuccaucggcuccugguccaagaagauccuccgcacccaggaguccgagugcgucugcaucaacggcaccugcaccgucgucaugaccgacggcuccgccuccggcaaggccgacaccaagauccucuucaucgaggagggcaagaucguccacaucuccacccucuccggcuccgcccagcacgucgaggagugcuccugcuacccccgcuaccccggcguccgcugcgucugccgcgacaacuggaagggcuccaaccgccccaucgucgacaucaacgucaaggacuacuccaucgucuccuccuacgucugcuccggccucgucggcgacaccccccgcaagaacgacuccuucuccuccucccacugccucgaccccaacaacgaggagggcggccacggcgucaagggcugggccuucgacgacggcaacgacgucuggaugggccgcaccaucuccgagaagcuccgcuccggcuacgagaccuucaaggucaucgagggcugguccaagcccaacuccaagcuccagaucaaccgccaggucaucgucgagcgcggcaaccgcuccggcuacuccggcaucuucuccgucgagggcaaguccugcaucaaccgcugcuucuacgucgagcucauccgcggccgcaaggaggagaccgaggucugguggaccuccaacuccaucgucgucuucugcggcaccuccggcaccuacggcaccggcuccuggcccgacggcgccgacaucucccucaugcccaucuga

SEQ ID NO: 111991 - RNA, 1410 nt, Artificial Sequence; identical to SEQ ID NO: 110261
  derived and/or modified CDS sequence (opt2) from neuraminidase__InfluenzaA__ABU92835

SEQ ID NO: 111992 - RNA, 1410 nt, Artificial Sequence; identical to SEQ ID NO: 110261
  derived and/or modified CDS sequence (opt2) from neuraminidase__InfluenzaA__ABU92836

SEQ ID NO: 111993 - RNA, 1410 nt, Artificial Sequence
  derived and/or modified CDS sequence (opt2) from neuraminidase__InfluenzaA__ABU92837
augaaccccaaccagaagaucaucaccaucggcuccgucucccucaccaucuccaccaucugcuucuucaugcagaucgccauccucaucaccaccgucacccuccacuucaagcaguacgaguucaacuccccccccaacaaccaggucaugcucugcgagcccaccaucaucgagcgcaacaucaccgagaucgucuaccucaccaacaccaccaucgagaaggagaucugccccaagcucgccgaguaccgcaacugguccaagccccagugcgacaucaccggcuucgcccccuucuccaaggacaacuccauccgccucuccgccggcggcgacaucugggucacccgcgagcccuacgucuccugcgaccccgacaagugcuaccaguucgcccucggccagggcaccacccucaacaacguccacuccaacgacaccguccacgaccgcacccccuaccgcacccuccucaugaacgagcucggcguccccuuccaccucggcaccaagcaggucugcaucgccugguccuccuccuccugccacgacggcaaggccuggcuccacgucugcgucaccggcgacgacaagaacgccaccgccuccuucaucuacaacggccgccucgucgacuccaucgucuccugguccaagaagauccuccgcacccaggaguccgagugcgucugcaucaacggcaccugcaccgucgucaugaccgacggcuccgccuccggcaaggccgacaccaagauccucuucaucgaggagggcaagaucguccacaccuccacccucuccggcuccgcccagcacgucgaggagugcuccugcuacccccgcuaccccggcguccgcugcgucugccgcgacaacuggaagggcuccaaccgccccaucgucgacaucaacaucaaggacuacuccaucgccuccuccuacgucugcuccggccucgucggcgacaccccccgcaagaacgacuccuccuccuccucccacugccucgaccccaacaacgaggagggcggccacggcgucaagggcugggccuucgacgacggcaacgacgucuggaugggccgcaccaucuccgagaagcuccgcuccggcuacgagaccuucaaggucaucgagggcugguccaaccccaacuccaagcuccagaucaaccgccaggucaucgucgaccgcggcaaccgcuccggcuacuccggcaucuucuccgucgagggcaaguccugcgucaaccgcugcuucuacgucgagcucauccgcggccgcaaggaggagaccgagguccucuggaccuccaacuccaucgucgucuucugcggcaccuccggcaccuacggcaccggcuccuggcccgacggcgccgacaucaaccucaugcccaucuga

SEQ ID NO: 111994 - RNA, 1410 nt, Artificial Sequence; identical to SEQ ID NO: 110261
  derived and/or modified CDS sequence (opt2) from neuraminidase__InfluenzaA__ABU92838

SEQ ID NO: 111995 - RNA, 1410 nt, Artificial Sequence; identical to SEQ ID NO: 110097
  derived and/or modified CDS sequence (opt2) from neuraminidase__InfluenzaA__ABU92839

SEQ ID NO: 111996 - RNA, 1410 nt, Artificial Sequence
  derived and/or modified CDS sequence (opt2) from neuraminidase__InfluenzaA__ABU92840
augaaccccaaccagaagaucaucaccaucggcuccgucucccucaccaucgccaccaucugcuuccucaugcagaucgccauccucgucaccaccgucacccuccacuucaagcaguacgagugcaacuccccccccaacaaccaggucaugcucugcgagcccaccaucaucgagcgcaacaucaccgagaucgucuaccucaccaacaccaccaucgagaaggagaucugccccaagcucgccgaguaccgcaacugguccaagccccagugcaacaucaccggcuucgcccccuucuccaaggacaacuccauccgccucuccgccggcggcgacaucugggucacccgcgagcccuacgucuccugcgaccccgacaagugcuaccaguucgcccucggccagggcaccacccucaacaacggccacuccaacgacaccguccacgaccgcacccccuaccgcacccuccucaugaacgagcucggcguccccuuccaccucggcaccaagcaggucugcaucgccugguccuccuccuccugccacgacggcaaggccuggcuccacgucugcgucaccggcgacgacgagaacgccaccgccuccuucaucuacaacggccgccucgucgacuccaucggcuccugguccaagaagauccuccgcacccaggaguccgagugcgucugcaucaacggcaccugcaccgucgucaugaccgacggcuccgccuccggcaaggccgacaccaagauccucuucaucgaggagggcaagaucguccacaucucccuccucuccggcuccgcccagcacgucgaggagugcuccugcuacccccgcuaccccggcguccgcugcgucugccgcgacaacuggaagggcuccaaccgccccaucgucgacaucaacgucaaggacuacuccaucgucuccuccuacgucugcuccggccucgucggcgacaccccccgcaagaacgacuccuccuccuccucccacugccucgaccccaacaacgaggagggcggccacggcgucaagggcugggccuucgacgacggcaacgacgucuggaugggccgcaccaucuccgagaagcuccgcuccggcuacgagaccuucaaggucaucgagggcugguccaagcccaacuccaagcuccagaucaaccgccaggucaucgucgaccgcgacaaccgcuccggcuacuccggcaucuucuccgucgagggcaaguccugcaucaaccgcugcuucuacgucgagcucauccgcggccgcaagcaggagaccgagguccucuggaccuccaacuccaucgucgucuucugcggcaccuccggcaccuacggcaccggcuccuggcccgacggcgccgacaucaaccucaugcccaucuga

SEQ ID NO: 111997 - RNA, 1410 nt, Artificial Sequence
  derived and/or modified CDS sequence (opt2) from neuraminidase__InfluenzaA__ABU92841
augaaccccaaccagaagaucaucaccaucggcuccgucucccucaccaucgccaccaucugcuuccucaugcagaucgccauccucgucaccaccgucacccuccacuucaagcaguacgagugcaacuccccccccaacaaccaggucaugcucugcgagcccaccaucaucgagcgcaacaucaccgagaucgucuaccucaccaacaccaccaucgagaaggagaucugccccaagcucgccgaguaccgcaacugguccaagccccagugcaacaucaccggcuucgcccccuucuccaaggacaacuccauccgccucuccgccggcggcgacaucugggucacccgcgagcccuacgucuccugcgaccccgacaagugcuaccaguucgcccucggccagggcaccacccucaacaacggccacuccaacgacaccguccacgaccgcacccccuaccgcacccuccucaugaacgagcucggcguccccuuccaccucggcaccaagcaggucugcaucgccugguccuccuccuccugccacgacggcaaggccuggcuccacgucugcgucaccggcgacgacgagaacgccaccgccuccuucaucuacaacggccgccucgucgacuccaucggcuccugguccaagaagauccuccgcacccaggaguccgagugcgucugcaucaacggcaccugcaccgucgucaugaccgacggcuccgccuccggcaaggccgacaccaagauccucuucaucgaggagggcaagaucguccacaccucccuccucuccggcuccgcccagcacgucgaggagugcuccugcuacccccgcuaccccggcguccgcugcgucugccgcgacaacuggaagggcuccaaccgccccaucgucgacaucaacgucaaggacuacuccaucgucuccuccuacgucugcuccggccucgucggcgacaccccccgcaagaacgacuccuccuccuccucccacugccucgaccccaacaacgaggagggcggccacggcgucaagggcugggccuucgacgacggcaacgacgucuggaugggccgcaccaucuccgagaagcuccgcuccggcuacgagaccuucaaggucaucgagggcugguccaagcccaacuccaagcuccagaucaaccgccaggucaucgucgaccgcgacaaccgcuccggcuacuccggcaucuucuccgucgagggcaaguccugcaucaaccgcugcuucuacgucgagcucauccgcggccgcaagcaggagaccgagguccucuggaccuccaacuccaucgucgucuucugcggcaccuccggcaccuacggcaccggcuccuggcccgacggcgccgacaucaaccucaugcccaucuga

SEQ ID NO: 111998 - RNA, 1410 nt, Artificial Sequence
  derived and/or modified CDS sequence (opt2) from neuraminidase__InfluenzaA__ABU92842
augaaccccaaccagaagaucaucaccaucggcuccgucucccucaccaucgccaccaucugcuuccucaugcagaucgccauccucgucaccaccgucacccuccacuucaagcaguacgacugcaacuccccccccaacaaccaggucaugcucugcgagcccaccaucaucgagcgcaacaucaccgagaucgucuaccucaccaacaccaccaucgagaaggagaucugccccaagcucgccgaguaccgcaacugguccaagccccagugcaacaucaccggcuucgcccccuucuccaaggacaacuccauccgccucuccgccggcggcgacaucugggucacccgcgagcccuacgucuccugcgaccccgacaagugcuaccaguucgcccucggccagggcaccacccucaacaacggccacuccaacgacaccguccacgaccgcacccccuaccgcacccuccucaugaacgagcucggcguccccuuccaccucggcaccaagcaggucugcaucgccugguccuccuccuccugccacgacggcaaggccuggcuccacgucugcgucaccggcgacgacgagaacgccaccgccuccuucaucuacaacggccgccucgucgacuccaucggcuccugguccaagaagauccuccgcacccaggaguccgagugcgucugcaucaacggcaccugcaccgucgucaugaccgacggcuccgccuccggcaaggccgacaccaagauccucuucaucgaggagggcaagaucguccacaccucccuccucuccggcuccgcccagcacgucgaggagugcuccugcuacccccgcuaccccggcguccgcugcgucugccgcgacaacuggaagggcuccaaccgccccaucgucgacaucaacgucaaggacuacuccaucgucuccuccuacgucugcuccggccucgucggcgacaccccccgcaagaacgacuccuccuccuccucccacugccucgaccccaacaacgaggagggcggccacggcgucaagggcugggccuucgacgacggcaacgacgucuggaugggccgcaccaucuccgagaagcuccgcuccggcuacgagaccuucaaggucaucgagggcugguccaagcccaacuccaagcuccagaucaaccgccaggucaucgucgaccgcggcaaccgcuccggcuacuccggcaucuucuccgucgagggcaaguccugcaucaaccgcugcuucuacgucgagcucauccgcggccgcaagcaggagaccgagguccucuggaccuccaacuccaucgucgucuucugcggcaccuccggcaccuacggcaccggcuccuggcccgacggcgccgacaucaaccucaugcccaucuga

SEQ ID NO: 111999 - RNA, 1410 nt, Artificial Sequence; identical to SEQ ID NO: 110097
  derived and/or modified CDS sequence (opt2) from neuraminidase__InfluenzaA__ABU92843

SEQ ID NO: 112000 - RNA, 1410 nt, Artificial Sequence; identical to SEQ ID NO: 111785
  derived and/or modified CDS sequence (opt2) from neuraminidase__InfluenzaA__ABU92844

SEQ ID NO: 112001 - RNA, 1410 nt, Artificial Sequence; identical to SEQ ID NO: 110097
  derived and/or modified CDS sequence (opt2) from neuraminidase__InfluenzaA__ABU92845

SEQ ID NO: 112002 - RNA, 1410 nt, Artificial Sequence; identical to SEQ ID NO: 110097
  derived and/or modified CDS sequence (opt2) from neuraminidase__InfluenzaA__ABU92846

SEQ ID NO: 112003 - RNA, 1410 nt, Artificial Sequence; identical to SEQ ID NO: 110097
  derived and/or modified CDS sequence (opt2) from neuraminidase__InfluenzaA__ABU92847

SEQ ID NO: 112004 - RNA, 1410 nt, Artificial Sequence; identical to SEQ ID NO: 110097
  derived and/or modified CDS sequence (opt2) from neuraminidase__InfluenzaA__ABU92848

SEQ ID NO: 112005 - RNA, 1410 nt, Artificial Sequence; identical to SEQ ID NO: 110750
  derived and/or modified CDS sequence (opt2) from neuraminidase__InfluenzaA__ABU92849

SEQ ID NO: 112006 - RNA, 1410 nt, Artificial Sequence
  derived and/or modified CDS sequence (opt2) from neuraminidase__InfluenzaA__ABU92850
augaaccccaaccagaagaucaucaccaucggcuccgucucccucaccaucuccaccaucugcuucuucaugcagaucgccauccucaucaccaccgucacccuccacuucaagcaguacgaguucaacuccccccccaacaaccaggucaugcucugcgagcccaccaucaucgagcgcaacaucaccgagaucgucuaccucaccaacaccaccaucgagaaggagaucugccccaagcucgucgaguaccgcaacugguccaagccccagugcgacaucaccggcuucgcccccuucuccaaggacaacuccauccgccucuccgccggcggcgacaucugggucacccgcgagcccuacgucuccugcgaccccgacaagugcuaccaguucgcccucggccagggcaccacccucaacaacguccacuccaacgacaccguccacgaccgcacccccuaccgcacccuccucaugaccgagcucggcguccccuuccaccucggcaccaagcaggucugcaucgccugguccuccuccuccugccacgacggcaaggccuggcuccacgucugcgucaccggcgacgacaagaacgccaccgccuccuucaucuacaacggccgccucgucgacuccaucgucuccugguccaagaagauccuccgcacccaggaguccgagugcgucugcaucaacggcaccugcaccgucgucaugaccgacggcuccgccuccggcaaggccgacaccaagauccucuucaucgaggagggcaagaucguccacaccuccacccucuccggcuccgcccagcacgucgaggagugcuccugcuacccccgcuaccccggcguccgcugcgucugccgcgacaacuggaagggcuccaaccgccccaucgucgacaucaacaucaaggacuacuccaucgucuccuccuacgucugcuccggccucgucggcgacaccccccgcaagaacgacuccuccuccuccucccacugccucgaccccaacaacgaggagggcggccacggcgucaagggcugggccuucgacgacggcaacgacgucuggaugggccgcaccaucuccgagaagcuccgcuccggcuacgagaccuucaaggucaucgagggcugguccaaccccaacuccaagcuccagaucaaccgccaggucaucgucgaccgcggcaaccgcuccggcuacuccggcaucuucuccgucgagggcaaguccugcaucaaccgcugcuucuacgucgagcucauccgcggccgcaaggaggagaacgagguccucuggaccuccaacuccaucgucgucuucugcggcaccuccggcaccuacggcaccggcuccuggcccgacggcgccgacaucaaccucaugcccaucuga

SEQ ID NO: 112007 - RNA, 1410 nt, Artificial Sequence
  derived and/or modified CDS sequence (opt2) from neuraminidase__InfluenzaA__ABU92851
augaaccccaaccagaagaucaucaccaucggcuccgucucccucaccaucuccaccaucugcuucuucaugcagaucgccauccucaucaccaccgucacccuccacuucaagcaguacgaguucaacuccccccccaacaaccaggucaugcucugcgagcccaccaucaucgagcgcaacaucaccgagaucgucuaccucaccaacaccaccaucgagaaggagaucugccccaagcucgccgaguaccgcaacugguccaagccccagugcuccaucaccggcuucgcccccuucuccaaggacaacuccauccgccucuccgccggcggcgacaucugggucacccgcgagcccuacgucuccugcgaccccgacaagugcuaccaguucgcccucggccagggcaccacccucaacaacguccacuccaacgacaccguccacgaccgcacccccuaccgcacccuccucaugaacgagcucggcguccccuuccaccucggcaccaagcaggucugcaucgccugguccuccuccuccugccacgacggcaaggccuggcuccacgucugcgucaccggcgacgacaagaacgccaccgccuccuucaucuacaacggccgccucgucgacuccaucgucuccugguccaaggagauccuccgcacccaggaguccgagugcgucugcaucaacggcaccugcaccgucgucaugaccgacggcuccgccuccggcaaggccgacaccaagauccucuucaucgaggagggcaagaucguccacaccuccacccucuccggcuccgcccagcacgucgaggagugcuccugcuacccccgcuaccccggcguccgcugcgucugccgcgacaacuggaagggcuccaaccgccccaucgucgacaucaacaucaaggacuacuccaucgucuccuccuacgucugcuccggccucgucggcgacaccccccgcaaggacgacuccuccuccuccucccacugccucgaccccaacaacgaggagggcggccacggcgucaagggcugggccuucgacgacggcaacgacgucuggaugggccgcaccaucuccgagaagucccgcuccggcuacgagaccuucaaggucaucgagggcugguccaaccccaacuccaagcuccagaucaaccgccaggucaucgucgaccgcggcaaccgcuccggcuacuccggcaucuucuccgucgagggcaaguccugcaucaaccgcugcuucuacgucgagcucauccgcggccgcaaggaggagaccgagguccucuggaccuccaacuccaucgucgucuucugcggcaccuccggcaccuacggcaccggcuccuggcccgacggcgccgacaucaaccucaugcccaucuga

SEQ ID NO: 112008 - RNA, 1410 nt, Artificial Sequence; identical to SEQ ID NO: 110261
  derived and/or modified CDS sequence (opt2) from neuraminidase__InfluenzaA__ABU92852

SEQ ID NO: 112009 - RNA, 1410 nt, Artificial Sequence
  derived and/or modified CDS sequence (opt2) from neuraminidase__InfluenzaA__ABU92853
augaaccccaaccagaagaucaucaccaucggcuccgucucccucaccaucgccgccaucugcuuccucaugcagaucgccauccucgucaccaccgucacccuccacuucaagcagcacgagugcaacuccccccccaagaaccaggucaugcucugcgagcccaccaucaucgagcgcaacaucaccgagaucgucuacaugaccaacaccaccaucgagaaggagaucugccccaagcucgccgaguaccgcaacugguccaagccccagugcaacaucaccggcuucgcccccuucuccaaggacaacuccauccgccucuccgccggcggcgacaucugggucacccgcgagcccuacgucuccugcgaccccgacaagugcuaccaguucgcccucggccagggcaccacccucaacaacggccacuccaacgacaccguccacgaccgcacccccuaccgcacccuccucaugaacgagcucggcguccccuuccaccucggcacccgccaggucugcaucgccugguccuccuccuccugccacgacggcaaggccuggcuccacgucugcgucaccggcgacgacaagaacgccaccgccuccuucaucuacaacggccgccucgucgacuccaucgucuccugguccaagaagauccuccgcacccaggaguccgagugcgucugcaucaacggcaccugcaccgucgucaugaccgacggcuccgccuccggcaaggccgacaccaagauccucuucaucgaggagggcaagaucguccacaucuccacccucuccggcuccgcccagcacgucgaggagugcuccugcuacccccgcuaccccggcguccgcugcgucugccgcgacaacuggaagggcuccaaccgccccaucgucgacaucaacgucaaggacuacuccaucgucuccuccuacgucugcuccggccucgucggcgacaccccccgcaagaacgacuccuucuccuccucccacugccucgaccccaacaacgaggagggcggccacggcgucaagggcugggccuucgacgacggcaacgacgucuggaugggccgcaccaucuccgagaagcuccgcuccggcuacgagaccuucaaggucaucgagggcugguccaagcccaacuccaagcuccagaucaaccgccaggucaucgucgagcgcggcaaccgcuccggcuacuccggcaucuucuccgucgagggcaaguccugcaucaaccgcugcuucuacgucgagcucauccgcggccgcaaggaggagaccgaggucugguggaccuccaacuccaucgucgucuucugcggcaccuccggcaccuacggcaccggcuccuggcccgacggcgccgacaucaaccucaugcccaucuga

SEQ ID NO: 112010 - RNA, 1410 nt, Artificial Sequence; identical to SEQ ID NO: 110261
  derived and/or modified CDS sequence (opt2) from neuraminidase__InfluenzaA__ABU92854

SEQ ID NO: 112011 - RNA, 1410 nt, Artificial Sequence
  derived and/or modified CDS sequence (opt2) from neuraminidase__InfluenzaA__ABU92855
augaaccccaaccagaagaucaucaccaucggcuccgucucccucaccaucgccgccaucugcuuccucaugcagaucgccauccucgucaccaccgucacccuccacuucaagcagcacgagugcaacuccccccccaacaaccaggucaugcucugcgagcccaccaucaucgagcgcaacaucaccgagaucgucuaccucaccaacaccaccaucgagaaggagaucugccccaagcucgccgaguaccgcaacugguccaagccccagugcaacaucaccggcuucgcccccuucuccaaggacaacuccauccgccucuccgccggcggcgacaucugggucacccgcgagcccuacgucuccugcgaccccgacaagugcuaccaguucgcccucggccagggcaccacccucaacaacggccacuccaacgacaccguccacgaccgcacccccuaccgcacccuccucaugaacgagcucggcguccccuuccaccucggcacccgccaggucugcaucgccugguccuccuccuccugccacgacggcaaggccuggcuccacgucugcgucaccggcgacgacaagaacgccaccgccuccuucaucuacaacggccgccucgucgacuccaucggcuccugguccaagaagauccuccgcacccaggaguccgagugcgucugcaucaacggcaccugcaccgucgucaugaccgacggcuccgccuccggcaaggccgacaccaagauccucuucaucgaggagggcaagaucguccacaucuccacccucuccggcuccgcccagcacgucgaggagugcuccugcuacccccgcuaccccggcguccgcugcgucugccgcgacaacuggaagggcuccaaccgccccaucgucgacaucaacgucaaggacuacuccaucgucuccuccuacgucugcuccggccucgucggcgacaccccccgcaagaacgacuccuucuccuccucccacugccucgaccccaacaacgaggagggcggccacggcgucaagggcugggccuucgacgacggcaacgacgucuggaugggccgcaccaucuccgagaagcuccgcuccggcuacgagaccuucaaggucaucgagggcugguccaagcccaacuccaagcuccagaucaaccgccaggucaucaucgagcgcggcaaccgcuccggcuacuccggcaucuucuccgucgagggcaaguccugcaucaaccgcugcuucuacgucgagcucauccgcggccgcaaggaggagaccgaggucugguggaccuccaacuccaucgucgucuucugcggcaccuccggcaccuacggcaccggcuccuggcccgacggcgccgacaucaaccucaugcccaucuga

SEQ ID NO: 112012 - RNA, 1410 nt, Artificial Sequence; identical to SEQ ID NO: 110181
  derived and/or modified CDS sequence (opt2) from neuraminidase__InfluenzaA__ABU92856

SEQ ID NO: 112013 - RNA, 1410 nt, Artificial Sequence; identical to SEQ ID NO: 110261
  derived and/or modified CDS sequence (opt2) from neuraminidase__InfluenzaA__ABU92857

SEQ ID NO: 112014 - RNA, 1410 nt, Artificial Sequence
  derived and/or modified CDS sequence (opt2) from neuraminidase__InfluenzaA__ABU92858
augaaccccaaccagaagaucaucaccaucggcuccgucucccucaccaucuccaccaucugcuucuucaugcagaucgccauccucaucaccaccgucacccuccacuucaagcaguacgaguucaacuccccccccaacaaccaggucauccucugcgagcccaccaucaucgagcgcaacaucaccgagaucgucuaccucaccaacaccaccaucgagaaggagaucugccccaagcucgccgaguaccgcaacugguccaagccccagugcgacaucaccggcuucgcccccuucuccaaggacaacuccauccgccucuccgccggcggcgacaucugggucacccgcgagcccuacgucuccugcgaccccgacaagugcuaccaguucgcccucggccagggcaccacccucaacaacguccacuccaacgacaccguccacgaccgcacccccuaccgcacccuccucaugaacgagcucggcguccccuuccaccucggcaccaagcaggucugcaucgccugguccuccuccuccugccacgacggcaaggccuggcuccacgucugcgucaccggcgacgacaagaacgccaccgccuccuucaucuacaacggccgccucgucgacuccaucgucuccugguccaagaagauccuccgcacccaggaguccgagugcgucugcaucaacggcaccugcaccgucgucaugaccgacggcuccgccuccggcaaggccgacaccaagauccucuucaucgaggagggcaagaucguccacaccuccacccucuccggcuccgcccagcacgucgaggagugcuccugcuacccccgcuaccccggcguccgcugcgucugccgcgacaacuggaagggcuccaaccgccccaucgucgacaucaacaucaaggacuacuccaucgucuccuccuacgucugcuccggccucgucggcgacaccccccgcaagaacgacuccuccuccuccucccacugccucgaccccaacaacgaggagggcggccacggcgucaagggcugggccuucgacgacggcaacgacgucuggaugggccgcaccaucuccgagaagcuccgcuccggcuacgagaccuucaaggucaucgagggcugguccaaccccaacuccaagcuccagaucaaccgccaggucaucgucgaccgcggcaaccgcuccggcuacuccggcaucuucuccgucgagggcaaguccugcaucaaccgcugcuucuacgucgagcucauccgcggccgcaaggaggagaccgagguccucuggaccuccaacuccaucgucgucuucugcggcaccuccggcaccuacggcaccggcuccuggcccgacggcgccgacaucaaccucaugcccaucuga

SEQ ID NO: 112015 - RNA, 1410 nt, Artificial Sequence
  derived and/or modified CDS sequence (opt2) from neuraminidase__InfluenzaA__ABU92859
augaaccccaaccagaagaucaucaccaucggcuccgucucccucaccaucgccgccaucugcuuccucaugcagaucgccauccucgucaccaccgucacccuccacuucaagcagcacgagugcaacuccccccccaacaaccaggucaugcucugcgagcccaccaucaucgagcgcaacaucaccgagaucgucuaccucaccaacaccaccaucgagaaggagaucugccccaagcucgccggcuaccgcaacugguccaagccccagugcaacaucaccggcuucgcccccuucuccaaggacaacuccauccgccucuccgccggcggcgacaucugggucacccgcgagcccuacgucuccugcgaccccgacaagugcuaccaguucgcccucggccagggcaccacccucaacaacggccacuccaacgacaccguccacgaccgcacccccuaccgcacccuccucaugaacgagcucggcguccccuuccaccucggcacccgccaggucugcaucgccugguccuccuccuccugccacgacggcaaggccuggcuccacgucugcgucaccggcgacgacaagaacgccaccgccuccuucaucuacaacggccgccucgucgacuccaucggcuccugguccaagaagauccuccgcacccaggaguccgagugcgucugcaucaacggcaccugcaccgucgucaugaccgacggcuccgccuccggcaaggccgacaccaagauccucuucaucgaggagggcaagaucguccacaucuccacccucuccggcuccgcccagcacgucgaggagugcuccugcuacccccgcuaccccggcguccgcugcgucugccgcgacaacuggaagggcuccaaccgccccaucgucgacaucaacgucaaggacuacuccaucgucuccuccuacgucugcuccggccucgucggcgacaccccccgcaagaacgacuccuucuccuccucccacugccucgaccccaacaacgaggagggcggccacggcgucaagggcugggccuucgacgacggcaacgacgucuggaugggccgcaccaucuccgagaagcuccgcuccggcuacgagaccuucaaggucaucgagggcugguccaagcccaacuccaagcuccagaucaaccgccaggucaucgucgagcgcggcaaccgcuccggcuacuccggcaucuucuccgucgagggcaaguccugcaucaaccgcugcuucuacgucgagcucauccgcggccgcaaggaggagaccgaggucugguggaccuccaacuccaucgucgucuucugcggcaccuccggcaccuacggcaccggcuccuggcccgacggcgccgacaucaaccucaugcccaucuga

SEQ ID NO: 112016 - RNA, 1410 nt, Artificial Sequence
  derived and/or modified CDS sequence (opt2) from neuraminidase__InfluenzaA__ABU92860
augaaccccaaccagaagaucaucaccaucggcuccgucucccucaccaucgccgccaucugcuuccucaugcagaucgccauccucgucaccaccgucacccuccacuucaagcagcacgagugcaacuccccccccaacaaccaggucaugcucugcgagcccaccaucaucgagcgcaacaucaccgagaucgucuaccucaccaacaccaccaucgagaaggagaucugccccaagcucgccgaguaccgcaacugguccaagccccagugcaacaucaccggcuucgcccccuucuccaaggacaacuccauccgccucuccgccggcggcgacaucugggucacccgcgagcccuacgucuccugcgaccccgacaagugcuaccaguucgcccucggccagggcaccacccucaacaacggccacuccaacgacaccguccacgaccgcacccccuaccgcacccuccucaugaacgagcucggcguccccuuccaccucggcacccgccaggucugcaucgccugguccuccuccuccugccacgacggcaaggccuggcuccacgucugcgucaccggcgacgacaagaacgccaccgccuccuucaucuacaacggccgccucgucgacuccaucggcuccugguacaagaagauccuccgcacccaggaguccgagugcgucugcaucaacggcaccugcaccgucgucaugaccgacggcuccgccuccggcaaggccgacaccaagauccucuucaucgaggagggcaagaucguccacaucuccacccucuccggcuccgcccagcacgucgaggagugcuccugcuacccccgcuaccccggcguccgcugcgucugccgcgacaacuggaagggcuccaaccgccccaucgucgacaucaacgucaaggacuacuccaucaucuccuccuacgucugcuccggccucgucggcgacaccccccgcaagaacgacuccuucuccuccucccacugccucgaccccaacaacgaggagggcggccacggcgucaagggcugggccuucgacgacggcaacgacgucuggaugggccgcaccaucuccgagaagcuccgcuccggcuacgagaccuucaaggucaucgagggcugguccaagcccaacuccaagcuccagaucaaccgccaggucaucgucgagcgcggcaaccgcuccggcuacuccggcaucuucuccgucgagggcaaguccugcaucaaccgcugcuucuacgucgagcucauccgcggccgcaaggaggagaccgaggucugguggaccuccaacuccaucgucgucuucugcggcaccuccggcaccuacggcaccggcuccuggcccgacggcgccgacaucaaccucaugcccaucuga

SEQ ID NO: 112017 - RNA, 1410 nt, Artificial Sequence
  derived and/or modified CDS sequence (opt2) from neuraminidase__InfluenzaA__ABU92861
augaaccccaaccagaagaucaucaccaucggcuccgucucccucaccaucgccgccaucugcuuccucaugcagaucgccauccucgucaccaccgucacccuccacuucaagcagcacgagugcaacuccccccccaacaaccaggucaugcucugcgagcccaccaucaucgagcgcaacaucaccgagaucgucuaccucaccaacaccaccaucgagaaggagaucugccccaagcucgccgaguaccgcaacugguccaagccccagugcaacaucaccggcuucgcccccuucuccaaggacaacuccauccgccucuccgccggcggcgacaucugggucacccgcgagcccuacgucuccugcgaccccgacaagugcuaccaguucgcccucggccagggcaccacccucaacaacggccacuccaacgacaccguccacgaccgcacccccuaccgcacccuccucaugaacgagcucggcguccccuuccaccucggcacccgccaggucugcauggccugguccuccuccuccugccacgacggcaaggccuggcuccacgucugcgucaccggcgacgacaagaacgccaccgccuccuucaucuacaacggccgccucgucgacuccaucggcuccugguccaagaagauccuccgcacccaggaguccgagugcgucugcaucaacggcaccugcaccgucgucaugaccgacggcuccgccuccggcaaggccgacaccaagauccucuucaucgaggagggcaagaucguccacaucuccacccucuccggcuccgcccagcacgucgaggagugcuccugcuacccccgcuaccccggcguccgcugcgucugccgcgacaacuggaagggcuccaaccgccccaucgucgacaucaacgucaaggacuacuccaucgucuccuccuacgucugcuccggccucgucggcgacaccccccgcaagaacgacuccuucuccuccucccacugccucgaccccaacaacgaggagggcggccacggcgucaagggcugggccuucgacgacggcaacgacgucuggaugggccgcaccaucuccgagaagcuccgcuccggcuacgagaccuucaaggucaucgagggcugguccaagcccaacuccaagcuccagaucaaccgccaggucaucgucgagcgcggcaaccgcuccggcuacuccggcaucuucuccgucgagggcaaguccugcaucaaccgcugcuucuacgucgagcucauccgcggccgcaaggaggagaccgaggucugguggaccuccaacuccaucgucgucuucugcggcaccuccggcaccuacggcaccggcuccuggcccgacggcgccgacaucaaccucaugcccaucuga

SEQ ID NO: 112018 - RNA, 1410 nt, Artificial Sequence
  derived and/or modified CDS sequence (opt2) from neuraminidase__InfluenzaA__ABU92862
augaaccccaaccagaagaucaucaccaucggcuccgucucccucaccaucgccgccaucugcuuccucaugcagaucgccauccucgucaccaccgucacccuccacuucaagcagcacgagugcaacuccccccccaacaaccaggucaugcucugcgagcccaccaucaucgagcgcaacaucaccgagaucgucuaccucaccaacaccaccaucgagaaggagaucugccccaagcucgccgaguaccgcaacugguccaagccccagugcaacaucaccggcuucgcccccuucucccgcgacaacuccauccgccucuccgccggcggcgacaucugggucacccgcgagcccuacgucuccugcgaccccgacaagugcuaccaguucgcccucggccagggcaccacccucaacaacggccacuccaacgacaccguccacgaccgcacccccuaccgcacccuccucaugaacgagcucggcguccccuuccaccucggcacccgccaggucugcaucgccugguccuccuccuccugccacgacggcaaggccuggcuccacgucugcgucaccggcgacgacaagaacgccaccgccuccuucaucuacaacggccgccucgucgacuccaucggcuccugguccaagaagauccuccgcacccaggaguccgagugcgucugcaucaacggcaccugcaccgucgucaugaccgacggcuccgccuccggcaaggccgacaccaagauccucuucaucgaggagggcaagaucguccacaucuccacccucuccggcuccgcccagcacgucgaggagugcuccugcuacccccgcuaccccggcguccgcugcgucugccgcgacaacuggaagggcuccaaccgccccaucgucgacaucaacgucaaggacuacuccaucgucuccuccuacgucugcuccggccucgucggcgacaccccccgcaagaacgacuccuucuccuccucccacugccucgaccccaacaacgaggagggcggccacggcgucaagggcugggccuucgacgacggcaacgacgucuggaugggccgcaccaucuccgagaagcuccgcuccggcuacgagaccuucaaggucaucgagggcugguccaagcccaacuccaagcuccagaucaaccgccaggucaucgucgagcgcggcaaccgcuccggcuacuccggcaucuucuccgucgagggcaaguccugcaucaaccgcugcuucuacgucgagcucauccgcggccgcaaggaggagaccgaggucugguggaccuccaacuccaucgucgucuucugcggcaccuccggcaccuacggcaccggcuccuggcccgacggcgccgacaucaaccucaugcccaucuga

SEQ ID NO: 112019 - RNA, 1410 nt, Artificial Sequence; identical to SEQ ID NO: 110261
  derived and/or modified CDS sequence (opt2) from neuraminidase__InfluenzaA__ABU92863

SEQ ID NO: 112020 - RNA, 1410 nt, Artificial Sequence
  derived and/or modified CDS sequence (opt2) from neuraminidase__InfluenzaA__ABU92865
augaaccccaaccagaagaucaucaccaucggcuccgucucccucaccaucuccaccaucugcuucuucaugcagaucgccauccucaucaccaccgucacccuccacuucaagcaguacgaguucaacuccccccccaacaaccaggucaugcucugcgagcccaccaucaucgagcgcaacaucaccgagaucgucuaccucaccaacaccaccaucgagaaggagaucugccccaagcucgccgaguaccgcaacugguccaagccccagugcgacaucaccggcuucgcccccuucuccaaggacaacuccauccgccucuccgccggcggcgacaucugggucacccgcgagcccuacgucuccugcgaccucgacaagugcuaccaguucgcccucggccagggcaccacccucaacaacguccacuccaacgacaccguccacgaccgcacccccuaccgcacccuccucaugaacgagcucggcguccccuuccaccucggcaccaagcaggucugcaucgccugguccuccuccuccugccacgacggcaaggccuggcuccacgucugcgucaccggcgacgacaagaacgccaccgccuccuucaucuacaacggccgccucgucgacuccaucgucuccugguccaagaagauccuccgcacccaggaguccgagugcgucugcaucaacggcaccugcaccgucgucaugaccgacggcuccgccuccggcaaggccgacaccaagauccucuucaucgaggagggcaagaucguccacaccuccacccucuccggcuccgcccagcacgucgaggagugcuccugcuacccccgcuaccccggcguccgcugcgucugccgcgacaacuggaagggcuccaaccgccccaucgucgacaucaacaucaaggacuacuccaucgucuccuccuacgucugcuccggccucgucggcgacaccccccgcaagaacgacuccuccuccuccucccacugccucgaccccaacaacgaggagggcggccacggcgucaagggcugggccuucgacgacggcaacgacgucuggaugggccgcaccaucuccgagaagcuccgcuccggcuacgagaccuucaaggucaucgagggcugguccaaccccaacuccaagcuccagaucaaccgccaggucaucgucgaccgcggcaaccgcuccggcuacuccggcaucuucuccgucgagggcaaguccugcaucaaccgcugcuucuacgucgagcucauccgcggccgcaaggaggagaccgagguccucuggaccuccaacuccaucgucgucuucugcggcaccuccggcaccuacggcaccggcuccuggcccgacggcgccgacaucaaccucaugcccaucuga

SEQ ID NO: 112021 - RNA, 1410 nt, Artificial Sequence
  derived and/or modified CDS sequence (opt2) from neuraminidase__InfluenzaA__ABU92866
augaaccccaaccagaagaucaucaccaucggcuccgucucccucaccaucuccaccaucugcuucuucaugcagaucgccauccucaucaccaccgucacccuccacuucaagcaguacgaguucaacuccccccccaacaaccaggucaugcucugcgagcccaccaucaucgagcgcaacaucaccgagaucgucuaccucaccaacaccaccaucgagaaggaggucugccccaagcucgccgaguaccgcaacugguccaagccccagugcgacaucaccggcuucgcccccuucuccaaggacaacuccauccgccucuccgccggcggcgacaucugggucacccgcgagcccuacgucuccugcgaccccgacaagugcuaccaguucgcccucggccagggcaccacccucaacaacguccacuccaacgacaccguccacgaccgcacccccuaccgcacccuccucaugaacgagcucggcguccccuuccaccucggcaccaagcaggucugcaucgccugguccuccuccuccugccacgacggcaaggccuggcuccacgucugcgucaccggcgacgacaagaacgccaccgccuccuucaucuacaacggccgccucgucgacuccaucgucuccugguccaaggagauccuccgcacccaggaguccgagugcgucugcaucaacggcaccugcaccgucgucaugaccgacggcuccgccuccggcaaggccgacaccaagauccucuucaucgaggagggcaagaucguccacaccuccacccucuccggcuccgcccagcacgucgaggagugcuccugcuacccccgcuaccccggcguccgcugcgucugccgcgacaacuggaagggcuccaaccgccccaucgucgacaucaacaucaaggacuacuccaucgucuccuccuacgucugcuccggccucgucggcgacaccccccgcaagaacgacuccuccuccaacucccacugccucgaccccaacaacgaggagggcggccacggcgucaagggcugggccuucgacgacggcaacgacgucuggaugggccgcaccaucuccgagaagcuccgcuccggcuacgagaccuucaaggucaucgagggcugguccaaccccaacuccaagcuccagaucaaccgccaggucaucgucgaccgcggcaaccgcuccggcuacuccggcaucuucuccgucgagggcaaguccugcaucaaccgcugcuucuacgucgagcucauccgcggccgcaaggaggagaccgagguccucuggaccuccaacuccaucgucgucuucugcggcaccuccggcaccuacggcaccggcuccuggcccgacggcgccgacaucaaccucaugcccaucuga

SEQ ID NO: 112022 - RNA, 1410 nt, Artificial Sequence; identical to SEQ ID NO: 110843
  derived and/or modified CDS sequence (opt2) from neuraminidase__InfluenzaA__ABU92867

SEQ ID NO: 112023 - RNA, 1410 nt, Artificial Sequence; identical to SEQ ID NO: 111950
  derived and/or modified CDS sequence (opt2) from neuraminidase__InfluenzaA__ABU92868

SEQ ID NO: 112024 - RNA, 1410 nt, Artificial Sequence; identical to SEQ ID NO: 110730
  derived and/or modified CDS sequence (opt2) from neuraminidase__InfluenzaA__ABU92869

SEQ ID NO: 112025 - RNA, 1410 nt, Artificial Sequence; identical to SEQ ID NO: 111920
  derived and/or modified CDS sequence (opt2) from neuraminidase__InfluenzaA__ABU92870

SEQ ID NO: 112026 - RNA, 1410 nt, Artificial Sequence
  derived and/or modified CDS sequence (opt2) from neuraminidase__InfluenzaA__ABU92872
augaaccccaaccagaagaucaucaccaucggcuccgucucccucaccaucgccgccaucugcuuccucaugcagaucgccauccucgucaccaccgucacccuccacuucaagcagcacgagugcaacuccccccccaacaaccaggucaugcucugcgagcccaccaucaucgagcgcaacaucaccgagaucgucuaccucaccaacaccaccaucgagaaggagaucugccccaagcucgccgaguaccgcaacugguccaagccccagugcaacaucaccggcuucgcccccuucuccaaggacaacuccauccgccucuccgccggcggcgacaucugggucacccgcgagcccuacgucuccugcgaccccgacaagugcuaccaguucgcccucggccagggcaccacccucaacaacggccacuccaacgacaccguccacgaccgcacccccuaccgcacccuccucaugaacgagcucggcguccccuuccaccucggcacccgccaggucugcaucgccugguccuccuccuccugccacgacggcaaggccuggcuccacgucugcgucaccggcgacgacaagaacgccaccgccuccuucaucuacaacggccgccucgucgacuccaucggcuccugguccaagaagauccuccgcacccaggaguccgagugcgucugcaucaacggcaccugcaccgucgucaugaccgacggcuccgccuccggcaaggccgacaccaagauccucuucaucgaggagggcaagaucguccacaucuccacccucuccggcuccgcccagcacgucgaggagugcuccugcuacccccgcuaccccggcguccgcugcgucugccgcgacaacuggaagggcuccaaccgccccaucgucgacaucaacgucaaggacuacaacaucgucuccuccuacgucugcuccggccucgucggcgacaccccccgcaagaacgacuccuucuccuccucccacugccucgaccccaacaacgaggagggcggccacggcgucaagggcugggccuucgacgacggcaacgacgucuggaugggccgcaccaucuccgagaagcuccgcuccggcuacgagaccuucaaggucaucgagggcugguccaagcccaacuccaagcuccagaucaaccgccaggucaucgucgagcgcggcaaccgcuccggcuacuccggcaucuucuccgucgagggcaaguccugcaucaaccgcugcuucuacgucgagcucauccgcggccgcaaggaggagaccgaggucugguggaccuccaacuccaucgucgucuucugcggcaccuccggcaccuacggcaccggcuccuggcccgacggcgccgacaucaaccucaugcccaucuga

SEQ ID NO: 112027 - RNA, 1410 nt, Artificial Sequence
  derived and/or modified CDS sequence (opt2) from neuraminidase__InfluenzaA__ABU92873
augaaccccaaccagaagaucaucaccaucggcuccgucucccucaccaucuccaccaucugcuucuucaugcagaucgccauccucaucaccaccgucacccuccacuucaagcaguacgaguucaacuccccccccaacaaccaggucaugcucugcgagcccaccaucaucgagcgcaacaucaccgagaucgucuaccucaccaacaccaccaucgagaaggagaucugccccaagcucgccgaguaccgcaacugguccaagccccagugcaacaucaccggcuucgcccccuucuccaaggacaacuccauccgccucuccgccggcggcgacaucugggucacccgcgagcccuacgucuccugcgaccccgacaagugcuaccaguucgcccucggccagggcaccacccucaacaacguccacuccaacgacaccguccacgaccgcacccccuaccgcacccuccucaugaacgagcucggcguccccuuccaccucggcaccaagcaggucugcaucgccugguccuccuccuccugccacgacggcaaggccuggcuccacgucugcgucaccggcgacgacgagaacgccaccgccuccuucaucuacaacggccgccucgucgacuccaucgucuccugguccaagaagauccuccgcacccaggaguccgagugcgucugcaucaacggcaccugcaccgucgucaugaccgacggcuccgccuccggcaaggccgacaccaagauccucuucaucgaggagggcaagaucguccacaccuccacccucuccggcuccgcccagcacgucgaggagugcuccugcuacccccgcuaccccggcguccgcugcgucugccgcgacaacuggaagggcuccaaccgccccaucgucgacaucaacaucaaggacuacuccaucgucuccuccuacgucugcuccggccucgucggcgacaccccccgcaagaacgacuccuccuccuccucccacugccucgaccccaacaacgaggagggcggccacggcgucaagggcugggccuucgacgacggcaacgacgucuggaugggccgcaccaucuccgagaagcuccgcuccggcuacgagaccuucaaggucaucgagggcugguccaaccccaacuccaagcuccagaucaaccgccaggucaucgucgaccgcggcaaccgcuccggcuacuccggcaucuucuccgucgagggcaaguccugcaucaaccgcugcuucuacgucgagcucauccgcggccgcaagcaggagaccgagguccucuggaccuccaacuccaucgucgucuucugcggcaccuccggcaccuacggcaccggcuccuggcccgacggcgccgacaucaacaucaugcccaucuga

SEQ ID NO: 112028 - RNA, 1410 nt, Artificial Sequence; identical to SEQ ID NO: 111965
  derived and/or modified CDS sequence (opt2) from neuraminidase__InfluenzaA__ABU92874

SEQ ID NO: 112029 - RNA, 1410 nt, Artificial Sequence; identical to SEQ ID NO: 110261
  derived and/or modified CDS sequence (opt2) from neuraminidase__InfluenzaA__ABU92875

SEQ ID NO: 112030 - RNA, 1410 nt, Artificial Sequence; identical to SEQ ID NO: 110261
  derived and/or modified CDS sequence (opt2) from neuraminidase__InfluenzaA__ABU92876

SEQ ID NO: 112031 - RNA, 1410 nt, Artificial Sequence; identical to SEQ ID NO: 110181
  derived and/or modified CDS sequence (opt2) from neuraminidase__InfluenzaA__ABU92877

SEQ ID NO: 112032 - RNA, 1410 nt, Artificial Sequence; identical to SEQ ID NO: 110261
  derived and/or modified CDS sequence (opt2) from neuraminidase__InfluenzaA__ABU92878

SEQ ID NO: 112033 - RNA, 1410 nt, Artificial Sequence
  derived and/or modified CDS sequence (opt2) from neuraminidase__InfluenzaA__ABU92879
augaaccccaaccagaagaucaucaccaucggcuccgucucccucaccaucgccaccaucugcuuccucaugcagaucgccauccucgucaccaccgucacccuccacuucaagcagcacgagugcaacuccccccccaacaaccaggucaugcucugcgagcccaccaucaucgagcgcaacaucaccgagaucgucuaccucaccaacaccaccaucgagaaggagaucugccccaagcucgccgaguaccgcaacugguccaagccccagugcaacaucaccggcuucgcccccuucuccaaggacaacuccauccgccucuccgccggcggcgacaucugggucacccgcgagcccuacgucuccugcgaccccgacaagugcuaccaguucgcccucggccagggcaccacccucaacaacggccacuccaacgacaccguccacgaccgcacccccuaccgcacccuccucaugaacgagcucggcguccccuuccaccucggcacccgccaggucugcaucgccugguccuccuccuccugccacgacggcaaggccuggcuccacgucugcgucaccggcgacgacaagaacgccaccgccuccuucaucuacaacggccgccucgucgacuccaucggcuccugguccaagaagauccuccgcacccaggaguccgagugcgucugcaucaacggcaccugcaccgucgucaugaccgacggcuccgccuccggcaaggccgacaccaagauccucuucaucgaggagggcaagaucguccacaucuccacccucuccggcuccgcccagcacgucgaggagugcuccugcuacccccgcuaccccggcguccgcugcgucugccgcgacaacuggaagggcuccaaccgccccaucgucgacaucaacgucaaggacuacuccaucgucuccuccuacgucugcuccggccucgucggcgacaccccccgcaagaacgacuccuucuccuccucccacugccucgaccccaacaacgaggagggcggccacggcgucaagggcugggccuucgacgacggcaacgacgucuggaugggccgcaccaucuccgagaagcuccgcuccggcuacgagaccuucaaggucaucgagggcugguccaagcccaacuccaagcuccagaucaaccgccaggucaucgucgagcgcggcaaccgcuccggcuacuccggcaucuucuccgucgagggcaaguccugcaucaaccgcugcuucuacgucgagcucauccgcggccgcaagggcgagaccgaggucugguggaccuccaacuccaucgucgucuucugcggcaccuccggcaccuacggcaccggcuccuggcccgacggcgccgacaucaaccucaugcccaucuga

SEQ ID NO: 112034 - RNA, 1410 nt, Artificial Sequence; identical to SEQ ID NO: 112026
  derived and/or modified CDS sequence (opt2) from neuraminidase__InfluenzaA__ABU92880

SEQ ID NO: 112035 - RNA, 1410 nt, Artificial Sequence; identical to SEQ ID NO: 110261
  derived and/or modified CDS sequence (opt2) from neuraminidase__InfluenzaA__ABU92881

SEQ ID NO: 112036 - RNA, 1410 nt, Artificial Sequence; identical to SEQ ID NO: 110261
  derived and/or modified CDS sequence (opt2) from neuraminidase__InfluenzaA__ABU92882

SEQ ID NO: 112037 - RNA, 1410 nt, Artificial Sequence
  derived and/or modified CDS sequence (opt2) from neuraminidase__InfluenzaA__ABU92883
augaaccccaaccagaagaucaucaccaucggcuccgucucccucaccaucgccgccaucugcuuccucaugcagaucgccauccucgucaccaccgucacccuccacuucaagcagcacgagugcaacuccccccccaagaaccaggucaugcucugcgagcccaccaucaucgagcgcaacaucaccgagaucgucuaccucaccaacaccaccaucgagaaggagaucugccccaagcucgccgaguaccgcaacugguccaagccccagugcaacaucaccggcuucgcccccuucuccaaggacaacuccauccgccucuccgccggcggcgacaucugggucacccgcgagcccuacgucuccugcgaccccgacaagugcuaccaguucgcccucggccagggcaccacccucaacaacggccacuccaacgacaccguccacgaccgcacccccuaccgcacccuccucaugaacgagcucggcguccccuuccaccucggcacccgccaggucugcaucgccugguccuccuccuccugccacgacggcaaggccuggcuccacgucugcgucaccggcgacgacaagaacgccaccgccuccuucaucuacaacggccgccucgucgacuccaucgucuccugguccaagaagauccuccgcacccaggaguccgagugcgucugcaucaacggcaccugcaccgucgucaugaccgacggcuccgccuccggcaaggccgacaccaagauccucuucaucgaggagggcaagaucguccacaucuccacccucuccggcuccgcccagcacgucgaggagugcuccugcuacccccgcuaccccggcguccgcugcgucugccgcgacaacuggaagggcuccaaccgccccaucgucgacaucaacgucaaggacuacuccaucgucuccuccuacgucugcuccggccucgucggcgacaccccccgcaagaacgacuccuucuccuccucccacugccucgaccccaacaacgaggagggcggccacggcgucaagggcugggccuucgacgacggcaacgacgucuggaugggccgcaccaucuccgagaagcuccgcuccggcuacgagaccuucaaggucaucgagggcugguccaagcccaacuccaagcuccagaucaaccgccaggucaucgucgagcgcggcaaccgcuccggcuacuccggcaucuucuccgucgagggcaaguccugcaucaaccgcugcuucuacgucgagcucauccgcggccgcaaggaggagaccgaggucugguggaccuccaacuccaucgucgucuucugcggcaccuccggcaccuacggcaccggcuccuggcccgacggcgccgacaucaaccucaugcccaucuga

SEQ ID NO: 112038 - RNA, 1410 nt, Artificial Sequence; identical to SEQ ID NO: 110261
  derived and/or modified CDS sequence (opt2) from neuraminidase__InfluenzaA__ABU92884

SEQ ID NO: 112039 - RNA, 1410 nt, Artificial Sequence; identical to SEQ ID NO: 110261
  derived and/or modified CDS sequence (opt2) from neuraminidase__InfluenzaA__ABU92885

SEQ ID NO: 112040 - RNA, 1410 nt, Artificial Sequence; identical to SEQ ID NO: 110750
  derived and/or modified CDS sequence (opt2) from neuraminidase__InfluenzaA__ABU92886

SEQ ID NO: 112041 - RNA, 1410 nt, Artificial Sequence; identical to SEQ ID NO: 110261
  derived and/or modified CDS sequence (opt2) from neuraminidase__InfluenzaA__ABU92887

SEQ ID NO: 112042 - RNA, 1410 nt, Artificial Sequence
  derived and/or modified CDS sequence (opt2) from neuraminidase__InfluenzaA__ABU92888
augaaccccaaccagaagaucaucaccaucggcuccgucucccucaccaucuccaccaucugcuucuucaugcagaucgccauccucaucaccaccgucacccuccacuucaagcaguacgaguucaacuccccccccaacaaccaggucaugcucugcgagcccaccaucaucgagcgcaacaucaccgagaucgucuaccucaccaacaccaccaucgagaaggagaucugccccaagcucgccgaguaccgcaacugguccaagccccagugcaacaucaccggcuucgcccccuucuccaaggacaacuccauccgccucuccgccggcggcgacaucugggucacccgcgagcccuacgucuccugcgaccccgacaagugcuaccaguucgcccucggccagggcaccacccucaacaacguccacuccaacgacaccguccacgaccgcacccccuaccgcacccuccucaugaacgagcucggcguccccuuccaccucggcaccaagcaggucugcaucgccugguccuccuccuccugccacgacggcaaggccuggcuccacgucugcgucaccggcgacgacgagaacgccaccgccuccuucaucuacaacggccgccucgucgacuccaucgucuccugguccaagaagauccuccgcacccaggaguccgagugcgucugcaucaacggcaccugcaccgucgucaugaccgacggcuccgccuccggcaaggccgacaccaagauccucuucaucgaggagggcaagaucguccacaccuccacccucuccggcuccgcccagcacgucgaggagugcuccugcuacccccgcuaccccggcguccgcugcgucugccgcgacaacuggaagggcuccaaccgccccaucgucgacaucaacaucaaggacuacuccaucaucuccuccuacgucugcuccggccucgucggcgacaccccccgcaagaacgacuccuccuccuccucccacugccucgaccccaacaacgaggagggcggccacggcgucaagggcugggccuucgacgacggcaacgacgucuggaugggccgcaccaucuccgagaagcuccgcuccggcuacgagaccuucaaggucgucgagggcugguccaaccccaacuccaagcuccagaucaaccgccaggucaucgucgaccgcgacaaccgcuccggcuacuccggcaucuucuccgucgagggcaaguccugcaucaaccgcugcuucuacgucgagcucauccgcggccgcaaccaggagaccgagguccucuggaccuccaacuccaucgucgucuucugcggcaccuccggcaccuacggcaccggcuccuggcccgacggcgccgacaucaaccucaugcccaucuga

SEQ ID NO: 112043 - RNA, 1410 nt, Artificial Sequence; identical to SEQ ID NO: 111965
  derived and/or modified CDS sequence (opt2) from neuraminidase__InfluenzaA__ABU92889

SEQ ID NO: 112044 - RNA, 1410 nt, Artificial Sequence
  derived and/or modified CDS sequence (opt2) from neuraminidase__InfluenzaA__ABU92890
augaaccccaaccagaagaucaucaccaucggcuccgucucccucaccaucgccgccaucugcuuccucaugcagaucgccauccucgucaccaccgucacccuccacuucaagcagcacgagugcaacuccccccccaacaaccaggucaugcucugcgagcccaccaucaucgagcgcaacaucaccgagaucgucuaccucaccaacaccaccaucgagaaggagaucugccccaagcucgccgaguaccgcaacugguccaagccccagugcaacaucaccggcuucgcccccuucuccaaggacaacuccauccgccucuccgccggcggcgacaucugggucacccgcgagcccuacgucuccugcgaccccgacaagugcuaccaguucgcccucggccagggcaccacccucaacaacggccacuccaacgacaccguccacgaccgcacccccuaccgcacccuccucaugaacgagcucggcguccccuuccaccucggcacccgccaggucugcaucgccugguccuccuccuccugccacgacggcaaggccuggcuccacgucugcgucaccggcgacgacaagaacgccaccgccuccuucaucuacaacggccgccucgucgacuccaucggcuccugguccaagaagauccuccgcacccaggaguccgagugcgucugcaucaacggcaccugcaccgucgucaugaccgacggcuccgccuccggcaaggccgacaccaagauccucuucaucgaggagggcaagaucguccacaucuccacccucuccggcuccgcccagcacgucgaggagugcuccugcuacccccgcuaccccggcguccgcugcgucugccgcgacaacuggaagggcuccaaccgccccaucgucgacaucaacgucaaggacuacuccaucgucuccuccuacgucugcuccggccucgucggcgacaccccccgcaagaacgacuccuucuccuccucccacugccucgaccccaacaacgaggagggcggccacggcgucaagggcugggccuucgacgacggcaacgacgucuggaugggccgcaccaucuccgagaagcuccgcuccggcuacgagaccuucaaggucaucgagggcugguccaagcccaacuccaagcuccagaucaaccgccaggucaucgucgagcgcggcaaccgcuccggcuacuccggcaucuucuccgucgagggcaaguccugcaucaaccgcugcuucuacgucgagcucguccgcggccgcaaggaggagaccgaggucugguggaccuccaacuccaucgucgucuucugcggcaccuccggcaccuacggcaccggcuccuggcccgacggcgccgacaucaaccucaugcccaucuga

SEQ ID NO: 112045 - RNA, 1410 nt, Artificial Sequence; identical to SEQ ID NO: 111981
  derived and/or modified CDS sequence (opt2) from neuraminidase__InfluenzaA__ABU92891

SEQ ID NO: 112046 - RNA, 1410 nt, Artificial Sequence
  derived and/or modified CDS sequence (opt2) from neuraminidase__InfluenzaA__ABU92892
augaaccccaaccagaagaucaucaccaucggcuccgucucccucaccaucuccaccaucugcuucuucaugcagaucgccauccucaucaccaccgucacccuccacuucaagcaguacgaguucaacuccccccccaacaaccaggucaugcucugcgagcccaccaucaucgagcgcaacaucaccgagaucgucuaccucaccaacaccaccaucgagaaggagaucugccccaagcucgccgaguaccgcaacugguccaagccccagugcgacaucaccggcuucgcccccuucuccaaggacaacuccauccgccucuccgccggcggcaacaucugggucacccgcgagcccuacgucuccugcgaccccgacaagugcuaccaguucgcccucggccagggcaccacccucaacaacguccacuccaacgacaccguccacgaccgcacccccuaccgcacccuccucaugaacgagcucggcguccccuuccaccucggcaccaagcaggucugcaucgccugguccuccuccuccugccacgacggcaaggccuggcuccacgucugcgucaccggcgacgacaagaacgccaccgccuccuucaucuacaacggccgccucgucgacuccaucgucuccugguccaagaagauccuccgcacccaggaguccgagugcgucugcaucaacggcaccugcaccgucgucaugaccgacggcuccgccuccggcaaggccgacaccaagauccucuucaucgaggagggcaagaucguccacaccuccacccucuccggcuccgcccagcacgucgaggagugcuccugcuacccccgcuaccccggcguccgcugcgucugccgcgacaacuggaagggcuccaaccgccccaucgucgacaucaacaucaaggacuacuccaucgucuccuccuacgucugcuccggccucgucggcgacaccccccgcaagaacgacuccuccuccuccucccacugccucgaccccaacaacgaggagggcggccacggcgucaagggcugggccuucgacgacggcaacgacgucuggaugggccgcaccaucuccgagaagcuccgcuccggcuacgagaccuucaaggucaucgagggcugguccaaccccaacuccaagcuccagaucaaccgccaggucaucgucgaccgcggcaaccgcuccggcuacuccggcaucuucuccgucgagggcaaguccugcaucaaccgcugcuucuacgucgagcucauccgcggccgcaaggaggagaccgagguccucuggaccuccaacuccaucgucgucuucugcggcaccuccggcaccuacggcaccggcuccuggcccgacggcgccgacaucaaccucaugcccaucuga

SEQ ID NO: 112047 - RNA, 1410 nt, Artificial Sequence; identical to SEQ ID NO: 110843
  derived and/or modified CDS sequence (opt2) from neuraminidase__InfluenzaA__ABU92893

SEQ ID NO: 112048 - RNA, 1410 nt, Artificial Sequence
  derived and/or modified CDS sequence (opt2) from neuraminidase__InfluenzaA__ABU92895
augaaccccaaccagaagaucaucaccgucggcuccgucucccucaccaucuccaccaucugcuucuucaugcagaucgccauccucaucaccaccgucacccuccacuucaagcaguacgaguucaacuccccccccaacaaccaggucaugcucugcgagcccaccaucaucgagcgcaacaucaccgagaucgucuaccucaccaacaccaccaucgagaaggagaucugccccaagcucgccgaguaccgcaacugguccaagccccagugcgacaucaccggcuucgcccccuucuccaaggacaacuccauccgccucuccgccggcggcgacaucugggucacccgcgagcccuacgucuccugcgaccccgacaagugcuaccaguucgcccucggccagggcaccacccucaacaacguccacuccaacgacaccguccacgaccgcacccccuaccgcacccuccucaugaacgagcucggcguccccuuccaccucggcaccaagcaggucugcaucgccugguccuccuccuccugccacgacggcaaggccuggcuccacgucugcgucaccggcgacgacaagaacgccaccgccuccuucaucuacaacggccgccucgucgacuccaucgucuccugguccaaggagauccuccgcacccaggaguccgagugcgucugcaucaacggcaccugcaccgucgucaugaccgacggcuccgccuccggcaaggccgacaccaagauccucuucaucgaggagggcaagaucguccacaccuccacccucuccggcuccgcccagcacgucgaggagugcuccugcuacccccgcuaccccggcguccgcugcgucugccgcgacaacuggaagggcuccaaccgccccaucgucgacaucaacaucaaggacuacuccaucgccuccuccuacgucugcuccggccucgucggcgacaccccccgcaagaacgacuccuccuccuccucccacugccucgaccccaacaacgaggagggcggccacggcgucaagggcugggccuucgacgacggcaacgacgucuggaugggccgcaccaucuccgagaagcuccgcuccggcuacgagaccuucaaggucaucgagggcugguccaaccccaacuccaagcuccagaucaaccgccaggucaucgucgaccgcggcaaccgcuccggcuacuccggcaucuucuccgucgagggcaaguccugcaucaaccgcugcuucuacgucgagcucauccgcggccgcaaggaggagaccgagguccucuggaccuccaacuccaucgucgucuucugcggcaccuccggcaccuacggcaccggcuccuggcccgacggcgccgacaucaaccucaugcccaucuga

SEQ ID NO: 112049 - RNA, 1410 nt, Artificial Sequence
  derived and/or modified CDS sequence (opt2) from neuraminidase__InfluenzaA__ABU92896
augaaccccaaccagaagaucaucaccaucggcuccgucucccucaccaucuccaccaucugcuucuucaugcagaucgccauccucaucaccaccgucacccuccacuucaagcaguacgaguucaacuccccccccaacaaccaggucaugcucugcgagcccaccaucaucgagcgcaacaucaccgagaucgucuaccucaccaacaccaccaucgagaaggagaucugccccaagcucgccgaguaccgcaacugguccaagccccagugcgacaucaccggcuucgcccccuucuccaaggacaacuccauccgccucuccgccggcggcgacaucugggucacccgcgagcccuacgucuccugcgaccccgacaagugcuaccaguucgcccucggccagggcaccacccucaacaacguccacuccaacgacaccguccgcgaccgcacccccuaccgcacccuccucaugaacgagcucggcguccccuuccaccucggcaccaagcaggucugcaucgccugguccuccuccuccugccacgacggcaaggccuggcuccacgucugcaucaccggcaacgacaagaacgccaccgccuccuucaucuacaacggccgccucgucgacuccaucgucuccugguccaaggagauccuccgcacccaggaguccgagugcgucugcaucaacggcaccugcaccgucgucaugaccgacggcuccgccuccggcaaggccgacaccaagauccucuucaucgaggagggcaagaucguccacaccuccacccucuccggcuccgcccagcacgucgaggagugcuccugcuacccccgcuaccccggcguccgcugcgucugccgcgacaacuggaagggcuccaaccgccccaucgucgacaucaacaucaaggaccacuccaucgucuccuccuacgucugcuccggccucgucggcgacaccccccgcaagaacgacuccuccuccuccucccacugccucgaccccaacaacgaggagggcggccacggcgucaagggcugggccuucgacgaccgcaacgacgucuggaugggccgcaccaucuccgagaagucccgccucggcuacgagaccuucaaggucaucgagggcugguccaaccccaacuccaagcuccagaucaaccgccaggucaucgucgaccgcggcaaccgcuccggcuacuccggcaucuucuccgucgagggcaaguccugcaucaaccgcugcuucuacgucgagcucauccgcggccgcaaggaggagaccgagguccucuggaccuccaacuccaucgucgucuucugcggcaccuccggcaccuacggcaccggcuccuggcccgacggcgccgacaucaaccucaugcccaucuga

SEQ ID NO: 112050 - RNA, 1410 nt, Artificial Sequence
  derived and/or modified CDS sequence (opt2) from neuraminidase__InfluenzaA__ABU92897
augaaccccaaccagaagaucaucaccaucggcuccgucucccucaccaucuccaccaucugcuucuucaugcagaucgccauccucaucaccaccgucacccuccacuucaagcaguacgagcucaacuccccccccaacaaccaggucaugcucugcgagcccaccaucaucgagcgcaacaucaccgagaucgucuaccucaccaacaccaccaucgagaaggagaucugccccaagcucgccgaguaccgcaacugguccaagccccagugcaacaucaccggcuucgcccccuucuccaaggacaacuccauccgccucuccgccggcggcgacaucugggucacccgcgagcccuacgucuccugcgaccccgacaagugcuaccaguucgcccucggccagggcaccacccucaacaacguccacuccaacgacaccguccacgaccgcacccccuaccgcacccuccucaugaacgagcucggcguccccuuccaccucggcaccaagcaggucugcaucgccugguccuccuccuccugccacgacggcaaggccuggcuccacgucugcgucaccggcgacgacaagaacgccaccgccuccuucaucuacaacggccgccucgucgacuccaucgucuccugguccaaggagauccuccgcacccaggaguccgagugcgucugcaucaacggcaccugcaccgucgucaugaccgacggcuccgccuccggcaaggccgacaccaagauccucuucaucgaggagggcaagaucguccacaccuccacccucuccggcuccgcccagcacgucgaggagugcuccugcuacccccgcuaccccggcguccgcugcgucugccgcgacaacuggaagggcuccaaccgccccaucgucgacaucaacaucaaggacuacuccaucgucuccuccuacgucugcuccggccucgucggcgacaccccccgcaagaacgacuccuccuccuccucccacugccucgaccccaacaacgaggagggcggccacggcgucaagggcugggccuucgacgacggcaacgacgucuggaugggccgcaccaucuccgagaagucccgcuccggcuacgagaccuucaaggucaucgagggcugguccaaccccaacuccaagcuccagaucaaccgccaggucaucgucgaccgcggcaaccgcuccggcuacuccggcaucuucuccgucgagggcaaguccugcaucaaccgcugcuucuacgucgagcucauccgcggccgcaaggaggagaccgagguccucuggaccuccaacuccaucgucgucuucugcggcaccuccggcaccuacggcaccggcuccuggcccgacggcgccgacaucaaccucaugcccaucuga

SEQ ID NO: 112051 - RNA, 1410 nt, Artificial Sequence
  derived and/or modified CDS sequence (opt2) from neuraminidase__InfluenzaA__ABU92898
augaaccccaaccagaagaucaucaccaucggcuccgucucccucaccaucuccaccaucugcuucuucaugcagaucgccauccucaucaccaccgucacccuccacuucaagcaguacgaguucaacuccccccccaacaaccaggucaugcucugcgagcccaccaucaucgagcgcaacaucaccgagaucgucuaccucaccaacaccaccaucgagaaggagaucugccccaagcucgccgaguaccgcaacugguccaagccccagugcgacaucaccggcuucgcccccuucuccaaggacaacuccauccgccucuccgccggcggcgacaucugggucacccgcgagcccuacgucuccugcgaccccgacaagugcuaccaguucgcccucggccagggcaccacccucaacaacguccacuccaacgacaccguccacgaccgcacccccuaccgcacccuccucaugaacgagcucggcguccccuuccaccucggcaccaagcaggucugcaucgccugguccuccuccuccugccacgacggcaaggccuggcuccacgucugcgucaccggcgacgacaagaacgccaccgccuccuucaucuacaacggccgccucgucgacuccgucgucuccugguccaaggacauccuccgcacccaggaguccgagugcgucugcaucaacggcaccugcaccgucgucaugaccgacggcuccgccuccggcaaggccgacaccaagauccucuucaucgaggagggcaagaucguccacaccuccacccucuccggcuccgcccagcacgucgaggagugcuccugcuacccccgcuaccccggcguccgcugcgucugccgcgacaacuggaagggcuccaaccgccccaucgucgacaucaacaucaagaacuacuccaucgucuccuccuacgucugcuccggccucgucggcgacaccccccgcaagaccgacuccuccuccuccucccacugccucgaccccaacaacgaggagggcggccacggcgucaagggcugggccuucgacgacggcaacgacgucuggaugggccgcaccaucuccgagaagcuccgccucggcuacgagaccuucaaggucaucgagggcugguccaaccccaacuccaagcuccagaucaaccgccaggucaucgucgaccgcggcaaccgcaccggcuacuccggcaucuucuccgucgagggcaaguccugcaucaaccgcugcuucuacgucgagcucauccgcggccgcaaggaggagaccgagguccucuggaccuccaacuccaucgucgucuucugcggcaccuccggcaccuacggcaccggcuccuggcccgacggcgccgacaucaaccucaugcccaucuga

SEQ ID NO: 112052 - RNA, 1410 nt, Artificial Sequence; identical to SEQ ID NO: 110261
  derived and/or modified CDS sequence (opt2) from neuraminidase__InfluenzaA__ABU92899

SEQ ID NO: 112053 - RNA, 1410 nt, Artificial Sequence
  derived and/or modified CDS sequence (opt2) from neuraminidase__InfluenzaA__ABU92900
augaaccccaaccagaagaucaucaccaucggcuccgucucccucaccaucgccgccaucugcuuccucaugcagaucgccauccucgucaccaccgucacccuccacuucaagcagcacgagugcaaccccccccccaacaaccaggucaugcucugcgagcccaccaucaucgagcgcaacaucaccgagaucgucuaccucaccaacaccaccaucgagaaggagaucugccccaagcucgccgaguaccgcaacugguccaagccccagugcaacaucaccggcuucgcccccuucuccaaggacaacuccauccgccucuccgccggcggcgacaucugggucacccgcgagcccuacgucuccugcgaccccgacaagugcuaccaguucgcccucggccagggcaccacccucaacaacggccacuccaacgacaccguccacgaccgcacccccuaccgcacccuccucaugaacgagcucggcguccccuuccaccucggcacccgccaggucugcaucgccugguccuccuccuccugccacgacggcaaggccuggcuccacgucugcgucaccggcgacgacaagaacgccaccgccuccuucaucuacaacggccgccucgucgacuccaucggcuccugguccaagaagauccuccgcacccaggaguccgagugcgucugcaucaacggcaccugcaccgucgucaugaccgacggcuccgccuccggcaaggccgacaccaagauccucuucaucgaggagggcaagaucguccacaucuccacccucuccggcuccgcccagcacgucgaggagugcuccugcuacccccgcuaccccggcguccgcugcgucugccgcgacaacuggaagggcuccaaccgccccaucgucgacaucaacgucaaggacuacuccaucgucuccuccuacgucugcuccggccucgucggcgacaccccccgcaagaacgacuccuucuccuccucccacugccucgaccccaacaacgaggagggcggccacggcgucaagggcugggccuucgacgacggcaacgacgucuggaugggccgcaccaucuccgagaagcuccgcuccggcuacgagaccuucaaggucaucgagggcugguccaagcccaacuccaagcuccagaucaaccgccaggucaucgucgagcgcggcaaccgcuccggcuacuccggcaucuucuccgucgagggcaaguccugcaucaaccgcugcuucuacgucgagcucauccgcggccgcaaggaggagaccgaggucugguggaccuccaacuccaucgucgucuucugcggcaccuccggcaccuacggcaccggcuccuggcccgacggcgccgacaucaaccucaugcccaucuga

SEQ ID NO: 112054 - RNA, 1410 nt, Artificial Sequence
  derived and/or modified CDS sequence (opt2) from neuraminidase__InfluenzaA__ABU92901
augaaccccaaccagaagaucaucaccaucggcuccgucucccucaccaucgccgccaucugcuuccucaugcagaucgccauccucgucaccaccgucacccuccacuucaagcagcacgagugcaacuccccccccaacaaccaggucaugcucugcgagcccaccaucaucgagcgcaacaucaccgagaucgucuaccucaccaacaccaccaucgagaaggagaucugccccaagcucgccgaguaccgcaacugguccaagccccagugcaacaucaccggcuucgcccccuucuccaaggacaacuccauccgccucuccgccggcggcgacaucugggucacccgcgagcccuacgucuccugcgaccccgacaagugcuaccaguucgcccucggccagggcaccacccucaacaacggccacuccaacgacaccguccacgaccgcacccccuaccgcacccuccucaugaacgagcucggcguccccuuccaccucggcacccgccaggucugcaucgccugguccuccuccuccugccacgacggcaaggccuggcuccacgucugcgucaccggcgacgacaagaacgccaccgccuccuucaucuacaacggccgccucgucgacuccaucuccuccugguccaagaagauccuccgcacccaggaguccgagugcgucugcaucaacggcaccugcaccgucgucaugaccgacggcuccgccuccggcaaggccgacaccaagauccucuucaucgaggagggcaagaucguccacaucuccacccucuccggcuccgcccagcacgucgaggagugcuccugcuacccccgcuaccccggcguccgcugcgucugccgcgacaacuggaagggcuccaaccgccccaucgucgacaucaacgucaaggacuacuccaucgucuccuccuacgucugcuccggccucgucggcgacaccccccgcaagaacgacuccuucuccuccucccacugccucgaccccaacaacgaggagggcggccacggcgucaagggcugggccuucgacgacggcaacgacgucuggaugggccgcaccaucuccgagaagcuccgcuccggcuacgagaccuucaaggucaucgagggcugguccaagcccaacuccaagcuccagaucaaccgccaggucaucgucgagcgcggcaaccgcuccggcuacuccggcaucuucuccgucgagggcaaguccugcaucaaccgcugcuucuacgucgagcucauccgcggccgcaaggaggagaccgaggucugguggaccuccaacuccaucgucgucuucugcggcaccuccggcaccuacggcaccggcuccuggcccgacggcgccgacaucaaccucaugcccaucuga

SEQ ID NO: 112055 - RNA, 1410 nt, Artificial Sequence; identical to SEQ ID NO: 110261
  derived and/or modified CDS sequence (opt2) from neuraminidase__InfluenzaA__ABU92902

SEQ ID NO: 112056 - RNA, 1410 nt, Artificial Sequence; identical to SEQ ID NO: 110261
  derived and/or modified CDS sequence (opt2) from neuraminidase__InfluenzaA__ABU92903

SEQ ID NO: 112057 - RNA, 1410 nt, Artificial Sequence; identical to SEQ ID NO: 111216
  derived and/or modified CDS sequence (opt2) from neuraminidase__InfluenzaA__ABU92904

SEQ ID NO: 112058 - RNA, 1410 nt, Artificial Sequence; identical to SEQ ID NO: 110261
  derived and/or modified CDS sequence (opt2) from neuraminidase__InfluenzaA__ABU92905

SEQ ID NO: 112059 - RNA, 1410 nt, Artificial Sequence
  derived and/or modified CDS sequence (opt2) from neuraminidase__InfluenzaA__ABU92906
augaaccccaaccagaagaucaucaccaucggcuccgucucccucaccaucgccgccaucugcuuccucaugcagaucgccauccucgucaccaccgucacccuccacuucaagcagcacgagugcaacuccccccccaacaaccaggucaugcucugcgagcccaccaucaucgagcgcaacaucaccgagaucgucuaccucaccaacaccaccaucgagaaggagaucugccccaagcucgccgaguaccgcaacugguccaagccccagugcaacaucaccggcuucgcccccuucuccaaggacaacuccauccgccucuccgccggcggcgacaucugggucacccgcgagcccuacgucuccugcgaccccgacaagugcuaccaguucgcccucggccagggcaccacccucaacaacggccacuccaacgacaccguccacgaccgcacccccuaccgcacccuccucaugaacgagcucggcguccccuuccaccucggcacccgccaggucugcaucgccugguccuccuccuccugccacgacggcaaggccuggcuccacgucugcgucaccggcgacgacaagaacgccaccgccuccuucaucuacaacggccgccucgucgacuccaucggcuccugguccaagaagauccuccgcacccaggaguccgagugcgucugcaucaacggcaccugcaccgucgucaugaccgacggcuccgccuccggcaaggccgacaccaagauccucuucaucgaggagggcaagaucguccacaucuccacccucuccggcuccgcccagcacgucgaggagugcuccugcuacccccgcuaccccggcguccgcugcgucugccgcgacaacuggaagggcuccaaccgccccaucgucgacaucaacgucaaggacuacuccaucgucuccuccuacgucugcuccggccucgucggcgacaccccccgcaagaacgacuccuucuccuccucccacugccucgaccccaacaacgaggagggcggccacggcgucaagggcugggccuucgacgacggcaacgacgucuggaugggccgcaccaucuccgagaagcuccgcuccggcuacgagaccuucaaggucaucgagggcugguccaagcccaacuccaagcuccagaucaaccgccaggucaucgucgagcgcggcaaccgcuccggcuacuccggcaucuucuccgucgagggcaaguccugcaucaaccgcugcuucuacgucgagcucauccgcggccgcaaggaggagaccgaggucugguggaccuccaacuccaucgucgucuucugcggcaccuccggcaccuacggcaccggcuccuggcccgacggcgccgacaucaagcucaugcccaucuga

SEQ ID NO: 112060 - RNA, 1410 nt, Artificial Sequence
  derived and/or modified CDS sequence (opt2) from neuraminidase__InfluenzaA__ABU92907
augaaccccaaccagaagaucaucaccaucggcuccaucucccucaccaucgccgccaucugcuuccucaugcagaucgccauccucgucaccaccgucacccuccacuucaagcagcacgagugcaacuccccccccaacaaccaggucaugcucugcgagcccaccaucaucgagcgcaacaucaccgagaucgucuaccucaccaacaccaccaucgagaaggagaucugccccaagcucgccgaguaccgcaacugguccaagccccagugcaacaucaccggcuucgcccccuucuccaaggacaacuccauccgccucuccgccggcggcgacaucugggucacccgcgagcccuacgucuccugcgaccccgacaagugcuaccaguucgcccucggccagggcaccacccucaacaacggccacuccaacgacaccguccacgaccgcacccccuaccgcacccuccucaugaacgagcucggcguccccuuccaccucggcacccgccaggucugcaucgccugguccuccuccuccugccacgacggcaaggccuggcuccacgucugcgucaccggcgacgacaagaacgccaccgccuccuucaucuacaacggccgccucgucgacuccaucggcuccugguccaagaagauccuccgcacccaggaguccgagugcgucugcaucaacggcaccugcaccgucgucaugaccgacggcuccgccuccggcaaggccgacaccaagauccucuucaucgaggagggcaagaucguccacaucuccacccucuccggcuccgcccagcacgucgaggagugcuccugcuacccccgcuaccccggcguccgcugcgucugccgcgacaacuggaagggcuccaaccgccccaucgucgacaucaacgucaaggacuacuccaucgucuccuccuacgucugcuccggccucgucggcgacaccccccgcaagaacgacuccuucuccuccucccacugccucgaccccaacaacgaggagggcggccacggcgucaagggcugggccuucgacgacggcaacgacgucuggaugggccgcaccaucuccgagaagcuccgcuccggcuacgagaccuucaaggucaucgagggcugguccaagcccaacuccaagcuccagaucaaccgccaggucaucgucgagcgcggcaaccgcuccggcuacuccggcaucuucuccgucgagggcaaguccugcaucaaccgcugcuucuacgucgagcucauccgcggccgcaaggaggagaccgaggucugguggaccuccaacuccaucgucgucuucugcggcaccuccggcaccuacggcaccggcuccuggcccgacggcgccgacaucaaccucaugcccaucuga

SEQ ID NO: 112061 - RNA, 1410 nt, Artificial Sequence; identical to SEQ ID NO: 110261
  derived and/or modified CDS sequence (opt2) from neuraminidase__InfluenzaA__ABU92908

SEQ ID NO: 112062 - RNA, 1410 nt, Artificial Sequence; identical to SEQ ID NO: 110261
  derived and/or modified CDS sequence (opt2) from neuraminidase__InfluenzaA__ABU92909

SEQ ID NO: 112063 - RNA, 1410 nt, Artificial Sequence
  derived and/or modified CDS sequence (opt2) from neuraminidase__InfluenzaA__ABU92910
augaaccccaaccagaagaucaucaccaucggcuccgucucccucaccaucgccaccaucugcuuccucacccagaucgccauccucaucaccaccgucacccuccacuucaagcaguacgagugcaacuccccccccaacaaccaggucaugcucugcgagcccaccaucaucgagcgcaacaucaccgagaucgucuaccucaccaacaccaccaucgagaaggagaucugccccaagcucgccgaguaccgcaacugguccaagccccagugcaacaucaccggcuucgcccccuucuccaaggacaacuccauccgccucuccgccggcggcgacaucugggucacccgcgagcccuacgucuccugcgaccccgacaagugcuaccaguucgcccucggccagggcaccacccucaacaacggccacuccaacgacaccguccacgaccgcacccccuaccgcacccuccucaugaacgagcucggcguccccuuccaccucggcaccaagcaggucugcaucgccugguccuccuccuccugccacgacggcaaggccuggcuccacgucugcgucaccggcgacgacaagaacgccaccgccuccuucaucuacaacggccgccucgucgacuccaucggcuccugguccaagaagauccuccgcacccaggaguccgagugcgucugcaucaacggcaccugcaccgucgucaugaccgacggcuccgccuccggcaaggccgacaccaagauccucuucaucgaggagggcaagaucguccacaccucccuccucuccggcuccgcccagcacgucgaggagugcuccugcuacccccgcuaccccggcguccgcugcgucugccgcgacaacuggaagggcuccaaccgccccaucgucgacaucaacguccgcgacuacuccaucgucuccuccuacgucugcuccggccucgucggcgacaccccccgcaagaacgacuccuccuccuccucccacugccucgaccccaacaacgaggagggcggccacggcgucaagggcugggccuucgacgacggcaacgacgucuggaugggccgcaccaucuccgagaagcuccgcuccggcuacgagaccuucaaggucaucgagggcugguccaagcccaacuccaagcuccagaucaaccgccaggucaucgucgacaagggcaaccgcuccggcuacuccggcaucuucuccgucgagggcaaguccugcaucaaccgcugcuucuacgucgagcucauccgcggccgcaaccaggagaccgagguccucuggaccuccaacuccaucgucgucuucugcggcaccuccggcaccuacggcaccggcuccuggcccgacggcgccgacaucaaccucaugcccaucuga

SEQ ID NO: 112064 - RNA, 1410 nt, Artificial Sequence
  derived and/or modified CDS sequence (opt2) from neuraminidase__InfluenzaA__ABU92911
augaaccccaaccagaagaucaucaccaucggcuccgucucccucaccaucgccaccaucugcuuccucacccagaucgccauccucgucaccaccgucacccuccacuucaagcaguacgagugcaacuccccccccaacaaccaggucaugcucugcgagcccaccaucaucgagcgcaacaucaccgagaucgucuaccucaccaacaccaccaucgagaaggagaucugccccaagcaggccgaguaccgcaacugguccaagccccagugcaacaucaccggcuucgcccccuucuccaaggacaacuccauccgccucuccgccggcggcgacaucugggucacccgcgagcccuacgucuccugcgaccccgacaagugcuaccaguucgcccucggccagggcaccacccucaacaacggccacuccaacgacaccguccacgaccgcacccccuaccgcacccuccucaugaacgagcucggcguccccuuccaccucggcaccaagcaggucugcaucgccugguccuccuccuccugccacgacggcaaggccuggcuccacgucugcgucaccggcgacgacaagaacgccaccgccuccuucaucuacaacggccgccucgucgacuccaucggcuccugguccaagaagauccuccgcacccaggaguccgagugcgucugcaucaacggcaccugcaccgucgucaugaccgacggcuccgccuccggcaaggccgacaccaagauccucuucaucaaggagggcaagaucguccacaccucccuccucuccggcuccgcccagcacgucgaggagugcuccugcuacccccgcuaccccggcguccgcugcgucugccgcgacaacuggaagggcuccaaccgccccaucgucgacaucaacgucaaggacuacuccaucgucuccuccuacgucugcuccggccucgucggcgacaccccccgcaagaacgacuccuccuccuccucccacugccucgaccccaacaacgaggagggcggccacggcgucaagggcugggccuucgacgacggcaacgacgucuggaugggccgcaccaucuccgagaagcuccgcuccggcuacgagaccuucaaggucaucgagggcugguccaagcccaacuccaagcuccagaucaaccgccaggucaucgucgaccgcgacaaccgcuccggcuacuccggcaucuucuccgucgagggcaaguccugcaucaaccgcugcuucuacgucgagcucauccgcggccgcaaccaggagaccgagguccucuggaccuccaacuccaucgucgucuucugcggcaccuccggcaccuacggcaccggcuccuggcccgacggcgccgacaucaaccucaugcccaucuga

SEQ ID NO: 112065 - RNA, 1410 nt, Artificial Sequence
  derived and/or modified CDS sequence (opt2) from neuraminidase__InfluenzaA__ABU92913
augaaccccaaccagaagaucaucaccaucggcuccgucucccucaccaucgccaccaucugcuuccucacccagaucgccauccucgucaccaccgucacccuccacuucaagcaguacgagugcaacuccccccccaacaaccaggucaugcucugcgagcccaccaucaucgagcgcaacaucaccgagaucgucuaccucaccaacaccaccaucgagaaggagaucugccccaagcucgccgaguaccgcaacugguccaagccccagugcaacaucaccggcuucgcccccuucuccaaggacaacuccauccgccucuccgccggcggcgacaucugggucacccgcgagcccuacgucuccugcgaccccgacaagugcuaccaguucgcccucggccagggcaccacccucaacaacggccacuccaacgacaccguccacgaccgcacccccuaccgcacccuccucaugaacgagcucggcguccccuuccaccucggcaccaagcaggucugcaucgccugguccuccuccuccugccacgacggcaaggccuggcuccacgucugcgucaccggcgacgacaagaacgccaccgccuccuucaucuacaacggccgccucgucgacuccaucggcuccugguccaagaagauccuccgcacccaggaguccgagugcgucugcaucaacggcaccugcaccgucgucaugaccgacggcuccgccuccggcaaggccgacaccaagauccucuucaucaaggagggcaagaucguccacaccucccuccucuccggcuccgcccagcacgucgaggagugcuccugcuacccccgcuaccccggcguccgcugcgucugccgcgacaacuggaagggcuccaaccgccccaucgucgacaucaacgucaaggacuacuccaucgucuccuccuacgucugcuccggccucgucggcgacaccccccgcaagaacgacuccuccuccuccucccacugccucgaccccaacaacgaggagggcggccacggcgucaagggcugggccuucgacgacggcaacgacgucuggaugggccgcaccaucuccgagaagcuccgcuccggcuacgagaccuucaaggucaucgagggcugguccaagcccaacuccaagcuccagaucaaccgccaggucaucgucgaccgcgacaaccgcuccggcuacuccggcaucuucuccgucgagggcaaguccugcaucaaccgcugcuucuacgucgagcucauccgcggccgcaaccaggagaccgagguccucuggaccuccaacuccaucgucgucuucugcggcaccuccggcaccuacggcaccggcuccuggcccgacggcgccgacaucaaccucaugcccaucuga

SEQ ID NO: 112066 - RNA, 1413 nt, Artificial Sequence
  derived and/or modified CDS sequence (opt2) from neuraminidase__InfluenzaA__ABV29560
augaaccccaaccagaagaucaucaccaucggcuccaucuccaucgccaucggcaucaucucccucaugcuccagaucggcaacaucaucuccaucugggccucccacuccauccagaccggcucccagaaccacaccggcaucugcaaccagcgcaucaucaccuacgagaacuccaccugggucaaccacaccuacgucuccaucaacaacaccaacgucgucgccggcaaggacaagaccuccgucacccucgccggcaacuccucccucugcuccaucuccggcugggccaucuacaccaaggacaacuccauccgcaucggcuccaagggcgacgucuucgucauccgcgagcccuucaucuccugcucccaccucgagugccgcaccuucuuccucacccagggcgcccuccucaacgacaagcacuccaacggcaccgucaaggaccgcucccccuaccgcgcccucauguccugcccccucggcgaggcccccucccccuacaacuccaaguucgaguccgucgccugguccgccuccgccugccacgacggcaugggcuggcucaccaucggcaucuccggccccgacaacggcgccgucgccguccucaaguacaacggcaucaucaccgagaccaucaaguccuggaagaagcgcauccuccgcacccaggaguccgagugcgucugcgucaacggcuccugcuucaccaucaugaccgacggccccuccaacggcgccgccuccuacaagaucuucaagaucgagaagggcaaggucaccaaguccaucgagcucaacgcccccaacuuccacuacgaggagugcuccugcuaccccgacaccggcaccgucaugugcgucugccgcgacaacuggcacggcuccaaccgccccugggucuccuucaaccagaaccucgacuaccagaucggcuacaucugcuccggcgucuucggcgacaacccccgccccaaggacggcaagggcuccugcaaccccgucaccgucgacggcgccgacggcgucaagggcuucuccuacaaguacggcaacggcgucuggaucggccgcaccaaguccaaccgccuccgcaagggcuucgagaugaucugggaccccaacggcuggaccgacaccgacuccgacuucuccgucaagcaggacgucgucgccaucaccgacugguccggcuacuccggcuccuucguccagcaccccgagcucaccggccucgacugcauccgccccugcuucugggucgagcucguccgcggccucccccgcgagaacaccaccaucuggaccuccggcuccuccaucuccuucugcggcgucgacuccgacaccgccaacugguccuggcccgacggcgccgagcuccccuucaccaucgacaaguga

SEQ ID NO: 112067 - RNA, 1413 nt, Artificial Sequence; identical to SEQ ID NO: 112066
  derived and/or modified CDS sequence (opt2) from neuraminidase__InfluenzaA__ABV29571

SEQ ID NO: 112068 - RNA, 1413 nt, Artificial Sequence; identical to SEQ ID NO: 112066
  derived and/or modified CDS sequence (opt2) from neuraminidase__InfluenzaA__ABV29582

SEQ ID NO: 112069 - RNA, 1413 nt, Artificial Sequence; identical to SEQ ID NO: 112066
  derived and/or modified CDS sequence (opt2) from neuraminidase__InfluenzaA__ABV29615

SEQ ID NO: 112070 - RNA, 1413 nt, Artificial Sequence
  derived and/or modified CDS sequence (opt2) from neuraminidase__InfluenzaA__ABV29637
augaaccccaaccagaagaucaucaccaucggcuccaucuccaucgccaucggcaucaucucccucaugcuccagaucggcaacaucaucuccaucugggccucccacuccauccagaccggcucccagaaccacaccggcaucugcaaccagcgcaucaucaccuacgagaacuccaccugggucaaccacaccuacgucaacaucaacaacaccaacgucgucgccggcaaggacaagaccuccgucacccucgccggcaacuccucccucugcuccaucuccggcugggccaucuacaccaaggacaacuccauccgcaucggcuccaagggcgacgucuucgucauccgcgagcccuucaucuccugcucccaccucgagugccgcaccuucuuccucacccagggcgcccuccucaacgacaagcacuccaacggcaccgucaaggaccgcucccccuaccgcgcccucauguccugcccccucggcgaggcccccucccccuacaacuccaaguucgaguccgucgccugguccgccuccgccugccacgacggcaugggcuggcucaccaucggcaucuccggccccgacaacggcgccgucgccguccucaaguacaacggcaucaucaccgagaccaucaaguccuggaagaagcgcauccuccgcacccaggaguccgagugcgucugcgucaacggcuccugcuucaccaucaugaccgacggccccuccaacggcaccgccuccuacaagaucuucaagaucgagaagggcaaggucaccaaguccaucgagcucaacgcccccaacuuccacuacgaggagugcuccugcuaccccgacaccggcaccgucaugugcgucugccgcgacaacuggcacggcuccaaccgccccugggucuccuucaaccagaaccucgacuaccaggucggcuacaucugcuccggcgucuucggcgacaacccccgccccaaggacggcaagggcuccugcaaccccaugaccgucgacggcgccgacggcgucaagggcuucuccuacaaguacggcaacggcgucuggaucggccgcaccaaguccaacaagcuccgcaagggcuucgagaugaucugggaccccaacggcuggaccgacaccgacuccgacuucuccgucaagcaggacgucgucgccaucuccgacugguccggcuacuccggcuccuucguccagcaccccgagcucaccggccucgacugcauccgccccugcuucugggucgagcucguccgcggccucccccgcgagaacaccaccaucuggaccuccggcuccuccaucuccuucugcggcgucgacuccgacaccgccaacugguccuggcccgacggcgccgagcuccccuucaccaucgacaaguga

SEQ ID NO: 112071 - RNA, 1413 nt, Artificial Sequence; identical to SEQ ID NO: 112066
  derived and/or modified CDS sequence (opt2) from neuraminidase__InfluenzaA__ABV29648

SEQ ID NO: 112072 - RNA, 1413 nt, Artificial Sequence; identical to SEQ ID NO: 112066
  derived and/or modified CDS sequence (opt2) from neuraminidase__InfluenzaA__ABV29659

SEQ ID NO: 112073 - RNA, 1413 nt, Artificial Sequence; identical to SEQ ID NO: 112066
  derived and/or modified CDS sequence (opt2) from neuraminidase__InfluenzaA__ABV29670

SEQ ID NO: 112074 - RNA, 1413 nt, Artificial Sequence
  derived and/or modified CDS sequence (opt2) from neuraminidase__InfluenzaA__ABV29681
augaaccccaaccagaagaucaucaccaucggcuccaucuccaucgccaucggcaucaucucccucaugcuccagaucggcaacaucaucuccaucugggccucccacuccauccagaccggcucccagaaccacaccggcaucugcaaccagcgcaucaucaccuacgagaacuccaccugggucaaccacaccuacgucuccaucaacaacaccaacgucgucgccggcaaggacaagaccuccgucacccucgccggcaacuccucccucugcuccaucuccggcugggccaucuacaccaaggacaacuccauccgcaucggcuccaagggcgacgucuucgucauccgcgagcccuucaucuccugcucccaccucgagugccgcaccuucuuccucacccagggcgcccuccucaacgacaagcacuccaacggcaccgucaaggaccgcucccccuaccgcgcccucauguccugcccccucggcgaggcccccucccccuacaacuccaaguucgaguccgucgccugguccgccuccgccugccacgacggcaugggcuggcucaccaucggcaucuccggccccgacaacggcgccgucgccguccucaaguacaacggcaucaucaccgagaccaucaaguccuggaagaagcgcauccuccgcacccaggaguccgagugcgucugcgucaacggcuccugcuucaccaucaugaccgacggccccuccaacggcgccgccuccuacaagaucuucaagaucgagaagggcaaggucaccaaguccaucgagcucaacgcccccaacuuccacuacgaggagugcuccugcuaccccgacaccggcaccgucaugugcgucugccgcgacaacuggcacggcuccaaccgccccugggucuccuucaaccagaaccucgacuaccagaucggcuacaucugcuccggcgucuucggcgacaacccccgccccaaggacggcaagggcuccugcaaccccgucaccgucgacggcgccgacggcgucaagggcuucuccuacaaguacggcaacggcgucuggaucggccgcaccaaguccaaccgccuccgcaagggcuucgagaugaucugggaccccaacggcuggaccgacaccgacuccgacuucuccgucaagcaggacgucgucgccaucaccgacugguccggcuacuccggcuccuucguccagcaccccgagcucaccggccucgacugcauccgccccugcuucugggucgagcucguccgcggccucccccgcgagaacaccaccaucuggaccuccggcuccuccaucuccuucugcggcaucgacuccgacaccgccaacugguccuggcccgacggcgccgagcuccccuucaccaucgacaaguga

SEQ ID NO: 112075 - RNA, 1413 nt, Artificial Sequence; identical to SEQ ID NO: 112066
  derived and/or modified CDS sequence (opt2) from neuraminidase__InfluenzaA__ABV29692

SEQ ID NO: 112076 - RNA, 1413 nt, Artificial Sequence; identical to SEQ ID NO: 112066
  derived and/or modified CDS sequence (opt2) from neuraminidase__InfluenzaA__ABV29703

SEQ ID NO: 112077 - RNA, 1410 nt, Artificial Sequence
  derived and/or modified CDS sequence (opt2) from neuraminidase__InfluenzaA__ABV29714
augaaccccaaccagaagaucaucaccaucggcuccgucucccucaccaucuccaccaucugcuucuucaugcagaucgccauccucaucaccaccgucacccuccacuucaagcaguacgaguucaacuccccccccaacaaccaggucaugcucugcgagcccaccaucaucgagcgcaacaucaccgagaucgucuaccucaccaacaccaccaucgagaaggagaucugccccaagcucgccgaguaccgcaacugguccaagccccagugcgacaucaccggcuucgcccccuucuccaaggacaacuccauccgccucuccgccggcggcgacaucugggucacccgcgagcccuacgucuccugcgaccccgacaagugcuaccaguucgcccucggccagggcaccacccucaacaacguccacuccaacgacaccguccgcgaccgcacccccuaccgcacccuccucaugaacgagcucggcguccccuuccaccucggcaccaagcaggucugcaucgccugguccuccuccuccugccacgacggcaaggccuggcuccacgucugcaucaccggcgacgacaagaacgccaccgccuccuucaucuacaacggccgccucgucgacuccaucgucuccugguccaaggagauccuccgcacccaggaguccgagugcgucugcaucaacggcaccugcaccgucgucaugaccgacggcuccgccuccggcgaggccgacaccaagauccucuucaucgaggagggcaagaucguccacaccuccacccucuccggcuccgcccagcacgucgaggagugcuccugcuacccccgcuaccccggcguccgcugcgucugccgcgacaacuggaagggcuccaaccgccccaucgucgacaucaacaucaaggaccacuccaucgucuccuccuacgucugcuccggccucgucggcgacaccccccgcaagaacgacuccuccuccuccucccacugccucgaccccaacaacgaggagggcggccacggcgucaagggcugggccuucgacgacggcaacgacgucuggaugggccgcaccaucuccgagaagucccgccucggcuacgagaccuucaaggucaucgagggcugguccaaccccaaguccaagcuccagaucaaccgccaggucaucgucgaccgcggcaaccgcuccggcuacuccggcaucuucuccgucgagggcaaguccugcaucaaccgcugcuucuacgucgagcucauccgcggccgcaaggaggagaccgagguccucuggaccuccaacuccaucgucgucuucugcggcaccuccggcaccuacggcaccggcuccuggcccgacggcgccgacaucaaccucaugcccaucuga

SEQ ID NO: 112078 - RNA, 1410 nt, Artificial Sequence
  derived and/or modified CDS sequence (opt2) from neuraminidase__InfluenzaA__ABV29725
augaaccccaaccagaagaucaucaccaucggcuccgucucccucaccaucuccaccaucugcuucuucaugcagaccgccauccucaucaccaccgucacccuccacuucaagcaguacgaguucaacuccccccccaacaaccagggcaugcucugcgagcccaccaucaucgagcgcaacaucaccgagaucgucuaccucaccaacaccaccaucgagaaggagaucugccccaagcucgccgaguaccgcaacugguccaagccccagugcgacaucaccggcuucgcccccuucuccaaggacaacuccauccgccucuccgccggcggcgacaucugggucacccgcgagcccuacgucuccugcgaccccgacaagugcuaccaguucgcccucggccagggcaccacccucaacaacguccacuccaacgacaccguccgcgaccgcacccccuaccgcacccuccucaugaacgagcucggcguccccuuccaccucggcaccaagcaggucugcaucgccugguccuccuccuccugccacgacggcaaggccuggcuccacgucugcaucaccggcgacgacaagaacgccaccgccuccuucaucuacaacggccgccucgucgacuccaucgucuccugguccaaggagauccuccgcacccaggaguccgagugcgucugcaucaacggcaccugcaccgucgucaugaccgacggcuccgccuccggcaaggccgacaccaagauccucuucaucgaggagggcaagaucguccacaccuccacccucuccggcuccgcccagcacgucgaggagugcuccugcuucccccgcuaccccggcguccgcugcgucugccgcgacaacuggaagggcuccaaccgccccaucgucgacaucaacaucaaggaccacuccaucgucuccuccuacgucugcuccggccucgucggcgacaccccccgcaagaacgacuccuccuccuccucccacugccucgaccccaacaacgaggagggcggccacggcgucaagggcugggccuucgacgacggcaacgacgucuggaugggccgcaccaucuccgagaagucccgccucggcuacgagaccuucaaggucaucgagggcugguccaaccccaaguccaagcuccagaucaaccgccaggucaucgucgaccgcggcaaccgcuccggcuacuccggcaucuucuccgucgagggcaaguccugcaucaaccgcugcuucuacgucgagcucauccgcggccgcaaggaggagaccgagguccucuggaccuccaacuccaucgucgucuucugcggcaccuccggcaccuacggcaccggcuccuggcccgacggcgccgacaucaaccucaugcccaucuga

SEQ ID NO: 112079 - RNA, 1413 nt, Artificial Sequence
  derived and/or modified CDS sequence (opt2) from neuraminidase__InfluenzaA__ABV29736
augaaccccaaccagaagaucaucaccaucggcuccaucuccaucgccaucggcaucaucucccucaugcuccagaucggcaacaucaucuccaucugggccucccacuccauccagaccggcucccagaaccacaccggcaucugcaaccagcgcaucaucaccuacgagaacuccaccugggucaaccacaccuacgucaacaucaacaacaccaacgucgucaccggcaaggacaagaccuccgucacccucgccggcaacuccucccucugcuccaucuccggcugggccaucuacaccaaggacaacuccauccgcaucggcuccaagggcgacgucuucgucauccgcgagcccuucaucuccugcucccaccucgagugccgcaccuucuuccucacccagggcgcccuccucaacgacaagcacuccaacggcaccgucaaggaccgcucccccuaccgcgcccucauguccugcccccucggcgaggcccccucccccuacaacuccaaguucgaguccgucgccugguccgccuccgccugccacgacggcaugggcuggcucaccaucggcaucuccggccccgacaacggcgccgucgccguccucaaguacaacggcaucaucaccgagaccaucaaguccuggaagaagcgcauccuccgcacccaggaguccgagugcgucugcgucaacggcuccugcuucaccaucaugaccgacggccccuccgacggcgccgccuccuacaagaucuucaagaucgagaagggcaaggucaccaaguccaucgagcucaacgcccccaacuuccacuacgaggagugcuccugcuaccccgacaccggcaccgucaugugcgucugccgcgacaacuggcacggcuccaaccgccccugggucuccuucaaccagaaccucgacuaccagaucggcuacaucugcuccggcgucuucggcgacaacccccgccccaaggacggcaagggcuccugcaaccccgucaccgucgacggcgccgacggcgucaagggcuucuccuacaaguacggcaacggcgucuggaucggccgcaccaaguccaacaagcuccgcaagggcuucgagaugaucugggaccccaacggcuggaccgacaccgacaacgacuucuccgucaagcaggacgucgucgccaucaccgacugguccggcuacuccggcuccuucguccagcaccccgagcucaccggccucgacugcauccgccccugcuucugggucgagcucguccgcggccucccccgcgagaacaccaccaucuggaccuccggcuccuccaucuccuucugcggcgucgacuccgacaccgccaacugguccuggcccgacggcgccgagcuccccuucaccaucgacaaguga

SEQ ID NO: 112080 - RNA, 1413 nt, Artificial Sequence
  derived and/or modified CDS sequence (opt2) from neuraminidase__InfluenzaA__ABV29747
augaaccccaaccagaagaucaucaccaucggcuccaucuccaucgccaucggcaucaucucccucaugcuccagaucggcaacaucaucuccaucugggccucccacuccauccagaccggcucccagaaccacaccggcaucugcaaccagcgcaucaucaccuacgagaacuccaccugggucaaccacaccuacgucuccaucaacaacaccaacgucgucgccggcaaggacaagaccuccgucacccucgccggcaacuccucccucugcuccaucuccggcugggccaucuacaccaaggacaacuccauccgcaucggcuccaagggcgacgucuucgucauccgcgagcccuucaucuccugcucccaccucgagugccgcaccuucuuccucacccagggcgcccuccucaacgacaagcacuccaacggcaccgucaaggaccgcucccccuaccgcgcccucauguccugcccccucggcgaggcccccucccccuacaacuccaaguucgaguccgucgccugguccgccuccgccugccacgacggcaugggcuggcucaccaucggcaucuccggccccgacaacggcgccgucgccguccucaaguacaacggcaucaucaccgagaccaucaaguccuggaagaagcgcauccuccgcacccaggaguccgagugcgucugcgucaacggcuccugcuucaccaucaugaccgacggccccuccaacggcgccgccuccuacaagaucuucaagaucgagaagggcaaggucaccaaguccaucgagcucaacgcccccaacuuccacuacgaggagugcuccugcuaccccgacaccggcaccgucaugugcgucugccgcgacaacuggcacggcuccaaccgccccugggucuccuucaaccagaaccucgacuaccagaucggcuacaucugcuccggcgucuucggcgacaacccccgccccaaggacggcaagggcuccugcaaccccgucaccgucgacggcgccgacggcgucaagggcuucuccuacaaguacggcaacggcgucuggaucggccgcaccaaguccaaccgccuccgcaagggcuucgagaugaucugggaccccaacggcuggaccgacaccgacuccgacuucuccguccgccaggacgucgucgccaucaccgacugguccggcuacuccggcuccuucguccagcaccccgagcucaccggccucgacugcauccgccccugcuucugggucgagcucguccgcggccucccccgcgagaacaccaccaucuggaccuccggcuccuccaucuccuucugcggcgucgacuccgacaccgccaacugguccuggcccgacggcgccgagcuccccuucaccaucgacaaguga

SEQ ID NO: 112081 - RNA, 1413 nt, Artificial Sequence; identical to SEQ ID NO: 112066
  derived and/or modified CDS sequence (opt2) from neuraminidase__InfluenzaA__ABV29769

SEQ ID NO: 112082 - RNA, 1413 nt, Artificial Sequence
  derived and/or modified CDS sequence (opt2) from neuraminidase__InfluenzaA__ABV29780
augaaccccaaccagaagaucaucaccaucggcuccaucuccaucgccaucggcaucaucucccucaugcuccagaucggcaacaucaucuccaucugggccucccacuccauccagaccggcucccagaaccacaccggcaucugcaaccagcgcaucaucaccuacgagaacuccaccugggucaaccacaccuacgucaacaucaacaacaccaacgucgucaccggcaaggacaagaccuccgucacccucgccggcaacuccucccucugcuccaucuccggcugggccaucuacaccaaggacaacuccauccgcaucggcuccaagggcgacgucuucgucauccgcgagcccuucaucuccugcucccaccucgagugccgcaccuucuuccucacccagggcgcccuccucaacgacaagcacuccaacggcaccgucaaggaccgcucccccuaccgcgcccucauguccugcccccucggcgaggcccccucccccuacaacuccaaguucgaguccgucgccugguccgccuccgccugccacgacggcaugggcuggcucaccaucggcaucuccggccccgacaacggcgccgucgccguccucaaguacaacggcaucaucaccgagaccaucaaguccuggaagaagcgcauccuccgcacccaggaguccgagugcgucugcgucaacggcuccugcuucaccaucaugaccgacggccccuccgacggcgccgccuccuacaagaucuucaagaucgagaagggcaaggucaccaaguccaucgagcucaacgcccccaacuuccacuacgaggagugcuccugcuaccccgacaccggcaccgucaugugcgucugccgcgacaacuggcacggcuccaaccgccccugggucuccuucaaccagaaccucgacuaccagaucggcuacaucugcuccggcgucuucggcgacaacccccgccccaaggacggcaagggcuccugcaaccccgucaccgucgacggcgccgacggcgucaagggcuucuccuacaaguacggcaacggcgucuggaucggccgcaccaaguccuccaagcuccgcaagggcuucgagaugaucugggaccccaacggcuggaccgacaccgacaacgacuucuccgucaagcaggacgucgucgccaucaccgacugguccggcuacuccggcuccuucguccagcaccccgagcucaccggccucgacugcauccgccccugcuucugggucgagcucguccgcggccucccccgcgagaacaccaccaucuggaccuccggcuccuccaucuccuucugcggcgucgacuccgacaccgccaacugguccuggcccgacggcgccgagcuccccuucaccaucgacaaguga

SEQ ID NO: 112083 - RNA, 1413 nt, Artificial Sequence; identical to SEQ ID NO: 112066
  derived and/or modified CDS sequence (opt2) from neuraminidase__InfluenzaA__ABV29791

SEQ ID NO: 112084 - RNA, 1413 nt, Artificial Sequence; identical to SEQ ID NO: 112066
  derived and/or modified CDS sequence (opt2) from neuraminidase__InfluenzaA__ABV29802

SEQ ID NO: 112085 - RNA, 1410 nt, Artificial Sequence; identical to SEQ ID NO: 111920
  derived and/or modified CDS sequence (opt2) from neuraminidase__InfluenzaA__ABV29824

SEQ ID NO: 112086 - RNA, 1413 nt, Artificial Sequence; identical to SEQ ID NO: 112066
  derived and/or modified CDS sequence (opt2) from neuraminidase__InfluenzaA__ABV29835

SEQ ID NO: 112087 - RNA, 1413 nt, Artificial Sequence
  derived and/or modified CDS sequence (opt2) from neuraminidase__InfluenzaA__ABV29846
augaaccccaaccagaagaucaucaccaucggcuccaucuccaucgccaucggcaucaucucccucaugcuccagaucggcaacaucaucuccaucugggccucccacuccauccagaucggcucccagaaccacaccggcaucugcaaccagcgcaucaucaccuacgagaacuccaccugggucaaccacaccuacgucaacaucaacaacaccaacgucgucgccggcaaggacaagaccuccgucacccucgccggcaacuccucccucugcuccaucuccggcugggccaucuacaccaaggacaacuccauccgcaucggcuccaagggcgacgucuucgucauccgcgagcccuucaucuccugcucccaccucgagugccgcaccuucuuccucacccagggcgcccuccucaacgacaagcacuccaacggcaccgucaaggaccgcucccccuaccgcgcccucauguccugcccccucggcgaggcccccucccccuacaacuccaaguucgaguccgucgccugguccgccuccgccugccacgacggcaugggcuggcucaccaucggcaucuccggccccgacaacggcgccgucgccguccucaaguacaacggcaucaucaccgagaccaucaaguccuggaagaagcgcauccuccgcacccaggaguccgagugcgucugcgucaacggcuccugcuucaccaucaugaccgacggccccuccaacggcgccgccuccuacaagaucuucaagaucgagaagggcaaggucaccaaguccaucgagcucaacgcccccaacuuccacuacgaggagugcuccugcuaccccgacaccggcaccgucaugugcgucugccgcgacaacuggcacggcuccaaccgccccugggucuccuucaaccagaaccucgacuaccaggucggcuacaucugcuccggcgucuucggcgacaacccccgccccaaggacggcaagggcuccugcaaccccaugaccgucgacggcgccgacggcgucaagggcuucuccuacaaguacggcaacggcgucuggaucggccgcaccaaguccaacaagcuccgcaagggcuucgagaugaucugggaccccaacggcuggaccgacaccgacuccgacuucuccgucaagcaggacgucgucgccaucaccgacugguccggcuacuccggcuccuucguccagcaccccgagcucaccggccucgacugcauccgccccugcuucugggucgagcucguccgcggccucccccgcgagaacaccaccaucuggaccuccggcuccuccaucuccuucugcggcgucgacuccgacaccgccaacugguccuggcccgacggcgccgagcuccccuucaccaucgacaaguga

SEQ ID NO: 112088 - RNA, 1413 nt, Artificial Sequence
  derived and/or modified CDS sequence (opt2) from neuraminidase__InfluenzaA__ABV29879
augaaccccaaccagaagaucaucaccaucggcuccaucuccaucgccaucggcaucaucucccucaugcuccagaucggcaacaucaucuccaucugggccucccacuccauccagaccggcucccagaaccacaccggcaucugcaaccagcgcaucaucaccuacgagaacuccaccugggucaaccacaccuacgucuccaucaacaacaccaacgucgucgccggcaaggacaagaccuccgucacccucgccggcaacuccucccucugcuccaucuccggcugggccaucuacaccaaggacaacuccauccgcaucggcuccaagggcgacgucuucaucauccgcgagcccuucaucuccugcucccaccucgagugccgcaccuucuuccucacccagggcgcccuccucaacgacaagcacuccaacggcaccgucaaggaccgcucccccuaccgcgcccucauguccugcccccucggcgaggcccccucccccuacaacuccaaguucgaguccgucgccugguccgccuccgccugccacgacggcaugggcuggcucaccaucggcaucuccggccccgacaacggcgccgucgccguccucaaguacaacggcaucaucaccgagaccaucaaguccuggaagaagcgcauccuccgcacccaggaguccgagugcgucugcgucaacggcuccugcuucaccaucaugaccgacggccccuccaacggcgccgccuccuacaagaucuucaagaucgagaagggcaaggucaccaaguccaucgagcucaacgcccccaacuuccacuacgaggagugcuccugcuaccccgacaccggcaccgucaugugcgucugccgcgacaacuggcacggcuccaaccgccccugggucuccuucaaccagaaccucgacuaccagaucggcuacaucugcuccggcgucuucggcgacaacccccgccccaaggacggcaagggcuccugcaaccccgucaccgucgacggcgccgacggcgucaagggcuucuccuacaaguacggcaacggcgucuggaucggccgcaccaaguccaaccgccuccgcaagggcuucgagaugaucugggaccccaacggcuggaccgacaccgacuccgacuucuccgucaagcaggacgucgucgccaucaccgacugguccggcuacuccggcuccuucguccagcaccccgagcucaccggccucgacugcauccgccccugcuucugggucgagcucguccgcggccucccccgcgagaacaccaccaucuggaccuccggcuccuccaucuccuucugcggcgucgacuccgacaccgccaacugguccuggcccgacggcgccgagcuccccuucaccaucgacaaguga

SEQ ID NO: 112089 - RNA, 1413 nt, Artificial Sequence; identical to SEQ ID NO: 112066
  derived and/or modified CDS sequence (opt2) from neuraminidase__InfluenzaA__ABV29890

SEQ ID NO: 112090 - RNA, 1410 nt, Artificial Sequence; identical to SEQ ID NO: 111920
  derived and/or modified CDS sequence (opt2) from neuraminidase__InfluenzaA__ABV29901

SEQ ID NO: 112091 - RNA, 1410 nt, Artificial Sequence
  derived and/or modified CDS sequence (opt2) from neuraminidase__InfluenzaA__ABV29912
augaaccccaaccagaagaucaucaccaucggcuccgucucccucaccaucuccaccaucugcuucuucaugcagaucgccauccucaucaccaccgucacccuccacuucaagcaguacgaguucaacuccccccccaacaaccaggucaugcucugcgagcccaccaucaucgagcgcaacaucaccgagaucgucuaccucaccaacaccaccaucgagaaggagaucugccccaagcucgccgaguaccgcaacugguccaagccccagugcgacaucaccggcuucgcccccuucuccaaggacaacuccauccgccucuccgccggcggcgacaucugggucacccgcgagcccuacgucuccugcgaccccgacaagugcuaccaguucgcccucggccagggcaccacccucaacaacguccacuccaacgacaccguccacgaccgcacccccuaccgcacccuccucaugaacgagcucggcguccccuuccaccucggcaccaagcaggucugcaucgccugguccuccuccuccugccacgacggcaaggccuggcuccacgucugcgucaccggcgacgacaagaacgccaccgccuccuucaucuacaacggccgccucgucgacuccaucgucuccugguccaaggacauccuccgcacccaggaguccgagugcaucugcaucaacggcaccugcaccgucgucaugaccgacggcuccgccuccggcaaggccgacaccaagauccucuucaucgaggagggcaagaucguccacaccuccacccucuccggcuccgcccagcacgucgaggagugcuccugcuacccccgcuaccccggcguccgcugcgucugccgcgacaacuggaagggcuccaaccgccccaucgucgacaucaacaucaaggacuacuccaucgucuccuccuacgucugcuccggccucgucggcgacaccccccgcaagaacgacuccuccuccuccucccacugccucgaccccaacaacgaggagggcggccacggcgucaagggcugggccuucgacgacggcaacgacgucuggaugggccgcaccaucuccgagaagcuccgccucggcuacgagaccuucaaggucaucgagggcugguccaaccccaacuccaagcuccagaucaaccgccaggucaucgucgacaagggcaaccgcuccggcuacuccggcaucuucuccgucgagggcaaguccugcaucaaccgcugcuucuacgucgagcucauccgcggccgcaaggaggagaccgagguccucuggaccuccaacuccaucgucgucuucugcggcaccuccggcaccuacggcaccggcuccuggcccgacggcgccgacaucaaccucaugcccaucuga

SEQ ID NO: 112092 - RNA, 1413 nt, Artificial Sequence
  derived and/or modified CDS sequence (opt2) from neuraminidase__InfluenzaA__ABV29923
augaaccccaaccagaagaucaucaccaucggcuccaucuccaucgccaucggcaucaucucccucaugcuccagaucggcaacaucaucuccaucugggccucccacuccauccagaccggcucccagaaccacaccggcaucugcaaccagcgcaucaucaccuacgagaacuccaccugggucaaccacaccuacgucaacaucaacaacaccaacgucgucgccggcaaggacaagaccuccgucacccucgccggcaacuccucccucugcuccaucuccggcugggccaucuacaccaaggacaacuccauccgcaucggcuccaagggcgacgucuucgucauccgcgagcccuucaucuccugcucccaccucgagugccgcaccuucuuccucacccagggcgcccuccucaacgacaagcacuccaacggcaccgucaaggaccgcucccccuaccgcgcccucauguccugcccccucggcgaggcccccucccccuacaacuccaaguucgaguccgucgccugguccgccuccgccugccacgacggcaugggcuggcucaccaucggcaucuccggccccgacaacggcgccgucgccguccucaaguacaacggcaucaucaccgagaccaucaaguccuggaagaagcgcauccuccgcacccaggaguccgagugcgucugcgucaacggcuccugcuucaccaucaugaccgacggccccuccaacggcgccgccuccuacaagaucuucaagaucgagaagggcaaggucaccaaguccaucgagcucaacgcccccaacuuccacuacgaggagugcuccugcuaccccgacaccggcaccgucaugugcgucugccgcgacaacuggcacggcuccaaccgccccugggucuccuucaaccagaaccucgacuaccaggucggcuacaucugcuccggcgucuucggcgacaacccccgccccaaggacggcaagggcuccugcaaccccaugaccgucgacggcgccgacggcgucaagggcuucuccuacaaguacggcaacggcgucuggaucggccgcaccaaguccaacaagcuccgcaagggcuucgagaugaucugggaccccaacggcuggaccgacaccgacuccgacuucuccgucaagcaggacgucgucgccaucaccgacugguccggcuacuccggcuccuucguccagcaccccgagcucaccggccucgacugcauccgccccugcuucugggucgagcucguccgcggccucccccgcgagaacgccaccaucuggaccuccggcuccuccaucuccuucugcggcgucgacuccgacaccgccaacugguccuggcccgacggcgccgagcuccccuucaccaucgacaaguga

SEQ ID NO: 112093 - RNA, 1410 nt, Artificial Sequence
  derived and/or modified CDS sequence (opt2) from neuraminidase__InfluenzaA__ABV29934
augaaccccaaccagaagaucaucaccaucggcuccgucucccucaccaucuccaccaucugcuucuucaugcagaucgccauccucaucaccaccgucacccuccacuucaagcaguacgaguucaacuccccccccaacaaccaggucaugcucugcgagcccaccaucaucgagcgcaacaucaccgagaucgucuaccucaccaacaccaccaucgagaaggagaucugccccaagcucgccgaguaccgcaacugguccaagccccagugcgacaucaccggcuucgcccccuucuccaaggacaacuccauccgccucuccgccggcggcgacaucugggucacccgcgagcccuacgucuccugcgaccccgacaagugcuaccaguucgcccucggccagggcaccacccucaacaacguccacuccaacgacaccguccgcgaccgcacccccuaccgcacccuccucaugaacgagcucggcguccccuuccaccucggcaccaagcaggucugcaucgccugguccuccuccuccugccacgacggcaaggccuggcuccacgucugcaucaccggcgacgacaagaacgccaccgccuccuucaucuacaacggccgccucgucgacuccaucgucuccugguccaaggagauccuccgcacccaggaguccgagugcgucugcaucaacggcaccugcaccgucgucaugaccgacggcuccgccuccggcaaggccgacaccaagauccucuucaucgaggagggcaagaucguccacaccuccacccucuccggcuccgcccagcacgucgaggagugcuccugcuacccccgcuaccccggcguccgcugcgucugccgcgacaacuggaagggcuccaaccgccccaucgucgacaucaacaucaaggaccacuccaucgucuccuccuacgucugcuccggccucgucggcgacaccccccgcaagaacgacuccuccuccuccucccacugccucgaccccaacaacgaggagggcggccacggcgucaagggcugggccuucgacgacggcaacgacgucuggaugggccgcaccaucuccgagaagucccgccucggcuacgagaccuucaaggucaucgagggcugguccaaccccaaguccaagcuccagaucaaccgccaggucaucgucgaccgcggcaaccgcaccggcuacuccggcaucuucuccgucgagggcaaguccugcaucaaccgcugcuucuacgucgagcucauccgcggccgcaaggaggagaccgagguccucuggaccuccaacuccaucgucgucuucugcggcaccuccggcaccuacggcaccggcuccuggcccgacggcgccgacaucaaccucaugcccaucuga

SEQ ID NO: 112094 - RNA, 1413 nt, Artificial Sequence; identical to SEQ ID NO: 112079
  derived and/or modified CDS sequence (opt2) from neuraminidase__InfluenzaA__ABV29945

SEQ ID NO: 112095 - RNA, 1413 nt, Artificial Sequence
  derived and/or modified CDS sequence (opt2) from neuraminidase__InfluenzaA__ABV29956
augaaccccaaccagaagaucaucaccaucggcuccaucuccaucgccaucggcaucaucucccucaugcuccagaucggcaacaucaucuccaucugggccucccacuccauccagaccggcucccagaaccacaccggcaucugcaaccagcgcaucaucaccuacgagaacuccaccugggucaaccacaccuacgucuccaucaacaacaccaacgucgucgccggcaaggacaagaccuccgucacccucgccggcaacuccucccucugcuccaucuccggcugggccaucuacaccaaggacaacuccauccgcaucggcuccaagggcgacgucuucgucauccgcgagcccuucaucuccugcucccaccucgagugccgcaccuucuuccucacccagggcgcccuccucaacgacaagcacuccaacggcaccgucaaggaccgcucccccuaccgcgcccucauguccugcccccucggcgaggcccccucccccuacaacuccaaguucgaguccgucgccugguccgccuccgccugccacgacggcaugggcuggcucaccaucggcaucuccggccccgacaacggcgccgucgccguccucaaguacaagggcaucaucaccgagaccaucaaguccuggaagaagcgcauccuccgcacccaggaguccgagugcgucugcgucaacggcuccugcuucaccaucaugaccgacggccccuccaacggcgccgccuccuacaagaucuucaagaucgagaagggcaaggucaccaaguccaucgagcucaacgcccccaacuuccacuacgaggagugcuccugcuaccccgacaccggcaccgucaugugcgucugccgcgacaacuggcacggcuccaaccgccccugggucuccuucaaccagaaccucgacuaccagaucggcuacaucugcuccggcgucuucggcgacaacccccgccccaaggacggcaagggcuccugcaaccccgucaccgucgacggcgccgacggcgucaagggcuucuccuacaaguacggcaacggcgucuggaucggccgcaccaaguccaaccgccuccgcaagggcuucgagaugaucugggaccccaacggcuggaccgacaccgacuccgacuucuccgucaagcaggacgucgucgccaucaccgacugguccggcuacuccggcuccuucguccagcaccccgagcucaccggccucgacugcauccgccccugcuucugggucgagcucguccgcggccucccccgcgagaacaccaccaucuggaccuccggcuccuccaucuccuucugcggcgucgacuccgacaccgccaacugguccuggcccgacggcgccgagcuccccuucaccaucgacaaguga

SEQ ID NO: 112096 - RNA, 1413 nt, Artificial Sequence
  derived and/or modified CDS sequence (opt2) from neuraminidase__InfluenzaA__ABV29989
augaaccccaaccagaagaucaucaccaucggcuccaucuccaucgccaucggcaucaucucccucaugcuccagaucggcaacaucaucuccaucugggccucccacuccauccagaccggcucccagaaccacaccggcaucugcaaccagcgcaucaucaccuacgagaacuccaccugggucaaccacaccuacgucuccaucaacaacaccaacgucgucgccggcaaggacaagaccuccgucacccucgccggcaacuccucccucugcuccaucuccggcugggccaucuacaccaaggacaacuccauccgcaucggcuccaagggcgacgucuucgucaugcgcgagcccuucaucuccugcucccaccucgagugccgcaccuucuuccucacccagggcgcccuccucaacgacaagcacuccaacggcaccgucaaggaccgcucccccuaccgcgcccucauguccugcccccucggcgaggcccccucccccuacaacuccaaguucgaguccgucgccugguccgccuccgccugccacgacggcaugggcuggcucaccaucggcaucuccggccccgacaacggcgccgucgccguccucaaguacaacggcaucaucaccgagaccaucaaguccuggaagaagcgcauccuccgcacccaggaguccgagugcgucugcgucaacggcuccugcuucaccaucaugaccgacggccccuccaacggcgccgccuccuacaagaucuucaagaucgagaagggcaaggucaccaaguccaucgagcucaacgcccccaacuuccacuacgaggagugcuccugcuaccccgacaccggcaccgucaugugcgucugccgcgacaacuggcacggcuccaaccgccccugggucuccuucaaccagaaccucgacuaccagaucggcuacaucugcuccggcgucuucggcgacaacccccgccccaaggacggcaagggcuccugcaaccccgucaccgucgacggcgccgacggcgucaagggcuucuccuacaaguacggcaacggcgucuggaucggccgcaccaaguccaaccgccuccgcaagggcuucgagaugaucugggaccccaacggcuggaccgacaccgacuccgacuucuccgucaagcaggacgucgucgccaucaccgacugguccggcuacuccggcuccuucguccagcaccccgagcucaccggccucgacugcauccgccccugcuucugggucgagcucguccgcggccucccccgcgagaacaccaccaucuggaccuccggcuccuccaucuccuucugcggcgucgacuccgacaccgccaacugguccuggcccgacggcgccgagcuccccuucaccaucgacaaguga

SEQ ID NO: 112097 - RNA, 1413 nt, Artificial Sequence; identical to SEQ ID NO: 112066
  derived and/or modified CDS sequence (opt2) from neuraminidase__InfluenzaA__ABV30000

SEQ ID NO: 112098 - RNA, 1413 nt, Artificial Sequence; identical to SEQ ID NO: 112066
  derived and/or modified CDS sequence (opt2) from neuraminidase__InfluenzaA__ABV30011

SEQ ID NO: 112099 - RNA, 1413 nt, Artificial Sequence; identical to SEQ ID NO: 112066
  derived and/or modified CDS sequence (opt2) from neuraminidase__InfluenzaA__ABV30022

SEQ ID NO: 112100 - RNA, 1413 nt, Artificial Sequence
  derived and/or modified CDS sequence (opt2) from neuraminidase__InfluenzaA__ABV30044
augaaccccaaccagaagaucaucaccaucggcuccaucuccaucgccaucggcaucaucucccucaugcuccagaucggcaacaucaucuccaucugggccucccacuccauccagaccggcucccagaaccacaccggcaucugcaaccagcgcaucaucaccuacgagaacuccaccugggucaaccacaccuacgucaacaucaacaacaccaacgucgucgccggcaaggacaagaccuccggcacccucgccggcaacuccucccucugcuccaucuccggcugggccaucuacaccaaggacaacuccauccgcaucggcuccaagggcgacgucuucgucauccgcgagcccuucaucuccugcucccaccucgagugccgcaccuucuuccucacccagggcgcccuccucaacgacaagcacuccaacggcaccgucaaggaccgcucccccuaccgcgcccucauguccugcccccucggcgaggcccccucccccuacaacuccaaguucgaguccgucgccugguccgccuccgccugccacgacggcaugggcuggcucaccaucggcaucuccggccccgacaacggcgccgucgccguccucaaguacaacggcaucaucaccgagaccaucaaguccuggaagaagcgcauccuccgcacccaggaguccgagugcgucugcgucaacggcuccugcuucaccaucaugaccgacggccccuccaacggcgccgccuccuacaagaucuucaagaucgagaagggcaaggucaccaaguccaucgagcucaacgcccccaacuuccacuacgaggagugcuccugcuaccccgacaccggcaccgucaugugcgucugccgcgacaacuggcacggcuccaaccgccccugggucuccuucaaccagaaccucgacuaccaggucggcuacaucugcuccggcgucuucggcgacaacccccgccccaaggacggcaagggcuccugcaaccccaugaccgucgacggcgccgacggcgucaagggcuucuccuacaaguacggcaacggcgucuggaucggccgcaccaaguccaacaagcuccgcaagggcuucgagaugaucugggaccccaacggcuggaccgacaccgacuccgacuucuccgucaagcaggacgucgucgccaucaccgacugguccggcuacuccggcuccuucguccagcaccccgagcucaccggccucgacugcauccgccccugcuucugggucgagcucguccgcggccucccccgcgagaacaccaccaucuggaccuccggcuccuccaucuccuucugcggcgucgacuccgacaccgccaacugguccuggcccgacggcgccgagcuccccuucaccaucgacaaguga

SEQ ID NO: 112101 - RNA, 1413 nt, Artificial Sequence
  derived and/or modified CDS sequence (opt2) from neuraminidase__InfluenzaA__ABV30055
augaaccccaaccagaagaucaucaccaucggcuccaucuccaucgccaucggcaucaucucccucaugcuccagaucggcaacaucaucuccaucugggccucccacuccauccagaccggcucccagaaccacaccggcaucugcaaccagcgcaucaucaccuacgagaacuccaccugggucaaccacaccuacgucaacaucaacaacaccaacgucgucgccggcaaggacaagaccuccgucacccucgccggcaacuccucccucugcuccaucuccggcugggccaucuacaccaaggacaacuccauccgcaucggcuccaagggcgacgucuucgucauccgcgagcccuucaucuccugcucccaccucgagugccgcaccuucuuccucacccagggcgcccuccucaacgacaagcacuccaacggcaccgucaaggaccgcucccccuaccgcgcccucauguccugcccccucggcgaggcccccucccccuacaacuccaaguucgaguccgucgccugguccgccuccgccugccacgacggcaugggcuggcucaccaucggcaucuccggccccgacaacggcgccgucgccguccucaaguacaacggcaucaucaccgagaccaucaaguccuggaagaagcgcauccuccgcacccaggaguccgagugcgucugcgucaacggcuccugcuucaccaucaugaccgacggccccuccaacggcgccgccuccuacaagaucuucaagaucgagaagggcaaggucaccaaguccaucgagcucaacgcccccaacuuccacuacgaggagugcuccugcuaccccgacaccggcaccgucaugugcgucugccgcgacaacuggcacggcuccaaccgccccugggucuccuucaaccagaaccucgacuaccaggucggcuacaucugcuccggcgucuucggcgacaacccccgccccaaggacggcaagggcuccugcaaccccaugaccgucgacggcgccgacggcgucaagggcuucuccuacaaguacggcaacggcgucuggaucggccgcaccaaguccaacaagcuccgcaagggcuucgagaugaucugggaccccaacggcuggaccgacaccgacuccgacuucuccgucaagcaggacgucgucgccaucaccgacugguccggcuacuccggcuccuucguccagcaccccgagcucaccggccucgacugcauccgccccugcuucugggucgagcucguccgcggccucccccgcgagaacaccaccaucuggaccuccggcuccuccaucuccuucugcggcgucgacuccgacaccgccaacugguccuggcccgacggcgccgagcuccccuucaccaucgacaaguga

SEQ ID NO: 112102 - RNA, 1410 nt, Artificial Sequence
  derived and/or modified CDS sequence (opt2) from neuraminidase__InfluenzaA__ABV30077
augaaccccaaccagaagaucaucaccaucggcuccgucucccucaccaucuccaccaucugcuucuucaugcagaccgccauccucaucaccaccgucacccuccacuucaagcaguacgaguucaacuccccccccaacaaccaggucaugcucugcgagcccaccaucaucgagcgcaacaucaccgagaucgucuaccucaccaacaccaccaucgagaaggagaucugccccaagcucgccgaguaccgcaacugguccaagccccagugcgacaucaccggcuucgcccccuucuccaaggacaacuccauccgccucuccgccggcggcgacaucugggucacccgcgagcccuacgucuccugcgaccccgacaagugcuaccaguucgcccucggccagggcaccacccucaacaacguccacuccaacgacaccguccgcgaccgcacccccuaccgcacccuccucaugaacgagcucggcguccccuuccaccucggcaccaagcaggucugcaucgccugguccuccuccuccugccacgacggcaaggccuggcuccacgucugcaucaccggcgacgacaagaacgccaccgccuccuucaucuacaacggccgccucgucgacuccaucgucuccugguccaaggagauccuccgcacccaggaguccgagugcgucugcaucaacggcaccugcaccgucgucaugaccgacggcuccgccuccggcaaggccgacaccaagauccucuucaucgaggagggcaagaucguccacaccuccacccucuccggcuccgcccagcacgucgaggagugcuccugcuacccccgcuaccccggcguccgcugcgucugccgcgacaacuggaagggcuccaaccgccccaucgucgacaucaacaucaaggaccacuccaucgucuccuccuacgucugcuccggccucgucggcgacaccccccgcaagaacgacuccuccuccuccucccacugccucgaccccaacaacgaggagggcggccacggcgucaagggcugggccuucgacgacggcaacgacgucuggaugggccgcaccaucuccgagaagucccgccucggcuacgagaccuucaaggucaucgagggcugguccaaccccaaguccaagcuccagaucaaccgccaggucaucgucgaccgcggcaaccgcuccggcuacuccggcaucuucuccgucgagggcaaguccugcaucaaccgcugcuucuacgucgagcucauccgcggccgcaaggaggagaccgagguccucuggaccuccaacuccaucgucgucuucugcggcaccuccggcaccuacggcaccggcuccuggcccgacggcgccgacaucaaccucaugcccaucuga

SEQ ID NO: 112103 - RNA, 1413 nt, Artificial Sequence; identical to SEQ ID NO: 112066
  derived and/or modified CDS sequence (opt2) from neuraminidase__InfluenzaA__ABV30088

SEQ ID NO: 112104 - RNA, 1413 nt, Artificial Sequence; identical to SEQ ID NO: 112066
  derived and/or modified CDS sequence (opt2) from neuraminidase__InfluenzaA__ABV30099

SEQ ID NO: 112105 - RNA, 1413 nt, Artificial Sequence
  derived and/or modified CDS sequence (opt2) from neuraminidase__InfluenzaA__ABV30110
augaaccccaaccagaagaucaucaccaucggcuccaucuccaucgccaucggcaucaucucccucaugcuccagaucggcaacaucaucuccaucugggccucccacuccauccagaccggcucccagaaccacaccggcaucugcaaccagcgcaucaucaccuacgagaacuccaccugggucaaccacaccuacgucuccaucaacaacaccaacgucgucgccggcaaggacaagaccuccgucacccucgccggcaacuccucccucugcuccaucuccggcugggccaucuacaccaaggacaacuccauccgcaucggcuccaagggcgacgucuucgucauccgcgagcccuucaucuccugcucccaccucgagugccgcaccuucuuccucacccagggcgcccuccucaacgacaagcacuccaacggcaccgucaaggaccgcucccccuaccgcgcccucauguccugcccccucggcgaggcccccucccccuacaacuccaaguucgaguccgucgccugguccgccuccgccugccacgacggcaugggcuggcucaccaucggcaucuccggccccgacaacggcgccgucgccguccucaaguacaacggcaucaucaccggcaccaucaaguccuggaagaagcgcauccuccgcacccaggaguccgagugcgucugcgucaacggcuccugcuucaccaucaugaccgacggccccuccaacggcgccgccuccuacaagaucuucaagaucgagaagggcaaggucaccaaguccaucgagcucaacgcccccaacuuccacuacgaggagugcuccugcuaccccgacaccggcaccgucaugugcgucugccgcgacaacuggcacggcuccaaccgccccugggucuccuucaaccagaaccucgacuaccagaucggcuacaucugcuccggcgucuucggcgacaacccccgccccaaggacggcaagggcuccugcaaccccgucaccgucgacggcgccgacggcgucaagggcuucuccuacaaguacggcaacggcgucuggaucggccgcaccaaguccaaccgccuccgcaagggcuucgagaugaucugggaccccaacggcuggaccgacaccgacuccgacuucuccgucaagcaggacgucgucgccaucaccgacugguccggcuacuccggcuccuucguccagcaccccgagcucaccggccucgacugcauccgccccugcuucugggucgagcucguccgcggccucccccgcgagaacaccaccaucuggaccuccggcuccuccaucuccuucugcggcgucgacuccgacaccgccaacugguccuggcccgacggcgccgagcuccccuucaccaucgacaaguga

SEQ ID NO: 112106 - RNA, 1413 nt, Artificial Sequence; identical to SEQ ID NO: 112066
  derived and/or modified CDS sequence (opt2) from neuraminidase__InfluenzaA__ABV30132

SEQ ID NO: 112107 - RNA, 1413 nt, Artificial Sequence
  derived and/or modified CDS sequence (opt2) from neuraminidase__InfluenzaA__ABV30143
augaaccccaaccagaagaucaucaccaucggcuccaucuccaucgccaucggcaucaucucccucaugcuccagaucggcaacaucaucuccaucugggccucccacuccauccagaccggcucccagaaccacaccggcaucugcaaccagcgcaucaucaccuacgagaacuccaccugggucaaccacaccuacgucaacaucaacaacaccaacgucgucgccggcaaggacaagaccuccgucacccucgccggcaacuccucccucugcuccaucuccggcugggccaucuacaccaaggacaacuccauccgcaucggcuccaagggcgacgucuucgucauccgcgagcccuucaucuccugcucccaccucgagugccgcaccuucuuccucacccagggcgcccuccucaacgacaagcacuccaacggcaccgucaaggaccgcucccccuaccgcgcccucauguccugcccccucggcgaggcccccucccccuacaacuccaaguucgaguccgucgccugguccgccuccgccugccacgacggcaugggcuggcucaccaucggcaucuccggccccgacaacggcgccgucgccguccucaaguacaacggcaucaucaccgagaccaucaaguccuggaagaagcgcauccuccgcacccaggaguccgagugcgucugcgucaacggcuccugcuucaccaucaugaccgacggccccuccaacggcgccgccuccuacaagaucuucaagaucgagaagggcaaggucaccaaguccaucgagcucaacgcccccaacuuccacuacgaggagugcuccugcuaccccgacaccggcaccgucaugugcgucugccgcgacaacuggcacggcuccaaccgccccugggucuccuucaaccagaaccucgacuaccagaucggcuacaucugcuccggcgucuucggcgacaacccccgccccaaggacggcaagggcuccugcaaccccgucaccgucgacggcgccgacggcgucaagggcuucuccuacaaguacggcaacggcgucuggaucggccgcaccaaguccaaccgccuccgcaagggcuucgagaugaucugggaccccaacggcuggaccaacaccgacuccgacuucuccgucaagcaggacgucgucgccaucaccgacugguccggcuacuccggcuccuucguccagcaccccgagcucaccggccucgacugcauccgccccugcuucugggucgagcucguccgcggccucccccgcgagaacaccaccaucuggaccuccggcuccuccaucuccuucugcggcgucgacuccgacaccgccaacugguccuggcccgacggcgccgagcuccccuucaccaucgacaaguga

SEQ ID NO: 112108 - RNA, 1413 nt, Artificial Sequence; identical to SEQ ID NO: 112092
  derived and/or modified CDS sequence (opt2) from neuraminidase__InfluenzaA__ABV30154

SEQ ID NO: 112109 - RNA, 1413 nt, Artificial Sequence
  derived and/or modified CDS sequence (opt2) from neuraminidase__InfluenzaA__ABV30165
augaaccccaaccagaagaucaucaccaucggcuccaucuccaucgccaucggcaucaucucccucaugcuccagaucggcaacaucaucuccaucugggccucccacuccauccagaccggcucccagaaccacaccggcaucugcaaccagcgcaucaucaccuacgagaacuccaccugggucaaccacaccuacgucuccaucaacaacaccaacgucgucgccggcaaggacaagaccuccgucacccucgccggcaaccucucccucugcuccaucuccggcugggccaucuacaccaaggacaacuccauccgcaucggcuccaagggcgacgucuucgucauccgcgagcccuucaucuccugcucccaccucgagugccgcaccuucuuccucacccagggcgcccuccucaacgacaagcacuccaacggcaccgucaaggaccgcucccccuaccgcgcccucauguccugcccccucggcgaggcccccucccccuacaacuccaaguucgaguccgucgccugguccgccuccgccugccacgacggcaugggcuggcucaccaucggcaucuccggccccgacaacggcgccgucgccguccucaaguacaacggcaucaucaccgagaccaucaaguccuggaagaagcgcauccuccgcacccaggaguccgagugcgucugcgucaacggcuccugcuucaccaucaugaccgacggccccuccaacggcgccgccuccuacaagaucuucaagaucgagaagggcaaggucaccaaguccaucgagcucaacgcccccaacuuccacuacgaggagugcuccugcuaccccgacaccggcaccgucaugugcgucugccgcgacaacuggcacggcuccaaccgccccugggucuccuucaaccagaaccucgacuaccagaucggcuacaucugcuccggcgucuucggcgacaacccccgccccaaggacggcaagggcuccugcaaccccgucaccgucgacggcgccgacggcgucaagggcuucuccuacaaguacggcaacggcgucuggaucggccgcaccaaguccaaccgccuccgcaagggcuucgagaugaucugggaccccaacggcuggaccgacaccgacuccgacuucuccgucaagcaggacgucgucgccaucaccgacugguccggcuacuccggcuccuucguccagcaccccgagcucaccggccucgacugcauccgccccugcuucugggucgagcucguccgcggccucccccgcgagaacaccaccaucuggaccuccggcuccuccaucuccuucugcggcgucgacuccgacaccgccaacugguccuggcccgacggcgccgagcuccccuucaccaucgacaaguga

SEQ ID NO: 112110 - RNA, 1413 nt, Artificial Sequence; identical to SEQ ID NO: 112066
  derived and/or modified CDS sequence (opt2) from neuraminidase__InfluenzaA__ABV30187

SEQ ID NO: 112111 - RNA, 1413 nt, Artificial Sequence; identical to SEQ ID NO: 112066
  derived and/or modified CDS sequence (opt2) from neuraminidase__InfluenzaA__ABV30198

SEQ ID NO: 112112 - RNA, 1410 nt, Artificial Sequence; identical to SEQ ID NO: 111920
  derived and/or modified CDS sequence (opt2) from neuraminidase__InfluenzaA__ABV30209

SEQ ID NO: 112113 - RNA, 1410 nt, Artificial Sequence; identical to SEQ ID NO: 112102
  derived and/or modified CDS sequence (opt2) from neuraminidase__InfluenzaA__ABV30220

SEQ ID NO: 112114 - RNA, 1410 nt, Artificial Sequence; identical to SEQ ID NO: 112102
  derived and/or modified CDS sequence (opt2) from neuraminidase__InfluenzaA__ABV30231

SEQ ID NO: 112115 - RNA, 1410 nt, Artificial Sequence
  derived and/or modified CDS sequence (opt2) from neuraminidase__InfluenzaA__ABV30264
augaaccccaaccagaagaucaucaccaucggcuccgucucccucaccaucuccaccaucugcuucuucaugcagaucgccauccucaucaccaccgucacccuccacuucaagcaguacgaguucuccuccccccccaacaaccaggucaugcucugcgagcccaccaucaucgagcgcaacaucaccgaggucgucuaccucaccaacaccaccaucgagaaggagaucugccccaagcucgccgaguaccgcaacugguccaagccccagugcgacaucaccggcuucgcccccuucuccaaggacaacuccauccgccucuccgccggcggcgacaucugggucacccgcgagcccuacgucuccugcgaccccgacaagugcuaccaguucgcccucggccagggcaccacccucaacaacguccacuccaacgacaccguccacgaccgcacccccuaccgcacccuccucaugaacgagcucggcguccccuuccaccucggcaccaagcaggucugcaucgccugguccuccuccuccugccacgacggcaaggccuggcuccacgucugcgucaccggcgacgacaagaacgccaccgccuccuucaucuacaacggccgccucgucgacuccaucgucuccugguccaaggagauccuccgcacccaggaguccgagugcgucugcaucaacggcaccugcaccgucgucaugaccgacggcuccgccuccggcaaggccgacaccaagauccucuucaucgaggagggcaagaucguccacaccuccacccucuccggcuccgcccagcacgucgaggagugcuccugcuacccccgcuaccccggcguccgcugcgucugccgcgacaacuggaagggcuccaaccgccccaucgucgacaucaacaucaaggacuacuccaucgucucccgcuacgucugcuccggccucgucggcgacaccccccgcaagaacgacuccuccuccuccucccacugccucgaccccaacaacgaggagggcggccacggcgucaagggcugggccuucgacgacggcaacgacgucuggaugggccgcaccaucuccgagaagucccgcuccggcuacgagaccuucaaggucaucgagggcugguccaaccccaacuccaagcuccagaucaaccgccaggucaucgucgaccgcggcaaccgcuccggcuacuccggcaucuucuccgucgagggcaaguccugcaucaaccgcugcuucuacgucgagcucauccgcggccgcaaggaggagaccgagguccucuggaccuccaacuccaucgucgucuucugcggcaccuccggcaccuacggcaccggcuccuggcccgacggcgccgacaucaaccucaugcccaucuga

SEQ ID NO: 112116 - RNA, 1410 nt, Artificial Sequence
  derived and/or modified CDS sequence (opt2) from neuraminidase__InfluenzaA__ABV30275
augaaccccaaccagaagaucaucaccaucggcuccgucucccucaccaucuccaccaucugcuucuucaugcagaccgccauccucaucaccaccgucacccuccacuucaagcaguacgaguucaacuccacccccaacaaccaggucaugcucugcgagcccaccaucaucgagcgcaacaucaccgagaucgucuaccucaccaacaccaccaucgagaaggagaucugccccaagcucgccgaguaccgcaacugguccaagccccagugcgacaucaccggcuucgcccccuucuccaaggacaacuccauccgccucuccgccggcggcgacaucugggucacccgcgagcccuacgucuccugcgaccccgacaagugcuaccaguucgcccucggccagggcaccacccucaacaacguccacuccaacgacaccguccgcgaccgcacccccuaccgcacccuccucaugaacgagcucggcguccccuuccaccucggcaccaagcaggucugcaucgccugguccuccuccuccugccacgacggcaaggccuggcuccacgucugcaucaccggcgacgacaagaacgccaccgccuccuucaucuacaacggccgccucgucgacuccaucgucuccugguccaaggagauccuccgcacccaggaguccgagugcgucugcaucaacggcaccugcaccgucgucaugaccgacggcuccgccuccggcaaggccgacaccaagauccucuucaucgaggagggcaagaucguccacaccuccacccucuccggcuccgcccagcacgucgaggagugcuccugcuacccccgcuaccccggcguccgcugcgucugccgcgacaacuggaagggcuccaaccgccccaucgucgacaucaacaucaaggaccacuccaucgucuccuccuacgucugcuccggccucgucggcgacaccccccgcaagaacgacuccuccuccuccucccacugccucgaccccaacaacgaggagggcggccacggcgucaagggcugggccuucgacgacggcaacgacgucuggaugggccgcaccaucuccgagaagucccgccucggcuacgagaccuucaaggucaucgagggcugguccaaccccaaguccaagcuccagaucaaccgccaggucaucgucgaccgcggcaaccgcuccggcuacuccggcaucuucuccgucgagggcaaguccugcaucaaccgcugcuucuacgucgagcucauccgcggccgcaaggaggagaccgagguccucuggaccuccaacuccaucgucgucuucugcggcaccuccggcaccuacggcaccggcuccuggcccgacggcgccgacaucaaccucaugcccaucuga

SEQ ID NO: 112117 - RNA, 1413 nt, Artificial Sequence; identical to SEQ ID NO: 112107
  derived and/or modified CDS sequence (opt2) from neuraminidase__InfluenzaA__ABV30297

SEQ ID NO: 112118 - RNA, 1413 nt, Artificial Sequence
  derived and/or modified CDS sequence (opt2) from neuraminidase__InfluenzaA__ABV30308
augaaccccaaccagaagaucaucaccaucggcuccaucuccaucgccaucggcaucaucucccucaugcuccagaucggcaacaucaucuccaucugggccucccacuccauccagaccggcucccagaaccacaccggcaucugcaaccagcgcaucaucaccuacgagaacuccaccugggucaaccacaccuacgucuccaucaacaacaccaacgucgucgccggcaaggacaagaccuccgucacccucgccggcaacuccucccucugcuccaucuccggcugggccaucuacaccaaggacaacuccauccgcaucggcuccaagggcgacgucuucgucauccgcgagcccuucaucuccugcucccaccucgagugccgcaccuucuuccucacccagggcgcccuccucaacgacaagcacuccaacggcaccgucaaggaccgcucccccuaccgcgcccucauguccugcccccucggcgaggcccccucccccuacaacuccaaguucgaguccgucgccugguccgccuccgccugccacgacggcaugggcuggcucaccaucggcaucuccggccccgacaacggcgccgucgccguccucaaguacaacggcaucaucaccgagaccaucaaguccuggaagaagcgcauccuccgcacccaggaguccgagugcgucugccucaacggcuccugcuucaccaucaugaccgacggccccuccaacggcgccgccuccuacaagaucuucaagaucgagaagggcaaggucaccaaguccaucgagcucaacgcccccaacuuccacuacgaggagugcuccugcuaccccgacaccggcaccgucaugugcgucugccgcgacaacuggcacggcuccaaccgccccugggucuccuucaaccagaaccucgacuaccagaucggcuacaucugcuccggcgucuucggcgacaacccccgccccaaggacggcaagggcuccugcaaccccgucaccgucgacggcgccgacggcgucaagggcuucuccuacaaguacggcaacggcgucuggaucggccgcaccaaguccaaccgccuccgcaagggcuucgagaugaucugggaccccaacggcuggaccgacaccgacuccgacuucuccgucaagcaggacgucgucgccaucaccgacugguccggcuacuccggcuccuucguccagcaccccgagcucaccggccucgacugcauccgccccugcuucugggucgagcucguccgcggccucccccgcgagaacaccaccaucuggaccuccggcuccuccaucuccuucugcggcgucgacuccgacaccgccaacugguccuggcccgacggcgccgagcuccccuucaccaucgacaaguga

SEQ ID NO: 112119 - RNA, 1413 nt, Artificial Sequence
  derived and/or modified CDS sequence (opt2) from neuraminidase__InfluenzaA__ABV30319
augaaccccaaccagaagaucaucaccaucggcuccaucuccaucgccaucggcaucaucucccucaugcuccagaucggcaacaucgucuccaucugggccucccacuccauccagaccggcucccagaaccacaccggcaucugcaaccagcgcaucaucaccuacgagaacuccaccugggucaaccacaccuacgucuccaucaacaacaccaacgucgucgccggcaaggacaagaccuccgucacccucgccggcaacuccucccucugcuccaucuccggcugggccaucuacaccaaggacaacuccauccgcaucggcuccaagggcgacgucuucgucauccgcgagcccuucaucuccugcucccaccucgagugccgcaccuucuuccucacccagggcgcccuccucaacgacaagcacuccaacggcaccgucaaggaccgcucccccuaccgcgcccucauguccugcccccucggcgaggcccccucccccuacaacuccaaguucgaguccgucgccugguccgccuccgccugccacgacggcaugggcuggcucaccaucggcaucuccggccccgacaacggcgccgucgccguccucaaguacaacggcaucaucaccgagaccaucaaguccuggaagaagcgcauccuccgcacccaggaguccgagugcgucugcgucaacggcuccugcuucaccaucaugaccgacggccccuccaacggcgccgccuccuacaagaucuucaagaucgagaagggcaaggucaccaaguccaucgagcucaacgcccccaacuuccacuacgaggagugcuccugcuaccccgacaccggcaccgucaugugcgucugccgcgacaacuggcacggcuccaaccgccccugggucuccuucaaccagaaccucgacuaccagaucggcuacaucugcuccggcgucuucggcgacaacccccgccccaaggacggcaagggcuccugcaaccccgucaccgucgacggcgccgacggcgucaagggcuucuccuacaaguacggcaacggcgucuggaucggccgcaccaaguccaaccgccuccgcaagggcuucgagaugaucugggaccccaacggcuggaccgacaccgacuccgacuucuccgucaagcaggacgucgucgccaucaccgacugguccggcuacuccggcuccuucguccagcaccccgagcucaccggccucgacugcauccgccccugcuucugggucgagcucguccgcggccucccccgcgagaacaccaccaucuggaccuccggcuccuccaucuccuucugcggcgucgacuccgacaccgccaacugguccuggcccgacggcgccgagcuccccuucaccaucgacaaguga

SEQ ID NO: 112120 - RNA, 1413 nt, Artificial Sequence; identical to SEQ ID NO: 112107
  derived and/or modified CDS sequence (opt2) from neuraminidase__InfluenzaA__ABV30330

SEQ ID NO: 112121 - RNA, 1413 nt, Artificial Sequence; identical to SEQ ID NO: 112066
  derived and/or modified CDS sequence (opt2) from neuraminidase__InfluenzaA__ABV30341

SEQ ID NO: 112122 - RNA, 1413 nt, Artificial Sequence; identical to SEQ ID NO: 112066
  derived and/or modified CDS sequence (opt2) from neuraminidase__InfluenzaA__ABV30363

SEQ ID NO: 112123 - RNA, 1413 nt, Artificial Sequence; identical to SEQ ID NO: 112066
  derived and/or modified CDS sequence (opt2) from neuraminidase__InfluenzaA__ABV30374

SEQ ID NO: 112124 - RNA, 1410 nt, Artificial Sequence
  derived and/or modified CDS sequence (opt2) from neuraminidase__InfluenzaA__ABV30385
augaaccccaaccagaagaucaucaccaucggcuccgucucccucaccaucuccaccaucugcuucuucaugcagaucgccauccucaucaccaccgucacccuccacuucaagcaguacgaguucucccccccccccaacaaccaggucaugcucugcgagcccaccaucaucgagcgcaacaucaccgagaucgucuaccucaccaacaccaccaucgagaaggagaucugccccaagcucgccgaguaccgcaacugguccaagccccagugcgacaucaccggcuucgcccccuucuccaaggacaacuccauccgccucuccgccggcggcgacaucugggucacccgcgagcccuacgucuccugcgaccccgacaagugcuaccaguucgcccucggccagggcaccacccucaacaacguccacuccaacgacaccguccacgaccgcacccccuaccgcacccuccucaugaacgagcucggcguccccuuccaccucggcaccaagcaggucugcaucgccugguccuccuccuccugccacgacggcaaggccuggcuccacgucugcgucaccggcgacgacaagaacgccaccgccuccuucaucuacaacggccgccucgucgacuccaucgucuccugguccaaggagauccuccgcacccaggaguccgagugcgucugcaucaacggcaccugcaccgucgucaugaccgacggcuccgccuccggcaaggccgacaccaagauccucuucaucgaggagggcaagaucguccacaccuccacccucuccggcuccgcccagcacgucgaggagugcuccugcuacccccgcuaccccggcguccgcugcgucugccgcgacaacuggaagggcuccaaccgccccaucgucgacaucaacaucaaggacuacuccaucgucucccgcuacgucugcuccggccucgucggcgacaccccccgcaagaacgacuccuccuccuccucccacugccucgaccccaacaacgaggagggcggccacggcgucaagggcugggccuucgacgacggcaacgacgucuggaugggccgcaccaucuccgagaagucccgcuccggcuacgagaccuucaaggucaucgagggcugguccaaccccaacuccaagcuccagaucaaccgccaggucaucgucgaccgcggcaaccgcuccggcuacuccggcaucuucuccgucgagggcaaguccugcaucaaccgcugcuucuacgucgagcucauccgcggccgcaaggaggagaccgagguccucuggaccuccaacuccaucgucgucuucugcggcaccuccggcaccuacggcaccggcuccuggcccgacggcgccgacaucaaccucaugcccaucuga

SEQ ID NO: 112125 - RNA, 1410 nt, Artificial Sequence
  derived and/or modified CDS sequence (opt2) from neuraminidase__InfluenzaA__ABV30396
augaaccccaaccagaagaucaucaccaucggcuccgucucccucaccaucuccaccaucugcuucuucaugcagaucgccauccucaucaccaccgucacccuccacuucaagcaguacgaguucaacuccucccccaacaaccaggucaugcucugcgagcccaccaucaucgagcgcaacaucaccgagaucgucuaccucaccaacaccaccaucgagaaggagaucugccccaagcucuccgaguaccgcaacugguccaagccccagugcaacaucaccggcuucgcccccuucuccaaggacaacuccauccgccucuccgccggcggcgacaucugggucacccgcgagcccuacgucuccugcgaccccgacaagugcuaccaguucgcccucggccagggcaccacccucaacaacguccacuccaacgacaccguccacgaccgcacccccuaccgcacccuccucaugaacgagcucggcguccccuuccaccucggcaccaagcaggucugcaucgccugguccuccuccuccugccacgacggcaaggccuggcuccacgucugcgucaccggcgacgacaagaacgccaccgccuccuucaucuacaacggccgccucgucgacuccaucgucuccugguccaaggagauccuccgcacccaggaguccgagugcgucugcaucaacggcaccugcaccgucgucaugaccgacggcuccgccuccggcaaggccgacaccaagauccucuucaucgaggagggcaagaucguccacaccuccacccucuccggcuccgcccagcacgucgaggagugcuccugcuacccccgcuaccccggcguccgcugcgucugccgcgacaacuggaagggcuccaaccgccccaucgucgacaucaacaucaaggacuacuccaucgucuccuccuacgucugcuccggccucgucggcgacaccccccgcaagaacgacuccuccuccuccucccacugccucgaccccaacaacgaggagggcggccacggcgucaagggcugggccuucgacgacggcaacgacgucuggaugggccgcaccaucuccgagaagcuccgcuccggcuacgagaccuucaaggucaucgagggcugguccaaccccaacuccaagcuccagaucaaccgccaggucaucgucgaccgcggcaaccgcuccggcuacuccggcaucuucuccgucgagggcaaguccugcaucaaccgcugcuucuacgucgagcucauccgcggccgcaaggaggagaacgagguccucuggaccuccaacuccaucgucgucuucugcggcaccuccggcaccuacggcaccggcuccuggcccgacggcgccgacaucaaccucaugcccaucuga

SEQ ID NO: 112126 - RNA, 1410 nt, Artificial Sequence
  derived and/or modified CDS sequence (opt2) from neuraminidase__InfluenzaA__ABV30407
augaaccccaaccagaagaucaucaccaucggcuccgucucccucaccaucuccaccaucugcuucuucaugcagaucgccauccucaucaccaccgucacccuccacuucaagcaguacgaguucaacuccccccccaacaaccaggucaugcucugcgagcccaccaucaucgagcgcaacaucaccgagaucgucuaccucaccaacaccaccaucgagaaggagaucugccccaagcucgccgaguaccgcaacugguccaagccccagugcgacaucaccggcuucgcccccuucuccaaggacaacuccauccgccucuccgccggcggcgacaucugggucacccgcgagcccuacgucuccugcgaccccgacaagugcuaccaguucgcccucggccagggcaccacccucaacaacguccacuccaacgacaccguccgcgaccgcacccccuaccgcacccuccucaugaacgagcucggcguccccuuccaccucggcaccaagcaggucugcaucgccugguccuccuccuccugccacgacggcaaggccuggcuccacgucugcaucaccggcgacgacaagaacgccaccgccuccuucaucuacaacggccgccucgucgacuccaucgucuccugguccaaggagauccuccgcacccaggaguccgagugcgucugcaucaacggcaccugcaccgucgucaugaccgacggcuccgccuccggcaaggccgacaccaagauccucuucaucgaggagggcaagaucguccacaccuccacccucuccggcuccgcccagcacgucgaggagugcuccugcuacccccgcuaccccggcguccgcugcgucugccgcgacaacuggaagggcuccaaccgccccaucgucgacaucaacaucaaggaccacuccaucgucuccuccuacgucugcuccggccucgucggcgacaccccccgcaagaacgacuccuccuccuccggccacugccucgaccccaacaacgaggagggcggccacggcgucaagggcugggccuucgacgacggcaacgacgucuggaugggccgcaccaucuccgagaagucccgccucggcuacgagaccuucaaggucaucgagggcugguccaaccccaaguccaagcuccagaucaaccgccaggucaucgucgaccgcggcaaccgcuccggcuacuccggcaucuucuccgucgagggcaaguccugcaucaaccgcugcuucuacgucgagcucauccgcggccgcaaggaggagaccgagguccucuggaccuccaacuccaucgucgucuucugcggcaccuccggcaccuacggcaccggcuccuggcccgacggcgccgacaucaaccucaugcccaucuga

SEQ ID NO: 112127 - RNA, 1410 nt, Artificial Sequence
  derived and/or modified CDS sequence (opt2) from neuraminidase__InfluenzaA__ABV30418
augaaccccaaccagaagaucaucaccaucggcuccgucucccucaccaucuccaccaucugcuucuucaugcagaucgccauccucaucaccaccgucacccuccacuucaagcaguacgaguucuccucccuccccaacaaccaggucaugcucugcgagcccaccaucaucgagcgcaacaucaccgagaucgucuaccucaccaacaccaccaucgagaaggagaucugccccaagcucgccgaguaccgcaacugguccaagccccagugcgacaucaccggcuucgcccccuucuccaaggacaacuccauccgccucuccgccggcggcgacaucugggucacccgcgagcccuacgucuccugcgaccccgacaagugcuaccaguucgcccucggccagggcaccacccucaacaacguccacuccaacgacaccguccacgaccgcacccccuaccgcacccuccucaugaacgagcucggcguccccuuccaccucggcaccaagcaggucugcaucgccugguccuccuccuccugccacgacggcaaggccuggcuccacgucugcgucaccggcgacgacaagaacgccaccgccuccuucaucuacaacggccgccucgucgacuccaucgucuccugguccaaggagauccuccgcacccaggaguccgagugcgucugcaucaacggcaccugcaccgucgucaugaccgacggcuccgccuccggcaaggccgacaccaagauccucuucaucgaggagggcaagaucguccacaccuccacccucuccggcuccgcccagcacgucgaggagugcuccugcuacccccgcuaccccggcguccgcugcgucugccgcgacaacuggaagggcuccaaccgccccaucgucgacaucaacaucaaggacuacuccaucgucucccgcuacgucugcuccggccucgucggcgacaccccccgcaagaacgacuccuccuccuccucccacugccucgaccccaacaacgaggagggcggccacggcgucaagggcugggccuucgacgacggcaacgacgucuggaugggccgcaccaucuccgagaagucccgcuccggcuacgagaccuucaaggucaucgagggcugguccaaccccaacuccaagcuccagaucaaccgccaggucaucgucgaccgcggcaaccgcuccggcuacuccggcaucuucuccgucgagggcaaguccugcaucaaccgcugcuucuacgucgagcucauccgcggccgccgcgaggagaccgagguccucuggaccuccaacuccaucgucgucuucugcggcaccuccggcaccuacggcaccggcuccuggcccgacggcgccgacaucaaccucaugcccaucuga

SEQ ID NO: 112128 - RNA, 1410 nt, Artificial Sequence; identical to SEQ ID NO: 112093
  derived and/or modified CDS sequence (opt2) from neuraminidase__InfluenzaA__ABV30429

SEQ ID NO: 112129 - RNA, 1410 nt, Artificial Sequence; identical to SEQ ID NO: 112093
  derived and/or modified CDS sequence (opt2) from neuraminidase__InfluenzaA__ABV30440

SEQ ID NO: 112130 - RNA, 1410 nt, Artificial Sequence; identical to SEQ ID NO: 112093
  derived and/or modified CDS sequence (opt2) from neuraminidase__InfluenzaA__ABV30451

SEQ ID NO: 112131 - RNA, 1413 nt, Artificial Sequence; identical to SEQ ID NO: 112066
  derived and/or modified CDS sequence (opt2) from neuraminidase__InfluenzaA__ABV30462

SEQ ID NO: 112132 - RNA, 1410 nt, Artificial Sequence; identical to SEQ ID NO: 112093
  derived and/or modified CDS sequence (opt2) from neuraminidase__InfluenzaA__ABV30473

SEQ ID NO: 112133 - RNA, 1410 nt, Artificial Sequence
  derived and/or modified CDS sequence (opt2) from neuraminidase__InfluenzaA__ABV30484
augaaccccaaccagaagaucaucaccaucggcuccgucucccucaccaucuccaccaucugcuucuucaugcagaucgccauccucaucaccaccgucacccuccacuucaagcaguacgaguucaacuccccccccaacaaccaggucaugcucugcgagcccaccaucaucgagcgcaacaucaccgagaucgucuaccucaccaacaccaccaucgagaaggagaucugccccaagcucgccgaguaccgcaacugguccaagccccagugcgacaucaccggcuucgcccccuucuccaaggacaacuccauccgccucuccgccggcggcgacaucugggucacccgcgagcccuacgucuccugcgaccccgacaagugcuaccaguucgcccucggccagggcaccacccucaacaacguccacuccaacgacaccguccacgaccgcacccccuaccgcacccuccucaugaacgagcucggcguccccuuccaccucggcaccaagcaggucugcaucgccugguccuccuccuccugccacgacggcaaggccuggcuccacgucugcgucaccggcgacgacaagaacgccaccgccuccuucaucuacaacggccgccucgucgacuccaucgucuccugguccaaggagauccuccgcacccaggaguccgagugcgucugcaucaacggcaccugcaccgucgucaugaccgacggcuccgccuccggcaaggccgacaccaagauccucuucaucgaggagggcaagaucguccacaccuccacccucuccggcuccgcccagcacgucgaggagugcuccugcuacccccgcuaccccggcguccgcugcgucugccgcgacaacuggaagggcuccaaccgccccaucgucgacaucaacaucaaggacuacuccaucgucucccgcuacgucugcuccggccucgucggcgacaccccccgcaagaacgacuccuccuccaacucccacugccucgaccccaacaacgaggagggcggccacggcgucaagggcugggccuucgacgacggcaacgacgucuggaugggccgcaccaucuccgagaagucccgcuccggcuacgagaccuucaaggucaucgagggcugguccaaccccaacuccaagcuccagaucaaccgccaggucaucgucgaccgcggcaaccgcuccggcuacuccggcaucuucuccgucgagggcaaguccugcaucaaccgcugcuucuacgucgagcucauccgcggccgcaaggaggagaccgagguccucuggaccuccaacuccaucgucgucuucugcggcaccuccggcaccuacggcaccggcuccuggcccgacggcgccgacaucaaccucaugcccaucuga

SEQ ID NO: 112134 - RNA, 1413 nt, Artificial Sequence; identical to SEQ ID NO: 112105
  derived and/or modified CDS sequence (opt2) from neuraminidase__InfluenzaA__ABV30495

SEQ ID NO: 112135 - RNA, 1413 nt, Artificial Sequence; identical to SEQ ID NO: 112066
  derived and/or modified CDS sequence (opt2) from neuraminidase__InfluenzaA__ABV30506

SEQ ID NO: 112136 - RNA, 1410 nt, Artificial Sequence; identical to SEQ ID NO: 112102
  derived and/or modified CDS sequence (opt2) from neuraminidase__InfluenzaA__ABV30517

SEQ ID NO: 112137 - RNA, 1413 nt, Artificial Sequence
  derived and/or modified CDS sequence (opt2) from neuraminidase__InfluenzaA__ABV30528
augaacuccaaccagaagaucaucaccaucggcuccaucuccaucgccaucggcaucaucucccucaugcuccagaucggcaacaucaucuccaugugggccucccacuccauccagaccggcucccagaaccacaccggcaucugcaaccagcgcaucaucaccuacgagaacuccaccugggucaaccacaccuacgucaacaucaacaacaccaacgucgucgccggcaaggacaagaccuccgucacccucgccggcaacuccucccucugcuccaucuccggcugggccaucuacaccaaggacaacuccauccgcaucggcuccaagggcgacgucuucgucauccgcgagcccuucaucuccugcucccaccucgagugccgcaccuucuuccucacccagggcgcccuccucaacgacaagcacuccaacggcaccgucaaggaccgcucccccuaccgcgcccucauguccugcccccucggcgaggcccccucccccuacaacuccaaguucgaguccgucgccugguccgccuccgccugccacgacggcaugggcuggcucaccaucggcaucuccggccccgacaacggcgccgucgccguccucaaguacaacggcaucaucaccgagaccaucaaguccuggaagaagcgcauccuccgcacccaggaguccgagugcgucugcgucaacggcuccugcuucaccaucaugaccgacggccccuccaacggcgccgccuccuacaagaucuucaagaucgagaagggcaaggucaccaaguccaucgagcucaacgcccccaacuuccacuacgaggagugcuccugcuaccccgacaccggcaccgucaugugcgucugccgcgacaacuggcacggcuccaaccgccccugggucuccuucaaccagaaccucgacuaccaggucggcuacaucugcuccggcgucuucggcgacaacccccgccccaaggacggcaagggcuccugcaaccccaugaccgucgacggcgccgacggcgucaagggcuucuccuacaaguacggcaacggcgucuggaucggccgcaccaaguccaacaagcuccgcaagggcuucgagaugaucugggaccccaacggcuggaccgacaccgacuccgacuucuccgucaagcaggacgucgucgccaucaccgacugguccggcuacuccggcuccuucguccagcaccccgagcucaccggccucgacugcauccgccccugcuucugggucgagcucguccgcggccucccccgcgagaacgccaccaucuggaccuccggcuccuccaucuccuucugcggcgucgacuccgacaccgccaacugguccuggcccgacggcgccgagcuccccuucaccaucgacaaguga

SEQ ID NO: 112138 - RNA, 1413 nt, Artificial Sequence; identical to SEQ ID NO: 112066
  derived and/or modified CDS sequence (opt2) from neuraminidase__InfluenzaA__ABV30539

SEQ ID NO: 112139 - RNA, 1413 nt, Artificial Sequence; identical to SEQ ID NO: 112066
  derived and/or modified CDS sequence (opt2) from neuraminidase__InfluenzaA__ABV30561

SEQ ID NO: 112140 - RNA, 1413 nt, Artificial Sequence; identical to SEQ ID NO: 112066
  derived and/or modified CDS sequence (opt2) from neuraminidase__InfluenzaA__ABV30572

SEQ ID NO: 112141 - RNA, 1413 nt, Artificial Sequence; identical to SEQ ID NO: 112066
  derived and/or modified CDS sequence (opt2) from neuraminidase__InfluenzaA__ABV30583

SEQ ID NO: 112142 - RNA, 1413 nt, Artificial Sequence; identical to SEQ ID NO: 112066
  derived and/or modified CDS sequence (opt2) from neuraminidase__InfluenzaA__ABV30594

SEQ ID NO: 112143 - RNA, 1413 nt, Artificial Sequence
  derived and/or modified CDS sequence (opt2) from neuraminidase__InfluenzaA__ABV30605
augaaccccaaccagaagaucaucaccaucggcuccaucuccaucgccaucggcaucaucucccucaugcuccagaucggcaacaucaucuccaucugggccucccacuccauccagaccggcucccagaaccacaccggcaucugcaaccagcgcaucaucaccuacgagaacuccaccugggucaaccacaccuacgucuccaucaacaacaccaacgucgucgucggcaaggacaagaccuccgucacccucgccggcaacuccucccucugcuccaucuccggcugggccaucuacaccaaggacaacuccauccgcaucggcuccaagggcgacgucuucgucauccgcgagcccuucaucuccugcucccaccucgagugccgcaccuucuuccucacccagggcgcccuccucaacgacaagcacuccaacggcaccgucaaggaccgcucccccuaccgcgcccucauguccugcccccucggcgaggcccccucccccuacaacuccaaguucgaguccgucgccugguccgccuccgccugccacgacggcaugggcuggcucaccaucggcaucuccggccccgacaacggcgccgucgccguccucaaguacaacggcaucaucaccgagaccaucaaguccuggaagaagcgcauccuccgcacccaggaguccgagugcgucugcgucaacggcuccugcuucaccaucaugaccgacggccccuccaacggcgccgccuccuacaagaucuucaagaucgagaagggcaaggucaccaaguccaucgagcucaacgcccccaacuuccacuacgaggagugcuccugcuaccccgacaccggcaccgucaugugcgucugccgcgacaacuggcacggcuccaaccgccccugggucuccuucaaccagaaccucgacuaccagaucggcuacaucugcuccggcgucuucggcgacaacccccgccccaaggacggcaagggcuccugcaaccccgucaccgucgacggcgccgacggcgucaagggcuucuccuacaaguacggcaacggcgucuggaucggccgcaccaaguccaaccgccuccgcaagggcuucgagaugaucugggaccccaacggcuggaccgacaccgacuccgacuucuccgucaagcaggacgucgucgccaucaccgacugguccggcuacuccggcuccuucguccagcaccccgagcucaccggccucgacugcauccgccccugcuucugggucgagcucguccgcggccucccccgcgagaacaccaccaucuggaccuccggcuccuccaucuccuucugcggcgucgacuccgacaccgccaacugguccuggcccgacggcgccgagcuccccuucaccaucgacaaguga

SEQ ID NO: 112144 - RNA, 1413 nt, Artificial Sequence; identical to SEQ ID NO: 112066
  derived and/or modified CDS sequence (opt2) from neuraminidase__InfluenzaA__ABV30616

SEQ ID NO: 112145 - RNA, 1413 nt, Artificial Sequence; identical to SEQ ID NO: 112066
  derived and/or modified CDS sequence (opt2) from neuraminidase__InfluenzaA__ABV30627

SEQ ID NO: 112146 - RNA, 1410 nt, Artificial Sequence
  derived and/or modified CDS sequence (opt2) from neuraminidase__InfluenzaA__ABV30649
augaaccccaaccagaagaucaucaccaucggcuccgucucccucaccaucuccaccaucugcuucuucaugcagaucgccauccucaucaccaccgucacccuccacuucaagcaguacgaguucaacuccccccccaacaaccaggucaugcucugcgagcccaccaucaucgagcgcaacaucaccgagaucgucuaccucaccaacaccaccaucgagaaggagaucugccccaagcucgccgaguaccgcaacugguccaagccccagugcgacaucaccggcuucgcccccuucuccaaggacaacuccauccgccucuccgccggcggcgacaucugggucacccgcgagcccuacgucuccugcgaccccgacaagugcuaccaguucgcccucggccagggcaccacccucaacaacguccacuccaacgacaccguccgcgaccgcacccccuaccgcacccuccucaugaacgagcucggcguccccuuccaccucggcaccaagcaggucugcaucgccugguccuccuccuccugccacgacggcaaggccuggcuccacgucugcaucaccggcgacgacaagaacgccaccgccuccuucaucuacaacggccgccucgucgacuccaucgucuccugguccaaggagauccuccgcacccaggaguccgagugcgucugcaucaacggcaccugcaccgucgucaugaccgacggcuccgccuccggcaacgccgacaccaagauccucuucaucgaggagggcaagaucguccacaccuccacccucuccggcuccgcccagcacgucgaggagugcuccugcuacccccgcuaccccggcguccgcugcgucugccgcgacaacuggaagggcuccaaccgccccaucgucgacaucaacaucaaggaccacuccaucgucuccuccuacgucugcuccggccucgucggcgacaccccccgcaagaacgacuccuccuccuccucccacugccucgaccccaacaacgaggagggcggccacggcgucaagggcugggccuucgacgacggcaacgacgucuggaugggccgcaccaucuccgagaagucccgccucggcuacgagaccuucaaggucaucgagggcugguccaaccccaaguccaagcuccagaucaaccgccaggucaucgucgaccgcggcaaccgcuccggcuacuccggcaucuucuccgucgagggcaaguccugcaucaaccgcugcuucuacgucgagcucauccgcggccgcaaggaggagaccgagguccucuggaccuccaacuccaucgucgucuucugcggcaccuccggcaccuacggcaccggcuccuggcccgacggcgccgacaucaaccucaugcccaucuga

SEQ ID NO: 112147 - RNA, 1410 nt, Artificial Sequence; identical to SEQ ID NO: 111920
  derived and/or modified CDS sequence (opt2) from neuraminidase__InfluenzaA__ABV30660

SEQ ID NO: 112148 - RNA, 1413 nt, Artificial Sequence
  derived and/or modified CDS sequence (opt2) from neuraminidase__InfluenzaA__ABV45852
augaaccccaaccagaagaucaucaccaucggcuccaucuccaucgccaucggcaucaucucccucaugcuccagaucggcaacaucaucuccaucugggccucccacuccauccagaccggcucccagaaccacaccggcaucugcaaccagcgcaucaucaccuacgagaacuccaccugggucaaccacaccuacgucaacaucaacaacaccaacgucgucgccggcaaggacaagaccuccgucacccucgccggcaacuccucccucugcuccaucuccggcugggccaucuacaccaaggacaacuccauccgcaucggcuccaagggcgacgucuucgucauccgcgagcccuucaucuccugcucccaccucgagugccgcaccuucuuccucacccagggcgcccuccucaacgacaagcacuccaacggcaccgucaaggaccgcucccccuaccgcgcccucauguccugcccccucggcgaggcccccucccccuacaacuccaaguucgaguccgucgccugguccgccuccgccugccacgacggcaugggcuggcucaccaucggcaucuccggccccgacaacggcgccgucgccguccucaaguacaacggcaucaucaccgagaccaucaaguccuggaagaagcgcauccuccgcacccaggaguccgagugcgucugcgucaacggcuccugcuucaccaucaugaccgacggccccaacaacggcgccgccuccuacaagaucuucaagaucgagaagggcaaggucaccaaguccaucgagcucaacgcccccaacuuccacuacgaggagugcuccugcuaccccgacaccggcaccgucaugugcgucugccgcgacaacuggcacggcuccaaccgccccugggucuccuucaaccagaaccucgacuaccagaucggcuacaucugcuccggcgucuucggcgacaacccccgccccaaggacggcgagggcuccugcaaccccgucaccgucgacggcgccgacggcgucaagggcuucuccuacaaguacggcaacggcgucuggaucggccgcaccaaguccaaccgccuccgcaagggcuucgagaugaucugggaccccaacggcuggaccgacaccgacuccaacuucuccgucaagcaggacgucgucgccaucaccgacugguccggcuacuccggcuccuucguccagcaccccgagcucaccggccucgacugcauccgccccugcuucugggucgagcucguccgcggccucccccgcgagaacaccaccaucuggaccuccggcuccuccaucuccuucugcggcgucaacuccgacaccgccaacugguccuggcccgacggcgccgagcuccccuucaccaucgacaaguga

SEQ ID NO: 112149 - RNA, 1410 nt, Artificial Sequence; identical to SEQ ID NO: 111920
  derived and/or modified CDS sequence (opt2) from neuraminidase__InfluenzaA__ABV45863

SEQ ID NO: 112150 - RNA, 1413 nt, Artificial Sequence
  derived and/or modified CDS sequence (opt2) from neuraminidase__InfluenzaA__ABV45874
augaaccccaaccagaagaucaucaccaucggcuccaucuccaucgccaucggcaucaucucccucaugcuccagaucggcaacaucaucuccaucugggccuccuacuccauccagaccggcucccagaaccacaccggcaucugcaaccagcgcaucaucaccuacgagaacuccaccugggucaaccacaccuacgucuccaucaacaacaccaacgucgucgccggcaaggacaagaccuccgucacccucgccggcaacuccucccucugcuccaucuccggcugggccaucuacaccaaggacaacuccauccgcaucggcuccaagggcgacgucuucgucauccgcgagcccuucaucuccugcucccaccucgagugccgcaccuucuuccucacccagggcgcccuccucaacgacaagcacuccaacggcaccgucaaggaccgcucccccuaccgcgcccucauguccugcccccucggcgaggcccccucccccuacaacuccaaguucgaguccgucgccugguccgccuccgccugccacgacggcaugggcuggcucaccaucggcaucuccggccccgacaacggcgccgucgccguccucaaguacaacggcaucaucaccgagaccaucaaguccuggaagaagcgcauccuccgcacccaggaguccgagugcgucugcgucaacggcuccugcuucaccaucaugaccgacggccccuccaacggcgccgccuccuacaagaucuucaagaucgagaagggcaaggucaccaaguccaucgagcucaacgcccccaacuuccacuacgaggagugcuccugcuaccccgacaccggcaccgucaugugcgucugccgcgacaacuggcacggcuccaaccgccccugggucuccuucaaccagaaccucgacuaccagaucggcuacaucugcuccggcgucuucggcgacaacccccgccccaaggacggcaagggcuccugcaaccccgucaccgucgacggcgccgacggcgucaagggcuucuccuacaaguacggcaacggcgucuggaucggccgcaccaaguccaaccgccuccgcaagggcuucgagaugaucugggaccccaacggcuggaccgacaccgacuccgacuucuccgucaagcaggacgucgucgccaucaccgacugguccggcuacuccggcuccuucguccagcaccccgagcucaccggccucgacugcauccgccccugcuucugggucgagcucguccgcggccucccccgcgagaacaccaccaucuggaccuccggcuccuccaucuccuucugcggcgucgacuccgacaccgccaacugguccuggcccgacggcgccgagcuccccuucaccaucgacaaguga

SEQ ID NO: 112151 - RNA, 1413 nt, Artificial Sequence; identical to SEQ ID NO: 112066
  derived and/or modified CDS sequence (opt2) from neuraminidase__InfluenzaA__ABV45885

SEQ ID NO: 112152 - RNA, 1413 nt, Artificial Sequence; identical to SEQ ID NO: 112079
  derived and/or modified CDS sequence (opt2) from neuraminidase__InfluenzaA__ABV45896

SEQ ID NO: 112153 - RNA, 1413 nt, Artificial Sequence; identical to SEQ ID NO: 112066
  derived and/or modified CDS sequence (opt2) from neuraminidase__InfluenzaA__ABV45918

SEQ ID NO: 112154 - RNA, 1413 nt, Artificial Sequence
  derived and/or modified CDS sequence (opt2) from neuraminidase__InfluenzaA__ABV45929
augaaccccaaccagaagaucaucaccaucggcuccaucuccaucgccaucggcaucaucucccucaugcuccagaucggcaacaucaucuccaugugggccucccacuccauccagaccggcucccagaaccacaccggcaucugcaaccagcgcaucaucaccuacgagaacuccaccugggucaaccacaccuacgucaacaucaacaacaccaacgucgucaccggcaaggacaagaccuccgucacccucgccggcaacuccucccucugcuccaucuccggcugggccaucuacaccaaggacaacuccauccgcaucggcuccaagggcgacgucuucgucauccgcgagcccuucaucuccugcucccaccucgagugccgcaccuucuuccucacccagggcgcccuccucaacgacaagcacuccaacggcaccgucaaggaccgcucccccuaccgcgcccucauguccugcccccucggcgaggcccccucccccuacaacuccaaguucgaguccgucgccugguccgccuccgccugccacgacggcaugggcuggcucaccaucggcaucuccggccccgacaacggcgccgucgccguccucaaguacaacggcaucaucaccgagaccaucaaguccuggaagaagcgcauccuccgcacccaggaguccgagugcgucugcgucaacggcuccugcuucaccaucaugaccgacggccccuccgacggcgccgccuccuacaagaucuucaagaucgagaagggcaaggucaccaaguccaucgagcucaacgcccccaacuuccacuacgaggagugcuccugcuaccccgacaccggcaccgucaugugcgucugccgcgacaacuggcacggcuccaaccgccccugggucuccuucaaccagaaccucgacuaccagaucggcuacaucugcuccggcgucuucggcgacaacccccgccccaaggacggcaagggcuccugcaaccccgucaccgucgacggcgccgacggcgucaagggcuucuccuacaaguacggcaacggcgucuggaucggccgcaccaaguccaacaagcuccgcaagggcuucgagaugaucugggaccccaacggcuggaccgacaccgacaacgacuucuccgucaagcaggacgucgucgccaucaccgacugguccggcuacuccggcuccuucguccagcaccccgagcucaccggccucgacugcauccgccccugcuucugggucgagcucguccgcggccucccccgcgagaacgccaccaucuggaccuccggcuccuccaucuccuucugcggcgucgacuccgacaccgccaacugguccuggcccgacggcgccgagcuccccuucaccaucgacaaguga

SEQ ID NO: 112155 - RNA, 1413 nt, Artificial Sequence
  derived and/or modified CDS sequence (opt2) from neuraminidase__InfluenzaA__ABV45940
augaaccccaaccagaagaucaucaccaucggcuccaucuccaucgccaucggcaucaucucccucaugcuccagaucggcaacaucaucuccaucugggccucccacuccauccagaccggcucccagaaccacaccggcaucugcaaccagcgcaucauccgcuacgagaacuccaccugggucaaccacaccuacgucaacaucaacaacaccaacgucgucgccggcaaggacaagaccuccgucacccucgccggcaacuccucccucugcuccaucuccggcugggccaucuacaccaaggacaacuccauccgcaucggcuccaagggcgacgucuucgucauccgcgagcccuucaucuccugcucccaccucgagugccgcaccuucuuccucacccagggcgcccuccucaacgacaagcacuccaacggcaccgucaaggaccgcucccccuaccgcgcccucauguccugcccccucggcgaggcccccucccccuacaacuccaaguucgaguccgucgccugguccgccuccgccugccacgacggcaugggcuggcucaccaucggcaucuccggccccgacaacggcgccgucgccguccucaaguacaacggcaucaucaccgagaccaucaaguccuggaagaagcagauccuccgcacccaggaguccgagugcgucugcgucaacggcuccugcuucaccaucaugaccgacggccccuccaacggcgccgccuccuacaagaucuucaagaucgagaagggcaaggucaccaaguccaucgagcucaacgcccccaacuuccacuacgaggagugcuccugcuaccccgacaccggcaccgucaugugcgucugccgcgacaacuggcacggcuccaaccgccccugggucuccuucaaccagucccucgacuaccaggucggcuacaucugcuccggcgucuucggcgacaacccccgccccaaggacggcaagggcuccugcaaccccaugaccgucgacggcgccgacggcgucaagggcuucuccuacaaguacggcaacggcgucuggaucggccgcaccaaguccaacaagcuccgcaagggcuucgagaugaucugggaccccaacggcuggaccgacaccgacuccgacuucuccgucaagcaggacgucgucgccaucaccgacugguccggcuacuccggcuccuucguccagcaccccgagcucaccggccucgacugcauccgccccugcuucugggucgagcucguccgcggccucccccgcgagaacaccaccaucuggaccuccggcuccuccaucuccuucugcggcgucgacuccgacaccgccaacugguccuggcccgacggcgccgagcuccccuucaccaucgacaaguga

SEQ ID NO: 112156 - RNA, 1413 nt, Artificial Sequence; identical to SEQ ID NO: 112092
  derived and/or modified CDS sequence (opt2) from neuraminidase__InfluenzaA__ABV45951

SEQ ID NO: 112157 - RNA, 1410 nt, Artificial Sequence
  derived and/or modified CDS sequence (opt2) from neuraminidase__InfluenzaA__ABV45973
augaaccccaaccagaagaucaucaccaucggcuccgucucccucaccaucuccaccaucugcuucuucaugcagaucgccauccucaucaccaccgucacccuccacuucaagcaguacgaguucaacuccccccccaacaaccaggucaugcucugcgagcccaccaucaucgagcgcaacaucaccgagaucgucuaccucaccaacaccaccaucgagaaggagaucugccccaagcucgccgaguaccgcaacugguccaagccccagugcgacaucaccggcuucgcccccuucuccaaggacaacuccauccgccucuccgccggcggcgacaucugggucacccgcgagcccuacgucuccugcgaccccgacaagugcuaccaguucgcccucggccagggcaccacccucaacaacguccacuccaacgacaccguccgcgaccgcacccccuaccgcacccuccucaugaacgagcucggcguccccuuccaccucggcaccaagcaggucugcaucgccugguccuccuccuccugccacgacggcaaggccuggcuccacgucugcaucaccggcgacgacaagaacgccaccgccuccuucaucuacaacggccgccucgucgacuccaucgucuccugguccaaggagauccuccgcacccaggaguccgagugcgucugcaucaacggcaccugcaccgucgucaugaccgacggcuccgccuccggcgaggccgacaccaagauccucuucaucgaggagggcaagaucguccacaccuccacccucuccggcuccgcccagcacgucgaggagugcuccugcuacccccgcuaccccggcguccgcugcgucugccgcgacaacuggaagggcuccaaccgccccaucgucgacaucaacaucaaggaccacuccaucgucuccuccuacgucugcuccggccucgucggcgacaccccccgcaagaacgacuccuccuccuccucccacugccucgaccccaacaacgaggagggcggccacggcgucaagggcugggccuucgacgacggcaacgacgucuggaugggccgcaccaucuccgagaagucccgccucggcuacgagaccuucaaggucaucgagggcugguccaaccccaaguccaagcuccagaucaaccgccaggucaucgucgaccgcggcaaccgcuccggcuacuccggcaucuucuccgucgagggcaaguccugcaucaaccgcugcuucuacgucgagcucauccgcggccgcaaggaggagaccgacguccucuggaccuccaacuccaucgucgucuucugcggcaccuccggcaccuacggcaccggcuccuggcccgacggcgccgacaucaaccucaugcccaucuga

SEQ ID NO: 112158 - RNA, 1410 nt, Artificial Sequence
  derived and/or modified CDS sequence (opt2) from neuraminidase__InfluenzaA__ABV45984
augaaccccaaccagaagaucaucaccaucggcuccgucucccucaccaucuccaccaucugcuucuucaugcagaucgccauccucgucaccaccgucacccuccacuucaagcaguacgaguucaacuccccccccaacaaccaggucaugcucugcgagcccaccaucaucgagcgcaacaucaccgagaucgucuaccucaccaacaccaccaucgagaaggagaucugccccaagcucgccgaguaccgcaacugguccaagccccagugcgacaucaccggcuucgcccccuucuccaaggacaacuccauccgccucuccgccggcggcgacaucugggucacccgcgagcccuacgucuccugcgaccccgacaagugcuaccaguucgcccucggccagggcaccacccucaacaacguccacuccaacgacaccguccgcgaccgcacccccuaccgcacccuccucaugaacgagcucggcguccccuuccaccucggcaccaagcaggucugcaucgccugguccuccuccuccugccacgacggcaaggccuggcuccacgucugcaucaccggcgacgacaagaacgccaccgccuccuucaucuacaacggccgccucgucgacuccaucgucuccugguccaaggagauccuccgcacccaggaguccgagugcgucugcaucaacggcaccugcaccgucgucaugaccgacggcuccgccuccggcaaggccgacaccaagauccucuucaucgaggagggcaagaucguccacaccuccacccucuccggcuccgcccagcacgucgaggagugcuccugcuacccccgcuaccccggcguccgcugcgucugccgcgacaacuggaagggcuccaaccgccccaucgucgacaucaacaucaaggaccacuccaucgucuccuccuacgucugcuccggccucgucggcgacaccccccgcaagaacgacuccuccuccuccucccacugccucgaccccaacaacgaggagggcggccacggcgucaagggcugggccuucgacgacggcaacgacgucuggaugggccgcaccaucuccgagaagucccgccucggcuacgagaccuucaaggucaucgagggcugguccaaccccaaguccaagcuccagaucaaccgccaggucaucgucgaccgcggcaaccgcuccggcuacuccggcaucuucuccgucgagggcaaguccugcaucaaccgcugcuucuacgucgagcucauccgcggccgcaaggaggagaccgagguccucuggaccuccaacuccaucgucgucuucugcggcaccuccggcaccuacggcaccggcuccuggcccgacggcgccgacaucaaccucaugcccaucuga

SEQ ID NO: 112159 - RNA, 1410 nt, Artificial Sequence; identical to SEQ ID NO: 111920
  derived and/or modified CDS sequence (opt2) from neuraminidase__InfluenzaA__ABV45995

SEQ ID NO: 112160 - RNA, 1413 nt, Artificial Sequence; identical to SEQ ID NO: 112079
  derived and/or modified CDS sequence (opt2) from neuraminidase__InfluenzaA__ABV82554

SEQ ID NO: 112161 - RNA, 1410 nt, Artificial Sequence; identical to SEQ ID NO: 112102
  derived and/or modified CDS sequence (opt2) from neuraminidase__InfluenzaA__ABV82565

SEQ ID NO: 112162 - RNA, 1410 nt, Artificial Sequence; identical to SEQ ID NO: 112102
  derived and/or modified CDS sequence (opt2) from neuraminidase__InfluenzaA__ABW36171

SEQ ID NO: 112163 - RNA, 1413 nt, Artificial Sequence; identical to SEQ ID NO: 112118
  derived and/or modified CDS sequence (opt2) from neuraminidase__InfluenzaA__ABW36193

SEQ ID NO: 112164 - RNA, 1413 nt, Artificial Sequence; identical to SEQ ID NO: 112066
  derived and/or modified CDS sequence (opt2) from neuraminidase__InfluenzaA__ABW36204

SEQ ID NO: 112165 - RNA, 1413 nt, Artificial Sequence
  derived and/or modified CDS sequence (opt2) from neuraminidase__InfluenzaA__ABW36215
augaaccccaaccagaagaucaucaccaucggcuccaucuccaucgccaucggcaucaucucccucaugcuccagaucggcaacaucaucuccaucugggccucccacuccauccagaccggcucccagaaccacaccggcaucugcaaccagcgcaucaucaccuacgagaacuccaccugggucaaccacaccuacgucaacaucaacaacaccaacgucgucgccggcaaggacaagaccuccgucacccucgccggcaacuccucccucugcuccaucuccggcugggccaucuacaccaaggacaacuccauccgcaucggcuccaagggcgacgucuucgucauccgcgagcccuucaucuccugcucccaccucgagugccgcaccuucuuccucacccagggcgcccuccucaacgacaagcacuccaacggcaccgucaaggaccgcucccccuaccgcgcccucauguccugcccccucggcgaggcccccucccccuacaacuccaaguucgaguccgucgccugguccgccuccgccugccacgacggcaagggcuggcucaccaucggcaucuccggccccgacaacggcgccgucgccguccucaaguacaacggcaucaucaccgagaccaucaaguccuggaacaagcagauccuccgcacccaggaguccgagugcgucugcgucaacggcuccugcuucaccaucaugaccgacggccccuccaacggcgccgccuccuacaagaucuucaagaucgagaagggcaaggucaccaaguccaucgagcucaacgcccccaacuuccacuacgaggagugcuccugcuaccccgacaccggcaccgucaugugcgucugccgcgacaacuggcacggcuccaaccgccccugggucuccuucaaccagaaccucgacuaccagaucggcuacaucugcuccggcgucuucggcgacaacccccgccccaaggacggccgcggcuccugcaaccccgucaccgucgacggcgccgacggcgucaagggcuucuccuacaaguacggcaacggcgucuggaucggccgcaccaaguccaaccgccuccgcaagggcuucgagaugaucugggaccccaacggcuggaccgacaccgacucccacuucuccgucaagcaggacgucgucgccaucaccgacugguccggcuacuccggcuccuucguccagcaccccgagcucaccggccucgacugcaucaagcccugcuucugggucgagcucguccgcggccucccccgcgagaacaccaccaucuggaccuccggcuccuccaucuccuucugcggcgucgacuccgacaccgccaacugguccuggcccgacggcgccgagcuccccuucaucaucgacaaguga

SEQ ID NO: 112166 - RNA, 1413 nt, Artificial Sequence; identical to SEQ ID NO: 112066
  derived and/or modified CDS sequence (opt2) from neuraminidase__InfluenzaA__ABW36226

SEQ ID NO: 112167 - RNA, 1413 nt, Artificial Sequence
  derived and/or modified CDS sequence (opt2) from neuraminidase__InfluenzaA__ABW36237
augaaccccaaccagaagaucaucaccaucggcuccaucuccaucaccaucggcaucaucucccucaugcuccagaucggcaacaucaucuccaucugggccucccacuccauccagaccggcucccagaaccacaccggcaucugcaaccagcgcaucaucaccuacgagaacuccaccugggucaaccacaccuacgucaacaucaacaacaccaacgucgucgccggcaaggacaagaccuccgucacccucgccggcaacuccucccucugcuccaucuccggcugggccaucuacaccaaggacaacuccauccgcaucggcuccaagggcgacgucuucgucauccgcgagcccuucaucuccugcucccaccucgagugccgcaccuucuuccucacccagggcgcccuccucaacgacaagcacuccaacggcaccgucaaggaccgcucccccuaccgcgcccucauguccugcccccucggcgaggcccccucccccuacaacuccaaguucgaguccgucgccugguccgccuccgccugccacgacggcaugggcuggcucaccaucggcaucuccggccccgacaacggcgccgucgccguccucaaguacaacggcaucaucaccgagaccaucaaguccuggaagaagcgcauccuccgcacccaggaguccgagugcgucugcgucaacggcuccugcuucaccaucaugaccgacggccccuccaacggcgccgccuccuacaagaucuucaagaucgagaagggcaaggucaccaaguccaucgagcucaacgcccccaacuuccacuacgaggagugcuccugcuaccccgacaccggcaccgucaugugcgucugccgcgacaacuggcacggcuccaaccgccccugggucuccuucaaccagaaccucgacuaccaggucggcuacaucugcuccggcgucuucggcgacaacccccgccccaaggacggcaagggcuccugcaaccccaugaccgucgacggcgccgacggcgucaagggcuucuccuacaaguacggcaacggcgucuggaucggccgcaccaaguccaacaagcuccgcaagggcuucgagaugaucugggaccccaacggcuggaccgacaccgacuccgacuucuccgucaagcaggacgucgucgccaucaccgacugguccggcuacuccggcuccuucguccagcaccccgagcucaccggccucgacugcauccgccccugcuucugggucgagcucguccgcggccucccccgcgagaacaccaccaucuggaccuccggcuccuccaucuccuucugcggcgucgacuccgacaccgccaacugguccuggcccgacggcgccgagcuccccuucaccaucgacaaguga

SEQ ID NO: 112168 - RNA, 1413 nt, Artificial Sequence; identical to SEQ ID NO: 112066
  derived and/or modified CDS sequence (opt2) from neuraminidase__InfluenzaA__ABW36248

SEQ ID NO: 112169 - RNA, 1413 nt, Artificial Sequence
  derived and/or modified CDS sequence (opt2) from neuraminidase__InfluenzaA__ABW36259
augaaccccaaccagaagaucaucaccaucggcuccaucuccaucgccaucggcaucaucucccucaugcuccagaucggcaacaucaucuccaucugggccucccacuccauccagaccggcucccagaacaacaccggcaucugcaaccagcgcaucaucaccuacgagaacuccaccugggucaaccacaccuacgucaacaucaacaacaccaacgucgucgccggcaaggacaagaccuccgucacccucgccggcaacuccucccucugcuccaucuccggcugggccaucuacaccaaggacaacuccauccgcaucggcuccaagggcgacgucuucgucauccgcgagcccuucaucuccugcucccaccucgagugccgcaccuucuuccucacccagggcgcccuccucaacgacaagcacuccaacggcaccgucaaggaccgcucccccuaccgcgcccucauguccugcccccucggcgaggcccccucccccuacaacuccaaguucgaguccgucgccugguccgccuccgccugccacgacggcaugggcuggcucaccaucggcaucuccggccccgacaacggcgccgucgccguccucaaguacaacggcaucaucaccggcaccaucaaguccuggaagaagcagauccuccgcacccaggaguccgagugcgucugcaugaacggcuccugcuucaccaucaugaccgacggccccuccaaccgcgccgccuccuacaagaucuucaagaucgagaagggcaaggucaccaaguccaucgagcucaacgcccccaacuuccacuacgaggagugcuccugcuaccccgacaccggcaucgucaugugcgucugccgcgacaacuggcacggcuccaaccgccccugggucuccuucaaccagaaccucgacuaccagaucggcuacaucugcuccggcguccucggcgacaacccccgccccgaggacggcgagggcuccugcaaccccgucaccgucgacggcgccgacggcgucaagggcuucuccuacaaguacgacaacggcgucuggaucggccgcaccaaguccaaccgccuccgcaagggcuucgagaugaucugggaccccaacggcuggaccaacaccgacuccgacuucuccgucaagcaggacgucgucgccaucaccgacugguccggcuacuccggcuccuucguccagcaccccgagcucaccggccucgacugcauccgccccugcuucugggucgagcucguccgcggccucccccgcgagaacaccaccaucuggaccuccggcuccuccaucuccuucugcggcgucuccuccgacaccgccaacugguccuggcccgacggcgccgagcuccccuucaccaucgacaaguga

SEQ ID NO: 112170 - RNA, 1413 nt, Artificial Sequence; identical to SEQ ID NO: 112066
  derived and/or modified CDS sequence (opt2) from neuraminidase__InfluenzaA__ABW36281

SEQ ID NO: 112171 - RNA, 1413 nt, Artificial Sequence; identical to SEQ ID NO: 112066
  derived and/or modified CDS sequence (opt2) from neuraminidase__InfluenzaA__ABW36292

SEQ ID NO: 112172 - RNA, 1413 nt, Artificial Sequence; identical to SEQ ID NO: 112079
  derived and/or modified CDS sequence (opt2) from neuraminidase__InfluenzaA__ABW36303

SEQ ID NO: 112173 - RNA, 1413 nt, Artificial Sequence
  derived and/or modified CDS sequence (opt2) from neuraminidase__InfluenzaA__ABW36314
augaaccccaaccagaagaucaucaccaucggcuccaucugcauggccaucggcaucaucucccucauccuccagaucggcaacaucaucuccaucugggucucccacuccauccagaccggcucccagaaccacaccggcaucugcaaccagcgcaucaucaccuacgagaacuccaccugggucaaccagaccuacgucaacaucuccaacaccaacgucgucgccggcaaggacaccaccuccaugacccucgccggcaacuccucccucugccccauccgcggcugggccaucuacuccaaggacaacuccauccgcaucggcuccaagggcgacgucuucgucauccgcgagcccuucaucuccugcucccaccucgagugccgcaccuucuuccucacccagggcgcccuccucaacgacaagcacuccaacggcaccgucaaggaccgcucccccuaccgcgcccucauguccugccccaucggcgaggcccccucccccuacaacucccgcuucgaguccgucgccugguccgccuccgccugccacgacggcaugggcuggcucaccaucggcaucuccggccccgacgacggcgccgucgccguccucaaguacaacggcaucaucaccgagaccaucaaguccuggcgcaagcagauccuccgcacccaggaguccgagugcgucugcgucaacggcuccugcuucaccaucaugaccgacggccccuccgacggccaggccuccuaccgcaucuucaagaucgagaagggcaagaucaccaaguccaucgagcucgacgcccccaacuuccacuacgaggagugcuccugcuaccccgacaccggcaccgucaugugcgucugccgcgacaacuggcacggcuccaaccgccccugggucuccuucaaccagaaccucgacuaccagaucggcuacaucugcuccggcgucuucggcgacaacccccgccccaaggacggcaagggcuccugcgaccccgucaacgucgacggcgccgacggcgucaagggcuucuccuaccgcuacggcaacggcgucuggaucggccgcaccaaguccaacuccucccgcaagggcuucgagaugaucugggaccccaacggcuggaccgacaccgacuccaacuuccucgucaagcaggacgucgucgccaugaccgacugguccggcuacuccggcuccuucguccagcaccccgagcucaccggccucgacugcaugcgccccugcuucugggucgagcucauccgcggccgcccccgcgagaagaccaccaucuggaccuccggcuccuccaucuccuucugcggcgucaacuccgacaccgucaacugguccuggcccgacggcgccgagcuccccuucaccaucgacaaguga

SEQ ID NO: 112174 - RNA, 1410 nt, Artificial Sequence
  derived and/or modified CDS sequence (opt2) from neuraminidase__InfluenzaA__ABW38366
augaaccccaaccagaagaucaucaccaucggcuccgucucccucaccaucuccaccaucugcuucuucaugcagaucgccauccucaucaccaccgucacccuccacuucaagcaguacgaguucaacuccccccccaacaaccaggucaugcucugcgagcccaccaucaucgagcgcaacaucaccgagaucgucuaccucaccaacaccaccaucgagaaggagaucugccccaagcucgccgaguaccgcaacugguccaagccccagugcaacaucaccggcuucgcccccuucuccaaggacaacuccauccgccucuccgccggcggcgacaucugggucacccgcgagcccuacgucuccugcgaccccgacaagugcuaccaguucgcccucggccagggcaccacccucaacaacguccacuccaacgacaccguccacgaccgcacccccuaccgcacccuccucaugaacgagcucggcguccccuuccaccucggcaccaagcaggucugcaucgccugguccuccuccuccugccacgacggcaaggccuggcuccacgucugcgucaccggcgacgacaagaacgccaccgccuccuucaucuacaacggccgccucgucgacuccaucgccuccugguccaaggagauccuccgcacccaggaguccgagugcgucugcaucaacggcaccugcaccgucgucaugaccgacggcuccgccuccggcaaggccgacaccaagauccucuucaucgaggagggcaagaucguccacaccuccacccucuccggcuccgcccagcacgucgaggagugcuccugcuacccccgcuaccccggcguccgcugcgucugccgcgacaacuggaagggcuccaaccgccccaucgucgacaucaacaucaaggacuacuccaucgucuccuccuacgucugcuccggccucgucggcgacaccccccgcaagaacgacuccuccuccuccucccacugccucgaccccaacaacgaggagggcggccacggcgucaagggcugggccuucgacgacggcaacgacgucuggaugggccgcaccaucuccgagaagcuccgcuccggcuacgagaccuucaaggucaucgagggcugguccaaccccaacuccaagcuccagaucaaccgccaggucaucgucgaccgcggcaaccgcuccggcuacuccggcaucuucuccgucgagggcaaguccugcaucaaccgcugcuucuacgucgagcucauccgcggccgcaaggaggagaccgagguccucuggaccuccaacuccaucgucgucuucugcggcaccuccggcaccuacggcaccggcuccuggcccgacggcgccgacaucaaccucaugcccaucuga

SEQ ID NO: 112175 - RNA, 1413 nt, Artificial Sequence; identical to SEQ ID NO: 112165
  derived and/or modified CDS sequence (opt2) from neuraminidase__InfluenzaA__ABW39780

SEQ ID NO: 112176 - RNA, 1413 nt, Artificial Sequence
  derived and/or modified CDS sequence (opt2) from neuraminidase__InfluenzaA__ABW39809
augaaccccaaccagaagaucaucaccaucggcuccaucuccaucgccaucggcaucaucucccucaugcuccagaucggcaacaucaucuccaucugggccucccacuccauccagaccggcucccagaaccacaccggcaucugcaaccagcgcaucaucaccuacgagaacuccaccugggucaaccacaccuacgucuccaucaacaacaccaacgucgucgccggcaaggacaagacccucgucacccucgccggcaacuccucccucugcuccaucuccggcugggccaucuacaccaaggacaacuccauccgcaucggcuccaagggcgacgucuucgucauccgcgagcccuucaucuccugcucccaccucgagugccgcaccuucuuccucacccagggcgcccuccucaacgacaagcacuccaacggcaccgucaaggaccgcucccccuaccgcgcccucauguccugcccccucggcgaggcccccucccccuacaacuccaaguucgaguccgucgccugguccgccuccgccugccacgacggcaugggcuggcucaccaucggcaucuccggccccgacaacggcgccgucgccguccucaaguacaacggcaucaucaccgagaccaucaaguccuggaagaagcgcauccuccgcacccaggaguccgagugcgucugcgucaacggcuccugcuucaccaucaugaccgacggccccuccaacggcgccgccuccuacaagaucuucaagaucgagaagggcaaggucaccaaguccaucgagcucaacgcccccaacuuccacuacgaggagugcuccugcuaccccgacaccggcaccgucaugugcgucugccgcgacaacuggcacggcuccaaccgccccugggucuccuucaaccagaaccucgacuaccagaucggcuacaucugcuccggcgucuucggcgacaacccccgccccaaggacggcaagggcuccugcaaccccgucaccgucgacggcgccgacggcgucaagggcuucuccuacaaguacggcaacggcgucuggaucggccgcaccaaguccaaccgccuccgcaagggcuucgagaugaucugggaccccaacggcuggaccgacaccgacuccgacuucuccgucaagcaggacgucgucgccaucaccgacugguccggcuacuccggcuccuucguccagcaccccgagcucaccggccucgacugcauccgccccugcuucugggucgagcucguccgcggccucccccgcgagaacaccaccaucuggaccuccggcuccuccaucuccuucugcggcgucgacuccgacaccgccaacugguccuggcccgacggcgccgagcuccccuucaccaucgacaaguga

SEQ ID NO: 112177 - RNA, 1413 nt, Artificial Sequence; identical to SEQ ID NO: 112079
  derived and/or modified CDS sequence (opt2) from neuraminidase__InfluenzaA__ABW39820

SEQ ID NO: 112178 - RNA, 1413 nt, Artificial Sequence
  derived and/or modified CDS sequence (opt2) from neuraminidase__InfluenzaA__ABW39831
augaaccccaaccagaagaucaucaccaucggcuccaucuccaucgccaucggcaucaucucccucaugcuccagaucggcaacaucaucuccaucugggccucccacuccauccagaccggcucccagaaccacaccggcaucugcaaccagcgcaucaucaccuacgagaacuccaccugggucaaccacaccuacgucaacaucaacaacaccaacgucgucgccggcaaggacaagacccccgucacccucgucggcaacuccucccucugcuccaucuccggcugggccaucuacaccaaggacaacuccauccgcaucggcuccaagggcgacgucuucgucauccgcgagcccuucaucuccugcucccaccucgagugcaagaccuucuuccucacccagggcgcccuccucaacgacaagcacuccaacggcaccgucaaggaccgcucccccuaccgcgcccucauguccugcccccucggcgaggcccccucccccuacaacuccaaguucgaguccgucgccugguccgccuccgccugccacgacggcaucggcuggcucaccaucggcaucuccggccccgacaacggcgccgucgccguccucaaguacaacggcaucaucaccggcaccaucaaguccuggaagaagcagauccuccgcacccaggaguccgagugcgucugcaugaacggcuccugcuucaccaucaugaccgacggccccuccaacggcgccgccuccuacaagaucuucaagaucgagaagggcaaggucaccaaguccauggagcucaacgcccccaacuuccacuacgaggagugcuccugcuaccccgacaccggcaccgucaugugcgucugccgcgacaacuggcacggcuccaaccgccccugggucuccuucaaccagaaccucgacuaccagaucggcuacaucugcuccggcgucuucggcgacaacccccgccccaaggacggcgagggcuccugcaaccccgucaccgucgacggcgccaacggcgucaagggcuucuccuacaaguacggcaacggcgucuggaucggccgcaccaaguccaaccgcauccgcaagggcuucgagaugaucugggaccccaacggcuggaccaacaccgacuccgacuucuccgucaagcaggacaucgucgccaucaccgacugguccggcuacuccggcuccuucguccagcaccccgagcucaccggccucgacugcauccgccccugcuucugggucgagcucguccgcggccucccccgcgagaacaccaccaucuggaccuccggcuccuccaucuccuucugcggcgucaacggcgacaucgccaacugguccuggcccgacggcgccgagcuccccuucaccaucgacaaguga

SEQ ID NO: 112179 - RNA, 1413 nt, Artificial Sequence; identical to SEQ ID NO: 112092
  derived and/or modified CDS sequence (opt2) from neuraminidase__InfluenzaA__ABW39842

SEQ ID NO: 112180 - RNA, 1413 nt, Artificial Sequence; identical to SEQ ID NO: 112066
  derived and/or modified CDS sequence (opt2) from neuraminidase__InfluenzaA__ABW39864

SEQ ID NO: 112181 - RNA, 1410 nt, Artificial Sequence; identical to SEQ ID NO: 112102
  derived and/or modified CDS sequence (opt2) from neuraminidase__InfluenzaA__ABW39875

SEQ ID NO: 112182 - RNA, 1413 nt, Artificial Sequence
  derived and/or modified CDS sequence (opt2) from neuraminidase__InfluenzaA__ABW39886
augaaccccaaccagaagaucaucaccaucggcuccaucuccaucgccaucggcaucaucucccucauccuccagaucggcaacaucaucuccaucugggccucccacuccauccagacccgcaaccagaaccacaccggcaucugcaaccagcgcaucaucaccuacgagaacuccaccugggucaaccacaccuacgucuccaucaacaacaccaacgucgucgccggcaaggacaagaccuccgucacccucgccggcaacuccucccucugcuccaucuccggcugggccaucuacaccaaggacaacuccauccgcaucggcuccaagggcgacgucuucgucauccgcgagcccuucaucuccugcucccaccucgagugccgcaccuucuuccucacccagggcgcccuccucaacgacaagcacuccaacggcaccgucaaggaccgcucccccuaccgcgcccucauguccugcccccucggcgaggcccccucccccuacaacuccaaguucgaguccgucgccugguccgccuccgccugccacgacggcaugggcuggcucaccaucggcaucuccggccccgacaacggcgccgucgccguccucaaguacaacggcaucaucaccgagaccaucaaguccuggaagaagcgcauccuccgcacccaggaguccgagugcgucugcgucaacggcuccugcuucaccaucaugaccgacggccccuccaacggcgccgccuccuacaagaucuucaagaucgagaagggcaaggucaccaaguccaucgagcucaacgcccccaacuuccacuacgaggagugcuccugcuaccccgacaccggcaccgucaugugcgucugccgcgacaacuggcacggcuccaaccgccccugggucuccuucaaccagaaccucgacuaccagaucggcuacaucugcuccggcgucuucggcgacaacccccgccccaaggacggcaagggcuccugcaaccccgucaccgucgacggcgccgacggcgucaagggcuucuccuacaaguacggcaacggcgucuggaucggccgcaccaaguccaaccgccuccgcaagggcuucgagaugaucugggaccccaacggcuggaccgacaccgacuccgacuucuccgucaagcaggacgucgucgccaucaccgacugguccggcuacuccggcuccuucguccagcaccccgagcucaccggccucgacugcauccgccccugcuucugggucgagcucguccgcggccucccccgcgagaacaccaccaucuggaccuccggcuccuccaucuccuucugcggcgucgacuccgacaccgccaacugguccuggcccgacggcgccgagcuccccuucaccaucgacaaguga

SEQ ID NO: 112183 - RNA, 1413 nt, Artificial Sequence; identical to SEQ ID NO: 112066
  derived and/or modified CDS sequence (opt2) from neuraminidase__InfluenzaA__ABW39897

SEQ ID NO: 112184 - RNA, 1413 nt, Artificial Sequence
  derived and/or modified CDS sequence (opt2) from neuraminidase__InfluenzaA__ABW39908
augaaccccaaccagaagaucaucaccaucggcuccaucuccaucgccaucggcaucaccucccucaugcuccagaucggcaacaucaucuccaucugggccucccacuccauccagaccggcucccagaaccacaccggcaucugcaaccagcgcaucaucaccuacgagaacuccaccugggucaaccacaccuacgucuccaucaacaacaccaacgucgucgccggcaaggacaagaccuccgucacccucgccggcaacuccucccucugcuccaucuccggcugggccaucuacaccaaggacaacuccauccgcaucggcuccaagggcgacgucuucgucauccgcgagcccuucaucuccugcucccaccucgagugccgcaccuucuuccucacccagggcgcccuccucaacgacaagcacuccaacggcaccgucaaggaccgcucccccuaccgcgcccucauguccugcccccucggcgaggcccccucccccuacaacuccaaguucgaguccgucgccugguccgccuccgccugccacgacggcaugggcuggcucaccaucggcaucuccggccccgacaacggcgccgucgccguccucaaguacaacggcaucaucaccgagaccaucaaguccuggaagaagcgcauccuccgcacccaggaguccgagugcgucugcgucaacggcuccugcuucaccaucaugaccgacggccccuccaacggcgccgccuccuacaagaucuucaagaucgagaagggcaaggucaccaaguccaucgagcucaacgcccccaacuuccacuacgaggagugcuccugcuaccccgacaccggcaccgucaugugcgucugccgcgacaacuggcacggcuccaaccgccccugggucuccuucaaccagaaccucgacuaccagaucggcuacaucugcuccggcgucuucggcgacaacccccgccccaaggacggcaagggcuccugcaaccccgucaccgucgacggcgccgacggcgucaagggcuucuccuacaaguacggcaacggcgucuggaucggccgcaccaaguccaaccgccuccgcaagggcuucgagaugaucugggaccccaacggcuggaccgacaccgacuccgacuucuccgucaagcaggacgucgucgccaucaccgacugguccggcuacuccggcuccuucguccagcaccccgagcucaccggccucgacugcauccgccccugcuucugggucgagcucguccgcggccucccccgcgagaacaccaccaucuggaccuccggcuccuccaucuccuucugcggcgucgacuccgacaccgccaacugguccuggcccgacggcgccgagcuccccuucaccaucgacaaguga

SEQ ID NO: 112185 - RNA, 1413 nt, Artificial Sequence
  derived and/or modified CDS sequence (opt2) from neuraminidase__InfluenzaA__ABW39930
augaaccccaaccagaagaucaucaccaucggcuccaucuccaucgccaucggcaucaucucccucaugcuccagaucggcaacaucaucuccaucugggccucccacuccauccagaccggcucccagaaccacaccggcaucugcaaccagcgcaucaucaccuacgagaacuccaccugggucaaccacaccuacgucuccaucaacaacaccaacgucgucgccggcaaggacaagaccuccgucacccucgccggcaacuccucccucugcuccaucuccggcugggccaucuacaccaaggacaacuccauccgcaucggcuccaagggcgacgucuucgucauccgcgagcccuucaucuccugcucccaccucgagugccgcaccuucuuccucacccagggcgcccuccucaacgacaagcacuccaacggcaccgucaaggaccgcucccccuaccgcgcccucauguccugcccccucggcgaggcccccucccccuacaacuccaaguucgaguccgucgccugguccgccuccgccugccacgacggcaugggcuggcucaccaucggcaucuccggccccgacaacggcgccgucgccguccucaaguacaacggcaucaucaccgagaccaucaaguccuggaagaagcgcauccuccgcacccaggaguccgagugcgucugcgucaacggcuccugcuucaccaucaugaccgacggccccuccgacggcgccgccuccuacaagaucuucaagaucgagaagggcaaggucaccaaguccaucgagcucaacgcccccaacuuccacuacgaggagugcuccugcuaccccgacaccggcaccgucaugugcgucugccgcgacaacuggcacggcuccaaccgccccugggucuccuucaaccagaaccucgacuaccagaucggcuacaucugcuccggcgucuucggcgacaacccccgccccaaggacggcaagggcuccugcaaccccgucaccgucgacggcgccgacggcgucaagggcuucuccuacaaguacggcaacggcgucuggaucggccgcaccaaguccaaccgccuccgcaagggcuucgagaugaucugggaccccaacggcuggaccgacaccgacuccgacuucuccgucaagcaggacgucgucgccaucaccgacugguccggcuacuccggcuccuucguccagcaccccgagcucaccggccucgacugcauccgccccugcuucugggucgagcucguccgcggccucccccgcgagaacaccaccaucuggaccuccggcuccuccaucuccuucugcggcgucgacuccgacaccgccaacugguccuggcccgacggcgccgagcuccccuucaccaucgacaaguga

SEQ ID NO: 112186 - RNA, 1413 nt, Artificial Sequence
  derived and/or modified CDS sequence (opt2) from neuraminidase__InfluenzaA__ABW39952
augaaccccaaccagaagaucaucaccaucggcuccaucuccaucaccaucggcaucaucucccucaugcuccagaucggcaacaucaucuccaucugggccucccacuccauccagaccggcucccagaaccacaccggcaugugcaaccagcgcaucaucaccuacgagaacuccaccugggucaaccacaccuacgucuccaucaacaacaccaacgucgucgccggcaaggacaagaccuccgucacccucgccggcaacuccucccucugcuccaucuccggcugggccaucuacaccaaggacaacuccauccgcaucggcuccaagggcgacgucuucgucauccgcgagcccuucaucuccugcucccaccucgagugccgcaccuucuuccucacccagggcgcccuccucaacgacaagcacuccaacggcaccgucaaggaccgcucccccuaccgcgcccucauguccugcccccucggcgaggcccccucccccuacaacuccaaguucgaguccgucgccugguccgccuccgccugccacgacggcaugggcuggcucaccaucggcaucuccggccccgacaacggcgccgucgccguccucaaguacaacggcaucaucaccgagaccaucaaguccuggaagaagcgcauccuccgcacccaggaguccgagugcgucugcgucaacggcuccugcuucaccaucaugaccgacggccccuccaacggcgccgccuccuacaagaucuucaagaucgagaagggcaaggucaccaaguccaucgagcucaacgcccccaacuuccacuacgaggagugcuccugcuaccccgacaccggcaccgucaugugcgucugccgcgacaacuggcacggcuccaaccgccccugggucuccuucaaccagaaccucgacuaccagaucggcuacaucugcuccggcgucuucggcgacaacccccgccccaaggacggcaagggcuccugcaaccccgucaccgucgacggcgccgacggcgucaagggcuucuccuacaaguacggcaacggcgucuggaucggccgcaccaaguccaaccgccuccgcaagggcuucgagaugaucugggaccccaacggcuggaccgacaccgacuccgacuucuccgucaagcaggacgucgucgccaucaccgacugguccggcuacuccggcuccuucguccagcaccccgagcucaccggccucgacugcauccgccccugcuucugggucgagcucguccgcggccucccccgcgagaacaccaccaucuggaccuccggcuccuccaucuccuucugcggcgucgacuccgacaccgccaacugguccuggcccgacggcgccgagcuccccuucaccaucgacaaguga

SEQ ID NO: 112187 - RNA, 1413 nt, Artificial Sequence; identical to SEQ ID NO: 112066
  derived and/or modified CDS sequence (opt2) from neuraminidase__InfluenzaA__ABW39963

SEQ ID NO: 112188 - RNA, 1413 nt, Artificial Sequence; identical to SEQ ID NO: 112066
  derived and/or modified CDS sequence (opt2) from neuraminidase__InfluenzaA__ABW39985

SEQ ID NO: 112189 - RNA, 1413 nt, Artificial Sequence
  derived and/or modified CDS sequence (opt2) from neuraminidase__InfluenzaA__ABW39996
augaaccccaaccagaagaucaucaccaucggcuccaucuccaucgccaucggcaucaucucccucaugcuccagaucggcaacaucaucuccaucugggccucccacuccauccagaccggcucccagaaccacaccggcaucugcaaccagcgcaucaucaccuacgagaacuccaccugggucaaccacaccuacgucaacaucaacaacaccaacgucgucgccggcaaggacaagaccuccgucacccucgccggcaacuccucccucugcuccaucuccggcugggccaucuacaccaaggacaacuccauccgcaucggcuccaagggcgacgucuucgucauccgcgagcccuucaucuccugcucccaccucgagugccgcaccuucuuccucacccagggcgcccuccucaacgacaagcacuccaacggcaccgucaaggaccgcucccccuaccgcgcccucauguccugcccccucggcgaggcccccucccccuacaacuccaaguucgaguccgucgccugguccgccuccgccugccacgacggcaugggcuggcucaccaucggcaucuccggccccgacaacggcgccgucgccguccucaaguacaacggcaucaucaccgagaccaucaaguccuggaagaagcgcauccuccgcacccaggaguccgagugcgucugcgucaacggcuccugcuucaccaucaugaccgacggccccuccaacggcaccgccuccuacaagaucuucaagaucgagaagggcaaggucaccaaguccaucgagcucaacgcccccaacuuccacuacgaggagugcuccugcuaccccgacaccggcaccgucaugugcgucugccgcgacaacuggcacggcuccaaccgccccugggucuccuucaaccagaaccucgacuaccaggucggcuacaucugcuccggcgucuucggcgacaacccccgccccaaggacggcaagggcuccugcaaccccaugaccgucgacggcgccgacggcgucaagggcuucuccuacaaguacggcaacggcgucuggaucggccgcaccaaguccaacaagcuccgcaagggcuucgagaugaucugggaccccaacggcuggaccgacaccgacuccgacuucuccgucaagcaggacgucgucgccaucaccgacugguccggcuacuccggcuccuucguccagcaccccgagcucaccggccucgacugcauccgccccugcuucugggucgagcucguccgcggccucccccgcgagaacaccaccaucuggaccuccggcuccuccaucuccuucugcggcgucgacuccgacaccgccaacugguccuggcccgacggcgccgagcuccccuucaccaucgacaaguga

SEQ ID NO: 112190 - RNA, 1413 nt, Artificial Sequence; identical to SEQ ID NO: 112066
  derived and/or modified CDS sequence (opt2) from neuraminidase__InfluenzaA__ABW40007

SEQ ID NO: 112191 - RNA, 1413 nt, Artificial Sequence
  derived and/or modified CDS sequence (opt2) from neuraminidase__InfluenzaA__ABW40018
augaaccccaaccagaagaucaucaccaucggcuccaucuccaucgccaucggcaucaucucccucaugcuccagaucggcaacaucaucuccaucugggccucccacuccauccagaccggcucccagaaccacaccggcaucugcaaccagcgcaucaucaccuacgagaacuccaccugggucaaccacaccuacgucaacaucaacaacaccaacgucgucgccggcaaggacaagaccuccgucacccucgccggcaacuccucccucugcuccaucuccggcugggccaucuacaccaaggacaacuccauccgcaucggcuccaagggcgacgucuucgucauccgcgagcccuucaucuccugcucccaccucgagugccgcaccuucuuccucacccagggcgcccuccucaacgacaagcacuccaacggcaccgucaaggaccgcucccccuaccgcgcccucauguccugcccccucggcgaggcccccucccccuacaacuccaaguucgaguccgucgccugguccgccuccgccugccacgacggcaugggcuggcucaccaucggcaucuccggccccgacaacggcgccgucgccguccucaaguacaacggcaucaucaccgagaccaucaaguccuggaagaagcgcauccuccgcacccaggaguccgagugcgucugcgucaacggcuccugcuucaccaucaugaccgacggccccuccaacggcgccgccuccuacaagaucuucaagaucgagaagggcaaggucaccaaguccaucgagcucaacgcccccaacuuccacuacgaggagugcuccugcuaccccgacaccggcaccgucaugugcgucugccgcgacaacuggcacggcuccaaccgccccugggucuccuucaaccagaaccucgacuaccagaucggcuacaucugcuccggcgucuucggcgacaacccccgccccaaggacggcaagggcuccugcaaccccgucaccgucgacggcgccgacggcaucaagggcuucuccuacaaguacggcaacggcgucuggaucggccgcaccaaguccaaccgccuccgcaagggcuucgagaugaucugggaccccaacggcuggaccaacaccgacuccgacuucuccgucaagcaggacgucgucgccaucaccgacugguccggcuacuccggcuccuucguccagcaccccgagcucaccggccucgacugcauccgccccugcuucugggucgagcucguccgcggccucccccgcgagaacaccaccaucuggaccuccggcuccuccaucuccuucugcggcgucgacggcgacaccgccaacugguccuggcccgacggcgccgagcuccccuucaccaucgacaaguga

SEQ ID NO: 112192 - RNA, 1410 nt, Artificial Sequence; identical to SEQ ID NO: 111920
  derived and/or modified CDS sequence (opt2) from neuraminidase__InfluenzaA__ABW40029

SEQ ID NO: 112193 - RNA, 1413 nt, Artificial Sequence
  derived and/or modified CDS sequence (opt2) from neuraminidase__InfluenzaA__ABW40040
augaaccccaaccagaagaucaucaccaucggcuccaucuccaucgccaucggcaucaucucccucaugcuccagaucggcaacaucaucuccaucugggccucccacuccauccagaccggcucccagaaccacaccggcaucugcaaccagcgcaucaucaccuacgagaacuccaccugggucaaccacaccuacgucuccaucaacaacaccaacgucgucgccggcaaggacaagaccuccgucacccucgccggcaacuccucccucugcuccaucuccggcugggccaucuacaccaaggacaacuccauccgcaucggcuccaagggcgacgucuucgucauccgcgagcccuucaucuccugcucccaccucgagugccgcaccuucuuccucacccagggcgcccuccucaacgacaagcacuccaacggcaccgucaaggaccgcucccccuaccgcgcccucauguccugcccccucggcgaggcccccucccccuacaacuccaaguucgaguccgucgccugguccgccuccgccugccacgacggcaugggcuggcucaccaucggcaucuccggccccgacaacggcgccgucgccguccucaaguacaacggcaucaucaccgagaccaucaaguccuggaagaagcgcauccuccgcacccaggaguccgagugcgucugcgucaacggcuccugcuucaccaucaugaccgacggccccuccaacggcgccgccuccuacaagaucuucaagaucgagaagggcaaggucaccaaguccaucgagcucaacgcccccaacuuccacuacgaggagugcuccugcuaccccgacaccggcaccgucaugugcgucugccgcgacaacuggcacggcuccaaccgccccugggucuccuucaaccagaaccucgacuaccagaucggcuacaucugcuccggcgucuucggcgacaacccccgccccaaggacggcaagggcuccugcaaccccgucaccgucgacggcgccgacggcgucaagggcuucuccuacaaguacggcaacggcaucuggaucggccgcaccaaguccaaccgccuccgcaagggcuucgagaugaucugggaccccaacggcuggaccgacaccgacuccgacuucuccgucaagcaggacgucgucgccaucaccgacugguccggcuacuccggcuccuucguccagcaccccgagcucaccggccucgacugcauccgccccugcuucugggucgagcucguccgcggccucccccgcgagaacaccaccaucuggaccuccggcuccuccaucuccuucugcggcgucgacuccgacaccgccaacugguccuggcccgacggcgccgagcuccccuucaccaucgacaaguga

SEQ ID NO: 112194 - RNA, 1413 nt, Artificial Sequence; identical to SEQ ID NO: 112066
  derived and/or modified CDS sequence (opt2) from neuraminidase__InfluenzaA__ABW40051

SEQ ID NO: 112195 - RNA, 1413 nt, Artificial Sequence; identical to SEQ ID NO: 112066
  derived and/or modified CDS sequence (opt2) from neuraminidase__InfluenzaA__ABW40062

SEQ ID NO: 112196 - RNA, 1410 nt, Artificial Sequence; identical to SEQ ID NO: 112102
  derived and/or modified CDS sequence (opt2) from neuraminidase__InfluenzaA__ABW40084

SEQ ID NO: 112197 - RNA, 1413 nt, Artificial Sequence
  derived and/or modified CDS sequence (opt2) from neuraminidase__InfluenzaA__ABW40095
augaaccccaaccagaagaucaucaccaucggcuccaucuccgucgccaucggcaucaucucccucaugcuccagaucggcaacaucaucuccaucugggccucccacuccauccagaccggcucccagaaccacaccggcaucugcaaccagcgcaucaucaccuacgagaacuccaccugggucaaccacaccuacgucuccaucaacaacaccaacgucgucgccggcaaggacaagaccuccgucacccucgccggcaacuccucccucugcuccaucuccggcugggccaucuacaccaaggacaacuccauccgcaucggcuccaagggcgacgucuucgucauccgcgagcccuucaucuccugcucccaccucgagugccgcaccuucuuccucacccagggcgcccuccucaacgacaagcacuccaacggcaccgucaaggaccgcucccccuaccgcgcccucauguccugcccccucggcgaggcccccucccccuacaacuccaaguucgaguccgucgccugguccgccuccgccugccacgacggcaugggcuggcucaccaucggcaucuccggccccgacaacggcgccgucgccguccucaaguacaacggcaucaucaccgagaccaucaaguccuggaagaagcgcauccuccgcacccaggaguccgagugcgucugcgucaacggcuccugcuucaccaucaugaccgacggccccuccaacggcgccgccuccuacaagaucuucaagaucgagaagggcaaggucaccaaguccaucgagcucaacgcccccaacuuccacuacgaggagugcuccugcuaccccgacaccggcaccgucaugugcgucugccgcgacaacuggcacggcuccaaccgccccugggucuccuucaaccagaaccucgacuaccagaucggcuacaucugcuccggcgucuucggcgacaacccccgccccaaggacggcaagggcuccugcaaccccaugaccgucgacggcgccgacggcgucaagggcuucuccuacaaguacggcaacggcgucuggaucggccgcaccaaguccaaccgccuccgcaagggcuucgagaugaucugggaccccaacggcuggaccgacaccgacuccgacuucuccgucaagcaggacgucgucgccaucaccgacugguccggcuacuccggcuccuucguccagcaccccgagcucaccggccucgacugcauccgccccugcuucugggucgagcucguccgcggccucccccgcgagaacaccaccaucuggaccuccggcuccuccaucuccuucugcggcgucgacuccgacaccgccaacugguccuggcccgacggcgccgagcuccccuucaccaucgacaaguga

SEQ ID NO: 112198 - RNA, 1413 nt, Artificial Sequence
  derived and/or modified CDS sequence (opt2) from neuraminidase__InfluenzaA__ABW40106
augaaccccaaccagaagaucaucaccaucggcuccaucuccaucgccaucggcaucaucucccucaugcuccagaucggcaacaucaucuccaucugggccucccacuccauccagaccggcucccagaaccacaccggcaucugcaaccagcgcaucaucaccuacgagaacuccaccugggucaaccacaccuacgucuccaucaacaacaccaacgucgucgccggcaaggacaagaccuccgucacccucgccggcaacuccucccucugcuccaucuccggcugggccaucuacaccaaggacaacuccauccgcaucggcuccaagggcgacgucuucgucauccgcgagcccuucaucuccugcucccaccucgagugccgcaccuucuuccucacccagggcgcccuccucaacgacaagcacuccaacggcaccgucaaggaccgcucccccuaccgcgcccucauguccugcccccucggcgaggcccccucccccuacaacuccaaguucgaguccgucgccugguccgccuccgccugccacgacggcaugggcuggcucaccaucggcaucuccggccccgacaacggcgccgucgccguccucaaguacaacggcaucaucaccgagaccaucaaguccuggaagaagcgcauccuccgcacccaggaguccgagugcgucugccucaacggcuccugcuucaccaucaugaccgacggccccuccaacggcgccgccuccuacaagaucuucaagaucgagaagggcaaggucaccaaguccaucgagcucaacgcccccaacuuccacuacgaggagugcuccugcuaccccgacaccggcaccgucaugugcgucugccgcgacaacuggcacggcuccaaccgccccugggucuccuucaaccagaaccucgacuaccagaucggcuacaucugcuccggcgucuucggcgacaacccccgccccaaggacggcaagggcuccugcaaccccgucaccgucgacggcgccgacggcgucaagggcuucuccuacaaguacggcaacggcgucuggaucggccgcaccaaguccaaccgccuccgcaagggcuucgagauggucugggaccccaacggcuggaccgacaccgacuccgacuucuccgucaagcaggacgucgucgccaucaccgacugguccggcuacuccggcuccuucguccagcaccccgagcucaccggccucgacugcauccgccccugcuucugggucgagcucguccgcggccucccccgcgagaacaccaccaucuggaccuccggcuccuccaucuccuucugcggcgucgacuccgacaccgccaacugguccuggcccgacggcgccgagcuccccuucaccaucgacaaguga

SEQ ID NO: 112199 - RNA, 1413 nt, Artificial Sequence; identical to SEQ ID NO: 112066
  derived and/or modified CDS sequence (opt2) from neuraminidase__InfluenzaA__ABW40117

SEQ ID NO: 112200 - RNA, 1413 nt, Artificial Sequence; identical to SEQ ID NO: 112066
  derived and/or modified CDS sequence (opt2) from neuraminidase__InfluenzaA__ABW40128

SEQ ID NO: 112201 - RNA, 1410 nt, Artificial Sequence; identical to SEQ ID NO: 111920
  derived and/or modified CDS sequence (opt2) from neuraminidase__InfluenzaA__ABW40139

SEQ ID NO: 112202 - RNA, 1413 nt, Artificial Sequence; identical to SEQ ID NO: 112066
  derived and/or modified CDS sequence (opt2) from neuraminidase__InfluenzaA__ABW40150

SEQ ID NO: 112203 - RNA, 1413 nt, Artificial Sequence; identical to SEQ ID NO: 112066
  derived and/or modified CDS sequence (opt2) from neuraminidase__InfluenzaA__ABW40161

SEQ ID NO: 112204 - RNA, 1410 nt, Artificial Sequence
  derived and/or modified CDS sequence (opt2) from neuraminidase__InfluenzaA__ABW40172
augaaccccaaccagaagaucaucaccaucggcuccgucucccucaccaucuccaccaucugcuucuucaugcagaucgccauccucaucaccaccgucacccuccacuucaagcaguacgaguucaacuccccccccaacaaccaggucaugcucugcgagcccaccaucaucgagcgcaacaucaccgagaucgucuaccucaccaacaccaccaucgagaaggagaucugccccaagcucgccgaguaccgcaacugguccaagccccagugcgacaucaccggcuucgcccccuucuccaaggacaacuccauccgccucuccgccggcggcgacaucugggucacccgcgagcccuacgucuccugcgaccccgacaagugcuaccaguucgcccucggccagggcaccacccucaacaacguccacuccaacgacaccguccgcgaccgcacccccuaccgcacccuccucaugaacgagcucggcguccccuuccaccucggcaccaagcaggucugcaucgccugguccuccuccuccugccacgacggcaaggccuggcuccacgucugcaucaccggcgacgacaagaacgccaccgccuccuucaucuacaacggccgccucgucgacuccaucgucuccugguccaaggagauccuccgcacccaggaguccgagugcgucugcaucaacggcaccugcaccgucgucaugaccgacggcuccgccuccggcaaggccgacaccaagauccucuucaucgaggagggcaagaucguccacaccuccacccucuccggcuccgcccagcacgucgaggagugcuccugcuacccccgcuaccccggcguccgcugcgucugccgcgacaacuggaagggcuccaaccgccccaucgucgacaucaacaucaaggaccacuccaucgucuccuccuacgucugcuccggccucgucggcgacaccccccgcaagaacgacuccuccuccuccucccacugccucgaccccaacaacgaggagggcggccacggcgucaagggcugggccuucgacgacggcaacgacgucuggaugggccgcaccaucuccgagaagucccgccucggcuacgagaccuucaaggucaucgagggcugguccaaccccaaguccaagcuccagaucaaccgccaggucaucgucgaccgcggcaaccgcuccggcuacuccggcaucuucuccgucgagggcaaguccugcaucaaccgcugcuucuacgucgagcucacccgcggccgcaaggaggagaccgagguccucuggaccuccaacuccaucgucgucuucugcggcaccuccggcaccuacggcaccggcuccuggcccgacggcgccgacaucaaccucaugcccaucuga

SEQ ID NO: 112205 - RNA, 1413 nt, Artificial Sequence; identical to SEQ ID NO: 112066
  derived and/or modified CDS sequence (opt2) from neuraminidase__InfluenzaA__ABW40183

SEQ ID NO: 112206 - RNA, 1410 nt, Artificial Sequence; identical to SEQ ID NO: 111920
  derived and/or modified CDS sequence (opt2) from neuraminidase__InfluenzaA__ABW40194

SEQ ID NO: 112207 - RNA, 1413 nt, Artificial Sequence; identical to SEQ ID NO: 112101
  derived and/or modified CDS sequence (opt2) from neuraminidase__InfluenzaA__ABW40205

SEQ ID NO: 112208 - RNA, 1413 nt, Artificial Sequence; identical to SEQ ID NO: 112105
  derived and/or modified CDS sequence (opt2) from neuraminidase__InfluenzaA__ABW40216

SEQ ID NO: 112209 - RNA, 1413 nt, Artificial Sequence; identical to SEQ ID NO: 112105
  derived and/or modified CDS sequence (opt2) from neuraminidase__InfluenzaA__ABW40227

SEQ ID NO: 112210 - RNA, 1413 nt, Artificial Sequence; identical to SEQ ID NO: 112066
  derived and/or modified CDS sequence (opt2) from neuraminidase__InfluenzaA__ABW40238

SEQ ID NO: 112211 - RNA, 1410 nt, Artificial Sequence
  derived and/or modified CDS sequence (opt2) from neuraminidase__InfluenzaA__ABW40249
augaaccccaaccagaagaucaucaccaucggcuccgucucccucaccaucuccaccaucugcuucuucaugcagaucgccauccucaucaccaccgucacccuccacuucaagcaguacgaguucaacuccccccccaacaaccaggucaugcucugcgagcccaccaucaucgagcgcaacaucaccgagaucgucuaccucaccaacaccaccaucgagaaggagaucugccccaagcucgccgaguaccgcaacugguccaagccccagugcgacaucaccggcuucgcccccuucuccaaggacaacuccauccgccucuccgccggcggcgacaucugggucacccgcgagcccuacgucuccugcgaccccgacaagugcuaccaguucgcccucggccagggcaccacccucaacaacguccacuccaacgacaccguccgcgaccgcacccccuaccgcacccuccucaugaacgagcucggcguccccuuccaccucggcaccaagcaggucugcaucgccugguccuccuccuccugccacgacggcaaggccuggcuccacgucugcaucaccggcgacgacaagaacgccaccgccuccuucaucuacaacggccgccucgucgacuccaucgucuccugguccaaggagauccuccgcacccaggaguccgagugcgucugcaucaacggcaccugcaccgucgucaugaccgacggcuccgccuccggcaaggccgacaccaagauccucuucaucgaggagggcaagaucguccacaccuccacccucuccggcuccgcccagcacgucgaggagugcuccugcuacccccgcuaccccggcguccgcugcgucugccgcgacaacuggaagggcuccaaccgccccaucgucgacaucaacaucaaggaccacuccaucgucuccuccuacgucugcuccggccucgucggcgacaccccccgcaagaacgacuccuccuccuccucccacugccucgaccccaacaacgaggagggcggccacggcgucaagggcugggccuucgacgacggcaacgacgucuggaugggccgcaccaucuccgagaagucccgccucggcuacgagaccuucaaggucaucgagggcugguccaaccacaaguccaagcuccagaucaaccgccaggucaucgucgaccgcggcaaccgcuccggcuacuccggcaucuucuccgucgagggcaaguccugcaucaaccgcugcuucuacgucgagcucauccgcggccgcaaggaggagaccgagguccucuggaccuccaacuccaucgucgucuucugcggcaccuccggcaccuacggcaccggcuccuggcccgacggcgccgacaucaaccucaugcccaucuga

SEQ ID NO: 112212 - RNA, 1413 nt, Artificial Sequence; identical to SEQ ID NO: 112066
  derived and/or modified CDS sequence (opt2) from neuraminidase__InfluenzaA__ABW40260

SEQ ID NO: 112213 - RNA, 1410 nt, Artificial Sequence
  derived and/or modified CDS sequence (opt2) from neuraminidase__InfluenzaA__ABW40271
augaaccccaaccagaagaucaucaccaucggcuccgucucccucaccaucuccaccaucugcuucuucaugcagaucgccauccucaucaccaccgucacccuccacuucaagcaguacgaguucaacuccccccccaacaaccaggucaugcucugcgagcccaccaucaucgagcgcaacaucaccgagaucgucuaccucaccaacaccaccaucgagaaggagaucugccccaagcucgccgagcaccgcaacugguccaagccccagugcgacaucaccggcuucgcccccuucuccaaggacaacuccauccgccucuccgccggcggcgacaucugggucacccgcgagcccuacgucuccugcgaccccgacaagugcuaccaguucgcccucggccagggcaccacccucaacaacguccacuccaacgacaccguccgcgaccgcacccccuaccgcacccuccucaugaacgagcucggcguccccuuccaccucggcaccaagcaggucugcaucgccugguccuccuccuccugccacgacggcaaggccuggcuccacgucugcaucaccggcgacgacaagaacgccaccgccuccuucaucuacaacggccgccucgucgacuccaucgucuccugguccaaggagauccuccgcacccaggaguccgagugcgucugcaucaacggcaccugcaccgucgucaugaccgacggcuccgccuccggcaaggccgacaccaagauccucuucaucgaggagggcaagaucguccacaccuccacccucuccggcuccgcccagcacgucgaggagugcuccugcuacccccgcuaccccggcguccgcugcgucugccgcgacaacuggaagggcuccaaccgccccaucgucgacaucaacaucaaggaccacuccaucgucuccuccuacgucugcuccggccucgucggcgacaccccccgcaagaacgacuccuccuccuccucccacugccucgaccccaacaacgaggagggcggccacggcgucaagggcugggccuucgacgacggcaacgacgucuggaugggccgcaccaucuccgagaagucccgccucggcuacgagaccuucaaggucaucgagggcugguccaaccccaaguccaagcuccagaucaaccgccaggucaucgucgaccgcggcaaccgcuccggcuacuccggcaucuucuccgucgagggcaaguccugcaucaaccgcugcuucuacgucgagcucauccgcggccgcaaggaggagaccgagguccucuggaccuccaacuccaucgucgucuucugcggcaccuccggcaccuacggcaccggcuccuggcccgacggcgccgacaucaaccucaugcccaucuga

SEQ ID NO: 112214 - RNA, 1413 nt, Artificial Sequence; identical to SEQ ID NO: 112066
  derived and/or modified CDS sequence (opt2) from neuraminidase__InfluenzaA__ABW40282

SEQ ID NO: 112215 - RNA, 1413 nt, Artificial Sequence; identical to SEQ ID NO: 112101
  derived and/or modified CDS sequence (opt2) from neuraminidase__InfluenzaA__ABW40293

SEQ ID NO: 112216 - RNA, 1413 nt, Artificial Sequence; identical to SEQ ID NO: 112066
  derived and/or modified CDS sequence (opt2) from neuraminidase__InfluenzaA__ABW40304

SEQ ID NO: 112217 - RNA, 1413 nt, Artificial Sequence; identical to SEQ ID NO: 112066
  derived and/or modified CDS sequence (opt2) from neuraminidase__InfluenzaA__ABW40315

SEQ ID NO: 112218 - RNA, 1410 nt, Artificial Sequence; identical to SEQ ID NO: 111920
  derived and/or modified CDS sequence (opt2) from neuraminidase__InfluenzaA__ABW40326

SEQ ID NO: 112219 - RNA, 1413 nt, Artificial Sequence; identical to SEQ ID NO: 112107
  derived and/or modified CDS sequence (opt2) from neuraminidase__InfluenzaA__ABW40337

SEQ ID NO: 112220 - RNA, 1413 nt, Artificial Sequence; identical to SEQ ID NO: 112101
  derived and/or modified CDS sequence (opt2) from neuraminidase__InfluenzaA__ABW40359

SEQ ID NO: 112221 - RNA, 1413 nt, Artificial Sequence
  derived and/or modified CDS sequence (opt2) from neuraminidase__InfluenzaA__ABW40370
augaaccccaaccagaagaucaucaccaucggcuccaucuccaucgccaucggcaucaucucccucaugcuccagaucggcaacaucaucuccaucugggccucccacuccauccagaccggcucccagaaccacaccggcaucugcaaccagcgcaucaucaccuacgagaacuccaccugggucaaccacaccuacgucuccaucaacaacaccaacgucgucgccggcaaggacaagaccuccgucacccucgccggcaacuccucccucugcuccaucuccggcugggccaucuacaccaaggacaacuccauccgcaucggcuccaagggcgacgucuucgucauccgcgagcccuucaucuccugcucccaccucgagugccgcaccuucuuccucacccagggcgcccuccucaacgacaagcacuccaacggcaccgucaaggaccgcucccccuaccgcgcccucauguccugcccccucggcgaggcccccucccccuacaacuccaaguucgaguccgucgccugguccgccuccgccugccacgacggcaugggcuggcucaccaucggcaucuccggccccgacaacggcgccgucgccguccucaaguacaacggcaucaucaccgagaccaucaaguccuggaagaagcgcauccuccgcacccaggaguccgagugcgucugcgucaacggcuccugcuucaccaucaugaccgacggccccuccaacggcgccgccuccuacaagaucuucaagaucgagaagggcaaggucaccaaguccaucgagcucaacgcccccaacuuccacuacgaggagugcuccugcuaccccgacuccggcaccgucaugugcgucugccgcgacaacuggcacggcuccaaccgccccugggucuccuucaaccagaaccucgacuaccagaucggcuacaucugcuccggcgucuucggcgacaacccccgccccaaggacggcaagggcuccugcaaccccgucaccgucgacggcgccgacggcgucaagggcuucuccuacaaguacggcaacggcgucuggaucggccgcaccaaguccaaccgccuccgcaagggcuucgagaugaucugggaccccaacggcuggaccgacaccgacuccgacuucuccgucaagcaggacgucgucgccaucaccgacugguccggcuacuccggcuccuucguccagcaccccgagcucaccggccucgacugcauccgccccugcuucugggucgagcucguccgcggccucccccgcgagaacaccaccaucuggaccuccggcuccuccaucuccuucugcggcgucgacuccgacaccgccaacugguccuggcccgacggcgccgagcuccccuucaccaucgacaaguga

SEQ ID NO: 112222 - RNA, 1413 nt, Artificial Sequence; identical to SEQ ID NO: 112066
  derived and/or modified CDS sequence (opt2) from neuraminidase__InfluenzaA__ABW40403

SEQ ID NO: 112223 - RNA, 1413 nt, Artificial Sequence
  derived and/or modified CDS sequence (opt2) from neuraminidase__InfluenzaA__ABW40414
augaaccccaaccagaagaucaucaccaucggcuccaucuccaucgccaucggcaucaucucccucaugcuccagaucggcaacaucaucuccaucugggccucccacuccauccagaccggcucccagaaccacaccggcaucugcaaccagcgcaucaucaccuacgagaacuccaccugggucaaccacaccuacgucuccaucaacaacaccaacgucgucgccggcaaggacaagaccuccgucacccucgccggcaacuccucccucugcuccaucuccggcugggccaucuacaccaaggacaacuccauccgcaucggcuccaagggcgacgucuucgucauccgcgagcccuucaucuccugcucccaccucgagugccgcaccuucuuccucacccagggcgcccuccucaacgacaagcacuccaacggcaccgucaaggaccgcucccccuaccgcgcccucauguccugcccccucggcgaggcccccucccccuacaacuccaaguucgaguccgucgccugguccgccuccgccugccacgacggcaugggcuggcucaccaucggcaucuccggccccgacaacggcgccgucgccguccucaaguacaacggcaucaucaccgagaccaucaaguccuggaagaagcgcauccuccgcacccaggaguccgagugcgucugcgucaacggcuccugcuucaccaucaugaccgacggccccuccaacggcgccgccuccuacaagaucuucaagaucgagaagggcaaggucaccaaguccaucgagcucaacgcccccaacuuccacuacgaggagugcuccugcuaccccgacaccggcaccgucaugugcgucugccgcgacaacuggcacggcuccaaccgccccugggucuccuucgaccagaaccucgacuaccagaucggcuacaucugcuccggcgucuucggcgacaacccccgccccaaggacggcaagggcuccugcaaccccgucaccgucgacggcgccgacggcgucaagggcuucuccuacaaguacggcaacggcgucuggaucggccgcaccaaguccaaccgccuccgcaagggcuucgagaugaucugggaccccaacggcuggaccgacaccgacuccgacuucuccgucaagcaggacgucgucgccaucaccgacugguccggcuacuccggcuccuucguccagcaccccgagcucaccggccucgacugcauccgccccugcuucugggucgagcucguccgcggccucccccgcgagaacaccaccaucuggaccuccggcuccuccaucuccuucugcggcgucgacuccgacaccgccaacugguccuggcccgacggcgccgagcuccccuucaccaucgacaaguga

SEQ ID NO: 112224 - RNA, 1413 nt, Artificial Sequence; identical to SEQ ID NO: 112066
  derived and/or modified CDS sequence (opt2) from neuraminidase__InfluenzaA__ABW40425

SEQ ID NO: 112225 - RNA, 1413 nt, Artificial Sequence; identical to SEQ ID NO: 112107
  derived and/or modified CDS sequence (opt2) from neuraminidase__InfluenzaA__ABW40436

SEQ ID NO: 112226 - RNA, 1413 nt, Artificial Sequence
  derived and/or modified CDS sequence (opt2) from neuraminidase__InfluenzaA__ABW40447
augaaccccaaccagaagaucaucaccaucggcuccaucuccaucgccaucggcaucaucucccucaugcuccagaucggcaacaucaucuccaucugggccucccacuccauccagaccggcucccagaaccacaccggcaucugcaaccagcgcaucaucaccuacgagaacuccaccugggucaaccacaccuacgucaacaucaacaacaccaacgucgucgccggcaaggacaagaccuccgucacccucgccggcaacuccucccucugcuccaucuccggcugggccaucuacaccaaggacaacuccauccgcaucggcuccaagggcgacgucuucgucauccgcgagcccuucaucuccugcucccaccucgagugccgcaccuucuuccucacccagggcgcccuccucaacgacaagcacuccaacggcaccgucaaggaccgcucccccuaccgcgcccucauguccugcccccucggcgaggcccccucccccuacaacuccaaguucgaguccgucgccugguccgccuccgccugccacgacggcaugggcuggcucaccaucggcaucuccggccccgacaacggcgccgucgccguccucaaguacaacggcaucaucaccgagaccaucaaguccuggaagaagcgcauccuccgcacccaggaguccgagugcgucugcgucaacggcuccugcuucaccaucaugaccgacggccccuccaacggcgccgccuccuacaagaucuucaagaucgagaagggcaaggucaccaaguccaucgagcucaacgcccccaacuuccacuacgaggagugcuccugcuaccccgacaccggcaccgucaugugcgucugccgcgacaacuggcacggcuccaaccgccccugggucuccuucaaccagaaccucgacuaccaggucggcuacaucugcuccggcgucuucggcgacaacccccgccccaaggacggcaagggcuccugcaaccccaugaccgucgacggcgccgacggcgucaagggcuucuccuacaaguacggcaacggcgucuggaucggccgcaccaaguccaacaagcuccgcaagggcuucgagaugaucugggaccccaacggcuggaccgacaccgacuccgacuucuccgucaagcaggacgucgucgccaucaccgacugguccggcuacuccggcuccuucguccagcaccccgagcucaccggccucaacugcauccgccccugcuucugggucgagcucguccgcggccucccccgcgagaacaccaccaucuggaccuccggcuccuccaucuccuucugcggcgucgacuccgacaccgccaacugguccuggcccgacggcgccgagcuccccuucaccaucgacaaguga

SEQ ID NO: 112227 - RNA, 1413 nt, Artificial Sequence; identical to SEQ ID NO: 112092
  derived and/or modified CDS sequence (opt2) from neuraminidase__InfluenzaA__ABW40458

SEQ ID NO: 112228 - RNA, 1413 nt, Artificial Sequence; identical to SEQ ID NO: 112066
  derived and/or modified CDS sequence (opt2) from neuraminidase__InfluenzaA__ABW40469

SEQ ID NO: 112229 - RNA, 1413 nt, Artificial Sequence; identical to SEQ ID NO: 112066
  derived and/or modified CDS sequence (opt2) from neuraminidase__InfluenzaA__ABW40491

SEQ ID NO: 112230 - RNA, 1413 nt, Artificial Sequence; identical to SEQ ID NO: 112066
  derived and/or modified CDS sequence (opt2) from neuraminidase__InfluenzaA__ABW40502

SEQ ID NO: 112231 - RNA, 1413 nt, Artificial Sequence; identical to SEQ ID NO: 112107
  derived and/or modified CDS sequence (opt2) from neuraminidase__InfluenzaA__ABW40513

SEQ ID NO: 112232 - RNA, 1413 nt, Artificial Sequence; identical to SEQ ID NO: 112066
  derived and/or modified CDS sequence (opt2) from neuraminidase__InfluenzaA__ABW40524

SEQ ID NO: 112233 - RNA, 1413 nt, Artificial Sequence
  derived and/or modified CDS sequence (opt2) from neuraminidase__InfluenzaA__ABW40546
augaaccccaaccagaagaucaucaccaucggcuccaucuccaucgccaucggcaucaucucccucaugcuccagaucggcaacaucaucuccaucugggccucccacuccauccagaccggcucccagaaccacaccggcaucugcaaccagcgcaucaucaccuacgagaacuccaccugggucaaccacaccuacgucaacaucaacaacaccaacgucgucgccggcaaggacaagaccuccgucacccucgccggcaacuccucccucugcuccaucuccggcugggccaucuacaccaaggacaacuccauccgcaucggcuccaagggcgacgucuucgucauccgcgagcccuucaucuccugcucccaccucgagugccgcaccuucuuccucacccagggcgcccuccucaacgacaagcacuccaacggcaccgucaaggaccgcucccccuaccgcgcccucauguccugcccccucggcgaggcccccucccccuacaacuccaaguucgaguccgucgccugguccgccuccgccugccacgacggcaugggcuggcucaccaucggcaucuccggccccgacaacggcgccgucgccguccucaaguacaacggcaucaucaccgagaccaucaaguccuggaagaagcgcauccuccgcacccaggaguccgagugcgucugcgucaacggcuccugcuucaccaucaugaccgacggccccuccaacggcgccgccuccuacaagaucuucaagaucgagaagggcaaggucaccaaguccauggagcucaacgcccccaacuuccacuacgaggagugcuccugcuaccccgacaccggcaccgucaugugcgucugccgcgacaacuggcacggcuccaaccgccccugggucuccuucaaccagaaccucgacuaccagaucggcuacaucugcuccggcgucuucggcgacaacccccgccccaaggacggcaagggcuccugcaaccccgucaccgucgacggcgccgacggcgucaagggcuucuccuacaaguacggcaacggcgucuggaucggccgcaccaaguccaaccgccuccgcaagggcuucgagaugaucugggaccccaacggcuggaccgacaccgacuccgacuucuccgucaagcaggacgucgucgccaucaccgacugguccggcuacuccggcuccuucguccagcaccccgagcucaccggccucgacugcauccgccccugcuucugggucgagcucguccgcggccucccccgcgagaacaccaccaucuggaccuccggcuccuccaucuccuucugcggcgucgacuccgacaccgccaacugguccuggcccgacggcgccgagcuccccuucaccaucgacaaguga

SEQ ID NO: 112234 - RNA, 1413 nt, Artificial Sequence; identical to SEQ ID NO: 112066
  derived and/or modified CDS sequence (opt2) from neuraminidase__InfluenzaA__ABW40557

SEQ ID NO: 112235 - RNA, 1413 nt, Artificial Sequence
  derived and/or modified CDS sequence (opt2) from neuraminidase__InfluenzaA__ABW40568
augaaccccaaccagaagaucaucaccaucggcuccaucuccaucgccaucggcaucaucucccucaugcuccagaucggcaacaucaucuccaucugggccucccacuccauccagaccggcucccagaaccacaccggcaucugcaaccagcgcaucaucaccuacgagaacuccaccugggucaaccacaccuacgucuccaucaacaacaccaacgucgucgccggcaaggacaagaccuccgucacccucgccggcaacuccucccucugcuccaucuccggcugggccaucuacaccaaggacaacuccauccgcaucggcuccaagggcgacgucuucgucauccgcgagcccuucaucuccugcucccaccucgagugccgcaccuucuuccucacccagggcgcccuccucaacgacaagcacuccaacggcaccgucaaggaccgcucccccuaccgcgcccucauguccugcccccucggcgaggcccccucccccuacaacuccaaguucgaguccgucgccugguccgccuccgccugccacgacggcaugggcuggcucaccaucggcaucuccggccccgacaacggcgccgucgccguccucaaguacaacggcaucaucaccgagaccaucaaguccuggaagaagcagauccuccgcacccaggaguccgagugcgucugcgucaacggcuccugcuucaccaucaugaccgacggccccuccaacggcgccgccuccuacaagaucuucaagaucgagaagggcaaggucaccaaguccaucgagcucaacgcccccaacuuccacuacgaggagugcuccugcuaccccgacaccggcaccgucaugugcgucugccgcgacaacuggcacggcuccaaccgccccugggucuccuucaaccagaaccucgacuaccagaucggcuacaucugcuccggcgucuucggcgacaacccccgccccaaggacggcaagggcuccugcaaccccgucaccgucgacggcgccgacggcgucaagggcuucuccuacaaguacggcaacggcgucuggaucggccgcaccaaguccaaccgccuccgcaagggcuucgagaugaucugggaccccaacggcuggaccgacaccgacuccgacuucuccgucaagcaggacgucgucgccaucaccgacugguccggcuacuccggcuccuucguccagcaccccgagcucaccggccucgacugcauccgccccugcuucugggucgagcucguccgcggccucccccgcgagaacaccaccaucuggaccuccggcuccuccaucuccuucugcggcgucgacuccgacaccgccaacugguccuggcccgacggcgccgagcuccccuucaccaucgacaaguga

SEQ ID NO: 112236 - RNA, 1413 nt, Artificial Sequence
  derived and/or modified CDS sequence (opt2) from neuraminidase__InfluenzaA__ABW40579
augaaccccaaccagaagaucaucaccaucggcuccaucuccaucgccaucggcaucaucucccucaugcuccagaucggcaacaucaucuccaucugggccucccacuccauccagaccggcucccagaaccacaccggcaucugcaaccagcgcaucaucaccuacgagaacuccaccugggucaaccacaccuacgucuccaucaacaacaccaacgucgucgccggcaaggacaagaccuccgucacccucgccggcaacuccucccucugcuccaucuccggcugggccaucuacaccaaggacaacuccauccgcaucggcuccaagggcgacgucuucgucauccgcgagcccuucaucuccugcucccaccucgagugccgcaccuucuuccucacccagggcgcccuccucaacgacaagcacuccaacggcaccgucaaggaccgcucccccuaccgcgcccucauguccugcccccucggcgaggcccccucccccuacaacuccaaguucgaguccgucgccugguccgccuccgccugccacgacggcaugggcuggcucaccaucggcaucuccggccccgacaacggcgccgucgccguccucaaguacaacggcaucaucaccgagaccaucaaguccuggaagaagcgcauccuccgcacccaggaguccgagugcgucugcgucaacggcuccugcuucaccaucaugaccgacggccccaacaacggcgccgccuccuacaagaucuucaagaucgagaagggcaaggucaccaaguccaucgagcucaacgcccccaacuuccacuacgaggagugcuccugcuaccccgacaccggcaccgucaugugcgucugccgcgacaacuggcacggcuccaaccgccccugggucuccuucaaccagaaccucgacuaccagaucggcuacaucugcuccggcgucuucggcgacaacccccgccccaaggacggcaagggcuccugcaaccccgucaccgucgacggcgccgacggcgucaagggcuucuccuacaaguacggcaacggcgucuggaucggccgcaccaaguccaaccgccuccgcaagggcuucgagaugaucugggaccccaacggcuggaccgacaccgacuccgacuucuccgucaagcaggacgucgucgccaucaccgacugguccggcuacuccggcuccuucguccagcaccccgagcucaccggccucgacugcauccgccccugcuucugggucgagcucguccgcggccucccccgcgagaacaccaccaucuggaccuccggcuccuccaucuccuucugcggcgucgacuccgacaccgccaacugguccuggcccgacggcgccgagcuccccuucaccaucgacaaguga

SEQ ID NO: 112237 - RNA, 1413 nt, Artificial Sequence
  derived and/or modified CDS sequence (opt2) from neuraminidase__InfluenzaA__ABW40601
augaaccccaaccagaagaucaucaccaucggcuccaucuccaucgccaucggcgucaucucccucaugcuccagaucggcaacaucaucuccaucugggccucccacuccauccagaccggcucccagaaccacaccggcaucugcaaccagcgcaucaucaccuacgagaacuccaccugggucaaccacaccuacgucaacaucaacaacaccaacgucgucgccggcaaggacaagaccuccgucacccucgccggcaacuccucccucugcuccaucuccggcugggccaucuacaccaaggacaacuccauccgcaucggcuccaagggcgacgucuucgucauccgcgagcccuucaucuccugcucccaccucgagugccgcaccuucuuccucacccagggcgcccuccucaacgacaagcacuccaacggcaccgucaaggaccgcucccccuaccgcgcccucauguccugcccccucggcgaggcccccucccccuacaacuccaaguucgaguccgucgccugguccgccuccgccugccacgacggcaugggcuggcucaccaucggcaucuccggccccgacaacggcgccgucgccguccucaaguacaacggcaucaucaccgagaccaucaaguccuggaagaagcgcauccuccgcacccaggaguccgagugcgucugcgucaacggcuccugcuucaccaucaugaccgacggccccuccaacggcgccgccuccuacaagaucuucaagaucgagaagggcaaggucaccaaguccaucgagcucaacgcccccaacuuccacuacgaggagugcuccugcuaccccgacaccggcaccgucaugugcgucugccgcgacaacuggcacggcuccaaccgccccugggucuccuucaaccagaaccucgacuaccagaucggcuacaucugcuccggcgucuucggcgacaacccccgccccaaggacggcaagggcuccugcaaccccgucaccgucgacggcgccgacggcaucaagggcuucuccuacaaguacggcaacggcgucuggaucggccgcaccaaguccaaccgccuccgcaagggcuucgagaugaucugggaccccaacggcuggaccaacaccgacuccgacuucuccgucaagcaggacgucgucgccaucaccgacugguccggcuacuccggcuccuucguccagcaccccgagcucaccggccucgacugcauccgccccugcuucugggucgagcucguccgcggccucccccgcgagaacaccaccaucuggaccuccggcuccuccaucuccuucugcggcgucgacggcgacaccgccaacugguccuggcccgacggcgccgagcuccccuucaccaucgacaaguga

SEQ ID NO: 112238 - RNA, 1413 nt, Artificial Sequence; identical to SEQ ID NO: 112101
  derived and/or modified CDS sequence (opt2) from neuraminidase__InfluenzaA__ABW40612

SEQ ID NO: 112239 - RNA, 1413 nt, Artificial Sequence; identical to SEQ ID NO: 112066
  derived and/or modified CDS sequence (opt2) from neuraminidase__InfluenzaA__ABW40623

SEQ ID NO: 112240 - RNA, 1410 nt, Artificial Sequence; identical to SEQ ID NO: 111920
  derived and/or modified CDS sequence (opt2) from neuraminidase__InfluenzaA__ABW40634

SEQ ID NO: 112241 - RNA, 1413 nt, Artificial Sequence; identical to SEQ ID NO: 112066
  derived and/or modified CDS sequence (opt2) from neuraminidase__InfluenzaA__ABW40645

SEQ ID NO: 112242 - RNA, 1410 nt, Artificial Sequence
  derived and/or modified CDS sequence (opt2) from neuraminidase__InfluenzaA__ABW40656
augaaccccaaccagaagaucaucaccaucggcuccgucucccucaccaucuccaccaucugcuucuucaugcagaucgccauccucaucaccaccgucacccuccacuucaagcaguacgaguucaacuccccccccaacaaccaggucaugcucugcgagcccaccaucaucgagcgcaacaucaccgagaucgucuaccucaccaacaccaccaucgagaaggagaucugccccaagcucgccgaguaccgcaacugguccaagccccagugcgacaucaccggcuucgcccccuucuccaaggacaacuccauccgccucuccgccggcggcggcaucugggucacccgcgagcccuacgucuccugcgaccccgacaagugcuaccaguucgcccucggccagggcaccacccucaacaacguccacuccaacgacaccguccgcgaccgcacccccuaccgcacccuccucaugaacgagcucggcguccccuuccaccucggcaccaagcaggucugcaucgccugguccuccuccuccugccacgacggcaaggccuggcuccacgucugcaucaccggcgacgacaagaacgccaccgccuccuucaucuacaacggccgccucgucgacuccaucgucuccugguccaaggagauccuccgcacccaggaguccgagugcgucugcaucaacggcaccugcaccgucgucaugaccgacggcuccgccuccggcaaggccgacaccaagauccucuucaucgaggagggcaagaucguccacaccuccacccucuccggcuccgcccagcacgucgaggagugcuccugcuacccccgcuaccccggcguccgcugcgucugccgcgacaacuggaagggcuccaaccgccccaucgucgacaucaacaucaaggaccacuccaucgucuccuccuacgucugcuccggccucgucggcgacaccccccgcaagaacgacuccuccuccuccucccacugccucgaccccaacaacgaggagggcggccacggcgucaagggcugggccuucgacgacggcaacgacgucuggaugggccgcaccaucuccgagaagucccgccucggcuacgagaccuucaaggucaucgagggcugguccaaccccaaguccaagcuccagaucaaccgccaggucaucgucgaccgcggcaaccgcuccggcuacuccggcaucuucuccgucgagggcaaguccugcaucaaccgcugcuucuacgucgagcucauccgcggccgcaaggaggagaccgagguccucuggaccuccaacuccaucgucgucuucugcggcaccuccggcaccuacggcaccggcuccuggcccgacggcgccgacaucaaccucaugcccaucuga

SEQ ID NO: 112243 - RNA, 1413 nt, Artificial Sequence; identical to SEQ ID NO: 112107
  derived and/or modified CDS sequence (opt2) from neuraminidase__InfluenzaA__ABW40667

SEQ ID NO: 112244 - RNA, 1413 nt, Artificial Sequence; identical to SEQ ID NO: 112092
  derived and/or modified CDS sequence (opt2) from neuraminidase__InfluenzaA__ABW40678

SEQ ID NO: 112245 - RNA, 1413 nt, Artificial Sequence; identical to SEQ ID NO: 112101
  derived and/or modified CDS sequence (opt2) from neuraminidase__InfluenzaA__ABW71297

SEQ ID NO: 112246 - RNA, 1413 nt, Artificial Sequence; identical to SEQ ID NO: 112107
  derived and/or modified CDS sequence (opt2) from neuraminidase__InfluenzaA__ABW71308

SEQ ID NO: 112247 - RNA, 1413 nt, Artificial Sequence; identical to SEQ ID NO: 112066
  derived and/or modified CDS sequence (opt2) from neuraminidase__InfluenzaA__ABW71319

SEQ ID NO: 112248 - RNA, 1413 nt, Artificial Sequence; identical to SEQ ID NO: 112066
  derived and/or modified CDS sequence (opt2) from neuraminidase__InfluenzaA__ABW71330

SEQ ID NO: 112249 - RNA, 1413 nt, Artificial Sequence
  derived and/or modified CDS sequence (opt2) from neuraminidase__InfluenzaA__ABW71341
augaaccccaaccagaagaucaucaccaucggcuccaucuccaucgccaucggcaucaucucccucaugcuccagaucggcaacaucaucuccaucugggccucccacuccauccagaccggcucccagaaccacaccggcaucugcaaccagcgcaucaucaccuacgagaacuccaccugggucaaccacaccuacgucuccaucaacaacaccaacgucgucgccggcaaggacaagaccuccgucacccucgccggcaacuccucccucugcuccaucuccggcugggccaucuacaccaaggacaacuccauccgcaucggcuccaagggcgacgucuucgucauccgcgagcccuucaucuccugcucccaccucgagugccgcaccuucuuccucacccagggcgcccuccucaacgacaagcacuccaacggcaccgucaaggaccgcucccccuaccgcgcccucauguccugcccccucggcgaggcccccucccccuacaacuccaaguucgaguccgucgccugguccgccuccgccugccacgacggcaugggcuggcucaccaucggcaucuccggccccgacaacggcgccgucgccguccucaaguacaacggcaucaucaccgagaccaucaaguccuggaagaagcgcauccuccgcacccaggaguccgagugcgucugcgucaacggcuccugcuucaccaucaugaccgacggccccuccaacggcgccgccuccuacaagaucuucaagaucgagaagggcaaggucaccaaguccaucgagcucaacgcccccaacuuccacuacgaggagugcuccugcuaccccgacaccggcaccgucaugugcgucugccgcgacaacuggcacggcuccaaccgccccugggucuccuucaaccagaaccucgacuaccagaucggcuacaucugcuccggcgucuucggcgacaacccccgccccaaggacggcaagggcuccugcaaccccgucaccgucgacggcgccgacggcgucaagggcuucuccuacaaguacggcaacggcgucuggcucggccgcaccaaguccaaccgccuccgcaagggcuucgagaugaucugggaccccaacggcuggaccgacaccgacuccgacuucuccgucaagcaggacgucgucgccaucaccgacugguccggcuacuccggcuccuucguccagcaccccgagcucaccggccucgacugcauccgccccugcuucugggucgagcucguccgcggccucccccgcgagaacaccaccaucuggaccuccggcuccuccaucuccuucugcggcgucgacuccgacaccgccaacugguccuggcccgacggcgccgagcuccccuucaccaucgacaaguga

SEQ ID NO: 112250 - RNA, 1410 nt, Artificial Sequence; identical to SEQ ID NO: 112093
  derived and/or modified CDS sequence (opt2) from neuraminidase__InfluenzaA__ABW71352

SEQ ID NO: 112251 - RNA, 1413 nt, Artificial Sequence; identical to SEQ ID NO: 112107
  derived and/or modified CDS sequence (opt2) from neuraminidase__InfluenzaA__ABW71363

SEQ ID NO: 112252 - RNA, 1413 nt, Artificial Sequence; identical to SEQ ID NO: 112092
  derived and/or modified CDS sequence (opt2) from neuraminidase__InfluenzaA__ABW71374

SEQ ID NO: 112253 - RNA, 1413 nt, Artificial Sequence; identical to SEQ ID NO: 112066
  derived and/or modified CDS sequence (opt2) from neuraminidase__InfluenzaA__ABW71385

SEQ ID NO: 112254 - RNA, 1413 nt, Artificial Sequence
  derived and/or modified CDS sequence (opt2) from neuraminidase__InfluenzaA__ABW71396
augaaccccaaccagaagaucaucaccaucggcuccaucuccaucgccaucggcaucaucucccucaugcuccagaucggcaacaucaucuccaucugggccucccacuccguccagaccggcucccagaaccacaccggcaucugcaaccagcgcaucaucaccuacgagaacuccaccugggucaaccacaccuacgucaacaucaacaacaccaacgucgucgccggcaaggacaagaccuccgucacccucgccggcaacuccucccucugcuccaucuccggcugggccaucuacaccaaggacaacuccauccgcaucggcuccaagggcgacgucuucgucauccgcgagcccuucaucuccugcucccaccucgagugccgcaccuucuuccucacccagggcgcccuccucaacgacaagcacuccaacggcaccgucaaggaccgcucccccuaccgcgcccucauguccugcccccucggcgaggcccccucccccuacaacuccaaguucgaguccgucgccugguccgccuccgccugccacgacggcaugggcuggcucaccaucggcaucuccggccccgacaacggcgccgucgccguccucaaguacaacggcaucaucaccgagaccaucaaguccuggaagaagcgcauccuccgcacccaggaguccgagugcgucugcgucaacggcuccugcuucaccaucaugaccgacggccccuccaacggcgccgccuccuacaagaucuucaagaucgagaagggcaaggucaccaaguccaucgagcucaacgcccccaacuuccacuacgaggagugcuccugcuaccccgacaccggcaccgucaugugcgucugccgcgacaacuggcacggcuccaaccgccccugggucuccuucaaccagaaccucgacuaccaggucggcuacaucugcuccggcgucuucggcgacaacccccgccccaaggacggcaagggcuccugcaaccccaugaccgucgacggcgccgacggcgucaagggcuucuccuacaaguacggcaacggcgucuggaucggccgcaccaaguccaacaagcuccgcaagggcuucgagaugaucugggaccccaacggcuggaccgacaccgacuccgacuucuccgucaagcaggacgucgucgccaucaccgacugguccggcuacuccggcuccuucguccagcaccccgagcucaccggccucgacugcauccgccccugcuucugggucgagcucguccgcggccucccccgcgagaacgccaccaucuggaccuccggcuccuccaucuccuucugcggcgucgacuccgacaccgccaacugguccuggcccgacggcgccgagcuccccuucaccaucgacaaguga

SEQ ID NO: 112255 - RNA, 1413 nt, Artificial Sequence
  derived and/or modified CDS sequence (opt2) from neuraminidase__InfluenzaA__ABW71407
augaaccccaaccagaagaucaucaccaucggcuccaucuccaucgccaucggcaucaucucccucaugcuccagaucggcaacaucaucuccaucugggccucccacuccauccagaccggcucccagaaccacaccggcaucugcaaccagcgcaucaucaccuacgagaacuccaccugggucaaccacaccuacgucaacaucaacaacaccaacgucgucgccggcaaggacaagaccuccgucacccucgccggcaacuccucccucugcuccaucuccggcugggccaucuacaccaaggacaacuccauccgcaucggcuccaagggcgacgucuucgucauccgcgagcccuucaucuccugcucccaccucgagugccgcaccuucuuccucacccagggcgcccuccucaacgacaagcacuccaacggcaccgucaaggaccgcucccccuaccgcgcccucauguccugcccccucggcgaggcccccucccccuacaacuccaaguucgaguccgucgccugguccgccuccgccugccacgacggcaugggcuggcucaccaucggcaucuccggccccgacaacggcgccgucgccguccucaaguacaacggcaucaucaccgagaccaucaaguccuggaagaagcgcauccuccgcacccaggaguccgagugcgucugcgucaacggcuccugcuucaccaucaugaccgacggccccuccaacggcgccgccuccuacaagaucuucaagaucgagaagggcaaggucaccaaguccaucgagcucaacgcccccaacuuccacuacgaggagugcuccugcuaccccgacaccggcaccgucaugugcgucugccgcgacaacuggcacggcuccaaccgccccugggucuccuucaaccagaaccucgacuaccaggucggcuacaucugcuccggcgucuucggcgacaacccccgccccaaggacggcaagggcuccugcaaccccaugaccgucgacggcgccgacggcgucaagggcuucuccuacaaguacggcaacggcgucuggaucggccgcaccaaguccaacaagauccgcaagggcuucgagaugaucugggaccccaacggcuggaccgacaccgacuccgacuucuccgucaagcaggacgucgucgccaucaccgacugguccggcuacuccggcuccuucguccagcaccccgagcucaccggccucgacugcauccgccccugcuucugggucgagcucguccgcggccucccccgcgagaacaccaccaucuggaccuccggcuccuccaucuccuucugcggcgucgacuccgacaccgccaacugguccuggcccgacggcgccgagcuccccuucaccaucgacaaguga

SEQ ID NO: 112256 - RNA, 1413 nt, Artificial Sequence; identical to SEQ ID NO: 112092
  derived and/or modified CDS sequence (opt2) from neuraminidase__InfluenzaA__ABW71418

SEQ ID NO: 112257 - RNA, 1413 nt, Artificial Sequence; identical to SEQ ID NO: 112066
  derived and/or modified CDS sequence (opt2) from neuraminidase__InfluenzaA__ABW71440

SEQ ID NO: 112258 - RNA, 1413 nt, Artificial Sequence; identical to SEQ ID NO: 112066
  derived and/or modified CDS sequence (opt2) from neuraminidase__InfluenzaA__ABW71451

SEQ ID NO: 112259 - RNA, 1413 nt, Artificial Sequence; identical to SEQ ID NO: 112101
  derived and/or modified CDS sequence (opt2) from neuraminidase__InfluenzaA__ABW71462

SEQ ID NO: 112260 - RNA, 1410 nt, Artificial Sequence; identical to SEQ ID NO: 110363
  derived and/or modified CDS sequence (opt2) from neuraminidase__InfluenzaA__ABW80980

SEQ ID NO: 112261 - RNA, 1410 nt, Artificial Sequence; identical to SEQ ID NO: 110207
  derived and/or modified CDS sequence (opt2) from neuraminidase__InfluenzaA__ABW80981

SEQ ID NO: 112262 - RNA, 1413 nt, Artificial Sequence
  derived and/or modified CDS sequence (opt2) from neuraminidase__InfluenzaA__ABW81474
augaaccccaaccagaagaucaucaccaucggcuccaucuccgucgccaucggcaucaucucccucauccuccagaucggcaacaucaucuccaucugggccucccacuccauccagaccggcucccagaacuacaccggcaucugcaaccagaagaucaucaccuacgagaaccgcaccugggucaaccagaccuacgucaacuucaacaacaccaacgucgucgccggcaaggacaagcccuccaugacccucgccggcaacuccucccucugccccauccgcggcugggccaucuacaccaaggacaacuccauccgcaucggcuccaagggcgacgucuucgucauccgcgagcccuucaucuccugcucccaccucgagugccgcaccuucuuccucacccagggcgcccuccucaacgacaagcacuccaacggcaccaucaaggaccgcucccccuuccgcgcccucauguccugcccccucggcgaggcccccucccccuacaacucccgcuucgaguccgucgccugguccgccuccgccugccacgacggccucggcuggcucaccaucggcaucuccggccccgacaacggcgccgucgccguccucaaguacaacggcaucaucaccgagaccaucaaguccuggaagaagcagauccuccgcacccaggaguccgagugcgucugcgucaacggcuccugcuucaccaucaugaccgacggccccuccaaccgcgccgccuccuaccgcaucuucaagaucgagaagggccgcgucaccaaguccaucgagcucgacgcccccaacuaccacuacgaggagugcuccugcuaccccgacaccggcaccgucaugugcgucugccgcgacaacuggcacggcuccaaccgccccugggucuccuucaaccagaaccucgacuaccagaucggcuacaucugcuccggcgucuucggcgacaacccccgccccaaggacggcgagggcuccugcaaccccgucaccgucgacggcgccgacggcgucaagggcuucuccuaccgcuacggcaacggcgucuggaucggccgcaccaaguccaaccgccuccgcaagggcuucgagaugaucugggaccccaacggcuggaccgacaccgacuccgacuucuccaugaagcaggacgucgucgccaugaccgacugguccggcuacuccggcuccuucguccagcaccccgagcucaccggccucgacugcaugcgccccugcuucugggucgagcucguccgcggccucccccgcgagaacaccaccaucuggaccuccggcuccuccaucuccuucugcggcgucaacuccgagaccgccaacugguccuggcccgacggcgccgagcuccccuucaccaucgacaaguga

SEQ ID NO: 112263 - RNA, 1413 nt, Artificial Sequence
  derived and/or modified CDS sequence (opt2) from neuraminidase__InfluenzaA__ABW81475
augaaccccaaccagaagaucaucaccaucggcuccaucuccaucgccaucggcaucaucucccucaugcuccagaucggcaacaucaucuccaucugggccucccacuccauccagaccggcucccagaaccacaccggcaucugcaaccagcgcaucaucaccuacgagaacuccaccugggucaaccacaccuacgucaacaucaacaacaccaacgucgucgccggcaaggacaaguccuccgucacccucgccggcaacuccucccucugcuccaucuccggcugggccaucuacaccaaggacaacuccauccgcaucggcuccaagggcgacgucuucgucauccgcgagcccuucaucuccugcucccaccucgagugccgcaccuucuuccucacccagggcgcccuccucaacgacaagcacuccaacggcaccgucaaggaccgcucccccuaccgcgcccucauguccugcccccucggcgaggcccccucccccuacaacuccaaguucgaguccgucgccugguccgccuccgccugccacgacggcaugggcuggcucaccaucggcaucuccggccccgacaacggcgccgucgccguccucaaguacaacggcaucaucaccgagaccaucaaguccuggaagaagcgcauccuccgcacccaggaguccgagugcgucugcgucaacggcuccugcuucaccaucaugaccgacggccccuccaacggcgccgccuccuacaagaucuucaagaucgagaagggcaaggucaccaaguccaucgagcucaacgcccccaacuuccacuacgaggagugcuccugcuaccccgacaccggcaccgucaugugcgucugccgcgacaacuggcacggcuccaaccgccccugggucuccuucaaccagaaccucgacuaccagaucggcuacaucugcuccggcgucuucggcgacaacccccgccccaaggacggcgagggcuccugcaaccccgucaccgucgacggcgccgacggcgucaagggcuucuccuacaaguacggcaacggcgucuggaucggccgcaccaaguccaaccgccuccgcaagggcuucgagaugaucugggaccccaacggcuggaccgacaccgacuccgacuucucccucaagcaggacgucgucgccaucaccgacugguccggcuacuccggcuccuucguccagcaccccgagcucaccggccucgacugcauccgccccugcuucugggucgagcucguccgcggccucccccgcgagaacaccaccaucuggaccuccggcuccuccaucuccuucugcggcgucaacuccgacaccgccaacugguccuggcccgacggcgccgagcuccccuucaccaucgacaaguga

SEQ ID NO: 112264 - RNA, 1413 nt, Artificial Sequence
  derived and/or modified CDS sequence (opt2) from neuraminidase__InfluenzaA__ABW81477
augaaccccaaccagaagaucaucaccaucggcuccaucuccaucgccaucggcaucaucucccucaugcuccagaucggcaacaucaucuccaucugggccucccacuccauccagaccggcucccagaaccacaccggcgucugcaaccagcgcaucaucaccuacgagaacuccaccugggucaaccacaccuacgucaacaucaacaacaccaacgucaucgccggcaaggacaagaccuccgucacccucgccggcaacuccucccucugcuccaucuccggcugggccaucuacaccaaggacaacuccauccgcaucggcuccaagggcgacgucuucgucauccgcgagcccuucaucuccugcucccaccucgagugccgcaccuucuuccucacccagggcgcccuccucaacgacaagcacuccaacggcaccgucaaggaccgcucccccuaccgcgcccucauguccugcccccucggcgaggcccccucccccuacaacuccaaguucgaguccgucgccugguccgccuccgccugccacgacggcaugggcuggcucaccaucggcaucuccggccccgacaacggcgccgucgccguccucaaguacaacggcaucaucaccgagaccaucaaguccuggaagaagcagauccuccgcacccaggaguccgagugcgucugcgucaacggcuccugcuucaccaucaugaccgacggccccuccaacggcgccgccuccuacaagaucuucaagaucgagaagggcaaggucaccaaguccaucgagcucuccgcccccaacuuccacuacgaggagugcuccugcuaccccgacaccggcaccgucaugugcgucugccgcgacaacuggcacggcuccaaccgccccugggucuccuucaaccagaaccucgacuaccagaucggcuacaucugcuccggcgucuucggcgacaacccccgccccaaggacggcgagggcuccugcaaccccgucaccgucgacggcgccaacggcgucaagggcuucuccuacaaguacggcaacggcgucuggaucggccgcaccaaguccaaccgccuccgcaagggcuucgagaugaucugggaccccaacggcuggcccgacaccgacuccgacuucuccgucaagcaggacgucgucgccaucaccgacugguccggcuacuccggcuccuucguccagcaccccgagcucaccggccucgacugcauccgccccugcuucugggucgagcucguccgcggccuccccaaggagaacaccaccaucuggaccuccggcuccuccaucuccuucugcggcgucaacuccgacaccgccaacugguccuggcccgacggcgccgagcuccccuucaccaucgacaaguga

SEQ ID NO: 112265 - RNA, 1413 nt, Artificial Sequence
  derived and/or modified CDS sequence (opt2) from neuraminidase__InfluenzaA__ABW81478
augaaccccaaccagaagaucaucaccaucggcuccaucuccaucgccaucggcaucaucucccucaugcuccagaucggcaacaucaucuccaucugggccucccacuccauccagaccggcucccagaaccacaccggcaucugcaaccagcgcaucaucaccuacgagaacuccaccugggucaaccacaccuacgucaacaucaacaacaccaacgucgucgccggcaaggacaagaccuccgucacccucgccggcaacuccucccucugcuccaucuccggcugggccaucuacaccaaggacaacuccauccgcaucggcuccaagggcgacgucuucgucauccgcgagcccuucaucuccugcucccaccucgagugccgcaccuucuuccucacccagggcgcccuccucaacgacaagcacuccaacggcaccgucaaggaccgcucccccuaccgcgcccucauguccugcccccucggcgaggcccccucccccuacaacuccaaguucgaguccgucgccugguccgccuccgccugccacgacggcaugggcuggcucaccaucggcaucuccggccccgacaacggcgccgucgccguccucaaguacaacggcaucaucaccgagaccaucaaguccuggaagaagcgcauccuccgcacccaggaguccgagugcgucugcgucaacggcuccugcuucaccaucaugaccgacggccccuccaacggcgccgccuccuacaagaucuucaagaucgagaagggcaaggucaccaaguccaucgagcucaacgcccccaacuuccacuacgaggagugcuccugcuaccccgacaccggcaccgucaugugcgucugccgcgacaacuggcacggcuccaaccgccccugggucuccuucaaccagaaccucgacuaccagaucggcuacaucugcuccggcgucuucggcgacaacccccgccccaaggacggcgagggcuccugcaaccccgucaccgucgacggcgccgacggcgucaagggcuucuccuacaaguacggcaacggcgucuggaucggccgcaccaagaacaaccgccuccgcaagggcuucgagaugaucugggaccccaacggcuggaccgacaccgacuccgacuucuccgucaagcaggacgucgucgccaucaccgacugguccggcuacuccggcuccuucguccagcaccccgagcucaccggccucgacugcauccgccccugcuucugggucgagcucguccgcggccucccccgcgagaacaccaccaucuggaccuccggcuccuccaucuccuucugcggcgucaacuccgacaccgccaacugguccuggcccgacggcgccgagcuccccuucaccaucgacaaguga

SEQ ID NO: 112266 - RNA, 1413 nt, Artificial Sequence
  derived and/or modified CDS sequence (opt2) from neuraminidase__InfluenzaA__ABW81479
augaaccccaaccagaagaucaucaccaucggcuccaucuccgucgccaucggcaucaucucccucauccuccagaucggcaacaucaucuccaucugggccucccacuccauccagaccggcucccagaacuacaccggcaucugcaaccagaagaucaucaccuacgagaaccgcaccugggucaaccagaccuacgucaacaucaacaacaccaacgucgucgccggcaaggacaagcccuccaugacccucgccggcaacuccucccucugccccauccgcggcugggccaucuacaccaaggacaacuccauccgcaucggcuccaagggcgacgucuucgucauccgcgagcccuucaucuccugcucccaccucgagugccgcaccuucuuccucacccagggcgcccuccucaacgacaagcacuccaacggcaccaucaaggaccgcucccccuuccgcgcccucauguccugcccccucggcgaggcccccucccccuacaacucccgcuucgaguccgucgccugguccgccuccgccugccacgacggccucggcuggcucaccaucggcaucuccggccccgacaacggcgccgucgccguccucaaguacaacggcaucaucaccgagaccaucaaguccuggaagaagcagauccuccgcacccaggaguccgagugcgucugcgucaacggcuccugcuucaccaucaugaccgacggccccuccaaccgcgccgccuccuaccgcaucuucaagaucgagaagggccgcgucaccaaguccaucgagcucgacgcccccaacuaccacuacgaggagugcuccugcuaccccgacaccggcaccgucaugugcgucugccgcgacaacuggcacggcuccaaccgccccugggucuccuucaaccagaaccucgacuaccagaucggcuacaucugcuccggcgucuucggcgacaacccccgccccaaggacggcgagggcuccugcaaccccgucaccgucgacggcgccgacggcaucaagggcuucuccuaccgcuacggcaacggcgucuggaucggccgcaccaaguccaaccgccuccgcaagggcuucgagaugaucugggaccccaacggcuggaccgacaccgacuccgacuucuccaugaagcaggacgucgucgccaugaccgacugguccggcuacuccggcuccuucguccagcaccccgagcucaccggccucgacugcaugcgccccugcuucugggucgagcucguccgcggccucccccgcgagaacaccaccaucuggaccuccggcuccuccaucuccuucugcggcgucaacuccgagaccgccaacugguccuggcccgacggcgccgagcuccccuucaccaucgacaaguga

SEQ ID NO: 112267 - RNA, 1413 nt, Artificial Sequence; identical to SEQ ID NO: 110432
  derived and/or modified CDS sequence (opt2) from neuraminidase__InfluenzaA__ABW81480

SEQ ID NO: 112268 - RNA, 1413 nt, Artificial Sequence
  derived and/or modified CDS sequence (opt2) from neuraminidase__InfluenzaA__ABW81481
augaaccccaaccagaagaucaucaccaucggcuccaucuccgucgccaucggcaucaucucccucauccuccagaucggcaacaucaucuccaucugggccucccacuccauccagaccggcucccagaacuacaccggcaucugcaaccagaagaucaucaccuacgagaaccgcaccugggucaaccagaccuacgucaacaucaacaacaccaacgucgucgccggcaaggacaagcccuccaugacccucgccggcaacuccucccucugccccauccgcggcugggccaucuacaccaaggacaacuccauccgcaucggcuccaagggcgacgucuucgucauccgcgagcccuucaucuccugcucccaccucgagugccgcaccuucuuccucacccagggcgcccuccucaacgacaagcacuccaacggcaccaucaaggaccgcucccccuuccgcgcccucauguccugcccccucggcgaggcccccucccccuacaacucccgcuucgaguccgucgccugguccgccuccgccugccacgacggccucggcuggcucaccaucggcaucuccggccccgacaacggcgccgucgccguccucaaguacaacggcaucaucaccgagaccaucaaguccuggaagaagcagauccuccgcacccaggaguccgagugcgucugcgucaacggcuccugcuucaccaucaugaccgacggccccuccaaccgcgccgccuccuaccgcaucuucaagaucgagaagggccgcgucaccaaguccaucgagcucgacgcccccaacuaccacuacgaggagugcuccugcuaccccgacaccggcaccgucaugugcgucugccgcgacaacuggcacggcuccaaccgccccugggucuccuucaaccagaaccucgacuaccagaucggcuacaucugcuccggcgucuucggcgacaacccccgccccaaggacggcgagggcuccugcaaccccgucaccgucgacggcgccgacggcgucaagggcuucuccuaccgcuacggcaacggcgucuggaucggccgcaccaaguccaaccgccuccgcaagggcuucgagaugaucugggaccccaacggcuggaccgacaccgacuccgacuucuccaugaagcaggacgucgucgccaugaccgacugguccggcuacuccggcuccuucguccagcaccccgagcucaccggccucgacugcaugcgccccugcuucugggucgagcucguccgcggccucccccgcgagaacaccaccaucuggaccuccggcuccuccaucuccuucugcggcgucaacuccgagaccgccaacugguccuggcccgacggcgccgagcuccccuucaccaucgacaaguga

SEQ ID NO: 112269 - RNA, 1413 nt, Artificial Sequence
  derived and/or modified CDS sequence (opt2) from neuraminidase__InfluenzaA__ABW81482
augaaccccaaccagaagaucaucaccaucggcuccaucuccgucgccaucggcaucaucucccucauccuccagaucggcaacaucaucuccaucugggccucccacuccauccagaccggcucccagaacuacaccggcaucugcaaccagaagaucaucaccuacgagaaccgcaccugggucaaccagaccuacgucaacaucaacaacaccaacgucgucgccggcaaggacaagcccuccaugacccucgccggcaacuccucccucugccccauccgcggcugggccaucuacaccaaggacaacuccauccgcaucggcuccaagggcgacgucuucgucauccgcgagcccuucaucuccugcucccaccucgagugccgcaccuucuuccucacccagggcgcccuccucaacgacaagcacuccaacggcaccaucaaggaccgcucccccuuccgcgcccucauguccugcccccucggcgaggcccccucccccuacaacucccgcuucgaguccgucgccugguccgccuccgccugccacgacggccucggcuggcucaccaucggcaucuccggccccgacaacggcgccgucgccguccucaaguacaacggcaucaucaccgagaccaucaaguccuggaagaagcagauccuccgcacccaggaguccgagugcgucugcgucaacggcuccugcuucaccaucaugaccgacggccccuccaaccgcgccgccuccuaccgcaucuucaagaucgagaagggccgcgucaccaaguccaucgagcucgacgcccccaacuaccacuacgaggagugcuccugcuaccccgacaccggcaccgucaugugcgucugccgcgacaacuggcacggcuccaaccgccccugggucuccuucaaccagaaccucgacuaccagaucggcuacaucugcuccggcgucuucggcgacaacccccgccccaaggacggcgagggcuccugcaaccccgucaccgucgacggcgccgacggcgucaagggcuucuccuaccgcuacggcaacggcgucuggaucggccgcaccaaguccaaccgccuccgcaagggcuucgagaugaucugggaccccaacggcuggaccgacaccgacuccgacuucuccaugaagcaggacgucgucgccaugaccgacugguccggcuacuccggcuccuucguccagcaccccgagcucaccggccucgccugcaugcgccccugcuucugggucgagcucguccgcggccucccccgcgagaacaccaccaucuggaccuccggcuccuccaucuccuucugcggcgucaacuccgagaccgccaacugguccuggcccgacggcgccgagcuccccuucaccaucgacaaguga

SEQ ID NO: 112270 - RNA, 1413 nt, Artificial Sequence; identical to SEQ ID NO: 110422
  derived and/or modified CDS sequence (opt2) from neuraminidase__InfluenzaA__ABW81483

SEQ ID NO: 112271 - RNA, 1413 nt, Artificial Sequence
  derived and/or modified CDS sequence (opt2) from neuraminidase__InfluenzaA__ABW81484
augaaccccaaccagaagaucaucaccaucggcuccaucuccaucgccaucggcaucaucucccucaugcuccagaucggcaacaucaucuccaucugggccucccacuccauccagaccggcaaccagaaccacaccggcaucugcaaccagcgcaucaucaccuacgagaacuccaccugggucaaccacaccuacgucaacaucaacaacaccaacgucgucgccggcaagggcaagaccuccgucacccucgccggcaacuccucccucugcuccaucuccggcugggccaucuacaccaaggacaacuccauccgcaucggcuccaagggcgacgucuucgucauccgcgagcccuucaucuccugcucccaccucgagugccgcaccuucuuccucacccagggcgcccuccucaacgacaagcacuccaacggcaccgucaaggaccgcucccccuaccgcgcccucauguccugcccccucggcgaggcccccucccccuacaacuccaaguucgaguccgucgccugguccgccuccgccugccacgacggcaugggcuggcucaccaucggcaucuccggccccgacaacggcgccgucgccguccucaaguacaacggcaucaucaccgagaccaucaaguccuggaagaagcgcauccuccgcacccaggaguccgagugcgucugcgucaacggcuccugcuucaccaucaugaccgacggccccuccaacggcgccgccuccuacaagaucuucaagaucgagaagggcaaggucaccaaguccaucgagcucaacgcccccaacuuccacuacgaggagugcuccugcuaccccgacaccggcaccgucaugugcgucugccgcgacaacuggcacggcuccaaccgccccugggucuccuucaaccagaaccucgacuaccagaucggcuacaucugcuccggcgucuucggcgacaacccccgccccaaggacggcaagggcuccugcaaccccgucaccgucgacggcgccgacggcgucaagggcuucuccuacaaguacggcaacggcgucuggaucggccgcaccaaguccaaccgccuccgcaagggcuucgagaugaucugggaccccaacggcuggaccgacaccgacuccgacuucuccgucaagcaggacgucgucgccaucaccgacugguccggcuacuccggcuccuucguccagcaccccgagcucaccggccucgacugcauccgccccugcuucugggucgagcucguccgcggccucccccgcgagaacaccaccaucuggaccuccggcuccuccaucuccuucugcggcgucgacuccgacaccgccaacugguccuggcccgacggcgccgagcuccccuucaccaucgacaaguga

SEQ ID NO: 112272 - RNA, 1413 nt, Artificial Sequence
  derived and/or modified CDS sequence (opt2) from neuraminidase__InfluenzaA__ABW81487
augaaccccaaccagaagaucaucaccaucggcuccaucuccaucgccaucggcaucaucucccucaugcuccagaucggcaacaucaucuccaucugggccucccacuccauccagaccggcucccagaaccacaccggcaucugcaaccagcgcaucaucaccuacgagaacuccaccugggucaaccacaccuacgucaacaucaacaacaccaacgucgucgccggcaaggacaagaccuccgucacccucgccggcaacuccucccucugcuccaucuccggcugggccaucuacaccaaggacaacuccauccgcaucggcuccaagggcgacgucuucgucauccgcgagcccuucaucuccugcucccaccucgagugccgcaccuucuuccucacccagggcgcccuccucaacgacaagcacuccaacggcaccgucaaggaccgcucccccuaccgcgcccucauguccugcccccucggcgaggcccccucccccuacaacuccaaguucgaguccgucgccugguccgccuccgccugccacgacggcaugggcuggcucaccaucggcaucuccggccccgacaacggcgccgucgccguccucaaguacaacggcaucaucaccgagaccaucaaguccuggaagaagcgcauccuccgcacccaggaguccgagugcgucugcgucaacggcuccugcuucaccaucaugaccgacggccccuccaacggcgccgccuccuacaagaucuucaagaucgagaagggcaaggucaccaaguccaucgagcucaacgcccccaacuuccacuacgaggagugcuccugcuaccccgacaccggcaccgucaugugcgucugccgcgacaacuggcacggcuccaaccgccccugggucuccuucaaccagaaccucgacuaccagaucggcuacaucugcuccggcgucuucggcgacaacccccgccccaaggacggcaagggcuccugcaaccccgucaccgucgacggcgccgacggcgucaagggcuucuccuacaaguacggcaacggcgucuggaucggccgcaccaaguccaaccgccuccgcaagggcuucgagaugaucugggaccccaacggcuggaccgacaccgacuccgacuucuccgucaagcaggacgucgucgccaucaccgacugguccggcuacuccggcuccuucauccagcaccccgagcucaccggccucgacugcauccgccccugcuucugggucgagcucguccgcggccucccccgcgagaacaccaccaucuggaccuccggcuccuccaucuccuucugcggcgucgacuccgacaccgccaacugguccuggcccgacggcgccgagcuccccuucaccaucgacaaguga

SEQ ID NO: 112273 - RNA, 1413 nt, Artificial Sequence; identical to SEQ ID NO: 110422
  derived and/or modified CDS sequence (opt2) from neuraminidase__InfluenzaA__ABW81488

SEQ ID NO: 112274 - RNA, 1413 nt, Artificial Sequence; identical to SEQ ID NO: 110422
  derived and/or modified CDS sequence (opt2) from neuraminidase__InfluenzaA__ABW81489

SEQ ID NO: 112275 - RNA, 1413 nt, Artificial Sequence
  derived and/or modified CDS sequence (opt2) from neuraminidase__InfluenzaA__ABW81490
augaaccccaaccagaagaucaucaccaucggcuccaucuccaucgccaucggcaucaucucccucaugcuccagaucggcaacaucaucuccaucugggccucccacuccauccagaccggcucccagaaccacaccggcaucugcaaccagcgcaucaucaccuacgagaacuccaccugggucaaccacaccuacgucaacaucaacaacaccaacgucgucgccggcaaggacaagaccuccgucacccucgccggcaacuccucccucugcuccaucuccggcugggccaucuacaccaaggacaacuccauccgcaucggcuccaagggcgacgucuucgucauccgcgagcccuucaucuccugcucccaccucgagugcaagaccuucuuccucacccagggcgcccuccucaacgacaagcacuccaacggcaccgucaaggaccgcucccccuaccgcgcccucauguccugcccccucggcgaggcccccucccccuacaacuccaaguucgaguccgucgccugguccgccuccgccugccacgacggcaugggcuggcucaccaucggcaucuccggccccgacaacggcgccgucgccguccucaaguacaacggcaucaucaccgagaccaucaaguccuggaagaagcgcauccuccgcacccaggaguccgagugcgucugcgucaacggcuccugcuucaccaucaugaccgacggccccuccaacggcgccgccuccuacaagaucuucaagaucgagaagggcaaggucaccaaguccaucgagcucaacgcccccaacuuccacuacgaggagugcuccugcuaccccgacaccggcaccgucaugugcgucugccgcgacaacuggcacggcuccaaccgccccugggucuccuucaaccagaaccucgacuaccagaucggcuacaucugcuccggcgucuucggcgacaacccccgccccaaggacggcaagggcuccugcaaccccgucaccgucgacggcgccgacggcgucaagggcuucuccuacaaguacggcaacggcgucuggaucggccgcaccaaguccaaccgccuccgcaagggcuucgagaugaucugggaccccaacggcuggaccgacaccgacuccgacuucuccgucaagcaggacgucgucgccaucaccgacugguccggcuacuccggcuccuucguccagcaccccgagcucaccggccucgacugcauccgccccugcuucugggucgagcucguccgcggccucccccgcgagaacaccaccaucuggaccuccggcuccuccaucuccuucugcggcgucgacuccgacaccgccaacugguccuggcccgacggcgccgagcuccccuucaccaucgacaaguga

SEQ ID NO: 112276 - RNA, 1413 nt, Artificial Sequence
  derived and/or modified CDS sequence (opt2) from neuraminidase__InfluenzaA__ABW81491
augaaccccaaccagaagaucaucaccaucggcuccaucuccaucgccaucggcaucaucucccucaugcuccagaucggcaacaucaucuccaucugggccucccacuccauccagaccggcucccagaaccacaccggcaucugcaaccagcgcaucaucaccuacgagaacuccaccugggucaaccacaccuacgucaacaucaacaacaccaacgucgucgccggcaaggacaagaccuccgucacccucgccggcaacuccucccucugcuccaucuccggcugggccaucuacaccaaggacaacuccauccgcaucggcuccaagggcgacgucuucgucauccgcgagcccuucaucuccugcucccaccucgagugccgcaccuucuuccucacccagggcgcccuccucaacgacaagcacuccaacggcaccgucaaggaccgcucccccuaccgcgcccucauguccugcccccucggcgaggcccccucccccuacaacuccaaguucgaguccgucgccugguccgccuccgccugccacgacggcaugggcuggcucaccaucggcaucuccggccccgacaacggcgccgucgccguccucaaguacaacggcaucaucaccgagaccaucaaguccugggagaagcgcauccuccgcacccaggaguccgagugcgucugcgucaacggcuccugcuucaccaucaugaccgacggccccuccaacggcgccgccuccuacaagaucuucaagaucgagaagggcaaggucaccaaguccaucgagcucaacgcccccaacuuccacuacgaggagugcuccugcuaccccgacaccggcaccgucaugugcgucugccgcgacaacuggcacggcuccaaccgccccugggucuccuucaaccagaaccucgacuaccagaucggcuacaucugcuccggcgucuucggcgacaacccccgccccaaggacggcaagggcuccugcaaccccgucaccgucgacggcgccgacggcgucaagggcuucuccuacaaguacggcaacggcgucuggaucggccgcaccaaguccaaccgccuccgcaagggcuucgagaugaucugggaccccaacggcuggaccgacaccgacuccgacuucuccgucaagcaggacgucgucgccaucaccgacugguccggcuacuccggcuccuucguccagcaccccgagcucaccggccucgacugcauccgccccugcuucugggucgagcucguccgcggccucccccgcgagaacaccaccaucuggaccuccggcuccuccaucuccuucugcggcgucgacuccgacaccgccaacugguccuggcccgacggcgccgagcuccccuucaccaucgacaaguga

SEQ ID NO: 112277 - RNA, 1413 nt, Artificial Sequence
  derived and/or modified CDS sequence (opt2) from neuraminidase__InfluenzaA__ABW81492
augaaccccaaccagaagaucaucaccaucggcuccaucuccaucgccaucggcaucaucucccucaugcuccagaucggcaacaucaucuccaucugggccucccacuccauccagaccggcucccagaaccacaccggcaucugcaaccagcgcaucaucaccuacgagaacuccaccugggucaaccacaccuacgucaacaucaacaacaccaacgucgucgccggcaaggacaagaccuccgucacccucgccggcaacuccucccucugcuccaucuccggcugggccaucuacaccaaggacaacuccauccgcaucggcuccaagggcgacgucuucgucauccgcgagcccuucaucuccugcucccaccucgagugccgcaccuucuuccucacccagggcgcccuccucaacgacaagcacuccaacggcaccgucaaggaccgcucccccuaccgcgcccucauguccugcccccucggcgaggcccccucccccuacaacuccaaguucgaguccgucgccugguccgccuccgccugccacgacggcaugggcuggcucaccaucggcaucuccggccccgacaacggcgccgucgccguccucaaguacaacggcaucaucaccgagaccaucaaguccuggaagaagcgcauccuccgcacccaggaguccgagugcgucugcgucaacggcuccugcuucaccaucaugaccgacggccccuccaacggcgccgccuccuacaagaucuucaagaucgagaagggcaaggucaccaaguccaucgagcucaacgcccccaacuuccacuacgaggagugcuccugcuaccccgacaccggcaccgucaugugcgucugccgcgacaacuggcacggcuccaaccgccccugggucuccuucaaccagaaccucgacuaccagaucggcuacaucugcuccggcgucuucggcgacaacccccgccccaaggacggcaagggcuccugcaaccccgucaccgucgacggcgccgacggcgucaagggcuucuccuacaaguacggcaacggcgucuggaucggccgcaccaaguccaaccgccuccgcaagggcuucgagaugaucugggaccccaacggcuggaccgacaccgacuccgacuucuccgucaagcaggacgucgucgccaucaccgacugguccggcuacuccggcuccuucguccagcaccccgagcucaccggccucgacugcauccgccccugcuucugggucgagcucguccgcggccucccccgcgagaacaccaccaucugggccuccggcuccuccaucuccuucugcggcgucgacuccgacaccgccaacugguccuggcccgacggcgccgagcuccccuucaccaucgacaaguga

SEQ ID NO: 112278 - RNA, 1413 nt, Artificial Sequence; identical to SEQ ID NO: 110422
  derived and/or modified CDS sequence (opt2) from neuraminidase__InfluenzaA__ABW81493

SEQ ID NO: 112279 - RNA, 1413 nt, Artificial Sequence; identical to SEQ ID NO: 110422
  derived and/or modified CDS sequence (opt2) from neuraminidase__InfluenzaA__ABW81494

SEQ ID NO: 112280 - RNA, 1413 nt, Artificial Sequence; identical to SEQ ID NO: 110422
  derived and/or modified CDS sequence (opt2) from neuraminidase__InfluenzaA__ABW81495

SEQ ID NO: 112281 - RNA, 1413 nt, Artificial Sequence; identical to SEQ ID NO: 112276
  derived and/or modified CDS sequence (opt2) from neuraminidase__InfluenzaA__ABW81497

SEQ ID NO: 112282 - RNA, 1413 nt, Artificial Sequence
  derived and/or modified CDS sequence (opt2) from neuraminidase__InfluenzaA__ABW81498
augaaccccaaccagaagaucaucaccaucggcuccaucuccaucgccaucggcaucaucucccucaugcuccagaucggcaacaucaucuccaucugggccucccacuccauccagaccggcucccagaaccacaccggcaucugcaaccagcgcaucaucaccuacgagaacuccaccugggucaaccacaccuacgucaacaucaacaacaccaacgucgucgccggcaaggacaagaccuccgucacccucgccggcaacuccucccucugcuccaucuccggcugggccaucuacaccaaggacaacuccauccgcaucggcuccaagggcgacgucuucgucauccgcgagcccuucaucuccugcucccaccucgagugccgcaccuucuuccucacccagggcgcccuccucaacgacaagcacuccaacggcaccgucaaggaccgcucccccuaccgcgcccucauguccugcccccucggcgaggcccccucccccuacaacuccaaguucgaguccgucgccugguccgccuccgccugccacgacggcaugggcuggcucaccaucggcaucuccggccccgacaacggcgccgucgccguccucaaguacaacggcaucaucaccgagaccaucaaguccugggagaagcgcauccuccgcacccaggaguccgagugcgucugcgucaacggcuccugcuucaccaucaugaccgacggccccuccaacggcgccgccuccuacaagaucuucaagaucgagaagggcaaggucaccaaguccaucgagcucaacgcccccaacuuccacuacgaggagugcuccugcuaccccgacaccggcaccgucaugugcgucugccgcgacaacuggcacggcuccaaccgccccugggucuccuucaaccagaaccucgacuaccaggucggcuacaucugcuccggcgucuucggcgacaacccccgccccaaggacggcaagggcuccugcaaccccgucaccgucgacggcgccgacggcgucaagggcuucuccuacaaguacggcaacggcgucuggaucggccgcaccaaguccaaccgccuccgcaagggcuucgagaugaucugggaccccaacggcuggaccgacaccgacuccgacuucuccgucaagcaggacgucgucgccaucaccgacugguccggcuacuccggcuccuucguccagcaccccgagcucaccggccucgacugcauccgccccugcuucugggucgagcucguccgcggccucccccgcgagaacaccaccaucuggaccuccggcuccuccaucuccuucugcggcgucgacuccgacaccgccaacugguccuggcccgacggcgccgagcuccccuucaccaucgacaaguga

SEQ ID NO: 112283 - RNA, 1413 nt, Artificial Sequence
  derived and/or modified CDS sequence (opt2) from neuraminidase__InfluenzaA__ABW81499
augaaccccaaccagaagaucaucaccaucggcuccaucuccaucgccaucggcaucaucucccucaugcuccagaucggcaacaucaucuccaucugggccucccacuccauccagaccggcucccagaaccacaccggcaucugcaaccagcgcaucaucaccuacgagaacuccaccugggucaaccacaccuacgucaacaucaacaacaccaacgucgucgccggccgcgacaagaccuccgucacccucgccggcaacuccucccucugcuccaucuccggcugggccaucuacaccaaggacaacuccauccgcaucggcuccaagggcgacgucuucgucauccgcgagcccuucaucuccugcucccaccucgagugccgcaccuucuuccucacccagggcgcccuccucaacgacaagcacuccaacggcaccgucaaggaccgcucccccuaccgcgcccucauguccugcccccucggcgaggcccccucccccuacaacuccaaguucgaguccgucgccugguccgccuccgccugccacgacggcaugggcuggcucaccaucggcaucuccggccccgacaacggcgccgucgccguccucaaguacaacggcaucaucaccgagaccaucaaguccuggaagaagcgcauccuccgcacccaggaguccgagugcgucugcgucaacggcuccugcuucaccaucaugaccgacggccccuccaacggcgccgccuccuacaagaucuucaagaucgagaagggcaaggucaccaaguccaucgagcucaacgcccccaacuuccacuacgaggagugcuccugcuaccccgacaccggcaccgucaugugcgucugccgcgacaacuggcacggcuccaaccgccccugggucuccuucaaccagaaccucgacuaccagaucggcuacaucugcuccggcgucuucggcgacaacccccgccccaaggacggcaagggcuccugcaaccccgucaccgucgacggcgccgacggcgucaagggcuucuccuacaaguacggcaacggcgucuggaucggccgcaccaaguccaaccgccuccgcaagggcuucgagaugaucugggaccccaacggcuggaccgacaccgacuccgacuucuccgucaagcaggacgucgucgccaucaccgacugguccggcuacuccggcuccuucguccagcaccccgagcucaccggccucgacugcauccgccccugcuucugggucgagcucguccgcggccucccccgcgagaacaccaccaucuggaccuccggcuccuccaucuccuucugcggcgucgacuccgacaccgccaacugguccuggcccgacggcgccgagcuccccuucaccaucgacaaguga

SEQ ID NO: 112284 - RNA, 1413 nt, Artificial Sequence
  derived and/or modified CDS sequence (opt2) from neuraminidase__InfluenzaA__ABW81500
augaaccccaaccagaagaucaucaccaucggcuccaucuccaucgccaucggcaucaucucccucaugcuccagaucggcaacaucaucuccaucugggccucccacuccauccagaccggcucccagaaccacaccggcaucugcaaccagcgcaucaucaccuacgagaacuccaccugggucaaccacaccuacgucaacaucaacaacaccaacgucgucgccggcaaggacaagaccuccgucacccucgccggcaacuccucccucugcuccaucuccggcugggccaucuacaccaaggacaacuccauccgcaucggcuccaagggcgacgucuucgucauccgcgagcccuucaucuccugcucccaccucgagugccgcaccuucuuccucacccagggcgcccuccucaacgacaagcacuccaacggcaccgucaaggaccgcucccccuaccgcgcccucauguccugcccccucggcgaggcccccucccccuacaacuccaaguucgaguccgucgccugguccgccuccgccugccacgacggcaugggcuggcucaccaucggcaucuccggccccgacaacggcgccgucgccguccucaaguacaacggcaucaucaccgagaccaucaaguccuggaagaagcgcauccuccgcacccaggaguccgagugcgucugcgucaacggcuccugcuucaccaucaugaccgacggccccuccaacggcgccgccuccuacaagaucuucaagaucgagaagggcaaggucaccaaguccaucgagcucaacgcccccaacuuccacuacgaggagugcuccugcuaccccgacaccggcaccgucaugugcgucugccgcgacaacuggcacggcuccaaccgccccugggucuccuucaaccagaaccucgacuaccagaucggcuacaucugcuccggcgucuucggcgacaacccccgccccaaggacggcaagggcuccugcaaccccgucaccgccgacggcgccgacggcgucaagggcuucuccuacaaguacggcaacggcgucuggaucggccgcaccaaguccaaccgccuccgcaagggcuucgagaugaucugggaccccaacggcuggaccgacaccgacuccgacuucuccgucaagcaggacgucgucgccaucaccgacugguccggcuacuccggcuccuucguccagcaccccgagcucaccggccucgacugcauccgccccugcuucugggucgagcucguccgcggccucccccgcgagaacaccaccaucuggaccuccggcuccuccaucuccuucugcggcgucgacuccgacaccgccaacugguccuggcccgacggcgccgagcuccccuucaccaucgacaaguga

SEQ ID NO: 112285 - RNA, 1413 nt, Artificial Sequence
  derived and/or modified CDS sequence (opt2) from neuraminidase__InfluenzaA__ABW81501
augaaccccaaccagaagaucaucaccaucggcuccaucuccaucgccaucggcaucaucucccucaugcuccagaucggcaacaucaucuccaucugggccucccacuccauccagaccggcucccagaaccacaccggcaucugcaaccagaagaucaucaccuacgagaacuccaccugggucaaccacaccuacgucaacaucaacaacaccaacgucgucgccggcaaggacaagaccuccgucacccucgccggcaacuccucccucugcuccgucuccggcugggccaucuacaccaaggacaacuccauccgcaucggcuccaagggcgacgucuucgucauccgcgagcccuucaucuccugcucccaccucgagugccgcaccuucuuccucacccagggcgcccuccucaacgacaagcacuccaacggcaccgucaaggaccgcucccccuaccgcgcccucauguccugcccccucggcgaggcccccucccccuacaacuccaaguucgaguccgucgccugguccgccuccgccugccacgacggcaugggcuggcucaccaucggcaucuccggccccgacaacggcgccgucgccguccucaaguacaacggcaucaucaccgagaccaucaaguccuggaagaagcgcauccuccgcacccaggaguccgagugcgucugcgucaacggcuccugcuucaccaucaugaccgacggccccuccaacggcgccgccuccuacaagaucuucaagaucgagaagggcaaggucaccaaguccaucgagcucaacgcccccaacuuccacuacgaggagugcuccugcuaccccgacaccggcaccgucaugugcgucugccgcgacaacuggcacggcuccaaccgccccugggucuccuucaaccagaaccucgacuaccagaucggcuacaucugcuccggcgucuucggcgacaacccccgccccaaggacggcaagggcuccugcaaccccgucaccgucgacggcgccgacggcgucaagggcuucuccuacaaguacggcaacggcgucuggaucggccgcaccaaguccaaccgccuccgcaagggcuucgagaugaucugggaccccaacggcuggaccgacaccgacuccgacuucuccgucaagcaggacgucgucgccaucaccgacugguccggcuacuccggcuccuucguccagcaccccgagcucaccggccucgacugcauccgccccugcuucugggucgagcucguccgcggccucccccgcgagaacaccaccaucuggaccuccggcuccuccaucuccuucugcggcgucgacuccgacaccgccaacugguccuggcccgacggcgccgagcuccccuucaccaucgacaaguga

SEQ ID NO: 112286 - RNA, 1413 nt, Artificial Sequence; identical to SEQ ID NO: 112107
  derived and/or modified CDS sequence (opt2) from neuraminidase__InfluenzaA__ABW86324

SEQ ID NO: 112287 - RNA, 1413 nt, Artificial Sequence; identical to SEQ ID NO: 112079
  derived and/or modified CDS sequence (opt2) from neuraminidase__InfluenzaA__ABW86335

SEQ ID NO: 112288 - RNA, 1413 nt, Artificial Sequence; identical to SEQ ID NO: 112066
  derived and/or modified CDS sequence (opt2) from neuraminidase__InfluenzaA__ABW86346

SEQ ID NO: 112289 - RNA, 1413 nt, Artificial Sequence; identical to SEQ ID NO: 112066
  derived and/or modified CDS sequence (opt2) from neuraminidase__InfluenzaA__ABW86357

SEQ ID NO: 112290 - RNA, 1413 nt, Artificial Sequence; identical to SEQ ID NO: 112066
  derived and/or modified CDS sequence (opt2) from neuraminidase__InfluenzaA__ABW86368

SEQ ID NO: 112291 - RNA, 1413 nt, Artificial Sequence; identical to SEQ ID NO: 112092
  derived and/or modified CDS sequence (opt2) from neuraminidase__InfluenzaA__ABW86379

SEQ ID NO: 112292 - RNA, 1413 nt, Artificial Sequence; identical to SEQ ID NO: 112066
  derived and/or modified CDS sequence (opt2) from neuraminidase__InfluenzaA__ABW86390

SEQ ID NO: 112293 - RNA, 1413 nt, Artificial Sequence; identical to SEQ ID NO: 112107
  derived and/or modified CDS sequence (opt2) from neuraminidase__InfluenzaA__ABW86401

SEQ ID NO: 112294 - RNA, 1413 nt, Artificial Sequence; identical to SEQ ID NO: 112066
  derived and/or modified CDS sequence (opt2) from neuraminidase__InfluenzaA__ABW86412

SEQ ID NO: 112295 - RNA, 1413 nt, Artificial Sequence
  derived and/or modified CDS sequence (opt2) from neuraminidase__InfluenzaA__ABW86423
augaaccccaaccagaagaucaucaccaucggcuccaucuccaucgccaucggcaucaucucccucaugcuccagaucggcaacaucaucuccaucugggccucccacuccauccagaccggcucccagaaccacaccggcaucugcaaccagcgcaucaucaccuacgagaacuccaccugggucaaccacaccuacgucaacaucaacaacaccaacgucgucgccggcaaggacaagaccuccgucacccucgccggcaacuccucccucugcuccaucuccggcugggccaucuacaccaaggacaacuccauccgcaucggcuccaagggcgacgucuucgucauccgcgagcccuucaucuccugcucccaccucgagugccgcaccuucuuccucacccagggcgcccuccucaacgacaagcacuccaacggcaccgucaaggaccgcucccccuaccgcgcccucauguccugcccccucggcgaggcccccucccccuacaacuccaaguucgaguccgucgccugguccgccuccgccugccacgacggcaugggcuggcucaccaucggcaucuccggccccgacaacggcgccgucgccguccucaaguacaacggcaucaucaccgagaccaucaaguccuggaagaagcgcauccuccgcacccaggaguccgagugcgucugcgucaacggcuccugcuucgccaucaugaccgacggccccuccaacggcgccgccuccuacaagaucuucaagaucgagaagggcaaggucaccaaguccaucgagcucaacgcccccaacuuccacuacgaggagugcuccugcuaccccgacaccggcaccgucaugugcgucugccgcgacaacuggcacggcuccaaccgccccugggucuccuucaaccagaaccucgacuaccaggucggcuacaucugcuccggcgucuucggcgacaacccccgccccaaggacggcaagggcuccugcaaccccaugaccgucgacggcgccgacggcgucaagggcuucuccuacaaguacggcaacggcgucuggaucggccgcaccaaguccaacaagcuccgcaagggcuucgagaugaucugggaccccaacggcuggaccgacaccgacuccgacuucuccgucaagcaggacgucgucgccaucaccgacugguccggcuacuccggcuccuucguccagcaccccgagcucaccggccucgacugcauccgccccugcuucugggucgagcucguccgcggccucccccgcgagaacaccaccaucuggaccuccggcuccuccaucuccuucugcggcgucgacuccgacaccgccaacugguccuggcccgacggcgccgagcuccccuucaccaucgacaaguga

SEQ ID NO: 112296 - RNA, 1413 nt, Artificial Sequence; identical to SEQ ID NO: 112066
  derived and/or modified CDS sequence (opt2) from neuraminidase__InfluenzaA__ABW86434

SEQ ID NO: 112297 - RNA, 1413 nt, Artificial Sequence; identical to SEQ ID NO: 112066
  derived and/or modified CDS sequence (opt2) from neuraminidase__InfluenzaA__ABW86445

SEQ ID NO: 112298 - RNA, 1413 nt, Artificial Sequence; identical to SEQ ID NO: 112101
  derived and/or modified CDS sequence (opt2) from neuraminidase__InfluenzaA__ABW86456

SEQ ID NO: 112299 - RNA, 1413 nt, Artificial Sequence
  derived and/or modified CDS sequence (opt2) from neuraminidase__InfluenzaA__ABW86467
augaacaccaaccagaagaucaucaccaucggcuccaucuccaucgccaucggcaucaucucccucaugcuccagaucggcaacaucaucuccaucugggccucccacuccauccagaccggcucccagaaccacaccggcaucugcaaccagcgcaucaucaccuacgagaacuccaccugggucaaccacaccuacgucuccaucaacaacaccaacgucgucgccggcaaggacaagaccuccgucacccucgccggcaacuccucccucugcuccaucuccggcugggccaucuacaccaaggacaacuccauccgcaucggcuccaagggcgacgucuucgucauccgcgagcccuucaucuccugcucccaccucgagugccgcaccuucuuccucacccagggcgcccuccucaacgacaagcacuccaacggcaccgucaaggaccgcucccccuaccgcgcccucauguccugcccccucggcgaggcccccucccccuacaacuccaaguucgaguccgucgccugguccgccuccgccugccacgacggcaugggcuggcucaccaucggcaucuccggccccgacaacggcgccgucgccguccucaaguacaacggcaucaucaccgagaccaucaaguccuggaagaagcgcauccuccgcacccaggaguccgagugcgucugcgucaacggcuccugcuucaccaucaugaccgacggccccuccaacggcgccgccuccuacaagaucuucaagaucgagaagggcaaggucaccaaguccaucgagcucaacgcccccaacuuccacuacgaggagugcuccugcuaccccgacaccggcaccgucaugugcgucugccgcgacaacuggcacggcuccaaccgccccugggucuccuucaaccagaaccucgacuaccagaucggcuacaucugcuccggcgucuucggcgacaacccccgccccaaggacggcaagggcuccugcaaccccgucaccgucgacggcgccgacggcgucaagggcuucuccuacaaguacggcaacggcgucuggaucggccgcaccaaguccaaccgccuccgcaagggcuucgagaugaucugggaccccaacggcuggaccgacaccgacuccgacuucuccaucaagcaggacgucgucgccaucaccgacugguccggcuacuccggcuccuucguccagcaccccgagcucaccggccucgacugcauccgccccugcuucugggucgagcucguccgcggccucccccgcgagaacaccaccaucuggaccuccggcuccuccaucuccuucugcggcgucgacuccgacaccgccaacugguccuggcccgacggcgccgagcuccccuucaccaucgacaaguga

SEQ ID NO: 112300 - RNA, 1413 nt, Artificial Sequence; identical to SEQ ID NO: 112101
  derived and/or modified CDS sequence (opt2) from neuraminidase__InfluenzaA__ABW86478

SEQ ID NO: 112301 - RNA, 1413 nt, Artificial Sequence
  derived and/or modified CDS sequence (opt2) from neuraminidase__InfluenzaA__ABW86489
augaaccccaaccagaagaucaucaccaucggcuccaucuccaucgccaucggcaucaucucccucaugcuccagaucggcaacaucaucuccaucugggccucccacuccauccagaccggcucccagaaccacaccggcaucugcaaccagcgcaucaucaccuacgagaacuccaccugggucaaccacaccuacgucuccaucaacaacaccaacgucgucgccggcaaggacaagaccuccgucacccucgccggcaacuccucccucugcuccaucuccggcugggccaucuacaccaaggacaacuccauccgcaucggcuccaagggcgacgucuucgucauccgcgagcccuucaucuccugcucccaccucgagugccgcaccuucuuccucacccagggcgcccuccucaacgacaagcacuccaacggcaccgucaaggaccgcucccccuaccgcgcccucauguccugcccccucggcgaggcccccucccccuacaacuccaaguucgaguccgucgccugguccgccuccgccugccacgacggcaugggcuggcucaccaucggcaucuccggccccgacaacggcgccgucgccguccucaaguacaacggcaucaucaccgagaccaucaaguccuggaagaagcgcauccuccgcacccaggaguccgagugcgucugcgucaacggcuccugcuucaccaucaugaccgacggccccuccaacggcgccgccuccuacaagaucuucaagaucgagaagggcaaggucaccaaguccaucgagcucaacgcccccaacuuccacuacgaggagugcuccugcuaccccgacaccggcaccgucaugugcgucugccgcgacaacuggcacggcuccaaccgccccugggucuccuucaaccagaaccucgacuaccagaucggcuacaucugcuccggcgucuucggcgacaacccccgccccaaggacggcaagggcuccugcaaccccgucaccgucgacggcgccgacggcgucaagggcuucuccuacaaguacggcaacggcgucuggaucggccgcaccaaguccaaccgccuccgcaagggcuucgagaugaucugggaccccaacggcuggaccgacaccgacuccgacuucuccgucaagcaggacgucgucggcaucaccgacugguccggcuacuccggcuccuucguccagcaccccgagcucaccggccucgacugcauccgccccugcuucugggucgagcucguccgcggccucccccgcgagaacaccaccaucuggaccuccggcuccuccaucuccuucugcggcgucgacuccgacaccgccaacugguccuggcccgacggcgccgagcuccccuucaccaucgacaaguga

SEQ ID NO: 112302 - RNA, 1413 nt, Artificial Sequence
  derived and/or modified CDS sequence (opt2) from neuraminidase__InfluenzaA__ABW86500
augaaccccaaccagaagaucaugaccaucggcuccaucuccaucgccaucggcaucaucucccucaugcuccagaucggcaacaucaucuccaucugggccucccacuccauccagaccggcucccagaaccacaccggcaucugcaaccagcgcaucaucaccuacgagaacuccaccugggucaaccacaccuacgucaacaucaacaacaccaacgucgucgccggcaaggacaagaccuccgucacccucgccggcaacuccucccucugcuccaucuccggcugggccaucuacaccaaggacaacuccauccgcaucggcuccaagggcgacgucuucgucauccgcgagcccuucaucuccugcucccaccucgagugccgcaccuucuuccucacccagggcgcccuccucaacgacaagcacuccaacggcaccgucaaggaccgcucccccuaccgcgcccucauguccugcccccucggcgaggcccccucccccuacaacuccaaguucgaguccgucgccugguccgccuccgccugccacgacggcaugggcuggcucaccaucggcaucuccggccccgacaacggcgccgucgccguccucaaguacaacggcaucaucaccgagaccaucaaguccuggaagaagcgcauccuccgcacccaggaguccgagugcgucugcgucaacggcuccugcuucaccaucaugaccgacggccccuccaacggcgccgccuccuacaagaucuucaagaucgagaagggcaaggucaccaaguccaucgagcucaacgcccccaacuuccacuacgaggagugcuccugcuaccccgacaccggcaccgucaugugcgucugccgcgacaacuggcacggcuccaaccgccccugggucuccuucaaccagaaccucgacuaccagaucggcuacaucugcuccggcgucuucggcgacaacccccgccccaaggacggcaagggcuccugcaaccccgucaccgucgacggcgccgacggcgucaagggcuucuccuacaaguacggcaacggcgucuggaucggccgcaccaaguccaaccgccuccgcaagggcuucgagaugaucugggaccccaacggcuggaccaacaccgacuccgacuucuccaugaagcaggacgucgucgccaucaccgacugguccggcuacuccggcuccuucguccagcaccccgagcucaccggccucgacugcauccgccccugcuucugggucgagcucguccgcggccucccccgcgagaacaccaccaucuggaccuccggcuccuccaucuccuucugcggcgucgacuccgacaccgccaacugguccuggcccgacggcgccgagcuccccuucaccaucgacaaguga

SEQ ID NO: 112303 - RNA, 1413 nt, Artificial Sequence; identical to SEQ ID NO: 112066
  derived and/or modified CDS sequence (opt2) from neuraminidase__InfluenzaA__ABW86511

SEQ ID NO: 112304 - RNA, 1413 nt, Artificial Sequence
  derived and/or modified CDS sequence (opt2) from neuraminidase__InfluenzaA__ABW86522
augaaccccaaccagaagaucaucaccaucggcuccaucuccaucgccaucggcaucaucucccucaugcuccagaucggcaacaucaucuccaucugggccucccacuccauccagaccggcucccagaaccacaccggcaucugcaaccagcgcaucaucaccuacgagaacuccaccugggucaaccacaccuacgucaacaucaacaacaccaacgucgucgccggcaaggacaagaccuccgucacccucgccggcaacuccucccucugcuccaucuccggcugggccaucuacaccaaggacaacuccauccgcaucggcuccaagggcgacgucuucgucauccgcgagcccuucaucuccugcucccaccucgagugccgcaccuucuuccucacccagggcgcccuccucaacgacaagcacuccaacggcaccgucaaggaccgcucccccuaccgcgcccucauguccugcccccucggcgaggcccccucccccuacaacuccaaguucgaguccgucgccugguccgccuccgccugccacgacggcaugggcuggcucaccaucggcaucuccggccccgacaacggcgccgucgccguccucaaguacaacggcaucaucaccgagaccaucaaguccuggaagaagcgcauccuccgcacccaggaguccgagugcgucugcgucaacggcuccugcuucaccaucaugaccgacggccccuccaacggcgccgccuccuacaagaucuucaagaucgagaagggcaaggucaccaaguccaucgagcucaacgcccccaacuuccacuacgaggagugcuccugcuaccccgacaccggcaccgucaugugcgucugccgcgacaacuggcacggcuccaaccgccccugggucuccuucaaccagaaccucgacuaccaggucggcuacaucugcuccggcgucuucggcgacaacccccgccccaaggacggcaagggcuccugcaaccccaugaccgucgacggcgccgacggcgucaagggcuucuccuacaaguacggcaacggcgucuggaucggccgcaccaaguccaacaagcuccgcaagggcuucgagaugaucugggaccccaacggcuggaccgacaccgacuccgacuucuccgucaagcaggacgucgucgccgucaccgacugguccggcuacuccggcuccuucguccagcaccccgagcucaccggccucgacugcauccgccccugcuucugggucgagcucguccgcggccucccccgcgagaacgccaccaucuggaccuccggcuccuccaucuccuucugcggcgucgacuccgacaccgccaacugguccuggcccgacggcgccgagcuccccuucaccaucgacaaguga

SEQ ID NO: 112305 - RNA, 1413 nt, Artificial Sequence; identical to SEQ ID NO: 112066
  derived and/or modified CDS sequence (opt2) from neuraminidase__InfluenzaA__ABW86533

SEQ ID NO: 112306 - RNA, 1413 nt, Artificial Sequence; identical to SEQ ID NO: 112101
  derived and/or modified CDS sequence (opt2) from neuraminidase__InfluenzaA__ABW86544

SEQ ID NO: 112307 - RNA, 1413 nt, Artificial Sequence; identical to SEQ ID NO: 112066
  derived and/or modified CDS sequence (opt2) from neuraminidase__InfluenzaA__ABW86555

SEQ ID NO: 112308 - RNA, 1410 nt, Artificial Sequence
  derived and/or modified CDS sequence (opt2) from neuraminidase__InfluenzaA__ABW86566
augaaccccaaccagaagaucaucaccaucggcuccgucucccucaccaucuccaccaucugcuucuucaugcagaccgccauccucaucaccaccgucacccuccacuucaagcaguacgaguucaacuccccccccaacaaccaggucaugcucugcgagcccaccgucaucgagcgcaacaucaccgagaucgucuaccucaccaacaccaccaucgagaaggagaucugccccaagcucgccgaguaccgcaacugguccaagccccagugcgacaucaccggcuucgcccccuucuccaaggacaacuccauccgccucuccgccggcggcgacaucugggucacccgcgagcccuacgucuccugcgaccccgacaagugcuaccaguucgcccucggccagggcaccacccucaacaacguccacuccaacgacaccguccgcgaccgcacccccuaccgcacccuccucaugaacgagcucggcguccccuuccaccucggcaccaagcaggucugcaucgccugguccuccuccuccugccacgacggcaaggccuggcuccacgucugcaucaccggcgacgacaagaacgccaccgccuccuucaucuacaacggccgccucgucgacuccaucgucuccugguccaaggagauccuccgcacccaggaguccgagugcgucugcaucaacggcaccugcaccgucgucaugaccgacggcuccgccuccggcaaggccgacaccaagauccucuucaucgaggagggcaagaucguccacaccuccacccucuccggcuccgcccagcacgucgaggagugcuccugcuacccccgcuaccccggcguccgcugcgucugccgcgacaacuggaagggcuccaaccgccccaucgucgacaucaacaucaaggaccacuccaucgucuccuccuacgucugcuccggccucgucggcgacaccccccgcaagaacgacuccuccuccuccucccacugccucgaccccaacaacgaggagggcggccacggcgucaagggcugggccuucgacgacggcaacgacgucuggaugggccgcaccaucuccgagaagucccgccucggcuacgagaccuucaaggucaucgagggcugguccaaccccaaguccaagcuccagaucaaccgccaggucaucgucgaccgcggcaaccgcuccggcuacuccggcaucuucuccgucgagggcaaguccugcaucaaccgcugcuucuacgucgagcucauccgcggccgcaaggaggagaccgagguccucuggaccuccaacuccaucgucgucuucugcggcaccuccggcaccuacggcaccggcuccuggcccgacggcgccgacaucaaccucaugcccaucuga

SEQ ID NO: 112309 - RNA, 1413 nt, Artificial Sequence; identical to SEQ ID NO: 112092
  derived and/or modified CDS sequence (opt2) from neuraminidase__InfluenzaA__ABW86609

SEQ ID NO: 112310 - RNA, 1413 nt, Artificial Sequence; identical to SEQ ID NO: 111095
  derived and/or modified CDS sequence (opt2) from neuraminidase__InfluenzaA__ABW91188

SEQ ID NO: 112311 - RNA, 1410 nt, Artificial Sequence
  derived and/or modified CDS sequence (opt2) from neuraminidase__InfluenzaA__ABW91210
augaaccccaaccagaagaucaucaccaucggcuccgucucccucaccaucuccaccaucugcuucuucaugcagaucgccauccucaucaccaccgucacccuccacuucaagcaguacgaguucaacuccccccccaacaaccaggucauccucugcgagcccaccaucaucgagcgcaacaucaccgagaucgucuaccucaccaacaccaccaucgagaaggagaucugccccaagcucgccgaguaccgcaacugguccaagccccagugcgacaucaccggcuucgcccccuucuccaaggacaacuccauccgccucuccgccggcggcgacaucugggucacccgcgagcccuacgucuccugcgaccccgacaagugcuaccaguucgcccucggccagggcaccacccucaacaacguccacuccaacgacaccguccgcgaccgcacccccuaccgcacccuccucaugaacgagcucggcguccccuuccaccucggcaccaagcaggucugcaucgccugguccuccuccuccugccacgacggcaaggccuggcuccacgucugcaucaccggcgacgacaagaacgccaccgccuccuucaucuacaacggccgccucgucgacuccaucgucuccugguccaaggagauccuccgcacccaggaguccgagugcgucugcaucaacggcaccugcaccgucgucaugaccgacggcuccgccuccggcaaggccgacaccaagauccucuucaucgaggagggcaagaucguccacaccuccacccucuccggcuccgcccagcacgucgaggagugcuccugcuacccccgcuaccccggcguccgcugcgucugccgcgacaacuggaagggcuccaaccgccccaucgucgacaucaacaucaaggaccacuccaucgucuccuccuacgucugcuccggccucgucggcgacaccccccgcaagaacgacuccuccuccuccucccacugccucgaccccaacaacgaggagggcggccacggcgucaagggcugggccuucgacgacggcaacgacgucuggaugggccgcaccaucuccgagaagucccgccucggcuacgagaccuucaaggucaucgagggcugguccaaccccaaguccaagcuccagaucaaccgccaggucaucgucgaccgcggcaaccgcuccggcuacuccggcaucuucuccgucgagggcaaguccugcaucaaccgcugcuucuacgucgagcucauccgcggccgcaaggaggagaccgagguccucuggaccuccaacuccaucgucgucuucugcggcaccuccggcaccuacggcaccggcuccuggcccgacggcgccgacaucaaccucaugcccaucuga

SEQ ID NO: 112312 - RNA, 1413 nt, Artificial Sequence; identical to SEQ ID NO: 112066
  derived and/or modified CDS sequence (opt2) from neuraminidase__InfluenzaA__ABW91221

SEQ ID NO: 112313 - RNA, 1410 nt, Artificial Sequence
  derived and/or modified CDS sequence (opt2) from neuraminidase__InfluenzaA__ABW91232
augaaccccaaccagaagaucaucaccaucggcuccgucucccucaccaucuccaccaucugcuucuucaugcagaucgccauccucaucaccaccgucacccuccacuucaagcaguacgaguucaacuccccccccaacaaccaggucaugcucugcgaguccaccaucaucgagcgcaacaucaccgagaucgucuaccucaccaacaccaccaucgagaaggagaucugccccaagcucgccgaguaccgcaacugguccaagccccagugcgacaucaccggcuucgcccccuucuccaaggacaacuccauccgccucuccgccggcggcgacaucugggucacccgcgagcccuacgucuccugcgaccccgacaagugcuaccaguucgcccucggccagggcaccacccucaacaacguccacuccaacgacaccguccgcgaccgcacccccuaccgcacccuccucaugaacgagcucggcguccccuuccaccucggcaccaagcaggucugcaucgccugguccuccuccuccugccacgacggcaaggccuggcuccacgucugcaucaccggcgacgacaagaacgccaccgccuccuucaucuacaacggccgccucgucgacuccaucgucuccugguccaaggagauccuccgcacccaggaguccgagugcgucugcaucaacggcaccugcaccgucgucaugaccgacggcuccgccuccggcaaggccgacaccaagauccucuucaucgaggagggcaagaucguccacaccuccacccucuccggcuccgcccagcacgucgaggagugcuccugcuacccccgcuaccccggcguccgcugcgucugccgcgacaacuggaagggcuccaaccgccccaucgucgacaucaacaucaaggaccacuccaucgucuccuccuacgucugcuccggccucgucggcgacaccccccgcaagaacgacuccuccuccuccggccacugccucgaccccaacaacgaggagggcggccacggcgucaagggcugggccuucgacgacggcaacgacgucuggaugggccgcaccaucuccgagaagucccgccucggcuacgagaccuucaaggucaucgagggcugguccaaccccaaguccaagcuccagaucaaccgccaggucaucgucgaccgcggcaaccgcuccggcuacuccggcaucuucuccgucgagggcaaguccugcaucaaccgcugcuucuacgucgagcucauccgcggccgcaaggaggagaccgagguccucuggaccuccaacuccaucgucgucuucugcggcaccuccggcaccuacggcaccggcuccuggcccgacggcgccgacaucaaccucaugcccaucuga

SEQ ID NO: 112314 - RNA, 1410 nt, Artificial Sequence; identical to SEQ ID NO: 112102
  derived and/or modified CDS sequence (opt2) from neuraminidase__InfluenzaA__ABW91243

SEQ ID NO: 112315 - RNA, 1410 nt, Artificial Sequence; identical to SEQ ID NO: 111920
  derived and/or modified CDS sequence (opt2) from neuraminidase__InfluenzaA__ABW91254

SEQ ID NO: 112316 - RNA, 1410 nt, Artificial Sequence; identical to SEQ ID NO: 111920
  derived and/or modified CDS sequence (opt2) from neuraminidase__InfluenzaA__ABW91265

SEQ ID NO: 112317 - RNA, 1413 nt, Artificial Sequence; identical to SEQ ID NO: 112066
  derived and/or modified CDS sequence (opt2) from neuraminidase__InfluenzaA__ABW91276

SEQ ID NO: 112318 - RNA, 1413 nt, Artificial Sequence
  derived and/or modified CDS sequence (opt2) from neuraminidase__InfluenzaA__ABW91287
augaaccccaaccagaagaucaucaccaucggcuccaucuccaucgccaucggcaucaucucccucauccuccagaucggcaacaucaucuccaucugggccucccacuccauccagaccggcucccagaaccacaccggcaucugcaaccagcgcaucaucaccuacgagaacuccaccugggucaacaacaccuacgucaacaucaacaacaccaacgucgucgccgagaaggacaagaccuccgucacccucgccggcaacuccucccucugcuccaucuccggcugggccaucuacaccaaggacaacuccauccgcaucggcuccaagggcgacaucuucgucauccgcgagcccuucaucuccugcucccaccucgagugccgcaccuucuuccucacccagggcgcccuccucaacgacaagcacuccaacggcaccgucaaggaccgcucccccuaccgcgcccucauguccugcccccucggcgaggcccccucccccuacaacucccgcuucgaguccgucgccugguccgccuccgccugccacgacggcaugggcuggcucaccaucggcaucuccggccccgacaacggcgccgucgccguccucaaguacaacggcaucaucaccgagaccaucaaguccuggaagaagcgcauccuccgcacccaggaguccgagugcgucugcaugaacggcuccugcuucaccaucaugaccgacggccccuccaacggcgccgccuccuacaagaucuucaagaucgagaagggcaaggucaccaagaccaucgagcucaacgcccccaacuuccacuacgaggagugcuccugcuaccccgacaccggcaccgucaugugcgucugccgcgacaacuggcacggcuccaaccgccccugggucuccuucaaccagaaccucgacuaccagaucggcuacaucugcuccggcgucuucggcgacaacccccgccccaaggacggcgagggcuccugcaaccccgucaccgucgacggcgccgacggcgucaagggcuucuccuacaaguacggcaacggcgucuggaucggccgcaccaaguccaaccgccuccgcaagggcuucgagaugaucugggaccccaacggcuggaccaacaccgacuccgacuucuccgucaagcaggacaucgucgccaucaccgacugguccggcuacuccggcuccuucguccagcaccccgagcucaccggccucgacugcauccgccccugcuucugggucgagcucguccgcggccucccccgcgagaacaccaccaucuggaccuccggcuccuccaucuccuucugcggcgucaacuccggcaccgccaacugguccuggcccgacggcgccgagcuccccuucaccaucgacaaguga

SEQ ID NO: 112319 - RNA, 1413 nt, Artificial Sequence; identical to SEQ ID NO: 112066
  derived and/or modified CDS sequence (opt2) from neuraminidase__InfluenzaA__ABW91298

SEQ ID NO: 112320 - RNA, 1413 nt, Artificial Sequence
  derived and/or modified CDS sequence (opt2) from neuraminidase__InfluenzaA__ABW91309
augaaccccaaccagaagaucaucaccaucggcuccaucuccaucgccaucggcaucaucucccucaugcuccagaucggcaacaucaucuccaucugggccucccacuccauccagaccggcucccagaaccacaccggcaucugcaaccagcgcaucaucaccuacgagaacuccaccugggucaaccacaccuacgucuccaucaacaacaccaacgucgucgccggcaaggacaagaccuccgucacccucgccggcaacuccucccucugcuccaucuccggcugggccaucuacaccaaggacaacuccauccgcaucggcuccaagggcgacgucuucgucauccgcgagcccuucaucuccugcucccaccucgagugccgcaccuucuuccucacccagggcgcccuccucaacgacaagcacuccaacggcaccgucaaggaccgcucccccuaccgcgcccucauguccugcccccucggcgaggcccccucccccuacaacuccaaguucgaguccgucgccugguccgccuccgccugccacgacggcaugggcuggcucaccaucggcaucuccggccccgacaacggcgccgucgccguccucaaguacaacggcaucaucaccgagaccaucaaguccuggaagaagcgcauccuccgcacccaggaguccgagugcgucugcgucaacggcuccugcuucaccaucaugaccgacggccccuccgacggcgccgccuccuacaagaucuucaagaucgagaagggcaaggucaccaaguccaucgagcucaacgcccccaacuuccacuacgaggagugcuccugcuaccccgacaccggcaccgucaugugcgucugccgcgacaacuggcacggcuccaaccgccccugggucuccuucaaccagaaccucgacuaccagaucggcuacaucugcuccggcgucuucggcgacaacccccgccccaaggacggcaagggcuccugcaaccccgucaccgccgacggcgccgacggcgucaagggcuucuccuacaaguacggcaacggcgucuggaucggccgcaccaaguccaaccgccuccgcaagggcuucgagaugaucugggaccccaacggcuggaccgacaccgacuccgacuucuccgucaagcaggacgucgucgccaucaccgacugguccggcuacuccggcuccuucguccagcaccccgagcucaccggccucgacugcauccgccccugcuucugggucgagcucguccgcggccucccccgcgagaacaccaccaucuggaccuccggcuccuccaucuccuucugcggcgucgacuccgacaccgccaacugguccuggcccgacggcgccgagcuccccuucaccaucgacaaguga

SEQ ID NO: 112321 - RNA, 1413 nt, Artificial Sequence; identical to SEQ ID NO: 112066
  derived and/or modified CDS sequence (opt2) from neuraminidase__InfluenzaA__ABW91320

SEQ ID NO: 112322 - RNA, 1413 nt, Artificial Sequence; identical to SEQ ID NO: 112066
  derived and/or modified CDS sequence (opt2) from neuraminidase__InfluenzaA__ABW91331

SEQ ID NO: 112323 - RNA, 1413 nt, Artificial Sequence; identical to SEQ ID NO: 112066
  derived and/or modified CDS sequence (opt2) from neuraminidase__InfluenzaA__ABW91342

SEQ ID NO: 112324 - RNA, 1413 nt, Artificial Sequence; identical to SEQ ID NO: 112066
  derived and/or modified CDS sequence (opt2) from neuraminidase__InfluenzaA__ABW91353

SEQ ID NO: 112325 - RNA, 1413 nt, Artificial Sequence
  derived and/or modified CDS sequence (opt2) from neuraminidase__InfluenzaA__ABW91364
augaacaccaaccagaagaucaucaccaucggcuccaucuccaucgccaucggcaucaucucccucaugcuccagaucggcaacaucaucuccaucugggccucccacuccauccagaccggcucccagaaccacaccggcaucugcaaccagcgcaucaucaccuacgagaacuccaccugggucaaccacaccuacgucaacaucaacaacaccaacgucgucaccggcaaggacaagaccuccgucacccucgccggcaacuccucccucugcuccaucuccggcugggccaucuacaccaaggacaacuccauccgcaucggcuccaagggcgacgucuucgucauccgcgagcccuucaucuccugcucccaccucgagugccgcaccuucuuccucacccagggcgcccuccucaacgacaagcacuccaacggcaccgucaaggaccgcucccccuaccgcgcccucauguccugcccccucggcgaggcccccucccccuacaacuccaaguucgaguccgucgccugguccgccuccgccugccacgacggcaugggcuggcucaccaucggcaucuccggccccgacaacggcgccgucgccguccucaaguacaacggcaucaucaccgagaccaucaaguccuggaagaagcgcauccuccgcacccaggaguccgagugcgucugcgucaacggcuccugcuucaccaucaugaccgacggccccuccgacggcgccgccuccuacaagaucuucaagaucgagaagggcaaggucaccaaguccaucgagcucaacgcccccaacuuccacuacgaggagugcuccugcuaccccgacaccggcaccgucaugugcgucugccgcgacaacuggcacggcuccaaccgccccugggucuccuucaaccagaaccucgacuaccagaucggcuacaucugcuccggcgucuucggcgacaacccccgccccaaggacggcaagggcuccugcaaccccgucaccgucgacggcgccgacggcgucaagggcuucuccuacaaguacggcaacggcgucuggaucggccgcaccaaguccaacaagcuccgcaagggcuucgagaugaucugggaccccaacggcuggaccgacaccgacaacgacuucuccgucaagcaggacgucgucgccaucaccgacugguccggcuacuccggcuccuucguccagcaccccgagcucaccggccucgacugcauccgccccugcuucugggucgagcucguccgcggccucccccgcgagaacaccaccaucuggaccuccggcuccuccaucuccuucugcggcgucgacuccgacaccgccaacugguccuggcccgacggcgccgagcuccccuucaccaucgacaaguga

SEQ ID NO: 112326 - RNA, 1413 nt, Artificial Sequence; identical to SEQ ID NO: 112066
  derived and/or modified CDS sequence (opt2) from neuraminidase__InfluenzaA__ABW91375

SEQ ID NO: 112327 - RNA, 1413 nt, Artificial Sequence; identical to SEQ ID NO: 112092
  derived and/or modified CDS sequence (opt2) from neuraminidase__InfluenzaA__ABW91386

SEQ ID NO: 112328 - RNA, 1410 nt, Artificial Sequence
  derived and/or modified CDS sequence (opt2) from neuraminidase__InfluenzaA__ABW91397
augaaccccaaccagaagaucaucaccaucggcuccgucucccucaccaucuccaccaucugcuucuucaugcagaucgccauccucaucaccaccgucacccuccacuucaagcaguacgaguucaacuccccccccaacaaccaggucaugcucugcgagcccaccaucaucgagcgcaacaucaccgagaucgucuaccucaccaacaccaccaucgagaaggagaucugccccaagcucgccgaguaccgcaacugguccaagccccagugcgacaucaccggcuucgcccccuucuccaaggacaacuccauccgccucuccgccggcggcgacaucugggucacccgcgagcccuacgucuccugcgaccccgacaagugcuaccaguucgcccucggccagggcaccacccucaacaacguccacuccaacgacaccguccgcgaccgcacccccuaccgcacccuccucaugaacgagcucggcguccccuuccaccucggcaccaagcaggucugcaucgccugguccuccuccuccugccacgacggcaaggccuggcuccacgucugcaucaccggcgacgacaagaacgccaccgccuccuucaucuacaacggccgccucgucgacuccaucgucuccugguccaaggagauccuccgcacccaggaguccgagugcaucugcaucaacggcaccugcaccgucgucaugaccgacggcuccgccuccggcaaggccgacaccaagauccucuucaucgaggagggcaagaucguccacaccuccacccucuccggcuccgcccagcacgucgaggagugcuccugcuacccccgcuaccccggcguccgcugcgucugccgcgacaacuggaagggcuccaaccgccccaucgucgacaucaacaucaaggaccacuccaucgucuccuccuacgucugcuccggccucgucggcgacaccccccgcaagaacgacuccuccuccuccucccacugccucgaccccaacaacgaggagggcggccacggcgucaagggcugggccuucgacgacggcaacgacgucuggaugggccgcaccaucuccgagaagucccgccucggcuacgagaccuucaaggucaucgagggcugguccaaccccaaguccaagcuccagaucaaccgccaggucaucgucgaccgcggcaaccgcuccggcuacuccggcaucuucuccgucgagggcaaguccugcaucaaccgcugcuucuacgucgagcucauccgcggccgcaaggaggagaccgagguccucuggaccuccaacuccaucgucgucuucugcggcaccuccggcaccuacggcaccggcuccuggcccgacggcgccgacaucaaccucaugcccaucuga

SEQ ID NO: 112329 - RNA, 1413 nt, Artificial Sequence; identical to SEQ ID NO: 112237
  derived and/or modified CDS sequence (opt2) from neuraminidase__InfluenzaA__ABW91408

SEQ ID NO: 112330 - RNA, 1413 nt, Artificial Sequence
  derived and/or modified CDS sequence (opt2) from neuraminidase__InfluenzaA__ABW91419
augaaccccaaccagaagaucaucaccaucggcuccaucuccaucgccaucggcaucaucucccucaugcuccagaucggcaacaucaucuccaucugggccucccacuccauccagaccggcucccagaaccacaccggcaucugcaaccagcgcaucaucaccuacgagaacuccaccugggucaaccacaccuacgucaacaucaacaacaccaacgucgucgccgagaaggacaagaccuccgucacccucgccggcaacuccucccucugcuccaucuccggcugggccaucuacaccaaggacaacuccauccgcaucggcuccaagggcgacgucuucgucauccgcgagcccuucaucuccugcucccaccucgagugccgcaccuucuuccucacccagggcgcccuccucaacgacaagcacuccaacggcaccgucaaggaccgcucccccuaccgcgcccucauguccugcccccucggcgaggcccccucccccuacaacuccaaguucgaguccgucgccugguccgccuccgccugccacgacggcaugggcuggcucaccaucggcaucuccggccccgacaacggcgccgucgccguccucaaguacaacggcaucaucaccgagaccaucaaguccuggaagaagcgcauccuccgcacccaggaguccgagugcgucugcgucaacggcuccugcuucaccaucaugaccgacggccccuccaacggcgccgccuccuacaagaucuucaagaucgagaagggcaaggucaccaaguccaucgagcucaacgcccccaacuuccacuacgaggagugcuccugcuaccccgacaccggcaccgucaugugcgucugccgcgacaacuggcacggcuccaaccgccccugggucuccuucaaccagaaccucgacuaccaggucggcuacaucugcuccggcgucuucggcgacaacccccgccccaaggacggcaagggcuccugcaaccccaugaccgucgacggcgccgacggcgucaagggcuucuccuacaaguacggcaacggcgucuggaucggccgcaccaaguccaacaagcuccgcaagggcuucgagaugaucugggaccccaacggcuggaccgacaccgacuccgacuucuccgucaagcaggacgucgucgccaucaccgacugguccggcuacuccggcuccuucguccagcaccccgagcucaccggccucgacugcauccgccccugcuucugggucgagcucguccgcggccucccccgcgagaacaccaccaucuggaccuccggcuccuccaucuccuucugcggcgucgacuccgacaccgccaacugguccuggcccgacggcgccgagcuccccuucaccaucgacaaguga

SEQ ID NO: 112331 - RNA, 1413 nt, Artificial Sequence
  derived and/or modified CDS sequence (opt2) from neuraminidase__InfluenzaA__ABW91430
augaaccccaaccagaagaucaucaccaucggcuccaucuccaucgccaucggcaucaucucccucaugcuccagaucggcaacaucaucuccaucugggccucccacuccauccagaccggcucccagaaccacaccggcaucugcaaccagcgcaucaucaccuacgagaacuccaccugggucaaccacaccuacgucaacaucaacaacaccaacgucgucgccggcaaggacaagaccuccgucacccucgccggcaacuccucccucugcuccaucuccggcugggccaucuacaccaaggacaacuccauccgcaucggcuccaagggcgacgucuucgucauccgcgagcccuucaucuccugcucccaccucgagugccgcaccuucuuccucacccagggcgcccuccucaacgacaagcacuccaacggcaccgucaaggaccgcucccccuaccgcgcccucauguccugcccccucggcgaggcccccucccccuacaacuccaaguucgaguccgucgccugguccgccuccgccugccacgacggcaugggcuggcucaccaucggcaucuccggccccgacaacggcuccgucgccguccucaaguacaacggcaucaucaccgagaccaucaaguccuggaagaagcgcauccuccgcacccaggaguccgagugcgucugcgucaacggcuccugcuucaccaucaugaccgacggccccuccaacggcgccgccuccuacaagaucuucaagaucgagaagggcaaggucaccaaguccaucgagcucaacgcccccaacuuccacuacgaggagugcuccugcuaccccgacaccggcaccgucaugugcgucugccgcgacaacuggcacggcuccaaccgccccugggucuccuucaaccagaaccucgacuaccaggucggcuacaucugcuccggcgucuucggcgacaacccccgccccaaggacggcaagggcuccugcaaccccaugaccgucgacggcgccgacggcgucaagggcuucuccuacaaguacggcaacggcgucuggaucggccgcaccaaguccaacaagcuccgcaagggcuucgagaugaucugggaccccaacggcuggaccgacaccgacuccgacuucuccgucaagcaggacgucgucgccaucaccgacugguccggcuacuccggcuccuucguccagcaccccgagcucaccggccucgacugcauccgccccugcuucugggucgagcucguccgcggccucccccgcgagaacaccaccaucuggaccuccggcuccuccaucuccuucugcggcgucgacuccgacaccgccaacugguccuggcccgacggcgccgagcuccccuucaccaucgacaaguga

SEQ ID NO: 112332 - RNA, 1410 nt, Artificial Sequence; identical to SEQ ID NO: 111920
  derived and/or modified CDS sequence (opt2) from neuraminidase__InfluenzaA__ABW91441

SEQ ID NO: 112333 - RNA, 1413 nt, Artificial Sequence; identical to SEQ ID NO: 112107
  derived and/or modified CDS sequence (opt2) from neuraminidase__InfluenzaA__ABW91452

SEQ ID NO: 112334 - RNA, 1413 nt, Artificial Sequence; identical to SEQ ID NO: 112107
  derived and/or modified CDS sequence (opt2) from neuraminidase__InfluenzaA__ABW91463

SEQ ID NO: 112335 - RNA, 1413 nt, Artificial Sequence; identical to SEQ ID NO: 112066
  derived and/or modified CDS sequence (opt2) from neuraminidase__InfluenzaA__ABW91474

SEQ ID NO: 112336 - RNA, 1413 nt, Artificial Sequence; identical to SEQ ID NO: 112107
  derived and/or modified CDS sequence (opt2) from neuraminidase__InfluenzaA__ABW91485

SEQ ID NO: 112337 - RNA, 1413 nt, Artificial Sequence; identical to SEQ ID NO: 112066
  derived and/or modified CDS sequence (opt2) from neuraminidase__InfluenzaA__ABW91496

SEQ ID NO: 112338 - RNA, 1413 nt, Artificial Sequence; identical to SEQ ID NO: 112092
  derived and/or modified CDS sequence (opt2) from neuraminidase__InfluenzaA__ABW91507

SEQ ID NO: 112339 - RNA, 1413 nt, Artificial Sequence; identical to SEQ ID NO: 112107
  derived and/or modified CDS sequence (opt2) from neuraminidase__InfluenzaA__ABW91518

SEQ ID NO: 112340 - RNA, 1413 nt, Artificial Sequence
  derived and/or modified CDS sequence (opt2) from neuraminidase__InfluenzaA__ABW91529
augaaccccaaccagaagaucaucaccaucggcuccaucuccaucgccaucggcaccaucucccucaugcuccagaucggcaacaucaucuccaucugggccucccacuccauccagaccggcucccagaaccacaccggcaucugcaaccagcgcaucaucaccuacgagaacuccaccugggucaaccacaccuacgucuccaucaacaacaccaacgucgucgccggcaaggacaagaccuccgucacccucgccggcaacuccucccucugcuccaucuccggcugggccaucuacaccaaggacaacuccauccgcaucggcuccaagggcgacgucuucgucauccgcgagcccuucaucuccugcucccaccucgagugccgcaccuucuuccucacccagggcgcccuccucaacgacaagcacuccaacggcaccaucaaggaccgcucccccuaccgcgcccucauguccugcccccucggcgaggcccccucccccuacaacuccaaguucgaguccgucgccugguccgccuccgccugccacgacggcaugggcuggcucaccaucggcaucuccggccccgacaacggcgccgucgccguccucaaguacaacggcaucaucaccgagaccaucaaguccuggaagaagcgcauccuccgcacccaggaguccgagugcgucugcgucaacggcuccugcuucaccaucaugaccgacggccccuccaacggcgccgccuccuacaagaucuucaagaucgagaagggcaaggucaccaaguccaucgagcucaacgcccccaacuuccacuacgaggagugcuccugcuaccccgacaccggcaccgucaugugcgucugccgcgacaacuggcacggcuccaaccgccccugggucuccuucaaccagaaccucgacuaccagaucggcuacaucugcuccggcgucuucggcgacaacccccgccccaaggacggcaagggcuccugcaaccccgucaccgucgacggcgccgacggcgucaagggcuucuccuacaaguacggcaacggcgucuggaucggccgcaccaaguccaaccgccuccgcaagggcuucgagaugaucugggaccccaacggcuggaccgacaccgacuccgacuucuccgucaagcaggacgucgucgccaucaccgacugguccggcuacuccggcuccuucguccagcaccccgagcucaccggccucgacugcauccgccccugcuucugggucgagcucguccgcggccucccccgcgagaacaccaccaucuggaccuccggcuccuccaucuccuucugcggcgucgacuccgacaccgccaacugguccuggcccgacggcgccgagcuccccuucaccaucgacaaguga

SEQ ID NO: 112341 - RNA, 1413 nt, Artificial Sequence
  derived and/or modified CDS sequence (opt2) from neuraminidase__InfluenzaA__ABW91540
augaaccccaaccagaagaucaucaccaucggcuccaucuccaucgccaucggcaucaucucccucaugcuccagaucggcaacaucaucuccaucugggccucccacuccauccagaccggcucccagaaccacaccggcaucugcaaccagcgcaucaucaccuacgagaacuccaccuggaugaaccacaccuacgucuccaucaacaacaccaacgucgucgccggcaaggacaagaccuccgucacccucgccggcaacuccucccucugcuccaucuccggcugggccaucuacaccaaggacaacuccauccgcaucggcuccaagggcgacgucuucgucauccgcgagcccuucaucuccugcucccaccucgagugccgcaccuucuuccucacccagggcgcccuccucaacgacaagcacuccaacggcaccgucaaggaccgcucccccuaccgcgcccucauguccugcccccucggcgaggcccccucccccuacaacuccaaguucgaguccgucgccugguccgccuccgccugccacgacggcaugggcuggcucaccaucggcaucuccggccccgacaacggcgccgucgccguccucaaguacaacggcaucaucaccgagaccaucaaguccuggaagaagcgcauccuccgcacccaggaguccgagugcgucugcgucaacggcuccugcuucaccaucaugaccgacggccccuccaacggcgccgccuccuacaagaucuucaagaucgagaagggcaaggucaccaaguccgucgagcucaacgcccccaacuuccacuacgaggagugcuccugcuaccccgacaccggcaccgucaugugcgucugccgcgacaacuggcacggcuccaaccgccccugggucuccuucaaccagaaccucgacuaccagaucggcuacaucugcuccggcgucuucggcgacaacccccgccccaaggacggcaagggcuccugcaaccccgucaccgucgacggcgccgacggcgucaagggcuucuccuacaaguacggcaacggcgucuggaucggccgcaccaaguccaaccgccuccgcaagggcuucgagaugaucugggaccccaacggcuggaccgacaccgacuccgacuucuccgucaagcaggacgucgucgccaucaccgacugguccggcuacuccggcuccuucguccagcaccccgagcucaccggccucgacugcauccgccccugcuucugggucgagcucguccgcggccucccccgcgagaacaccaccaucuggaccuccggcuccuccaucuccuucugcggcgucgacuccgacaccgccaacugguccuggcccgacggcgccgagcuccccuucaccaucgacaaguga

SEQ ID NO: 112342 - RNA, 1410 nt, Artificial Sequence
  derived and/or modified CDS sequence (opt2) from neuraminidase__InfluenzaA__ABW91551
augaaccccaaccagaagaucaucaccaucggcuccgucucccucaccaucuccaccaucugcuucuucaugcagaucgccauccucaucaccaccgucacccuccacuucaagcaguacgaguucaacuucccccccaacaaccaggucaugcucugcgagcccaccaucaucgagcgcaacaucaccgagaucgucuaccucaccaacaccaccaucgagaaggagaucugccccaagcucgccgaguaccgcaacugguccaagccccagugcgacaucaccggcuucgcccccuucuccaaggacaacuccauccgccucuccgccggcggcgacaucugggucacccgcgagcccuacgucuccugcgaccccgacaagugcuaccaguucgcccucggccagggcaccacccucaacaacguccacuccaacgacaccguccgcgaccgcacccccuaccgcacccuccucaugaacgagcucggcguccccuuccaccucggcaccaagcaggucugcaucgccugguccuccuccuccugccacgacggcaaggccuggcuccacgucugcaucaccggcgacgacaagaacgccaccgccuccuucaucuacaacggccgccucgucgacuccaucgucuccugguccaaggagauccuccgcacccaggaguccgagugcgucugcaucaacggcaccugcaccgucgucaugaccgacggcuccgccuccggcaaggccgacaccaagauccucuucaucgaggagggcaagaucguccacaccuccacccucuccggcuccgcccagcacgucgaggagugcuccugcuacccccgcuaccccggcguccgcugcgucugccgcgacaacuggaagggcuccaaccgccccaucgucgacaucaacaucaaggaccacuccaucgucuccuccuacgucugcuccggccucgucggcgacaccccccgcaagaacgacuccuccuccuccucccacugccucgaccccaacaacgaggagggcggccacggcgucaagggcugggccuucgacgacggcaacgacgucuggaugggccgcaccaucuccgagaagucccgccucggcuacgagaccuucaaggucaucgagggcugguccaaccccaaguccaagcuccagaucaaccgccaggucaucgucgaccgcggcaaccgcuccggcuacuccggcaucuucuccgucgagggcaaguccugcaucaaccgcugcuucuacgucgagcucauccgcggccgcaaggaggagaccgagguccucuggaccuccaacuccaucgucgucuucugcggcaccuccggcaccuacggcaccggcuccuggcccgacggcgccgacaucaaccucaugcccaucuga

SEQ ID NO: 112343 - RNA, 1413 nt, Artificial Sequence; identical to SEQ ID NO: 112066
  derived and/or modified CDS sequence (opt2) from neuraminidase__InfluenzaA__ABW91562

SEQ ID NO: 112344 - RNA, 1413 nt, Artificial Sequence; identical to SEQ ID NO: 112101
  derived and/or modified CDS sequence (opt2) from neuraminidase__InfluenzaA__ABW91584

SEQ ID NO: 112345 - RNA, 1413 nt, Artificial Sequence; identical to SEQ ID NO: 112066
  derived and/or modified CDS sequence (opt2) from neuraminidase__InfluenzaA__ABW91595

SEQ ID NO: 112346 - RNA, 1413 nt, Artificial Sequence; identical to SEQ ID NO: 112107
  derived and/or modified CDS sequence (opt2) from neuraminidase__InfluenzaA__ABW91606

SEQ ID NO: 112347 - RNA, 1413 nt, Artificial Sequence; identical to SEQ ID NO: 112101
  derived and/or modified CDS sequence (opt2) from neuraminidase__InfluenzaA__ABW91617

SEQ ID NO: 112348 - RNA, 1413 nt, Artificial Sequence; identical to SEQ ID NO: 112066
  derived and/or modified CDS sequence (opt2) from neuraminidase__InfluenzaA__ABW91628

SEQ ID NO: 112349 - RNA, 1413 nt, Artificial Sequence; identical to SEQ ID NO: 112066
  derived and/or modified CDS sequence (opt2) from neuraminidase__InfluenzaA__ABW91639

SEQ ID NO: 112350 - RNA, 1410 nt, Artificial Sequence; identical to SEQ ID NO: 111920
  derived and/or modified CDS sequence (opt2) from neuraminidase__InfluenzaA__ABW91650

SEQ ID NO: 112351 - RNA, 1350 nt, Artificial Sequence
  derived and/or modified CDS sequence (opt2) from neuraminidase__InfluenzaA__ABX10517
augaaccccaacaagaagaucaucaccaucggcuccaucugcauggucaccggcauggucucccucaugcuccagaucggcaaccucaucuccaucugggucucccacuccauccacaccggcaaccagcacaaggccgagcccaucuccaacaccaacuuccucaccgagaaggccgucgccuccgucaagcucgccggcaacuccucccucugccccaucaacggcugggccguccacuccaaggacaacuccauccgcaucggcuccaagggcgacgucuucgucauccgcgagcccuucaucuccugcucccaccucgagugccgcaccuucuuccucacccagggcgcccuccucaacgacaagcacuccaacggcaccgucaaggaccgcuccccccaccgcacccucauguccugccccgucggcgaggcccccucccccuacaacucccgcuucgaguccgucgccugguccgccuccgccugccacgacggcaccuccuggcucaccaucggcaucuccggccccgacaacggcgccgucgccguccucaaguacaacggcaucaucaccgacaccaucaaguccuggcgcaacaacauccuccgcacccaggaguccgagugcgccugcgucaacggcuccugcuucaccgucaugaccgacggccccuccaacggccaggccucccacaagaucuucaagauggagaagggcaaggucgucaaguccgucgagcucgacgcccccaacuaccacuacgaggagugcuccugcuaccccgacgccggcgagaucaccugcgucugccgcgacaacuggcacggcuccaaccgccccugggucuccuucaaccagaaccucgaguaccagaucggcuacaucugcuccggcgucuucggcgacaacccccgccccaacgacggcaccggcuccugcggccccgucuccuccaacggcgccuacggcgucaagggcuucuccuucaaguacggcaacggcgucuggaucggccgcaccaaguccaccaacucccgcuccggcuucgagaugaucugggaccccaacggcuggaccgagaccgacuccuccuucuccgucaagcaggacaucgucgccaucaccgacugguccggcuacuccggcuccuucguccagcaccccgagcucaccggccucgacugcauccgccccugcuucugggucgagcucauccgcggccgccccaaggaguccaccaucugggccuccggcuccuccaucuccuucugcggcgucaacuccgacaccgucggcugguccuggcccgacggcgccgagcuccccuucaccaucgacaaguga

SEQ ID NO: 112352 - RNA, 1410 nt, Artificial Sequence; identical to SEQ ID NO: 111965
  derived and/or modified CDS sequence (opt2) from neuraminidase__InfluenzaA__ABX10527

SEQ ID NO: 112353 - RNA, 1413 nt, Artificial Sequence
  derived and/or modified CDS sequence (opt2) from neuraminidase__InfluenzaA__ABX58242
augaaccccaaccagaagaucaucaccaucggcuccaucuccaucgccaucggcaucaucucccucaugcuccagaucggcaacaucaucuccaucuggaccucccacuccauccagaccggcucccagaaccacaccggcaucugcaaccagcgcaucaucaccuacgagaacuccaccugggucaaccacaccuacgucuccaucaacaacaccaacgucgucgccggcaaggacaagaccuccgucacccucgccggcaacuccucccucugcuccaucuccggcugggccaucuacaccaaggacaacuccauccgcaucggcuccaagggcgacgucuucgucauccgcgagcccuucaucuccugcucccaccucgagugccgcaccuucuuccucacccagggcgcccuccucaacgacaagcacuccaacggcaccgucaaggaccgcucccccuaccgcgcccucauguccugcccccucggcgaggcccccucccccuacaacuccaaguucgaguccgucgccugguccgccuccgccugccacgacggcaugggcuggcucaccaucggcaucuccggccccgacaacggcgccgucgccguccucaaguacaacggcaucaucaccgagaccaucaaguccuggaagaagcgcauccuccgcacccaggaguccgagugcgucugcgucaacggcuccugcuucaccaucaugaccgacggccccuccaacggcgccgccuccuacaagaucuucaagaucgagaagggcaaggucaccaaguccaucgagcucaacgcccccaacuuccacuacgaggagugcuccugcuaccccgacaccggcaccgucaugugcgucugccgcgacaacuggcacggcuccaaccgccccugggucuccuucaaccagaaccucgacuaccagaucggcuacaucugcuccggcgucuucggcgacaacccccgccccaaggacggcaagggcuccugcaaccccgucaccgucgacggcgccgacggcgucaagggcuucuccuacaaguacggcaacggcgucuggaucggccgcaccaaguccaaccgccuccgcaagggcuucgagaugaucugggaccccaacggcuggaccgacaccgacuccgacuucuccgucaagcaggacgucgucgccaucaccgacugguccggcuacuccggcuccuucguccagcaccccgagcucaccggccucgacugcauccgccccugcuucugggucgagcucguccgcggccucccccgcgagaacaccaccaucuggaccuccggcuccuccaucuccuucugcggcgucgacuccgacaccgccaacugguccuggcccgacggcgccgagcuccccuucaccaucgacaaguga

SEQ ID NO: 112354 - RNA, 1413 nt, Artificial Sequence; identical to SEQ ID NO: 112165
  derived and/or modified CDS sequence (opt2) from neuraminidase__InfluenzaA__ABX58253

SEQ ID NO: 112355 - RNA, 1413 nt, Artificial Sequence; identical to SEQ ID NO: 112066
  derived and/or modified CDS sequence (opt2) from neuraminidase__InfluenzaA__ABX58264

SEQ ID NO: 112356 - RNA, 1413 nt, Artificial Sequence; identical to SEQ ID NO: 112066
  derived and/or modified CDS sequence (opt2) from neuraminidase__InfluenzaA__ABX58275

SEQ ID NO: 112357 - RNA, 1413 nt, Artificial Sequence; identical to SEQ ID NO: 112066
  derived and/or modified CDS sequence (opt2) from neuraminidase__InfluenzaA__ABX58286

SEQ ID NO: 112358 - RNA, 1413 nt, Artificial Sequence
  derived and/or modified CDS sequence (opt2) from neuraminidase__InfluenzaA__ABX58297
augaaccccaaccagaagaucaucaccaucggcuccaucuccaucgccaucggcaucaucucccucaugcuccagaucggcaacaucaucuccaucugggccucccacuccauccagaccggcucccagaaccacaccggcaucugcaaccagaagaucaucaccuacgagaacuccaccugggucaaccacaccuacgucuccaucaacaacaccaacgucgucgccggcaaggacaagaccuccgucacccucgccggcaacuccucccucugcuccaucuccggcugggccaucuacaccaaggacaacuccauccgcaucggcuccaagggcgacgucuucgucauccgcgagcccuucaucuccugcucccaccucgagugccgcaccuucuuccucacccagggcgcccuccucaacgacaagcacuccaacggcaccgucaaggaccgcucccccuaccgcgcccucauguccugcccccucggcgaggcccccucccccuacaacuccaaguucgaguccgucgccugguccgccuccgccugccacgacggcaugggcuggcucaccaucggcaucuccggccccgacaacggcgccgucgccguccucaaguacaacggcaucaucaccgagaccaucaaguccuggaagaagcgcauccuccgcacccaggaguccgagugcgucugcgucaacggcuccugcuucaccaucaugaccgacggccccuccaacggcgccgccuccuacaagaucuucaagaucgagaagggcaaggucaccaaguccaucgagcucaacgcccccaacuuccacuacgaggagugcuccugcuaccccgacaccggcaccgucaugugcgucugccgcgacaacuggcacggcuccaaccgccccugggucuccuucaaccagaaccucgacuaccagaucggcuacaucugcuccggcgucuucggcgacaacccccgccccaaggacggcaagggcuccugcaaccccgucaccgucgacggcgccgacggcgucaagggcuucuccuacaaguacggcaacggcgucuggaucggccgcaccaaguccaaccgccuccgcaagggcuucgagaugaucugggaccccaacggcuggaccgacaccgacuccgacuucuccgucaagcaggacgucgucgccaucaccgacugguccggcuacuccggcuccuucguccagcaccccgagcucaccggccucgacugcauccgccccugcuucugggucgagcucguccgcggccucccccgcgagaacaccaccaucuggaccuccggcuccuccaucuccuucugcggcgucgacuccgacaccgccaacugguccuggcccgacggcgccgagcuccccuucaccaucgacaaguga

SEQ ID NO: 112359 - RNA, 1413 nt, Artificial Sequence; identical to SEQ ID NO: 112237
  derived and/or modified CDS sequence (opt2) from neuraminidase__InfluenzaA__ABX58308

SEQ ID NO: 112360 - RNA, 1413 nt, Artificial Sequence
  derived and/or modified CDS sequence (opt2) from neuraminidase__InfluenzaA__ABX58319
augaaccccaaccagaagaucaucaccaucggcuccaucuccaucgccaucggcaucaucucccucaugcuccagaucggcaacaucaucuccaucugggccucccacuccauccagaccggcucccagaaccacaccggcaucugcaaccagcgcaucaucaccuacgagaacuccaccugggucaaccacaccuacgucuccaucaacaacaccaacgucgucgccggcaaggacaagaccuccgucacccucgccggcaacuccucccucugcuccaucuccggcugggccaucuacaccaaggacaacuccauccgcaucggcuccaagggcgacgucuucgucauccgcgagcccuucaucuccugcucccaccucgagugccgcaccuucuuccucacccagggcgcccuccucaacgacaagcacuccaacggcaccaucaaggaccgcucccccuaccgcgcccucauguccugcccccucggcgaggcccccucccccuacaacuccaaguucgaguccgucgccugguccgccuccgccugccacgacggcaugggcuggcucaccaucggcaucuccggccccgacaacggcgccgucgccguccucaaguacaacggcaucaucaccgagaccaucaaguccuggaagaagcgcauccuccgcacccaggaguccgagugcgucugcgucaacggcuccugcuucaccaucaugaccgacggccccuccaacggcgccgccuccuacaagaucuucaagaucgagaagggcaaggucaccaaguccaucgagcucaacgcccccaacuuccacuacgaggagugcuccugcuaccccgacaccggcaccgucaugugcgucugccgcgacaacuggcacggcuccaaccgccccugggucuccuucaaccagaaccucgacuaccagaucggcuacaucugcuccggcgucuucggcgacaacccccgccccaaggacggcaagggcuccugcaaccccgucaccgucgacggcgccgacggcgucaagggcuucuccuacaaguacggcaacggcgucuggaucggccgcaccaaguccaaccgccuccgcaagggcuucgagaugaucugggaccccaacggcuggaccgacaccgacuccgacuucuccgucaagcaggacgucgucgccaucaccgacugguccggcuacuccggcuccuucguccagcaccccgagcucaccggccucgacugcauccgccccugcuucugggucgagcucguccgcggccucccccgcgagaacaccaccaucuggaccuccggcuccuccaucuccuucugcggcgucgacuccgacaccgccaacugguccuggcccgacggcgccgagcuccccuucaccaucgacaaguga

SEQ ID NO: 112361 - RNA, 1413 nt, Artificial Sequence; identical to SEQ ID NO: 112237
  derived and/or modified CDS sequence (opt2) from neuraminidase__InfluenzaA__ABX58352

SEQ ID NO: 112362 - RNA, 1413 nt, Artificial Sequence; identical to SEQ ID NO: 112066
  derived and/or modified CDS sequence (opt2) from neuraminidase__InfluenzaA__ABX58363

SEQ ID NO: 112363 - RNA, 1413 nt, Artificial Sequence; identical to SEQ ID NO: 112066
  derived and/or modified CDS sequence (opt2) from neuraminidase__InfluenzaA__ABX58385

SEQ ID NO: 112364 - RNA, 1413 nt, Artificial Sequence; identical to SEQ ID NO: 112066
  derived and/or modified CDS sequence (opt2) from neuraminidase__InfluenzaA__ABX58396

SEQ ID NO: 112365 - RNA, 1413 nt, Artificial Sequence
  derived and/or modified CDS sequence (opt2) from neuraminidase__InfluenzaA__ABX58407
augaaccccaaccagaagaucaucaccaucggcuccaucuccaucgccaucggcaucaucucccucaugcuccagaucggcaacaucaucuccaucugggccucccacuccauccagaccggcucccagaaccacaccggcaucugcaaccagcgcaucaucaccuacgagaacuccaccugggucaaccacaccuacgucuccaucaacaacaccaacgucgucgccggcaaggacaagaccuccgucacccucgccggcaacuccucccucugccccaucuccggcugggccaucuacaccaaggacaacuccauccgcaucggcuccaagggcgacgucuucgucauccgcgagcccuucaucuccugcucccaccucgagugccgcaccuucuuccucacccagggcgcccuccucaacgacaagcacuccaacggcaccgucaaggaccgcucccccuaccgcgcccucauguccugcccccucggcgaggcccccucccccuacaacuccaaguucgaguccgucgccugguccgccuccgccugccacgacggcaugggcuggcucaccaucggcaucuccggccccgacaacggcgccgucgccguccucaaguacaacggcaucaucaccgagaccaucaaguccuggaagaagcgcauccuccgcacccaggaguccgagugcgucugcgucaacggcuccugcuucaccaucaugaccgacggccccuccaacggcgccgccuccuacaagaucuucaagaucgagaagggcaaggucaccaaguccaucgagcucaacgcccccaacuuccacuacgaggagugcuccugcuaccccgacaccggcaccgucaugugcgucugccgcgacaacuggcacggcuccaaccgccccugggucuccuucaaccagaaccucgacuaccagaucggcuacaucugcuccggcgucuucggcgacaacccccgccccaaggacggcaagggcuccugcaaccccgucaccgucgacggcgccgacggcgucaagggcuucuccuacaaguacggcaacggcgucuggaucggccgcaccaaguccaaccgccuccgcaagggcuucgagaugaucugggaccccaacggcuggaccgacaccgacuccgacuucuccgucaagcaggacgucgucgccaucaccgacugguccggcuacuccggcuccuucguccagcaccccgagcucaccggccucgacugcauccgccccugcuucugggucgagcucguccgcggccucccccgcgagaacaccaccaucuggaccuccggcuccuccaucuccuucugcggcgucgacuccgacaccgccaacugguccuggcccgacggcgccgagcuccccuucaccaucgacaaguga

SEQ ID NO: 112366 - RNA, 1413 nt, Artificial Sequence; identical to SEQ ID NO: 112107
  derived and/or modified CDS sequence (opt2) from neuraminidase__InfluenzaA__ABX58418

SEQ ID NO: 112367 - RNA, 1413 nt, Artificial Sequence; identical to SEQ ID NO: 112066
  derived and/or modified CDS sequence (opt2) from neuraminidase__InfluenzaA__ABX58429

SEQ ID NO: 112368 - RNA, 1413 nt, Artificial Sequence; identical to SEQ ID NO: 112066
  derived and/or modified CDS sequence (opt2) from neuraminidase__InfluenzaA__ABX58440

SEQ ID NO: 112369 - RNA, 1413 nt, Artificial Sequence
  derived and/or modified CDS sequence (opt2) from neuraminidase__InfluenzaA__ABX58451
augaaccccaaccagaagaucaucaccaucggcuccaucuccaucgccaucggcaccaucucccucaugcuccagaucggcaacaucaucuccaucugggccucccacuccauccagaccggcucccagaaccacaccggcaucugcaaccagcgcaucaucaccuacgagaacuccaccugggucaaccacaccuacgucuccaucaacaacaccaacgucgucgccggcaaggacaagaccuccgucacccucgccggcaacuccucccucugcuccaucuccggcugggccaucuacaccaaggacaacuccauccgcaucggcuccaagggcgacgucuucgucauccgcgagcccuucaucuccugcucccaccucgagugccgcaccuucuuccucacccagggcgcccuccucaacgacaagcacuccaacggcaccgucaaggaccgcucccccuaccgcgcccucauguccugcccccucggcgaggcccccucccccuacaacuccaaguucgaguccgucgccugguccgccuccgccugccacgacggcaugggcuggcucaccaucggcaucuccggccccgacaacggcgccgucgccguccucaaguacaacggcaucaucaccgagaccaucaaguccuggaagaagcgcauccuccgcacccaggaguccgagugcgucugcgucaacggcuccugcuucaccaucaugaccgacggccccuccaacggcgccgccuccuacaagaucuucaagaucgagaagggcaaggucaccaaguccaucgagcucaacgcccccaacuuccacuacgaggagugcuccugcuaccccgacaccggcaccgucaugugcgucugccgcgacaacuggcacggcuccaaccgccccugggucuccuucaaccagaaccucgacuaccagaucggcuacaucugcuccggcgucuucggcgacaacccccgccccaaggacggcaagggcuccugcaaccccgucaccgucgacggcgccgacggcgucaagggcuucuccuacaaguacggcaacggcgucuggaucggccgcaccaaguccaaccgccuccgcaagggcuucgagaugaucugggaccccaacggcuggaccgacaccgacuccgacuucuccgucaagcaggacgucgucgccaucaccgacugguccggcuacuccggcuccuucguccagcaccccgagcucaccggccucgacugcauccgccccugcuucugggucgagcucguccgcggccucccccgcgagaacaccaccaucuggaccuccggcuccuccaucuccuucugcggcgucgacuccgacaccgccaacugguccuggcccgacggcgccgagcuccccuucaccaucgacaaguga

SEQ ID NO: 112370 - RNA, 1413 nt, Artificial Sequence; identical to SEQ ID NO: 112107
  derived and/or modified CDS sequence (opt2) from neuraminidase__InfluenzaA__ABX58462

SEQ ID NO: 112371 - RNA, 1413 nt, Artificial Sequence; identical to SEQ ID NO: 112066
  derived and/or modified CDS sequence (opt2) from neuraminidase__InfluenzaA__ABX58473

SEQ ID NO: 112372 - RNA, 1413 nt, Artificial Sequence; identical to SEQ ID NO: 112107
  derived and/or modified CDS sequence (opt2) from neuraminidase__InfluenzaA__ABX58484

SEQ ID NO: 112373 - RNA, 1413 nt, Artificial Sequence
  derived and/or modified CDS sequence (opt2) from neuraminidase__InfluenzaA__ABX58495
augaaccccaaccagaagaucaucaccaucggcuccaucuccaucgccaucggcaucaucucccucaugcuccagaucggcaacaucaucuccaucugggccucccacuccauccagaccggcucccagaaccacaccggcaucugcaaccagcgcaucaucaccuacgagaacuccaccugggucaaccacaccuacgucuccaucaacaacaccaacgucgucgccggcaaggacaagaccuccgucacccucgccggcaacuccucccucugcuccaucuccggcugggccaucuacaccaaggacaacuccauccgcaucggcuccaagggcgacgucuucgucauccgcgagcccuucaucuccugcucccaccucgagugccgcaccuucuuccucacccagggcgcccuccucaacgacaagcacuccaaccgcaccgucaaggaccgcucccccuaccgcgcccucauguccugcccccucggcgaggcccccucccccuacaacuccaaguucgaguccgucgccugguccgccuccgccugccacgacggcaugggcuggcucaccaucggcaucuccggccccgacaacggcgccgucgccguccucaaguacaacggcaucaucaccgagaccaucaaguccuggaagaagcgcauccuccgcacccaggaguccgagugcgucugcgucaacggcuccugcuucaccaucaugaccgacggccccuccaacggcgccgccuccuacaagaucuucaagaucgagaagggcaaggucaccaaguccaucgagcucaacgcccccaacuuccacuacgaggagugcuccugcuaccccgacaccggcaccgucaugugcgucugccgcgacaacuggcacggcuccaaccgccccugggucuccuucaaccagaaccucgacuaccagaucggcuacaucugcuccggcgucuucggcgacaacccccgccccaaggacggcaagggcuccugcaaccccgucaccgucgacggcgccgacggcgucaagggcuucuccuacaaguacggcaacggcgucuggaucggccgcaccaaguccaaccgccuccgcaagggcuucgagaugaucugggaccccaacggcuggaccgacaccgacuccgacuucuccgucaagcaggacgucgucgccaucaccgacugguccggcuacuccggcuccuucguccagcaccccgagcucaccggccucgacugcauccgccccugcuucugggucgagcucguccgcggccucccccgcgagaacaccaccaucuggaccuccggcuccuccaucuccuucugcggcgucgacuccgacaccgccaacugguccuggcccgacggcgccgagcuccccuucaccaucgacaaguga

SEQ ID NO: 112374 - RNA, 1413 nt, Artificial Sequence; identical to SEQ ID NO: 112101
  derived and/or modified CDS sequence (opt2) from neuraminidase__InfluenzaA__ABX58506

SEQ ID NO: 112375 - RNA, 1413 nt, Artificial Sequence; identical to SEQ ID NO: 112107
  derived and/or modified CDS sequence (opt2) from neuraminidase__InfluenzaA__ABX58528

SEQ ID NO: 112376 - RNA, 1413 nt, Artificial Sequence; identical to SEQ ID NO: 112107
  derived and/or modified CDS sequence (opt2) from neuraminidase__InfluenzaA__ABX58539

SEQ ID NO: 112377 - RNA, 1413 nt, Artificial Sequence
  derived and/or modified CDS sequence (opt2) from neuraminidase__InfluenzaA__ABX58550
augaaccccaaccagaagaucaucaccaucggcuccaucuccaucgccaucggcaucaucucccucaugcuccagaucggcaacaucaucuccaucugggccucccacuccauccagaccggcucccagaaccacaccggcaucugcaaccagcgcaucaucaccuacgagaacuccaccugggucaaccacaccuacgucuccaucaacaacaccaacgucgucgccggcaaggacaagaccuccgucacccucgccggcaacuccucccucugcuccaucuccggcugggccaucuacaccaaggacaacuccauccgcaucggcuccaagggcgacgucuucgucauccgcgagcccuucaucuccugcucccaccucgagugccgcaccuucuuccucacccagggcgcccuccucaacgacaagcacuccaacggcaccgucaaggaccgcucccccuaccgcgcccucauguccugcccccucggcgaggcccccucccccuacaacuccaaguucgaguccgucgccugguccgccuccgccugccacgacggcaugggcuggcucaccaucggcaucuccggccccgacaacggcgccgucgccguccucaaguacaacggcaucaucaccgagaccaucaaguccuggaagaagcgcauccuccgcacccaggaguccgagugcgucugcgucaacggcuccugcuucaccaucaugaccgacggccccuccaacggcgccgccuccuacaagaucuucaagaucgagaagggcaaggucaccaaguccaucgagcucaacgcccccaacuuccacuacgaggagugcuccugcuaccccgacaccggcaccgucaugugcgucugccgcgacaacuggcacggcuccaaccgccccugggucuccuucaaccagaaccucgacuaccagaucggcuacaucugcuccggcgucuucggcgacaacccccgccccaaggacggcaagggcuccugcaaccccgucaccgucgacggcgccgacggcgucaagggcuucuccuacaaguacggcaacggcgucuggaucggccgcaccaaguccaaccgccuccgcaagggcuucgagaugaucugggaccccaacggcuggaccgacaccgacuccgacuucuccgucaagcaggacgucgucgccaucaccgacugguccggcuacuccggcuccuucguccagcaccccgagcucaccggccucgacugcauccgccccugcuucugggucgagcucguccgcggccucccccgcgagaacaccaccaucuggaccuccggcuccuccaucuccuucugcggcgucgacuccgacaccgccaacugguccuggcccgacggcgccgagcuccccuucaccgucgacaaguga

SEQ ID NO: 112378 - RNA, 1413 nt, Artificial Sequence; identical to SEQ ID NO: 112066
  derived and/or modified CDS sequence (opt2) from neuraminidase__InfluenzaA__ABX58561

SEQ ID NO: 112379 - RNA, 1413 nt, Artificial Sequence
  derived and/or modified CDS sequence (opt2) from neuraminidase__InfluenzaA__ABX58572
augaaccccaaccagaagaucaucaccaucggcuccaucuccaucgccaucggcaucaucucccucaugcuccagaucggcaacaucaucuccaucugggccucccacuccauccagaccggcucccagaaccacaccggcaucugcaaccagcgcaucaucaccuacgagaacuccaccugggucaaccacaccuacgucuccaucaacaacaccaacgucgucgccggcaaggacaagaccuccgucacccucgccggcaacuccucccucugcuccaucuccggcugggccaucuacaccaaggacaacuccauccgcaucggcuccaagggcgacgucuucgucauccgcgagcccuucaucuccugcucccaccucgagugccgcaccuucuuccucacccagggcgcccuccucaacgacaagcacuccaacggcaccgucaaggaccgcucccccuaccgcgcccucauguccugcccccucggcgaggcccccucccccuacaacuccaaguucgaguccgucgccugguccgccuccgccugccacgacggcaugggcuggcucaccaucggcaucuccggccccgacaacggcgccgucgccguccucaaguacaacggcaucaucaccgagaccaucaaguccuggaagaagcgcauccuccgcacccaggaguccgagugcgucugcgucaacggcuccugcuucaccaucaugaccgacggccccuccaacggcgccgccuccuacaagaucuucaagaucgagaagggcaaggucaccaaguccaucgagcucaacgcccccaacuuccacuacgaggagugcuccugcuaccccgacaccggcaccgucaugugcgucugccgcgacaacuggcacggcuccaaccgccccugggucuccuucaaccagaaccucgacuaccagaucggcuacaucugcuccggcgucuucggcgacaacccccgccccaaggacggcaagggcuccugcaaccccaugaccgucgacggcgccgacggcgucaagggcuucuccuacaaguacggcaacggcgucuggaucggccgcaccaaguccaaccgccuccgcaagggcuucgagaugaucugggaccccaacggcuggaccgacaccgacuccgacuucuccgucaagcaggacgucgucgccaucaccgacugguccggcuacuccggcuccuucguccagcaccccgagcucaccggccucgacugcauccgccccugcuucugggucgagcucguccgcggccucccccgcgagaacaccaccaucuggaccuccggcuccuccaucuccuucugcggcgucgacuccgacaccgccaacugguccuggcccgacggcgccgagcuccccuucaccaucgacaaguga

SEQ ID NO: 112380 - RNA, 1413 nt, Artificial Sequence; identical to SEQ ID NO: 112066
  derived and/or modified CDS sequence (opt2) from neuraminidase__InfluenzaA__ABX58583

SEQ ID NO: 112381 - RNA, 1413 nt, Artificial Sequence; identical to SEQ ID NO: 112066
  derived and/or modified CDS sequence (opt2) from neuraminidase__InfluenzaA__ABX58594

SEQ ID NO: 112382 - RNA, 1413 nt, Artificial Sequence; identical to SEQ ID NO: 112092
  derived and/or modified CDS sequence (opt2) from neuraminidase__InfluenzaA__ABX58605

SEQ ID NO: 112383 - RNA, 1413 nt, Artificial Sequence; identical to SEQ ID NO: 112092
  derived and/or modified CDS sequence (opt2) from neuraminidase__InfluenzaA__ABX58616

SEQ ID NO: 112384 - RNA, 1413 nt, Artificial Sequence; identical to SEQ ID NO: 112066
  derived and/or modified CDS sequence (opt2) from neuraminidase__InfluenzaA__ABX58627

SEQ ID NO: 112385 - RNA, 1413 nt, Artificial Sequence; identical to SEQ ID NO: 112066
  derived and/or modified CDS sequence (opt2) from neuraminidase__InfluenzaA__ABX58638

SEQ ID NO: 112386 - RNA, 1413 nt, Artificial Sequence
  derived and/or modified CDS sequence (opt2) from neuraminidase__InfluenzaA__ABX58682
augaaccccaaccagaagaucaucaccaucggcuccaucuccaucgccaucggcaucaucucccucaugcuccagaucggcaacaucaucuccaucugggccucccacuccauccagaccggcucccagaaccacaccggcaucugcaaccagcgcaucaucaccuacgagaacuccaccugggucaaccacaccuacgucuccaucaacaacaccaacgucgucgccggcaaggacaagaccuccgucacccucgccggcaacuccucccucugcuccaucuccggcugggccaucuacaccaaggacaacuccauccgcaucggcuccaagggcgacgucuucgucauccgcgagcccuucaucuccugcucccaccucgagugccgcaccuucuuccucacccagggcgcccuccucaacgacaagcacuccaacggcaccgucaaggaccgcucccccuaccgcgcccucauguccugcccccucggcgaggcccccucccccuacaacuccaaguucgaguccgucgccugguccgccuccgccugccacgacggcaugggcuggcucaccaucggcaucuccggccccgacaacggcgccgucgccguccucaaguacaacggcaucaucaccgagaccaucaaguccuggaagaagcgcauccuccgcacccaggaguccgagugcgucugcgucaacggcuccugcuucaccaucaugaccgacggccccuccaacggcgccgccuccuacaagaucuucaagaucgagaagggcaaggucaccaaguccaucgagcucaacgcccccaacuuccacuacgaggagugcuccugcuaccccgacaccggcaccaugaugugcgucugccgcgacaacuggcacggcuccaaccgccccugggucuccuucaaccagaaccucgacuaccagaucggcuacaucugcuccggcgucuucggcgacaacccccgccccaaggacggcaagggcuccugcaaccccgucaccgucgacggcgccgacggcgucaagggcuucuccuacaaguacggcaacggcgucuggaucggccgcaccaaguccaaccgccuccgcaagggcuucgagaugaucugggaccccaacggcuggaccgacaccgacuccgacuucuccgucaagcaggacgucgucgccaucaccgacugguccggcuacuccggcuccuucguccagcaccccgagcucaccggccucgacugcauccgccccugcuucugggucgagcucguccgcggccucccccgcgagaacaccaccaucuggaccuccggcuccuccaucuccuucugcggcgucgacuccgacaccgccaacugguccuggcccgacggcgccgagcuccccuucaccaucgacaaguga

SEQ ID NO: 112387 - RNA, 1413 nt, Artificial Sequence
  derived and/or modified CDS sequence (opt2) from neuraminidase__InfluenzaA__ABX58693
augaaccccaaccagaagaucaucaccaucggcuccaucuccaucgccaucggcaucaucucccucaugcuccagaucggcaacaucaucuccaucugggccucccacuccauccagaccggcucccagaacaacaccggcaucugcaaccagcgcaucaucaccuacgagaacuccaccugggucaaccacaccuacgucaacaucaacaacaccaacgucgucgccggcaaggacaagaccuccgucacccucgccggcaacuccucccucugcuccaucuccggcugggccaucuacaccaaggacaacuccauccgcaucggcuccaagggcgacgucuucgucauccgcgagcccuucaucuccugcucccaccucgagugccgcaccuucuuccucacccagggcgcccuccucaacgacaagcacuccaacggcaccgucaaggaccgcucccccuaccgcgcccucauguccugcccccucggcgaggcccccucccccuacaacuccaaguucgaguccgucgccugguccgccuccgccugccacgacggcaugggcuggcucaccaucggcaucuccggccccgacaacggcgccgucgccguccucaaguacaacggcaucaucaccggcaccaucaaguccuggaagaagcagauccuccgcacccaggaguccgagugcgucugcaugaacggcuccugcuucaccaucaugaccgacggccccuccaaccgcgccgccuccuacaagaucuucaagaucgagaagggcaaggucaccaaguccaucgagcucaacgcccccaacuuccacuacgaggagugcuccugcuaccccgacaccggcaucgucaugugcgucugccgcgacaacuggcacggcuccaaccgccccugggucuccuucaaccagaaccucgacuaccagaucggcuacaucugcuccggcguccucggcgacaacccccgccccgaggacggcgagggcuccugcaaccccgucaccgucgacggcgccgacggcgucaagggcuucuccuacaaguacgacaacggcgucuggaucggccgcaccaaguccaaccgccuccgcaagggcuucgagaugaucugggaccccaacggcuggaccaacaccgacuccgacuucuccgucaagcaggacgucgucgccaucaccgacugguccggcuacuccggcuccuucguccagcaccccgagcucaccggccucgacugcauccgccccugcuucugggucgagcucguccgcggccucccccgcgagaacaccaccaucuggaccuccggcuccuccaucuccuucugcggcgucaacuccgacaccgccaacugguccuggcccgacggcgccgagcuccccuucaccaucgacaaguga

SEQ ID NO: 112388 - RNA, 1413 nt, Artificial Sequence; identical to SEQ ID NO: 112237
  derived and/or modified CDS sequence (opt2) from neuraminidase__InfluenzaA__ABX58704

SEQ ID NO: 112389 - RNA, 1413 nt, Artificial Sequence; identical to SEQ ID NO: 112165
  derived and/or modified CDS sequence (opt2) from neuraminidase__InfluenzaA__ABX58715

SEQ ID NO: 112390 - RNA, 1350 nt, Artificial Sequence
  derived and/or modified CDS sequence (opt2) from neuraminidase__InfluenzaA__ABY19420
augaaccccaaccagaaggucaucaccaucggcuccaucugcauggucaucggcaucgucucccucaugcuccagaucggcaacaugaucuccaucugggucucccacuccauccagaccggcaaccagaaccaggucgagcccaucaucaacaccaacuuccucaccggcaaggccgucgccuccaucacccucgccggcaacuccucccucugccccauccgcggcugggccauccacuccaaggacaacuccauccgcaucggcuccaagggcgacgucuucgucauccgcgagcccuucaucuccugcucccaccucgagugccgcaccuucuuccucacccagggcgcccuccucaacgacaagcacuccaacggcaccgucaaggaccgcuccccccaccgcacccucauguccugccccgucggcgaggcccccucccccuacaacucccgcuucgaguccgucgccugguccgccuccgccugccacgacggcaccuccuggcucaccaucggcaucuccggccccgacaacggcgccgucgccguccucaaguacaacggcaucaucaccgacaccaucaaguccuggcgcaacaacauccuccgcacccaggaguccgagugcgccugcgucaacggcuccugcuucaccgucaugaccgacggccccuccaacggccaggccuccuacaagaucuucaagauggagaagggcaaggucaucaaguccgucgagcucgacgcccccaacuaccacuacgaggagugcuccugcuaccccgacgccggcgagaucaccugcgucugccgcgacaacuggcacggcuccaaccgccccugggucuccuucaaccagaaccucgaguaccagaucggcuacaucugcuccggcgucuucggcgacaacccccgccccaacgacggcaccggcuccugcggccccgucucccacaacggcgccuacggcgucaagggcuucuccuucaaguacggcaacggcgucuggaucggccgcaccaagucccccaacucccgcuccggcuucgagaugaucugggaccccaacggcugguccgagaccgacuccuccuucuccgucaagcaggacaucgucgccaucaccgacugguccggcuacuccggcuccuucguccagcaccccgagcucaccggccucgacugcauccgccccugcuucugggucgagcucauccgcggccgccccaaggaguccaccgucuggaccuccggcuccuccaucuccuucugcggcgucaacuccgacaccgucuccugguccuggcccgacggcgccgagcuccccuucuccaucgacaaguga

SEQ ID NO: 112391 - RNA, 1350 nt, Artificial Sequence
  derived and/or modified CDS sequence (opt2) from neuraminidase__InfluenzaA__ABY19421
augaaccccaaccagaagaucaucaccaucggcuccaucugcauggucaucggcaucgucucccucaugcuccagaucggcaacaugaucuccaucugggucucccacuccauccagaccggcaaccagaaccaggucgagcccaucaucaacaccaacuuccucaccggcaaggccgucgccuccaucacccucgccggcaacuccucccucugccccauccgcggcugggccauccacuccaaggacaacuccauccgcaucggcuccaagggcgacgucuucgucauccgcgagcccuucaucuccugcucccaccucgagugccgcaccuucuuccucacccagggcgcccuccucaacgacaagcacuccaacggcaccgucaaggaccgcuccccccaccgcacccucauguccugccccgucggcgaggcccccucccccuacaacucccgcuucgaguccgucgccugguccgccuccgccugccacgacggcaccuccuggcucaccaucggcaucuccggccccgacaacggcgccgucgccguccucaaguacaacggcaucaucaccgacaccaucaaguccuggcgcaacaacauccuccgcacccaggaguccgagugcgccugcgucaacggcuccugcuucaccgucaugaccgacggccccuccaacggccaggccuccuacaagaucuucaagauggagaagggcaaggucaucaaguccgucgagcucgacgcccccaacuaccacuacgaggagugcuccugcuaccccgacgccggcgagaucaccugcgucugccgcgacaacuggcacggcuccaaccgccccugggucuccuucaaccagaaccucgaguaccagaucggcuacaucugcuccggcgucuucggcgacaacccccgccccaacgacggcaccggcuccugcggccccgucucccacaacggcgccuacggcgucaagggcuucuccuucaaguacggcaacggcgucuggaucggccgcaccaagucccccaacucccgcuccggcuucgagaugaucugggaccccaacggcugguccgagaccgacuccuccuucuccgucaagcaggacaucgucgccaucaccgacugguccggcuacuccggcuccuucguccagcaccccgagcucaccggccucgacugcauccgccccugcuucugggucgagcucauccgcggccgccccaaggaguccaccgucuggaccuccggcuccuccaucuccuucugcggcgucaacuccgacaccgucuccugguccuggcccgacggcgccgagcuccccuucuccaucgacaaguga

SEQ ID NO: 112392 - RNA, 1413 nt, Artificial Sequence
  derived and/or modified CDS sequence (opt2) from neuraminidase__InfluenzaA__ABY51020
augaaccccaaccagaagaucaucaccaucggcuccaucuccaucgccaucggcaucaucucccucaugcuccagaucggcaacaucaucuccaucugggccucccacuccauccagaccggcucccagaaccacaccggcaucugcaaccagcgcaucaucaccuacgagaacuccaccugggucaaccacaccuacgucuccaucaacaacaccaacgucgucgccggcaaggacaagaccuccgucacccucgccggcaacuccucccucugcuccaucuccggcugggccaucuacaccaaggacaacuccauccgcaucggcuccaagggcgacgucuucgucauccgcgagcccuucaucuccugcucccaccucgagugccgcaccuucuuccucacccagggcgcccuccucaacgacaagcacuccaacggcaccgucaaggaccgcucccccuaccgcgcccucauguccugcccccucggcgaggcccccucccccuacaacuccaaguucgaguccgucgccugguccgccuccgccugccacgacggcaugggcuggcucaccaucggcaucuccggccccgacaacggcgccgucgccguccucaaguacaacggcaucaucaccgagaccaucaaguccuggaagaagcgcauccuccgcacccaggaguccgagugcgucugcgucaacggcuccugcuucaccaucaugaccgacggccccuccaacggcgccgccuccuacaagaucuucaagaucgagaagggcaaggucaccaaguccaucgagcucaacgcccccaacuuccacuacgaggagugcuccugcuaccccgacaccggcaccgucaugugcgucugccgcgacaacuggcacggcuccaaccgccccugggucuccuucaaccagaaccucgacuaccagaucggcuacaucugcuccggcgucuucggcgacaacccccgccccaaggacggcaagggcuccugcaacccccucaccgucgacggcgccgacggcgucaagggcuucuccuacaaguacggcaacggcgucuggaucggccgcaccaaguccaaccgccuccgcaagggcuucgagaugaucugggaccccaacggcuggaccgacaccgacuccgacuucuccgucaagcaggacgucgucgccaucaccgacugguccggcuacuccggcuccuucguccagcaccccgagcucaccggccucgacugcauccgccccugcuucugggucgagcucguccgcggccucccccgcgagaacaccaccaucuggaccuccggcuccuccaucuccuucugcggcgucgacuccgacaccgccaacugguccuggcccgacggcgccgagcuccccuucaccaucgacaaguga

SEQ ID NO: 112393 - RNA, 1410 nt, Artificial Sequence; identical to SEQ ID NO: 112102
  derived and/or modified CDS sequence (opt2) from neuraminidase__InfluenzaA__ABY51031

SEQ ID NO: 112394 - RNA, 1413 nt, Artificial Sequence
  derived and/or modified CDS sequence (opt2) from neuraminidase__InfluenzaA__ABY51042
augaaccccaaccagaagaucaucaccaucggcuccaucuccaucgccaucggcaucaucucccucaugcuccagaucggcaacaucaucuccaucugggccucccacuccauccagaccggcucccagaaccacaccggcaucugcaaccagcgcaucaucaccuacgagaacuccaccugggucaaccacaccuacgucaacaucaacaacaccaacgucgucgccggcaaggacaagaccuccgucacccucgccggcaacuccucccucugcuccaucuccggcugggccaucuacaccaaggacaacuccauccgcaucggcuccaagggcgacgucuucgucauccgcgagcccuucaucuccugcucccaccucgagugccgcaccuucuuccucacccagggcgcccuccucaacgacaagcacuccaacggcaccgucaaggaccgcucccccuaccgcgcccucauguccugcccccucggcgaggcccccucccccuacaacuccaaguucgaguccgucgccugguccgccuccgccugccacgacggcaugggcuggcucaccaucggcaucuccggccccgacaacggcgccgucgccguccucaaguacaacggcaucaucaccggcaccaucaaguccuggaagaagcagauccuccgcacccaggaguccgagugcgucugcaugaacggcuccugcuucaccaucaugaccgacggccccuccaaccgcgccgccuccuacaagaucuucaagaucgagaagggcaaggucaccaaguccaucgagcucaacgcccccaacuuccacuacgaggagugcuccugcuaccccgacaccggcaucgucaugugcgucugccgcgacaacuggcacggcuccaaccgccccugggucuccuucaaccagaaccucgacuaccagaucggcuacaucugcuccggcgucuucggcgacaacccccgccccaaggacggcgagggcuccugcaaccccgucaccgucgacggcgccgacggcgucaagggcuucuccuacaaguacgacaacggcgucuggaucggccgcaccaaguccaaccgccuccgcaagggcuucgagaugaucugggaccccaacggcuggaccaacaccgacuccgacuucuccgucaagcaggacgucgucgccaucaccgacugguccggcuacuccggcuccuucguccagcaccccgagcucaccggccucgacugcauccgccccugcuucugggucgagcucguccgcggccucccccgcgagaacaccaccaucuggaccuccggcuccuccaucuccuucugcggcgucaacuccgacaccgccaacugguccuggcccgacggcgccgagcuccccuucaccaucgacaaguga

SEQ ID NO: 112395 - RNA, 1413 nt, Artificial Sequence
  derived and/or modified CDS sequence (opt2) from neuraminidase__InfluenzaA__ABY51053
augaaccccaaccagaagaucaucaccaucggcuccaucuccaucgccaucggcaucaucucccucaugcuccagaucggcaacaucaucuccaucugggccucccacuccauccagaccggcucccagaacaacaccggcaucugcaaccagcgcaucaucaccuacgagaacuccaccugggucaaccacaccuacgucaacaucaacaacaccaacgucgucgccggcaaggacaagaccuccgucacccucgccggcaacuccucccucugcuccaucuccggcugggccaucuacaccaaggacaacuccauccgcaucggcuccaagggcgacgucuucgucauccgcgagcccuucaucuccugcucccaccucgagugccgcaccuucuuccucacccagggcgcccuccucaacgacaagcacuccaacggcaccgucaaggaccgcucccccuaccgcgcccucauguccugcccccucggcgaggcccccucccccuacaacuccaaguucgaguccgucgccugguccgccuccgccugccacgacggcaugggcuggcucaccaucggcaucuccggccccgacaacggcgccgucgccguccucaaguacaacggcaucaucaccggcaccaucaaguccuggaagaagcagauccuccgcacccaggaguccgagugcgucugcaugaacggcuccugcuucaccaucaugaccgacggccccuccaaccgcgccgccuccuacaagaucuucaagaucgagaagggcaaggucaccaaguccaucgagcucaacgcccccaacuuccacuacgaggagugcuccugcuaccccgacaccggcaucgucaugugcgucugccgcgacaacuggcacggcuccaaccgccccugggucuccuucaaccagaaccucgacuaccagaucggcuacaucugcuccggcgucuucggcgacaacccccgccccgaggacggcgagggcuccugcaaccccgucaccgucgacggcaccgacggcgucaagggcuucuccuacaaguacgacaacggcgucuggaucggccgcaccaaguccaaccgccuccgcaagggcuucgagaugaucugggaccccaacggcuggaccaacaccgacuccgacuucuccgucaagcaggacgucgucgccaucaccgacugguccggcuacuccggcuccuucguccagcaccccgagcucaccggccucgacugcauccgccccugcuucugggucgagcucguccgcggccucccccgcgagaacaccaccaucuggaccuccggcuccuccaucuccuucugcggcgucaacuccgacaccgccaacugguccuggcccgacggcgccgagcuccccuucaccaucgacaaguga

SEQ ID NO: 112396 - RNA, 1413 nt, Artificial Sequence; identical to SEQ ID NO: 112165
  derived and/or modified CDS sequence (opt2) from neuraminidase__InfluenzaA__ABY51064

SEQ ID NO: 112397 - RNA, 1413 nt, Artificial Sequence; identical to SEQ ID NO: 112066
  derived and/or modified CDS sequence (opt2) from neuraminidase__InfluenzaA__ABY51075

SEQ ID NO: 112398 - RNA, 1413 nt, Artificial Sequence
  derived and/or modified CDS sequence (opt2) from neuraminidase__InfluenzaA__ABY51086
augaaccccaaccagaagaucaucaccaucggcuccaucuccaucgccaucggcaucaucuccaucaugcuccagaucggcaacaucaucuccaucugggccucccacuccauccagaccggcucccagaaccacaccggcaucugcaaccagcgcaucaucaccuacgagaacuccaccugggucaaccacaccuacgucaacaucaacaacaccaacgucgucgccgagaaggacaagaccuccgucacccucgccggcaacuccucccucugcuccaucuccggcugggccaucuacaccaaggacaacuccauccgcaucggcuccaagggcgacgucuucgucauccgcgagcccuucaucuccugcucccaccucgagugccgcaccuucuuccucacccagggcgcccuccucaacgacaagcacuccaacggcaccgucaaggaccgcucccccuaccgcgcccucauguccugcccccucggcgaggcccccucccccuacaacuccaaguucgaguccgucgccugguccgccuccgccugccacgacggcaugggcuggcucaccaucggcaucuccggccccgacaacggcgccgucgccguccucaaguacaacggcaucaucaccgagaccaucaaguccuggaagaagcgcauccuccgcacccaggaguccgagugcgucugcgucaacggcuccugcuucaccaucaugaccgacggccccuccaacggcgccgccuccuacaagaucuucaagaucgagaagggcaaggucaccaaguccaucgagcucaacgcccccaacuuccacuacgaggagugcuccugcuaccccgacaccggcaccgucaugugcgucugccgcgacaacuggcacggcuccaaccgccccugggucuccuucaaccagaaccucgacuaccagaucggcuacaucugcuccggcgucuucggcgacaacccccgccccaaggacggcaagggcuccugcaaccccgucaccgucgacggcgccgacggcaucaagggcuucuccuacaaguacggcaacggcgucuggaucggccgcaccaaguccaaccgccuccgcaagggcuucgagaugaucugggaccccaacggcuggaccaacaccgacuccgacuucuccgucaagcaggacgucgucgccaucaccgacugguccggcuacuccggcuccuucguccagcaccccgagcucaccggccucgacugcauccgccccugcuucugggucgagcucguccgcggccucccccgcgagaacaccaccaucuggaccuccggcuccuccaucuccuucugcggcgucgacggcgacaccgccaacugguccuggcccgacggcgccgagcuccccuucaccaucgacaaguga

SEQ ID NO: 112399 - RNA, 1413 nt, Artificial Sequence
  derived and/or modified CDS sequence (opt2) from neuraminidase__InfluenzaA__ABY51097
augaaccccaaccagaagaucaucaccaucggcuccaucuccaucgccaucggcaucaucucccucaugcuccagaucggcaacaucaucuccaucugggccucccacuccauccagaccggcucccagaaccacaccggcaucugcaaccagcgcaucaucaccuacgagaacuccaccugggucaaccacaccuacgucuccaucaacaacaccaacgucgucgccggcaaggacaagaccuccgucacccucgccggcaacuccucccucugcuccaucuccggcugggccaucuacaccaaggacaacuccauccgcaucggcuccaagggcgacgucuucgucauccgcgagcccuucaucuccugcucccaccucgagugccgcaccuucuuccucacccagggcgcccuccucaacgacaagcacuccaacggcaccgucaaggaccgcucccccuaccgcgcccucauguccugcccccucggcgaggcccccucccccuacaacuccaaguucgaguccgucgccugguccgccuccgccugccacgacggcaugggcuggcucaccaucggcaucuccggccccgacaacggcgccgucgccguccucaaguacaacggcaucaucaccgagaccaucaaguccuggaagaagcgcauccuccgcacccaggaguccgagugcgucugcgucaacggcuccugcuucaccaucaugaccgacggccccuccaacggcgccgccuccuacaagaucuucaagaucgagaagggcaaggucaccaaguccgucgagcucaacgcccccaacuuccacuacgaggagugcuccugcuaccccgacaccggcaccgucaugugcgucugccgcgacaacuggcacggcuccaaccgccccugggucuccuucaaccagaaccucgacuaccagaucggcuacaucugcuccggcgucuucggcgacaacccccgccccaaggacggcaagggcuccugcaaccccgucaccgucgacggcgccgacggcgucaagggcuucuccuacaaguacggcaacggcgucuggaucggccgcaccaaguccaaccgccuccgcaagggcuucgagaugaucugggaccccaacggcuggaccgacaccgacuccgacuucuccgucaagcaggacgucgucgccaucaccgacugguccggcuacuccggcuccuucguccagcaccccgagcucaccggccucgacugcauccgccccugcuucugggucgagcucguccgcggccucccccgcgagaacaccaccaucuggaccuccggcuccuccaucuccuucugcggcgucgacuccgacaccgccaacugguccuggcccgacggcgccgagcuccccuucaccaucgacaaguga

SEQ ID NO: 112400 - RNA, 1413 nt, Artificial Sequence
  derived and/or modified CDS sequence (opt2) from neuraminidase__InfluenzaA__ABY51108
augaaccccaaccagaagaucaucaccaucggcuccaucuccaucgccaucggcaucaucucccucaugcuccagaucggcaacaucaucuccaucugggccucccacuccauccagaccggcucccagaaccacaccggcaucugcaaccagcgcaucaucaccuacgagaacuccaccugggucaaccacaccuacgucuccaucaacaacaccaacgucgucgccggcaaggacaagaccuccgucacccucgccggcaacuccucccucugcuccaucuccggcugggccaucuacaccaaggacaacuccauccgcaucggcuccaagggcgacgucuucgucauccgcgagcccuucaucuccugcucccaccucgagugccgcaccuucuuccucacccagggcgcccuccucaacgacaagcacuccaacggcaccgucaaggaccgcucccccuaccgcgcccucauguccugcccccucggcgaggcccccucccccuacaacuccaaguucgaguccgucgccugguccgccuccgccugccacgacggcaugggcuggcucaccaucggcaucuccggccccgacaacggcgccgucgccguccucaaguacaacggcaucaucaccgagaccaucaaguccuggaagaagcgcauccuccgcacccaggaguccgagugcgucugcgucaacggcuccugcuucaccaucaugaccgacggccccuccaacggcgccgccuccuacaagaucuucaagaucgagaagggcaaggucaccaaguccaucgagcucaacgcccccaacuuccacuacgaggagugcuccugcuaccccgacaccggcaccgucaugugcgucugccgcgacaacuggcacggcuccaaccgccccugggucuccuucaaccagaaccucgacuaccagaucggcuacaucugcuccggcgucuucggcgacaacccccgccccaaggacggcaagggcuccugcaaccccgucaccgucgacggcgccgacggcgucaagggcuucuccuacaaguacggcaacggcgucuggaucggccgcaccaaguccaaccgccuccgcaagggcuucgagaugaucugggaccccaacggcuggaccgacaccgacuccgacuucuccgucaagcaggacaucgucgccaucaccgacugguccggcuacuccggcuccuucguccagcaccccgagcucaccggccucgacugcauccgccccugcuucugggucgagcucguccgcggccucccccgcgagaacaccaccaucuggaccuccggcuccuccaucuccuucugcggcgucgacuccgacaccgccaacugguccuggcccgacggcgccgagcuccccuucaccaucgacaaguga

SEQ ID NO: 112401 - RNA, 1413 nt, Artificial Sequence; identical to SEQ ID NO: 112066
  derived and/or modified CDS sequence (opt2) from neuraminidase__InfluenzaA__ABY51119

SEQ ID NO: 112402 - RNA, 1410 nt, Artificial Sequence; identical to SEQ ID NO: 111920
  derived and/or modified CDS sequence (opt2) from neuraminidase__InfluenzaA__ABY51130

SEQ ID NO: 112403 - RNA, 1413 nt, Artificial Sequence; identical to SEQ ID NO: 112107
  derived and/or modified CDS sequence (opt2) from neuraminidase__InfluenzaA__ABY51141

SEQ ID NO: 112404 - RNA, 1413 nt, Artificial Sequence
  derived and/or modified CDS sequence (opt2) from neuraminidase__InfluenzaA__ABY51152
augaaccccaaccagaagaucaucaccaucggcuccaucuccaucgccaucggcaucaucucccucaugcuccagaucggcaacaucaucuccaucugggccucccacuccauccagaccggcucccagaaccacaccggcaucugcaaccagcgcaucaucaccuacgagaacuccaccugggucaaccacaccuacgucuccaucaacaacaccaacgucgucgccggcaaggacaagaccuccgucacccucgccggcaacuccucccucugcuccaucuccggcugggccaucuacaccaaggacaacuccauccgcaucggcuccaagggcgacgucuucgucauccgcgagcccuucaucuccugcucccaccucgagugccgcaccuucuuccucacccagggcgcccuccucaacgacaagcacuccaacggcaccgucaaggaccgcucccccuaccgcgcccucauguccugcccccucggcgaggcccccucccccuacaacuccaaguucgaguccgucgccugguccgccuccgccugccacgacggcaugggcuggcucaccaucggcaucuccggccccgacaacggcgccgucgccguccucaaguacaacggcaucaucaccgagaccaucaaguccuggaagaagcgcauccuccgcacccaggaguccgagugcgucugcgucaacggcuccugcuucaccaucaugaccgacggccccuccaacggcgccgccuccuacaagaucuucaagaucgagaagggcaaggucaccaaguccaucgagcucaacgcccccaacuuccacuacgaggagugcuccugcuaccccgacaccggcaccgucaugugcgucugccgcgacaacuggcacggcuccaaccgccccugggucuccuucaaccagaaccucgacuaccagaucggcuacaucugcuccggcgucuucggcgacaacccccgccccaaggacggcaagggcuccugcaaccccgucaccgucgacggcgccgacggcgucaagggcuucuccuacaaguacggcaacggcgucuggaucggccgcaccaaguccaaccgccuccgcaagggcuucgagaugaucugggaccccaacggcuggaccgacaccgacuccgacuucuccgucaagcaggacgucgucgccaucaccgacugguccggcuacuccggcuccuucguccagcaccccgagcucaccggccucgacugcauccgccccugcuucugggucgagcucguccgcggccucccccgcgagaacaccaccaucuggaccuccggcuccuccaucuccuucugcggcgucaacuccgacaccgccaacugguccuggcccgacggcgccgagcuccccuucaccaucgacaaguga

SEQ ID NO: 112405 - RNA, 1413 nt, Artificial Sequence
  derived and/or modified CDS sequence (opt2) from neuraminidase__InfluenzaA__ABY51163
augaaccccaaccagaagaucaucaccaucggcuccaucuccaucgccaucggcaucaucucccucaugcuccagaucggcaacaucaucuccaucugggccucccacuccauccagaccggcucccagaaccacaccggcaucugcaaccagcgcaucaucaccuacgagaacuccaccugggucaaccacaccuacgucaacaucaacaacaccaacgucgucgccggcaaggacaagaccuccgucauccucgccggcaacuccucccucugcuccaucuccggcugggccaucuacaccaaggacaacuccauccgcaucggcuccaagggcgacgucuucgucauccgcgagcccuucaucuccugcucccaccucgagugccgcaccuucuuccucacccagggcgcccuccucaacgacaagcacuccaacggcaccgucaaggaccgcucccccuaccgcgcccucauguccugcccccucggcgaggcccccucccccuacaacuccaaguucgaguccgucgccugguccgccuccgccugccacgacggcaugggcuggcucaccaucggcaucuccggccccgacaacggcgccgucgccguccucaaguacaacggcaucaucaccgagaccaucaaguccuggaagaagcgcauccuccgcacccaggaguccgagugcgucugcgucaacggcuccugcuucaccaucaugaccgacggccccuccaacggcgccgccuccuacaagaucuucaagaucgagaagggcaaggucaccaaguccaucgagcucaacgcccccaacuuccacuacgaggagugcuccugcuaccccgacaccggcaccgucaugugcgucugccgcgacaacuggcacggcuccaaccgccccugggucuccuucaaccagaaccucgacuaccagaucggcuacaucugcuccggcgucuucggcgacaacccccgccccaaggacggcaagggcuccugcaaccccgucaccgucgacggcgccgacggcgucaagggcuucuccuacaaguacggcaacggcgucuggaucggccgcaccaaguccaaccgccuccgcaagggcuucgagaugaucugggaccccaacggcuggaccgacaccgacuccgacuucuccgucaagcaggacgucgucgccaucaccgacugguccggcuacuccggcuccuucguccagcaccccgagcucaccggccucgacugcauccgccccugcuucugggucgagcucguccgcggccucccccgcgagaacaccaccaucuggaccuccggcuccuccaucuccuucugcggcgucgacuccgacaccgccaacugguccuggcccgacggcgccgagcuccccuucaccaucgacaaguga

SEQ ID NO: 112406 - RNA, 1413 nt, Artificial Sequence
  derived and/or modified CDS sequence (opt2) from neuraminidase__InfluenzaA__ABY51174
augaaccccaaccagaagaugaucaccaucggcuccaucuccaucgccaucggcaucaucucccucaugcuccagaucggcaacaucaucuccaucugggccucccacuccauccagaccggcucccagaaccacaccggcaucugcaaccagcgcaucaucaccuacgagaacuccaccugggucaaccacaccuacgucaacaucaacaacaccaacgucgucgccggcaaggacaagaccuccgucacccucgccggcaacuccucccucugcuccaucuccggcugggccaucuacaccaaggacaacuccauccgcaucggcuccaagggcgacgucuucgucauccgcgagcccuucaucuccugcucccaccucgagugccgcaccuucuuccucacccagggcgcccuccucaacgacaagcacuccaacggcaccgucaaggaccgcucccccuaccgcgcccucauguccugcccccucggcgaggcccccucccccuacaacuccaaguucgaguccgucgccugguccgccuccgccugccacgacggcaugggcuggcucaccaucggcaucuccggccccgacaacggcgccgucgccguccucaaguacaacggcaucaucaccgagaccaucaaguccuggaagaagcgcauccuccgcacccaggaguccgagugcgucugcgucaacggcuccugcuucaccaucaugaccgacggccccuccaacggcgccgccuccuacaagaucuucaagaucgagaagggcaaggucaccaaguccaucgagcucaacgcccccaacuuccacuacgaggagugcuccugcuaccccgacaccggcaccgucaugugcgucugccgcgacaacuggcacggcuccaaccgccccugggucuccuucaaccagaaccucgacuaccaggucggcuacaucugcuccggcgucuucggcgacaacccccgccccaaggacggcaagggcuccugcaaccccaugaccgucgacggcgccgacggcgucaagggcuucuccuacaaguacggcaacggcgucuggaucggccgcaccaaguccaacaagcuccgcaagggcuucgagaugaucugggaccccaacggcuggaccgacaccgacuccgacuucuccgucaagcaggacgucgucgccaucaccgacugguccggcuacuccggcuccuucguccagcaccccgagcucaccggccucgacugcauccgccccugcuucugggucgagcucguccgcggccucccccgcgagaacaccaccaucuggaccuccggcuccuccaucuccuucugcggcgucgacuccgacaccgccaacugguccuggcccgacggcgccgagcuccccuucaccaucgacaaguga

SEQ ID NO: 112407 - RNA, 1413 nt, Artificial Sequence; identical to SEQ ID NO: 112066
  derived and/or modified CDS sequence (opt2) from neuraminidase__InfluenzaA__ABY51185

SEQ ID NO: 112408 - RNA, 1413 nt, Artificial Sequence; identical to SEQ ID NO: 112101
  derived and/or modified CDS sequence (opt2) from neuraminidase__InfluenzaA__ABY51196

SEQ ID NO: 112409 - RNA, 1410 nt, Artificial Sequence; identical to SEQ ID NO: 112102
  derived and/or modified CDS sequence (opt2) from neuraminidase__InfluenzaA__ABY51229

SEQ ID NO: 112410 - RNA, 1413 nt, Artificial Sequence
  derived and/or modified CDS sequence (opt2) from neuraminidase__InfluenzaA__ABY51240
augaaccccaaccagaagaucaucaccaucggcuccaucuccaucgccaucggcaucaucucccucaugcuccagaucggcaacaucaucuccgucugggccucccacuccauccagaccggcucccagaaccacaccggcaucugcaaccagcgcaucaucaccuacgagaacuccaccugggucaaccacaccuacgucuccaucaacaacaccaacgucgucgccggcaaggacaagaccuccgucacccucgccggcaacuccucccucugcuccaucuccggcugguccaucuacaccaaggacaacuccauccgcaucggcuccaagggcgacgucuucgucauccgcgagcccuucaucuccugcucccaccucgagugccgcaccuucuuccucacccagggcgcccuccucaacgacaagcacuccaacggcaccgucaaggaccgcucccccuaccgcgcccucauguccugcccccucggcgaggcccccucccccuacaacuccaaguucgaguccgucgccugguccgccuccgccugccacgacggcaugggcuggcucaccaucggcaucuccggccccgacaacggcgccgucgccguccucaaguacaacggcaucaucaccgagaccaucaaguccuggaagaagcgcauccuccgcacccaggaguccgagugcgucugcgucaacggcuccugcuucaccaucaugaccgacggccccuccaacggcgccgccuccuacaagaucuucaagaucgagaagggcaaggucaccaaguccaucgagcucaacgcccccaacuuccacuacgaggagugcuccugcuaccccgacaccggcaccgucaugugcgucugccgcgacaacuggcacggcuccaaccgccccugggucuccuucaaccagaaccucgacuaccagaucggcuacaucugcuccggcgucuucggcgacaacccccgccccaaggacggcaagggcuccugcaaccccgucaccgucgacggcgccgacggcgucaagggcuucuccuacaaguacggcaacggcgucuggaucggccgcaccaaguccaaccgccuccgcaagggcuucgagaugaucugggaccccaacggcuggaccgacaccgacuccgacuucuccgucaagcaggacgucgucgccaucaccgacugguccggcuacuccggcuccuucguccagcaccccgagcucaccggccucgacugcauccgccccugcuucugggucgagcucguccgcggccucccccgcgagaacaccaccaucuggaccuccggcuccuccaucuccuucugcggcgucgacuccgacaccgccaacugguccuggcccgacggcgccgagcuccccuucaccaucgacaaguga

SEQ ID NO: 112411 - RNA, 1413 nt, Artificial Sequence; identical to SEQ ID NO: 112092
  derived and/or modified CDS sequence (opt2) from neuraminidase__InfluenzaA__ABY51251

SEQ ID NO: 112412 - RNA, 1413 nt, Artificial Sequence
  derived and/or modified CDS sequence (opt2) from neuraminidase__InfluenzaA__ABY51262
augaaccccaaccagaagaucaucaccaucggcuccaucuccaucgccaucggcaucaucucccucaugcuccagaucggcaacaucaucuccaucugggccucccacuccauccagaccggcucccagaaccacaccggcaucugcaaccagcgcaucaucaccuacgagaacuccaccugggucaaccacaccuacgucuccaucaacaacaccaacgucgucgccggcaaggacaagaccuccgucacccucgccggcaacuccucccucugcuccaucuccggcugggccaucuacaccaaggacaacuccauccgcaucggcuccaagggcgacgucuucgucauccgcgagcccuucaucuccugcucccaccucgagugccgcaccuucuuccucacccagggcgcccuccucaacgacaagcacuccaacggcaccgucaaggaccgcucccccuaccgcgcccucauguccugcccccucggcgaggcccccucccccuacaacuccaaguucgaguccgucgccugguccgccuccgccugccacgacggcaugggcuggcucaccaucggcaucuccggccccgacaacggcgccgucgccguccucaaguacaacggcaucaucaccgagaccaucaaguccuggaagaagcgcauccuccgcacccaggaguccgagugcgucugcgucaacggcuccugcuucaccaucaugaccgacggccccuccaacggcgccgccuccuacaagaucuucaagaucgagaagggcaaggucaccaaguccaucgagcucaacgcccccaacuuccacuacgaggagugcuccugcuaccccgacaccggcaccgucaugugcgucugccgcgacaacuggcacggcuccaaccgccccugggucuccuucaaccagaaccucgacuaccagaucggcuacaucugcuccggcgucuucggcgacaacccccgccccaaggacggcaagggcuccugcaaccccgucaccgucgacggcgccgacggcgucaagggcuucuccuacaaguacggcaacggcgucuggaucggccgcaccaaguccaaccgccuccgcaagggcuucgagaugaucugggaccccaacggcuggaccgacaccgacuccgacuucuccgucaagcaggacgucgucgccaucaccgacugguccggcuacuccggcuccuucguccagcaccccgagcucaccggccucgacugcauccgccccugcuucugggucgagcucguccgcggccucccccgcgagaacgccaccaucuggaccuccggcuccuccaucuccuucugcggcgucgacuccgacaccgccaacugguccuggcccgacggcgccgagcuccccuucaccaucgacaaguga

SEQ ID NO: 112413 - RNA, 1410 nt, Artificial Sequence; identical to SEQ ID NO: 111920
  derived and/or modified CDS sequence (opt2) from neuraminidase__InfluenzaA__ABY51273

SEQ ID NO: 112414 - RNA, 1350 nt, Artificial Sequence
  derived and/or modified CDS sequence (opt2) from neuraminidase__InfluenzaA__ABY76285
augaaccccaaccagaagaucaucaccaucggcuccaucugcauggucaucggcaucgucucccucaugcuccagaucggcaacaugaucuccaucugggucucccacuccauccagaccggcaaccagcgccaggccgagcccaucuccaacaccaaguuccucaccgagaaggccgucgccuccgucacccucgccggcaacuccucccucugccccaucuccggcugggccgucuacuccaaggacaacuccauccgcaucggcuccaagggcgacgucuucgucauccgcgagcccuucaucuccugcucccaccucgagugccgcaccuucuuccucacccagggcgcccuccucaacgacaagcacuccaacggcaccgucaaggaccgcuccccccaccgcacccucauguccugccccgucggcgaggcccccucccccuacaacucccgcuucgaguccgucgccugguccgccuccgccugccacgacggcaccuccuggcucaccaucggcaucuccggccccgacaacggcgccgucgccguccucaaguacaacggcaucaucaccgacaccaucaaguccuggcgcaacaacauccuccgcacccaggaguccgagugcgccugcgucaacggcuccugcuucaccgucaugaccgacggccccuccaacggccaggccuccuacaagaucuucaagauggagaagggcaaggucgucaaguccgucgagcucgacgcccccaacuaccacuacgaggagugcuccugcuaccccgacgccggcgagaucaccugcgucugccgcgacaacuggcacggcuccaaccgccccugggucuccuucaaccagaaccucgaguaccagaucggcuacaucugcuccggcgucuucggcgacaacccccgccccaacgacggcaccggcuccugcggccccgucucccccaacggcgccuacggcgucaagggcuucuccuucaaguacggcaacggcgucuggaucggccgcaccaaguccaccaacucccgcuccggcuucgagaugaucugggaccccaacggcuggaccggcaccgacuccuccuucuccgucaagcaggacaucgucgccaucaccgacugguccggcuacuccggcuccuucguccagcaccccgagcucaccggccucgacugcauccgccccugcuucugggucgagcucauccgcggccgccccaaggaguccaccaucuggaccuccggcuccuccaucuccuucugcggcgucaacuccgacaccgucuccugguccuggcccgacggcgccgagcuccccuucaccaucgacaaguga

SEQ ID NO: 112415 - RNA, 1413 nt, Artificial Sequence
  derived and/or modified CDS sequence (opt2) from neuraminidase__InfluenzaA__ABY81352
augaaccccaaccagaagaucaucaccaucggcuccaucugcauggccaucggcaucaucucccucauccuccagaucggcuccaucaucuccaucugggucucccacuccauccagaccggcucccagaaccacaccggcaucugcaaccagcgcaucaucaccuacgagaacuccaccugggucaaccagaccuacgucaacaucuccaacaccaacgucgucgccggcaaggacaccaccuccaugacccucgccggcaacuccucccucugccccauccgcggcugggccaucuacuccaaggacaacuccauccgcaucggcuccaagggcgacgucuucgucauccgcgagcccuucaucuccugcucccaccucgagugccgcaccuucuuccucacccagggcgcccuccucaacgacaagcacuccaacggcaccgucaaggaccgcucccccuaccgcgcccucauguccugccccaucggcgaggcccccucccccuacaacucccgcuucgaguccgucgccugguccgccuccgccugccacgacggcaugggcuggcucaccaucggcaucuccggccccgacgacggcgccgucgccguccucaaguacaacggcaucaucaccgagaccaucaaguccuggcgcaagcagauccuccgcacccaggaguccgagugcgucugcgucaacggcuccugcuucaccaucaugaccgacggccccuccgacggccaggccuccuaccgcaucuucaagaucgagaagggcaagaucaccaaguccaucgagcucgacgcccccaacucccacuacgaggagugcuccugcuaccccgacaccggcaccgucaugugcgucugccgcgacaacuggcacggcuccaaccgccccugggucuccuucaaccagaaccucgacuaccagaucggcuacaucugcuccggcgucuucggcgacaacccccgccccaaggacggcaagggcuccugcgaccccgucaacgucgacggcgccgacggcgucaagggcuucuccuaccgcuacggcaacggcgucuggaucggccgcaccaaguccaacuccucccgcaagggcuucgagaugaucugggaccccaacggcuggaccgacaccgacuccaacuuccucgucaagcaggacgucgucgccaugaccgacugguccggcuacuccggcuccuucguccagcaccccgagcucaccggccucgacugcaugcgccccugcuucugggucgagcucauccgcggccgcccccgcgagaagaccaccaucuggaccuccggcuccuccaucuccuucugcggcgucaacuccgacaccgucaacugguccuggcccgacggcgccgagcuccccuucaccaucgacaaguga

SEQ ID NO: 112416 - RNA, 1413 nt, Artificial Sequence
  derived and/or modified CDS sequence (opt2) from neuraminidase__InfluenzaA__ABY81363
augaaccccaaccagaagaucaucaccaucggcuccaucuccaucgccaucggcaucaucucccucaugcuccagaucggcaacaucaucuccaucugggccucccacuccauccagaucggcucccagaaccacaccggcaucugcaaccagcgcaucaucaccuacgagaacuccaccugggucaaccacaccuacgucuccaucaacaacaccaacgucgucgccggcaaggacaagaccuccgucacccucgccggcaacuccucccucugcuccaucuccggcugggccaucuacaccaaggacaacuccauccgcaucggcuccaagggcgacgucuucgucauccgcgagcccuucaucuccugcucccaccucgagugccgcaccuucuuccucacccagggcgcccuccucaacgacaagcacuccaacggcaccgucaaggaccgcucccccuaccgcgcccucauguccugcccccucggcgaggcccccucccccuacaacuccaaguucgaguccgucgccugguccgccuccgccugccacgacggcaugggcuggcucaccaucggcaucuccggccccgacaacggcgccgucgccguccucaaguacaacggcaucaucaccgagaccaucaaguccuggaagaagcgcauccuccgcacccaggaguccgagugcgucugcgucaacggcuccugcuucaccaucaugaccgacggccccuccaacggcgccgccuccuacaagaucuucaagaucgagaagggcaaggucaccaaguccaucgagcucaacgcccccaacuuccacuacgaggagugcuccugcuaccccgacaccggcaccgucaugugcgucugccgcgacaacuggcacggcuccaaccgccccugggucuccuucaaccagaaccucgacuaccagaucggcuacaucugcuccggcgucuucggcgacaacccccgccccaaggacggcaagggcuccugcaaccccgucaccgucgacggcgccgacggcgucaagggcuucuccuacaaguacggcaacggcgucuggaucggccgcaccaaguccaaccgccuccgcaagggcuucgagaugaucugggaccccaacggcuggaccgacaccgacuccgacuucuccgucaagcaggacgucgucgccaucaccgacugguccggcuacuccggcuccuucguccagcaccccgagcucaccggccucgacugcauccgccccugcuucugggucgagcucguccgcggccucccccgcgagaacaccaccaucuggaccuccggcuccuccaucuccuucugcggcgucgacuccgacaccgccaacugguccuggcccgacggcgccgagcuccccuucaccaucgacaaguga

SEQ ID NO: 112417 - RNA, 1410 nt, Artificial Sequence; identical to SEQ ID NO: 112102
  derived and/or modified CDS sequence (opt2) from neuraminidase__InfluenzaA__ABY81374

SEQ ID NO: 112418 - RNA, 1413 nt, Artificial Sequence; identical to SEQ ID NO: 112066
  derived and/or modified CDS sequence (opt2) from neuraminidase__InfluenzaA__ABY81385

SEQ ID NO: 112419 - RNA, 1413 nt, Artificial Sequence
  derived and/or modified CDS sequence (opt2) from neuraminidase__InfluenzaA__ABY81407
augaaccccaaccagaagaucaucaccaucggcuccaucuccaucgccaucggcaccaucucccucaugcuccagaucggcaacaucaucuccaucugggccucccacuccauccagaccggcucccagaaccacaccggcaucugcaaccagcgcaucaucaccuacgagaacuccaccugggucaaccacaccuacgucuccaucaacaacaccaacgucgucgccggcaaggacaagaccuccgucacccucgccggcaacuccucccucugcuccaucuccggcugggccaucuacaccaaggacaacuccauccgcaucggcuccaagggcgacgucuucgucauccgcgagcccuucaucuccugcucccaccucgagugccgcaccuucuuccucacccagggcgcccuccucaacgacaagcacuccaacggcaccgucaaggaccgcucccccuaccgcgcccucauguccugcccccucggcgaggcccccucccccuacaacuccaaguucgaguccgucgccugguccgccuccgccugccacgacggcaugggcuggcucaccaucggcaucuccggccccgacaacggcgccgucgccguccucaaguacaacggcaucaucaccgagaccaucaaguccuggaagaagcgcauccuccgcacccaggaguccgagugcgucugcgucaacggcuccugcuucaccaucaugaccgacggccccuccaacggcgccgccuccuacaagaucuucaagaucgagaagggcaaggucaccaaguccaucgagcucaacgcccccaacuuccacuacgaggagugcuccugcuaccccgacaccggcaccgucaugugcgucugccgcgacaacuggcacggcuccaaccgccccugggucuccuucaaccagaaccucgacuaccagaucggcuacaucugcuccggcgucuucggcgacaacccccgccccaaggacggcaagggcuccugcaaccccgucaccgucgacggcgccgacggcgucaagggcuucuccuacaaguacggcaacggcgucuggaucggccgcaccaaguccaaccgccuccgcaagggcuucgagaugaucugggaccccaacggcuggaccgacaccgacuccgacuuccucgucaagcaggacgucgucgccaucaccgacugguccggcuacuccggcuccuucguccagcaccccgagcucaccggccucgacugcauccgccccugcuucugggucgagcucguccgcggccucccccgcgagaacaccaccaucuggaccuccggcuccuccaucuccuucugcggcgucgacuccgacaccgccaacugguccuggcccgacggcgccgagcuccccuucaccaucgacaaguga

SEQ ID NO: 112420 - RNA, 1410 nt, Artificial Sequence; identical to SEQ ID NO: 112102
  derived and/or modified CDS sequence (opt2) from neuraminidase__InfluenzaA__ACA24505

SEQ ID NO: 112421 - RNA, 1413 nt, Artificial Sequence; identical to SEQ ID NO: 112066
  derived and/or modified CDS sequence (opt2) from neuraminidase__InfluenzaA__ACA24516

SEQ ID NO: 112422 - RNA, 1413 nt, Artificial Sequence; identical to SEQ ID NO: 112066
  derived and/or modified CDS sequence (opt2) from neuraminidase__InfluenzaA__ACA24527

SEQ ID NO: 112423 - RNA, 1410 nt, Artificial Sequence
  derived and/or modified CDS sequence (opt2) from neuraminidase__InfluenzaA__ACA24692
augaaccccaaccagaagaucaucaccaucggcuccgucucccucaccaucuccaccaucugcuucuucaugcagaucgccauccucaucaccaccgucacccuccacuucaagcaguacgaguucucccccccccccaacaaccaggucaugcucugcgagcccaccaucaucgagcgcaacaucaccgagaucgucuaccucaccaacaccaccaucgagaaggagaucugccccaagcucgccgaguaccgcaacugguccaagccccagugcgacaucaccggcuucgcccccuucuccaaggacaacuccauccgccucuccgccggcggcgacaucugggucacccgcgagcccuacgucuccugcgaccccgacaagugcuaccaguucgcccucggccagggcaccacccucaacaacguccacuccaacgacaccguccacgaccgcacccccuaccgcacccuccucaugaacgagcucggcguccccuuccaccucggcaccaagcaggucugcaucgccugguccuccuccuccugccacgacggcaaggccuggcuccacgucugcgucaccggcgacgacaagaacgccaccgccuccuucaucuacaacggccgccucgucgacuccaucgucuccugguccaaggagauccuccgcacccaggaguccgagugcgucugcaucaacggcaccugcaccgucgucaugaccgacggcuccgccuccggcaaggccgacaccaagauccucuucaucgaggagggcaagaucguccacaccuccacccucuccggcuccgcccagcacgucgaggagugcuccugcuacccccgcuaccccggcguccgcugcgucugccgcgacaacuggaagggcuccaaccgccccaucgucgacaucaacaucaaggacuacuccaucgucuccaaguacgucugcuccggccucgucggcgacaccccccgcaagaacgacuccuccuccuccucccacugccucgaccccaacaacgaggagggcggccacggcgucaagggcugggccuucgacgacggcaacgacgucuggaugggccgcaccaucuccgagaagucccgcuccggcuacgagaccuucaaggucaucgagggcugguccaaccccaacuccaagcuccagaucaaccgccaggucaucgucgaccgcggcaaccgcuccggcuacuccggcaucuucuccgucgagggcaaguccugcaucaaccgcugcuucuacgucgagcucauccgcggccgcaacgaggagaccgagguccucuggaccuccaacuccaucgucgucuucugcggcaccuccggcaccuacggcaccggcuccuggcccgacggcgccgacaucaaccucaugcccaucuga

SEQ ID NO: 112424 - RNA, 1410 nt, Artificial Sequence
  derived and/or modified CDS sequence (opt2) from neuraminidase__InfluenzaA__ACA24703
augaaccccaaccagaagaucaucaccaucggcuccgucucccucaccaucuccaccaucugcuucuucaugcagaucgccauccucaucaccaccgucacccuccacuucaagcaguacgaguucuccuccccccccaacaaccaggucaugcucugcgagcccaccaucaucgagcgcaacaucaccgagaucgucuaccucaccaacaucaccaucgagaaggagaccugccccaagcucgccgaguaccgcaacugguccaagccccagugcgacaucaccggcuucgcccccuucuccaaggacaacuccauccgccucuccgccggcggcgacaucugggucacccgcgagcccuacgucuccugcgaccccgacaagugcuaccaguucgcccucggccagggcaccacccucaacaacguccacuccaacgacaccguccacgaccgcacccccuaccgcacccuccucaugaacgagcucggcguccccuuccaccucggcaccaagcaggucugcaucgccugguccuccuccuccugccacgacggcaaggccuggcuccacgucugcgucaccggcgacgacaagaacgccaccgccuccuucaucuacaacggccgccucgucgacuccaucgucuccugguccaaggagauccuccgcacccaggaguccgagugcgucugcaucaacggcaccugcaccgucgucaugaccgacggcuccgccuccggcaacgccgacaccaagauccucuucaucgaggagggcaagaucguccacaccuccacccucuccggcuccgcccagcacgucgaggagugcuccugcuacccccgcuaccccggcguccgcugcgucugccgcgacaacuggaagggcuccaaccgccccaucgucgacaucaacaucaaggacuacuccaucgucucccgcuacgucugcuccggccucgucggcgacaccccccgcaagaacgacuccuccuccuccucccacugccucgaccccaacaacgaggagggcggccacggcgucaagggcugggccuucgacgacggcaacgacgucuggaugggccgcaccaucuccgagaagucccgcuccggcuacgagaccuucaaggucaucgagggcugguccaaccccaacuccaagcuccagaucaaccgccaggucaucgucgaccgcggcaaccgcuccggcuacuccggcaucuucuccgucgagggcaaguccugcaucaaccgcugcuucuacgucgagcucauccgcggccgcaaggaggagaccgagguccucuggaccuccaacuccaucgucgucuucugcggcaccuccggcaccuacggcaccggcuccuggcccgacggcgccgacaucaaccucaugcccaucuga

SEQ ID NO: 112425 - RNA, 1413 nt, Artificial Sequence
  derived and/or modified CDS sequence (opt2) from neuraminidase__InfluenzaA__ACA33539
augaaccccuaccagaagaucaucaccaucggcuccaucuccaucgccaucggcaucaucucccucaugcuccagaucggcaacaucaucuccaucugggccucccacuccauccagaccggcucccagaaccacaccggcaucugcaaccagcgcaucaucaccuacgagaacuccaccugggucaaccacaccuacgucuccaucaacaacaccaacgucgucgccggcaaggacaagaccuccgucacccucgccggcaacuccucccucugcuccaucuccggcugggccaucuacaccaaggacaacuccauccgcaucggcuccaagggcgacgucuucgucauccgcgagcccuucaucuccugcucccaccucgagugccgcaccuucuuccucacccagggcgcccuccucaacgacaagcacuccaacggcaccgucaaggaccgcucccccuaccgcgcccucauguccugcccccucggcgaggcccccucccccuacaacuccaaguucgaguccgucgccugguccgccuccgccugccacgacggcaugggcuggcucaccaucggcaucuccggccccgacaacggcgccgucgccguccucaaguacaacggcaucaucaccgagaccaucaaguccuggaagaagcgcauccuccgcacccaggaguccgagugcgucugcgucaacggcuccugcuucaccaucaugaccgacggccccuccaacggcgccgccuccuacaagaucuucaagaucgagaagggcaaggucaccaaguccaucgagcucaacgcccccaacuucuacuacgaggagugcuccugcuaccccgacaccggcaccgucaugugcgucugccgcgacaacuggcacggcuccaaccgccccugggucuccuucaaccagaaccucgacuaccagaucggcuacaucugcuccggcgucuucggcgacaacccccgccccaaggacggcaagggcuccugcaaccccgucaccgucgacggcgccgacggcgucaagggcuucuccuacaaguacggcaacggcgucuggaucggccgcaccaaguccaaccgccuccgcaagggcuucgagaugaucugggaccccaacggcuggaccgacaccgacuccgacuucuccgucaagcaggacgucgucgccaucaccgacugguccggcuacuccggcuccuucguccagcaccccgagcucaccggccucgacugcauccgccccugcuucugggucgagcucguccgcggccucccccgcgagaacaccaccaucuggaccuccggcuccuccaucuccuucugcggcgucgacuccgacaccgccaacugguccuggcccgacggcgccgagcuccccuucaccaucgacaaguga

SEQ ID NO: 112426 - RNA, 1413 nt, Artificial Sequence
  derived and/or modified CDS sequence (opt2) from neuraminidase__InfluenzaA__ACA33540
augaaccccaaccagaagaucaucaccaucggcuccaucuccaucgccaucggcaucaucucccucaugcuccagaucggcaacaucaucuccaucugggccucccacuccauccagaccggcucccagaaccacaccggcaucugcaaccagcgcaucaucaccuacgagaacuccaccugggucaaccacaccuacgucuccaucaacaacaccaacgucgucgccggcaaggacaagaccuccgucacccucgccggcaacuccucccucugcuccaucuccggcugggccaucuacaccaaggacaacuccauccgcaucggcuccaagggcgacgucuucgucauccgcgagcccuucaucuccugcucccaccucgagugccgcaccuucuuccucacccagggcgcccuccucaacgacaagcacuccaacggcaccgucaaggaccgcucccccuaccgcgcccucauguccugcccccucggcgaggcccccucccccuacaacuccaaguucgaguccgucgccugguccgccuccgccugccacgacggcaugggcuggcucaccaucggcaucuccggccccgacaacggcgccgucgccguccucaaguacaacggcaucaucaccgagaccaucaaguccuggaagaagcgcauccuccgcacccaggaguccgagugcgucugcgucaacggcuccugcuucaccaucaugaccgacggccccuccaacggcgccgccuccuacaagaucuucaagaucgagaagggcaaggucaccaaguccaucgagcucaacgcccccaacuucuacuacgaggagugcuccugcuaccccgacaccggcaccgucaugugcgucugccgcgacaacuggcacggcuccaaccgccccugggucuccuucaaccagaaccucgacuaccagaucggcuacaucugcuccggcgucuucggcgacaacccccgccccaaggacggcaagggcuccugcaaccccgucaccgucgacggcgccgacggcgucaagggcuucuccuacaaguacggcaacggcgucuggaucggccgcaccaaguccaaccgccuccgcaagggcuucgagaugaucugggaccccaacggcuggaccgacaccgacuccgacuucuccgucaagcaggacgucgucgccaucaccgacugguccggcuacuccggcuccuucguccagcaccccgagcucaccggccucgacugcauccgccccugcuucugggucgagcucguccgcggccucccccgcgagaacaccaccaucuggaccuccggcuccuccaucuccuucugcggcgucgacuccgacaccgccaacugguccuggcccgacggcgccgagcuccccuucaccaucgacaaguga

SEQ ID NO: 112427 - RNA, 1413 nt, Artificial Sequence
  derived and/or modified CDS sequence (opt2) from neuraminidase__InfluenzaA__ACA33582
augaaccccaaccagaagaucaucaccaucggcuccaucuccaucgccaucggcaucaucucccucaugcuccagaucggcaacaucaucuccaucugggccucccacuccauccagaccggcucccagaaccacaccggcaucugcaaccagcgcaucaucaccuacgagaacuccaccugggucaaccacaccuacgucuccaucaacaacaccaacgucgucgccggcaaggacaagaccuccgucacccucgccggcaacuccucccucugcuccaucuccggcugggccaucuacaccaaggacaacuccauccgcaucggcuccaagggcgacgucuucgucauccgcgagcccuucaucuccugcucccaccucgagugccgcaccuucuuccucacccagggcgcccuccucaacgacaagcacuccaacggcaccgucaaggaccgcucccccuaccgcgcccucauguccugcccccucggcgaggcccccucccccuacaacuccaaguucgaguccgucgccugguccgccuccgccugccacgacggcaugggcuggcucaccaucggcaucuccggccccgacaacggcgccgucgccguccucaaguacaacggcaucaucaccgagaccaucaaguccuggaagaagcgcauccuccgcacccaggaguccgagugcgucugcgucaacggcuccugcuucaccaucaugaccgacggccccuccaacggcgccgccuccuacaagaucuucaagaucgagaagggcaaggucaccaaguccaucgagcucaacgcccccaacuucuacuacgaggagugcuccugcuaccccgacaccggcaccgucaugugcgucugccgcgacaacuggcacggcuccaaccgccccugggucuccuucaaccagaaccucgacuaccagaucggcuacaucugcuccggcgucuucggcgacaacccccgccccaaggacggcaagggcuccugcaaccccaugaccgucgacggcgccgacggcgucaagggcuucuccuacaaguacggcaacggcgucuggaucggccgcaccaaguccaaccgccuccgcaagggcuucgagaugaucugggaccccaacggcuggaccgacaccgacuccgacuucuccgucaagcaggacgucgucgccaucaccgacugguccggcuacuccggcuccuucguccagcaccccgagcucaccggccucgacugcauccgccccugcuucugggucgagcucguccgcggccucccccgcgagaacaccaccaucuggaccuccggcuccuccaucuccuucugcggcgucgacuccgacaccgccaacugguccuggcccgacggcgccgagcuccccuucaccaucgacaaguga

SEQ ID NO: 112428 - RNA, 1413 nt, Artificial Sequence
  derived and/or modified CDS sequence (opt2) from neuraminidase__InfluenzaA__ACA33622
augaaccccaaccagaagaucaucaccaucggcuccaucuccaucgccaucggcaucaucucccucaugcuccagaucggcaacaucaucuccaucugggccucccacuccauccagaccggcucccagaaccacaccggcaucugcaaccagcgcaucaucaccuacgagaacuccaccugggucaaccacaccuacgucaacaucaacaacaccaacgucgucgccggcaaggacaagaccuccgucacccucgccggcaacuccucccucugcuccaucuccggcugggccaucuacaccaaggacaacuccauccgcaucggcuccaagggcgacgucuucgucauccgcgagcccuucaucuccugcucccaccucgagugccgcaccuucuuccucacccagggcgcccuccucaacgacaagcacuccaacggcaccgucaaggaccgcucccccuaccgcgcccucauguccugcccccucggcgaggcccccucccccuacaacuccaaguucgaguccgucgccugguccgccuccgccugccacgacggcaugggcuggcucaccaucggcaucuccggccccgacaacggcgccgucgccguccucaaguacaacggcaucaucaccgagaccaucaaguccuggaagaagcgcauccuccgcacccaggaguccgagugcgucugcgucaacggcuccugcuucaccaucaugaccgacggccccuccaacggcgccgccuccuacaagaucuucaagaucgagaagggcaaggucaccaaguccaucgagcucaacgcccccaacuucuacuacgaggagugcuccugcuaccccgacaccggcaccgucaugugcgucugccgcgacaacuggcacggcuccaaccgccccugggucuccuucaaccagaaccucgacuaccagaucggcuacaucugcuccggcgucuucggcgacaacccccgccccaaggacggcaagggcuccugcaaccccgucaccgucgacggcgccgacggcgucaagggcuucuccuacaaguacggcaacggcgucuggaucggccgcaccaaguccaaccgccuccgcaagggcuucgagaugaucugggaccccaacggcuggaccaacaccgacuccgacuucuccgucaagcaggacgucgucgccaucaccgacugguccggcuacuccggcuccuucguccagcaccccgagcucaccggccucgacugcauccgccccugcuucugggucgagcucguccgcggccucccccgcgagaacaccaccaucuggaccuccggcuccuccaucuccuucugcggcgucgacuccgacaccgccaacugguccuggcccgacggcgccgagcuccccuucaccaucgacaaguga

SEQ ID NO: 112429 - RNA, 1413 nt, Artificial Sequence; identical to SEQ ID NO: 112105
  derived and/or modified CDS sequence (opt2) from neuraminidase__InfluenzaA__ACA96522

SEQ ID NO: 112430 - RNA, 1362 nt, Artificial Sequence
  derived and/or modified CDS sequence (opt2) from neuraminidase__InfluenzaA__ACC55274
augaaccccaaccagaagaucaucaccaucggcuccgucucccucaccaucgccaccgucugcuuccucaugcagaucgccauccucgccaugaccgucacccuccacuuccgccagaacgagugcuccaucuccgccaacucccaggucguccccugcgagcccaccaccgagaaggaggucugcuccaaggucgucgacuaccgcuccugguccaagccccagugccagaucaccggcuucgcccccuucuccaaggacaacuccauccgccucuccgccggcggcgacaucuggaucacccgcgagcccuacgucuccugcgacaccuccaagugcuaccaguucgcccucggccagggcaccacccucgacaacgagcacuccaacggcaccauccacgaccgcaucccccaccgcacccuccucaugaacgagcucggcguccccuuccaccucggcacccgccaggucugcaucgccugguccuccuccuccugccacgacggcaaggccuggcuccacgucugcgucaccggcgacgaccgcaacgccaccgccuccuucaucuacaacggcaugcucgucgacuccaucggcuccuggucccagaacauccuccgcacccaggaguccgagugcgucugcaucaacggcuccugcaccgucgucaugaccgacggcuccgccuccggcaaggccgacacccgcauccucuucgucaaggagggcaagaucguccacaucuccccccucuccggcuccgcccagcacaucgaggagugcuccugcuacccccgcuaccccaacguccgcugcgucugccgcgacaacuggaagggcuccaaccgccccgucaucgacaucaacaugaccgacuacuccaucgacuccuccuacgucugcuccggccucgucggcgacaccccccgcaacgaggacuccuccuccuccuccaacugccgcgaccccaacgaggagcgcggcaaccccggcgucaagggcugggccuucgacuccggcgacgacgucuggaugggccgcaccaucucccgcgacucccgcuccggcuacgagaccuuccgcgucaucggcggcuggaccaccgccaacuccaagucccagaccaaccgccaggucaucgucgacaacaacaacugguccggcuacuccggcaucuucuccgucgagcacaaguccugcaucaaccgcugcuucuacgucgagcucauccgcggccgccccaaggagacccgcgucugguggaccuccaacuccaucgucgucuucugcggcaccuccggcaccuacggcaccggcuccuggcccgacggcgccaacaucaacuucaugcccaucuga

SEQ ID NO: 112431 - RNA, 1413 nt, Artificial Sequence; identical to SEQ ID NO: 112365
  derived and/or modified CDS sequence (opt2) from neuraminidase__InfluenzaA__ACC61967

SEQ ID NO: 112432 - RNA, 1413 nt, Artificial Sequence
  derived and/or modified CDS sequence (opt2) from neuraminidase__InfluenzaA__ACD11077
augaaccccaaccagaagaucaucaccaucggcuccaucugcauggccaucggcaucaucucccucauccuccagaucggcaacaucaucuccaucugggucucccacuccauccagaccggcucccagaaccacaccggcaucugcaaccagcgcaucaucaccuacgagaacuccaccugggucaaccagaccuacgucaacaucuccaacaccaacgucgucgccggcaaggucaccaccuccaugacccucgccggcaacuccucccucugccccauccgcggcugggccaucuacuccaaggacaacuccauccgcaucggcuccaagggcgacgucuucgucauccgcgagcccuucaucuccugcucccaccucgagugccgcaccuucuuccucacccagggcgcccuccucaacgacaagcacuccaacggcaccgucaaggaccgcucccccuaccgcgcccucauguccugccccaucggcgaggcccccucccccuacaacucccgcuucgaguccgucgccugguccgccuccgccugccacgacggcaugggcuggcucaccaucggcaucuccggccccgacgacggcgccgucgccguccucaaguacaacggcaucaucaccgagaccaucaaguccuggcgcaagcagauccuccgcacccaggaguccgagugcgucugcgucaacggcuccugcuucaccaucaugaccgacggccccuccgacggccccgccuccuaccgcaucuucaagaucgagaagggcaagaucaccaaguccaucgagcucgacgcccccaacucccacuacgaggagugcuccugcuaccccgacaccggcaccgucaugugcgucugccgcgacaacuggcacggcuccaaccgccccugggucuccuucaaccagaaccucgacuaccagaucggcuacaucugcuccggcgucuucggcgacaacccccgccccaaggacggcaagggcuccugcgaccccgucaacgucgacggcgccgacggcgucaagggcuucuccuaccgcuacggcaacggcgucuggaucggccgcaccaaguccaacaacucccgcaagggcuucgagaugaucugggaccccaacggcuggaccgacaccgacuccaacuuccucgucaagcaggacgucgucgccaugaccgacugguccggcuacuccggcuccuucguccagcaccccgagcucaccggccucgacugcaugcgccccugcuucugggucgagcucauccgcggccgcccccgcgagaagaccaccaucuggaccuccggcuccuccaucuccuucugcggcgucaacuccgacaccgucaacugguccuggcccgacggcgccgagcucccccucaccaucgacaaguga

SEQ ID NO: 112433 - RNA, 1413 nt, Artificial Sequence
  derived and/or modified CDS sequence (opt2) from neuraminidase__InfluenzaA__ACD11078
augaaccccaaccagaagaucaucaccaucggcuccaucugcauggccaucggcaucaucucccucauccuccagaucggcaacaucaucuccaucugggucucccacuccauccagaccggcucccagaaccacaccggcaucugcaaccagcgcaucaucaccuacgagaacuccaccugggucaaccagaccuacgucaacaucuccaacaccaacgucgucgccggcaaggacaccaccuccaugacccucgccggcaacuccucccucugccccauccgcggcugggccaucuacuccaaggacaacuccauccgcaucggcuccaagggcgacgucuucgucauccgcgagcccuucaucuccugcucccaccucgagugccgcaccuucuuccucacccagggcgcccuccucaacgacaagcacuccaacggcaccgucaaggaccgcucccccuaccgcgcccucauguccugccccaucggcgaggcccccucccccuacaacucccgcuucgaguccgucgccugguccgccuccgccugccacgacggcaugggcuggcucaccaucggcaucuccggccccgacgacggcgccgucgccguccucaaguacaacggcaucaucaccgagaccaucaaguccuggcgcaagcagauccuccgcacccaggaguccgagugcgucugcgucaacggcuccugcuucaccaucaugaccgacggccccuccgacggccccgccuccuaccgcaucuucaagaucgagaagggcaagaucaccaaguccaucgagcucgacgcccccaacucccacuacgaggagugcuccugcuaccccgacaccggcaccgucaugugcgucugccgcgacaacuggcacggcuccaaccgccccugggucuccuucaaccagaaccucgacuaccagaucggcuacaucugcuccggcgucuucggcgacaacccccgccccaaggacggcaagggcuccugcgaccccgucaacgucgacggcgccgacggcgucaagggcuucuccuaccgcuacggcaacggcgucuggaucggccgcaccaaguccaacuccucccgcaagggcuucgagaugaucugggaccccaacggcuggaccgacaccgacuccaacuuccucgucaagcaggacgucgucgccaugaccgacugguccggcuacuccggcuccuucguccagcaccccgagcucaccggccucgacugcaugcgccccugcuucugggucgagcucauccgcggccgcccccgcgagaagaccaccaucuggaccuccggcuccuccaucuccuucugcggcgucaacuccgacaccgucaacugguccuggcccgacggcgccgagcucccccucaccaucgacaaguga

SEQ ID NO: 112434 - RNA, 1413 nt, Artificial Sequence
  derived and/or modified CDS sequence (opt2) from neuraminidase__InfluenzaA__ACD11079
augaaccccaaccagaagaucaucaccaucggcuccaucugcauggccaucggcaucaucucccucauccuccagaucggcaacaucaucuccaucugggucucccacuccauccagaccggcucccagaaccacaccggcaucugcaaccagcgcaucaucaccuacgagaacuccaccugggucaaccagaccuacgucaacaucuccaacaccaacgucgucgccggcaaggacaccaccuccaugacccucgccggcaacuccucccucugccccauccgcggcugggccaucuacuccaaggacaacuccauccgcaucggcuccaagggcgacgucuucgucauccgcgagcccuucaucuccugcucccaccucgagugccgcaccuucuuccucacccagggcgcccuccucaacgacaagcacuccaacggcaccgucaaggaccgcucccccuaccgcgcccucauguccugccccaucggcgaggcccccucccccuacaacucccgcuucgaguccgucgccugguccgccuccgccugccacgacggcaugggcuggcucaccaucggcaucuccggccccgacgacggcgccgucgccgucaucaaguacaacggcaucaucaccgagaccaucaaguccuggcgcaagcagauccuccgcacccaggaguccgagugcgucugcgucaacggcuccugcuucaccaucaugaccgacggccccuccgacggccccgccuccuaccgcaucuucaagaucgagaagggcaagaucaccaaguccaucgagcucgacgcccccaacucccacuacgaggagugcuccugcuaccccgacaccggcaccgucaugugcgucugccgcgacaacuggcacggcuccaaccgccccugggucuccuucaaccagaaccucgacuaccagaucggcuacaucugcuccggcgucuucggcgacaacccccgccccaaggacggcaagggcuccugcgaccccgucaacgucgacggcgccgacggcgucaagggcuucuccuaccgcuacggcaacggcgucuggaucggccgcaccaaguccaacuccucccgcaagggcuucgagaugaucugggaccccaacggcuggaccgacaccgacuccaacuuccucgucaagcaggacgucgucgccaugaccgacugguccggcuacuccggcuccuucguccagcaccccgagcucaccggccucgacugcaugcgccccugcuucugggucgagcucauccgcggccgcccccgcgagaagaccaccaucuggaccuccggcuccuccaucuccuucugcggcgucaacuccgacaccgucaacugguccuggcccgacggcgccgagcucccccucaccaucgacaaguga

SEQ ID NO: 112435 - RNA, 1413 nt, Artificial Sequence; identical to SEQ ID NO: 112066
  derived and/or modified CDS sequence (opt2) from neuraminidase__InfluenzaA__ACD56116

SEQ ID NO: 112436 - RNA, 1413 nt, Artificial Sequence; identical to SEQ ID NO: 112066
  derived and/or modified CDS sequence (opt2) from neuraminidase__InfluenzaA__ACD56127

SEQ ID NO: 112437 - RNA, 1410 nt, Artificial Sequence; identical to SEQ ID NO: 111920
  derived and/or modified CDS sequence (opt2) from neuraminidase__InfluenzaA__ACD56261

SEQ ID NO: 112438 - RNA, 1410 nt, Artificial Sequence
  derived and/or modified CDS sequence (opt2) from neuraminidase__InfluenzaA__ACD56272
augaaccccaaccagaagaucaucaccaucggcuccgucucccucaccaucuccaccaucugcuucuucaugcagaucgccauccucaucaccaccgucacccuccacuucaagcaguacgaguucuccuccccccccaacaaccaggucaugcucugcgagcccaccaucaucgagcgcaacaucaccgagaucgucuaccucaccaacaccaccaucgagaaggagaucugccccaagcucgccgaguaccgcaacugguccaagccccagugcgacaucaccggcuucgcccccuucuccaaggacaacuccauccgccucuccgccggcggcgacaucugggucacccgcgagcccuacgucuccugcgaccccgacaagugcuaccaguucgcccucggccagggcaccacccucaacaacguccacuccaacgacaccguccacgaccgcacccccuaccgcacccuccucaugaacgagcucggcguccccuuccaccucggcaccaagcaggucugcaucgccugguccuccuccuccugccacgacggcaaggccuggcuccacgucugcgucaccggcgacgacaagaacgccaccgccuccuucaucuacaacggccgccucgucgacuccaucgucuccugguccaaggagauccuccgcacccaggaguccgagugcgucugcaucaacggcaccugcaccgucgucaugaccgacggcuccgccuccggcaaggccgacaccaagauccucuucaucgaggagggcaagaucguccacaccuccacccucuccggcuccgcccagcacgucgaggagugcuccugcuacccccgcuaccccggcguccgcugcgucugccgcgacaacuggaagggcuccaaccgccccaucgucgacaucaacaucaaggacuacuccaucgucucccgcuacgucugcuccggccucgucggcgacaccccccgcaagaacgacuccuccuccuccucccacugccucgaccccaacaacgaggagggcggccacggcgucaagggcugggccuucgacgacggcaacgacgucuggaugggccgcaccaucuccgagaagucccgcuccggcuacgagaccuucaaggucaucgagggcugguccaaccccaacuccaagcuccagaucaaccgccaggucaucgucgaccgcggcaaccgcuccggcuacuccggcaucuucuccgucgagggcaaguccugcaucaaccgcugcuucuacgucgagcucauccgcggccgcaaggaggagaccgagguccucuggaccuccaacuccaucgucgucuucugcggcaccuccggcaccuacggcaccggcuccuggcccgacggcgccgacaucaaccucaugcccaucuga

SEQ ID NO: 112439 - RNA, 1413 nt, Artificial Sequence
  derived and/or modified CDS sequence (opt2) from neuraminidase__InfluenzaA__ACD56283
augaaccccaaccagaagaucaucaccaucggcuccaucuccauggccaucggcaucaucucccucaugcuccagaucggcaacaucaucuccaucugggccucccacuccauccagaccggcucccagaaccacaccggcaucugcaaccagcgcaucaucaccuacgagaacuccaccugggucaaccacaccuacgucuccaucaacaacaccaacgucgucgccggcaaggacaagaccuccgucacccucgccggcaacuccucccucugcuccaucuccggcugggccaucuacaccaaggacaacuccauccgcaucggcuccaagggcgacgucuucgucauccgcgagcccuucaucuccugcucccaccucgagugccgcaccuucuuccucacccagggcgcccuccucaacgacaagcacuccaacggcaccgucaaggaccgcucccccuaccgcgcccucauguccugcccccucggcgaggcccccucccccuacaacuccaaguucgaguccgucgccugguccgccuccgccugccacgacggcaugggcuggcucaccaucggcaucuccggccccgacaacggcgccgucgccguccucaaguacaacggcaucaucaccgagaccaucaaguccuggaagaagcgcauccuccgcacccaggaguccgagugcgucugcgucaacggcuccugcuucaccaucaugaccgacggccccuccaacggcgccgccuccuacaagaucuucaagaucgagaagggcaaggucaccaaguccaucgagcucaacgcccccaacuuccacuacgaggagugcuccugcuaccccgacaccggcaccgucaugugcgucugccgcgacaacuggcacggcuccaaccgccccugggucuccuucaaccagaaccucgacuaccagaucggcuacaucugcuccggcgucuucggcgacaacccccgccccaaggacggcaagggcuccugcaaccccgucaccgucgacggcgccgacggcgucaagggcuucuccuacaaguacggcaacggcgucuggaucggccgcaccaaguccaaccgccuccgcaagggcuucgagaugaucugggaccccaacggcuggaccgacaccgacuccgacuucuccgucaagcaggacgucgucgccaucaccgacugguccggcuacuccggcuccuucguccagcaccccgagcucaccggccucgacugcauccgccccugcuucugggucgagcucguccgcggccucccccgcgagaacaccaccaucuggaccuccggcuccuccaucuccuucugcggcgucgacuccgacaccgccaacugguccuggcccgacggcgccgagcuccccuucaccaucgacaaguga

SEQ ID NO: 112440 - RNA, 1410 nt, Artificial Sequence
  derived and/or modified CDS sequence (opt2) from neuraminidase__InfluenzaA__ACD56305
augaaccccaaccagaagaucaucaccaucggcuccgucucccucaccaucgccaccgucugcuuccucaugcagaucgccauccucgucaccaccgucacccuccacuucaagcagcacgagugcgacucccccgccuccaaccaggucaugcccugcgagcccaucaucaucgagcgcaacaucaccgagaucgucuaccucaacaacaccaccaucgagaaggagaucugccccgaggucgucgaguaccgcaacugguccaagccccagugccagaucaccggcuucgcccccuucuccaaggacaacuccauccgccucuccgccggcggcgacaucugggucacccgcgagcccuacgucuccugcgaccccggcaagugcuaccaguucgcccucggccagggcaccacccucgacaacaagcacuccaacgacaccauccacgaccgcaucccccaccgcacccuccucaugaacgagcucggcguccccuuccaccucggcacccgccaggucugcgucgccugguccuccuccuccugccacgacggcaaggccuggcuccacgucugcgucaccggcgacgacaagaacgccaccgccuccuucaucuacgacggccgccucgucgacuccaucggcuccuggucccagaacauccuccgcacccaggaguccgagugcgucugcaucaacggcaccugcaccgucgucaugaccgacggcuccgccuccggccgcgccgacacccgcauccucuucaucgaggagggcaagaucguccacaucuccccccucuccggcuccgcccagcacgucgaggagugcuccugcuacccccgcuaccccgacguccgcugcaucugccgcgacaacuggaagggcuccaaccgccccgucaucgacaucaacauggaggacuacuccaucgacuccuccuacgucugcuccggccucgucggcgacaccccccgcaacgacgaccgcuccuccaacuccaacugccgcgaccccaacaacgagcgcggcaaccccggcgucaagggcugggccuucgacaacggcgacgacgucuggaugggccgcaccaucuccaaggaccuccgcuccggcuacgagaccuucaaggucaucggcggcugguccacccccaacuccaagucccagaucaaccgccaggucaucgucgacuccaacaacugguccggcuacuccggcaucuucuccgucgagggcaaguccugcaucaaccgcugcuucuacgucgagcucauccgcggccgccagcaggagacccgcgucugguggaccuccaacuccaucgucgucuucugcggcaccuccggcaccuacggcaccggcuccuggcccgacggcgccaacaucaacuucaugcccaucuga

SEQ ID NO: 112441 - RNA, 1410 nt, Artificial Sequence
  derived and/or modified CDS sequence (opt2) from neuraminidase__InfluenzaA__ACD56316
augaaccccaaccagaagaucaucaccaucggcuccgucucccucaccaucgccaccgucugcuuccucaugcagaucgccauccucgucaccaccgucacccuccacuucaagcagcacgagugcgacucccccgccuccaaccaggucaugcccugcgagcccaucaucaucgagcgcaacaucaccgagaucgucuaccucaacaacaccaccaucgagaaggagaucugccccgaggucgucgaguaccgcaacugguccaagccccagugccagaucaccggcuucgcccccuucuccaaggacaacuccauccgccucuccgccggcggcgacaucugggucacccgcgagcccuacgucuccugcgaccccggcaagugcuaccaguucgcccucggccagggcaccacccucgacaacaagcacuccaacgacaccauccacgaccgcaucccccaccgcacccuccucaugaacgagcucggcguccccuuccaccucggcacccgccaggucugcgucgccugguccuccuccuccugccacgacggcaaggccuggcuccacgucugcgucaccggcgacgacaagaacgccaccgccuccuucaucuacgacggccgccucauggacuccaucggcuccuggucccagaacauccuccgcacccaggaguccgagugcgucugcaucaacggcaccugcaccgucgucaugaccgacggcuccgccuccggccgcgccgacacccgcauccucuucaucgaggagggcaagaucguccacaucuccccccucuccggcuccgcccagcacgucgaggagugcuccugcuacccccgcuaccccgacguccgcugcaucugccgcgacaacuggaagggcuccaaccgccccgucaucgacaucaacauggaggacuacuccaucgacuccuccuacgucugcuccggccucgucggcgacaccccccgcaacgacgaccgcuccuccaacuccaacugccgcaaccccaacaacgagcgcggcaaccccggcgucaagggcugggccuucgacaacggcgacgacgucuggaugggccgcaccaucuccaaggaccuccgcuccggcuacgagaccuucaaggucaucggcggcugguccacccccaacuccaagucccagaucaaccgccaggucaucgucgacuccaacaacugguccggcuacuccggcaucuucuccgucgagggcaagcgcugcaucaaccgcugcuucuacgucgagcucauccgcggccgccagcaggagacccgcgucugguggaccuccaacuccaucgucgucuucugcggcaccuccggcaccuacggcaccggcuccuggcccgacggcgccaacaucaacuucaugcccaucuga

SEQ ID NO: 112442 - RNA, 1410 nt, Artificial Sequence
  derived and/or modified CDS sequence (opt2) from neuraminidase__InfluenzaA__ACD56327
augaaccccaaccagaagaucaucaccaucggcuccgucucccucaccaucgccaccgucugcuuccucaugcagaucgccauccucgccaccaccgucacccuccacuucaagcagcacgagugcgacucccccgccuccaaccaggucaugcccugcgagcccaucaucaucgagcgcaacaucaccgagaucgucuaccucaacaacaccaccaucgagaaggagaucugccccgaggucgucgaguaccgcaacugguccaagccccagugccagaucaccggcuucgcccccuucuccaaggacaacuccauccgccucuccgccggcggcgacaucugggucacccgcgagcccuacgucuccugcgaccccuccaagugccaccaguucgcccucggccagggcaccacccucgagaacaagcacuccaacggcaccaagcacgaccgcaucccccaccgcacccuccucaugaacgagcucggcguccccuuccaccucggcaccaagcaggucugcgucgccugguccuccuccuccugccacgacggcaaggccuggcuccacgucugcgucaccggcgacgaccgcaacgccaccgccuccuucaucuacggcggccgccucgucgacuccaucgucuccuggucccagaacauccuccgcacccaggaguccgagugcgucugcaucaacggcaccugcaccgucgucaugaccgacggcuccgccuccggccgcgccgacacccgcauccucuucaucaaggagggcaagaucguccacaucuccccccucuccggcuccgcccagcacaucgaggagugcuccugcuacccccgcuaccccgacguccgcugcaucugccgcgacaacuggaagggcuccaaccgccccgucaucgacaucaacauggaggacuacuccaucgacuccuccuacgucugcuccggccucgucggcgacaccccccgcaacgacgacuccuccuccaacuccaacugccgcgaccccaacaacgagcgcggcaaccccggcgucaagggcugggccuucgacaacggcgacgacgucuggaugggccgcaccaucuccaaggacucccgcuccggcuacgagaccuucaaggucaucggcggcugguccacccccaacuccaagucccaggucaaccgccaggucaucgucgacuccaacaacugguccggcuacuccggcaucuucuccgucgagggcaaguccugcaucaaccgcugcuucuacgucgagcucauccgcggccgcccccaggagacccgcgucugguggaccuccaacuccaucgucgucuucugcggcaccuccggcaccuacggcaccggcuccuggcccgacggcgccaacaucaacuucaugcccaucuga

SEQ ID NO: 112443 - RNA, 1410 nt, Artificial Sequence
  derived and/or modified CDS sequence (opt2) from neuraminidase__InfluenzaA__ACD85190
augaaccccaaccagaagaucaucaccaucggcuccgucucccucaccaucgccaccgucugcuuccucaugcagaucgccauccucgucaccaccgucacccuccacuucaagcagcacgagugcgacucccccgccuccaaccaggucaugcccugcgagcccaucaucaucgagcgcaacaucaccgagaucgucuaccucaacaacaccaccaucgagaaggagaucugccccaaggucgucgaguaccgcaacugguccaagccccagugccagaucaccggcuucgcccccuucuccaaggacaacuccauccgccucuccgccggcggcgacaucugggucacccgcgagcccuacgucuccugcgaccccggcaagugcuaccaguucgcccucggccagggcaccacccucgacaacaagcacuccaacgacaccauccacgaccgcaucccccaccgcacccuccucaugaacgagcucggcguccccuuccaccucggcacccgccaggucugcaucgccugguccuccuccuccugccacgacggcaaggccuggcuccacgucugcgucaccggcgacgacaagaacgccaccgccuccuucaucuacgacggccgccucgucgacuccaucggcuccuggucccagaacauccuccgcacccaggaguccgagugcgucugcaucaacggcaccugcaccgucgucaugaccgacggcuccgccuccggccgcgccgacacccgcauccucuucaucgaggagggcaagaucguccacaucuccccccucuccggcuccgcccagcacgucgaggagugcuccugcuacccccgcuaccccgacguccgcugcaucugccgcgacaacuggaagggcuccaaccgccccaucaucgacaucaacauggaggacuacuccaucgacuccuccuacgucugcuccggccucgucggcgacaccccccgcaacgacgaccgcuccuccaacuccaacugccgcaaccccaacaacgagcgcggcaaccccggcgucaagggcugggccuucgacaacggcgacgacgucuggaugggccgcaccaucuccaaggaccuccgcuccggcuacgagaccuucaaggucaucggcggcugguccacccccaacuccaagucccagaucaaccgccaggucaucgucgacuccaacaacugguccggcuacuccggcaucuucuccgucgagggcaaguccugcaucaaccgcugcuucuacgucgagcucauccgcggccgccagcaggagacccgcgucugguggaccuccaacuccaucgucgucuucugcggcaccuccggcaccuacggcaccggcuccuggcccgacggcgccaacaucaacuucaugcccaucuga

SEQ ID NO: 112444 - RNA, 1410 nt, Artificial Sequence
  derived and/or modified CDS sequence (opt2) from neuraminidase__InfluenzaA__ACD85201
augaaccccaaccagaagaucaucaccaucggcuccgucucccucaccaucgccaccgucugcuuccucaugcagaucgccauccucgucaccaccgucacccuccacuucaagcagcacgagugcgacucccccgccuccaaccaggucaugcccugcgagcccaucaucaucgagcgcaacaucaccgagaucgucuaccucaacaacaccaccaucgagaaggagaucugccccaaggucgucgaguaccgcaacugguccaagccccagugccagaucaccggcuucgcccccuucuccaaggacaacuccauccgccucuccgccggcggcgacaucugggucacccgcgagcccuacgucuccugcgaccccggcaagugcuaccaguucgcccucggccagggcaccacccucgacaacaagcacuccaacgacaccauccacgaccgcaucccccaccgcacccuccucaugaacgagcucggcguccccuuccaccucggcacccgccaggucugcaucgccugguccuccuccuccugccacgacggcaaggccuggcuccacgucugcgucaccggcgacgacaagaacgccaccgccuccuucaucuacgacggccgccucgucgacuccaucuccuccuggucccagaacauccuccgcacccaggaguccgagugcgucugcaucaacggcaccugcaccgucgucaugaccgacggcuccgccuccggccgcgccgacacccgcauccucuucaucgaggagggcaagaucguccacaucuccccccucuccggcuccgcccagcacgucgaggagugcuccugcuacccccgcuaccccgacguccgcugcaucugccgcgacaacuggaagggcuccaaccgccccgucaucgacaucaacauggaggacuacuccaucgacuccuccuacgucugcuccggccucgucggcgacaccccccgcaacgacgaccgcuccuccaacuccaacugccgcaaccccaacaacgagcgcggcaaccccggcgucaagggcugggccuucgacaacggcgacgacgucuggaugggccgcaccaucuccaaggaccuccgcuccggcuacgagaccuucaaggucaucggcggcugguccacccccaacuccaagucccagaucaaccgccaggucaucgucgacuccaacaacugguccggcuacuccggcaucuucuccgucgagggcaaguccugcaucaaccgcugcuucuacgucgagcucauccgcggccgccagcaggagacccgcgucugguggaccuccaacuccaucgucgucuucugcggcaccuccggcaccuacggcaccggcuccuggcccgacggcgccaacaucaacuucaugcccaucuga

SEQ ID NO: 112445 - RNA, 1410 nt, Artificial Sequence
  derived and/or modified CDS sequence (opt2) from neuraminidase__InfluenzaA__ACD85212
augaaccccaaccagaagaucaucaccaucggcuccgucucccucaccaucgccaccgucugcuuccucaugcagaucgccauccucgccaccaccgucacccuccacuucaagcagcacgagugcgacucccccgccuccaaccaggucaugcccugcgagcccaucaucaucgagcgcaacaucaaggagaucgucuaccucaacaacaccaccaucgagaaggagaucugccccgaggucgucgaguaccgcaacugguccaagccccagugccagaucaccggcuucgcccccuucuccaaggacaacuccauccgccucuccgccggcggcgacaucugggucacccgcgagcccuacgucuccugcgaccccggcaagugcuaccaguucgcccucggccagggcaccacccucgacaacaagcacuccaacggcaccauccacgaccgcaucccccaccgcacccuccucaugaacgagcucggcguccccuuccaccucggcaccaagcaggucugcgucgccugguccuccuccuccugccacgacggcaaggccuggcuccacgucugcgucaccggcgacgaccgcaacgccaccgccuccuucaucuacgacggccgccucgucgacuccaucggcuccuggucccagaacauccuccgcacccaggaguccgagugcgucugcaucaacggcaccugcaccgucgucaugaccgacggcuccgccuccggccgcgccgacacccgcauccucuucaucaaggagggcaagaucguccacaucuccccccucuccggcuccgcccagcacaucgaggagugcuccugcuacccccgcuaccccgacguccgcugcaucugccgcgacaacuggaagggcuccaaccgccccgucaucgacaucaacauggaggacuacuccaucgacuccuccuacgucugcuccggccucgucggcgacaccccccgcaacgacgacuccuccuccaacuccaacugccgcgaccccaacaacgagcgcggcaaccccggcgucaagggcugggccuucgacaacggcgacgacgucuggaugggccgcaccaucaacaaggacucccgcuccggcuacgagaccuucaaggucaucggcggcugguccacccccaacuccaagucccaggucaaccgccaggucaucgucgacaacaacaacugguccggcuacuccggcaucuucuccgucgagggcaaguccugcaucaaccgcugcuucuacgucgagcucauccgcggccgcccccaggagacccgcgucugguggaccuccaacuccaucgucgucuucugcggcaccuccggcaccuacggcaccggcuccuggcccgacggcgccaacaucaacuucaugcccaucuga

SEQ ID NO: 112446 - RNA, 1410 nt, Artificial Sequence
  derived and/or modified CDS sequence (opt2) from neuraminidase__InfluenzaA__ACD85223
augaaccccaaccagaagaucaucaccaucggcuccgucucccucaccaucgccaccgccugcuuccucaugcagaucgccauccucgucaccaccgucacccuccacuucaagcagcacgagugcgacucccccgccuccaaccaggucaugcccugcgagcccaucaucaucgagcgcaacaucaccgagaucgucuaccucaacaacaccaccaucgagaaggagaucugccccaaggucgucgaguaccgcaacugguccaagccccagugccagaucaccggcuucgcccccuucuccaaggacaacuccauccgccucuccgccggcggcgacaucugggucacccgcgagcccuacgucuccugcgaccccggcaagugcuaccaguucgcccucggccagggcaccacccucgacaacaagcacuccaacgacaccauccacgaccgcaucccccaccgcacccuccucaugaacgagcucggcguccccuuccaccucggcacccgccaggucugcaucgccugguccuccuccuccugccacgacggcaaggccuggcuccacgucugcgucaccggcgacgacaagaacgccaccgccuccuucaucuacgacggccgccucgucgacuccaucggcuccuggucccagaacauccuccgcacccaggaguccgagugcgucugcaucaacggcaccugcaccgucgucaugaccgacggcuccgccuccggccgcgccgacacccgcauccucuucaucgaggagggcaagaucguccacaucuccccccucuccggcuccgcccagcacgucgaggagugcuccugcuacccccgcuaccccgacguccgcugcaucugccgcgacaacuggaagggcuccaaccgccccaucaucgacaucaacauggaggacuacuccaucgacuccuccuacgucugcuccggccucgucggcgacaccccccgcaacgacgaccgcuccuccaacuccaacugccgcaaccccaacaacgagcgcggcaaccccggcgucaagggcugggccuucgacaacggcgacgacgucuggaugggccgcaccaucuccaaggaccuccgcuccggcuacgagaccuucaaggucaucggcggcugguccacccccaacuccaagucccagaucaaccgccaggucaucgucgacuccaacaacugguccggcuacuccggcaucuucuccgucgagggcaaguccugcaucaaccgcugcuucuacgucgagcucauccgcggccgccagcaggagacccgcgucugguggaccuccaacuccaucgucgucuucugcggcaccuccggcaccuacggcaccggcuccuggcccgacggcgccaacaucaacuucaugcccaucuga

SEQ ID NO: 112447 - RNA, 1410 nt, Artificial Sequence
  derived and/or modified CDS sequence (opt2) from neuraminidase__InfluenzaA__ACD85234
augaaccccaaccagaagaucaucaccaucggcuccgucucccucaccaucgccaccgucugcuuccucaugcagaucgccauccucgccaccaccgucacccuccacuucaagcagcacgagugcgacucccccgccuccaaccaggucaugcccugcgagcccaucaucaucgagcgcaacaucaccgagaucgucuaccucaacaacaccaccaucgagaaggagaucugccccgaggucgucgaguaccgcaacugguccaagccccagugccagaucaccggcuucgcccccuucuccaaggacaacuccauccgccucuccgccgacggcgacaucugggucacccgcgagcccuacgucuccugcgaccccggcaagugcuaccaguucgcccucggccagggcaccacccucgacaacaagcacuccaacggcaccauccacgaccgcaucccccaccgcacccuccucaugaacgagcucggcguccccuuccaccucggcaccaagcaggucugcgucgccugguccuccuccuccugccacgacggcaaggccuggcuccacgucugcgucaccggcgacgaccgcaacgccaccgccuccuucaucuacgacggccgccucgucgacuccaucggcuccuggucccagaacauccuccgcacccaggaguccgagugcgucugcaucaacggcaccugcaccgucgucaugaccgacggcuccgccuccggccgcgccgacacccgcauccucuucaucaaggagggcaagaucguccacaucuccccccucuccggcuccgcccagcacaucgaggagugcuccugcuacccccgcuaccccgacguccgcugcaucugccgcgacaacuggaagggcuccaaccgccccgucaucgacaucaacauggaggacuacuccaucgacuccuccuacgucugcuccggccucgucggcgacaccccccgcaacgacgacuccuccuccaacuccaacugccgcgaccccaacaacgagcgcggcaaccccggcgucaagggcugggccuucgacaacggcgacgacgucuggaugggccgcaccaucuccaaggaccuccgcuccggcuacgagaccuucaaggucaucggcggcugguccacccccaacuccaagucccaggucaaccgccaggucaucgucgacaacaacaacugguccggcuacuccggcaucuucuccgucgagggcaaguccugcaucaaccgcugcuucuacgucgagcucauccgcggccgcccccaggagacccgcgucugguggaccuccaacuccaucgucgucuucugcggcaccuccggcaccuacggcaccggcuccuggcccgacggcgccaacaucaacuucaugcccaucuga

SEQ ID NO: 112448 - RNA, 1410 nt, Artificial Sequence
  derived and/or modified CDS sequence (opt2) from neuraminidase__InfluenzaA__ACD85245
augaaccccaaccagaagaucaucaccaucggcuccgucucccucaucaucgccaccgucugcuuccucaugcagaucgccauccucgucaccaccgucacccuccacuucaagcagcacgagugcgacucccccgccuccaaccaggucaugcccugcgagcccaucaucaucgagcgcaacaucaccgagaucgucuaccucaacaacaccaccaucgagaaggagaucugcccccgcgucgucgaguaccgcaacugguccaagccccagugccagaucaccggcuucgcccccuucuccaaggacaacuccauccgccucuccgccggcggcgacaucugggucacccgcgagcccuacgucuccugcgaccccggcaagugcuaccaguucgcccucggccagggcaccacccucgacaacaagcacuccaacgacaccauccacgaccgcaucccccaccgcacccuccucaugaacgagcucggcguccccuuccaccucggcacccgccaggucugcaucgccugguccuccuccuccugccacgacggcaaggccuggcuccacgucugcaucaccggcgacgacaagaacgccaccgccuccuucaucuacgacggccgccucgucgacuccaucggcuccuggucccagaacauccuccgcacccaggaguccgagugcgucugcaucaacggcaccugcaccgucgucaugaccgacggcuccgccuccggccgcgccgacacccgcauccucuucaucgaggagggcaagaucguccacaucuccccccucuccggcuccgcccagcacgucgaggagugcuccugcuacccccgcuaccccggcguccgcugcaucugccgcgacaacuggaagggcuccaaccgccccgucgucgacaucaacauggaggacuacuccaucgacuccuccuacgucugcuccggccucgucggcgacaccccccgcaacgacgaccgcuccuccaacuccaacugccgcaaccccaacaacgagcgcggcaaccagggcgucaagggcugggccuucgacaacggcgacgacgucuggaugggccgcaccaucuccaaggaccuccgcuccggcuacgagaccuucaaggucaucggcggcugguccacccccaacuccaagucccagaucaaccgccaggucaucgucgacuccgacgaccgcuccggcuacuccggcaucuucuccgucgagggcaaguccugcaucaaccgcugcuucuacgucgagcucauccgcggccgcaagcaggagacccgcgucugguggaccuccaacuccaucgucgucuucugcggcaccuccggcaccuacggcaccggcuccuggcccgacggcgccaacaucaacuucaugcccaucuga

SEQ ID NO: 112449 - RNA, 1410 nt, Artificial Sequence
  derived and/or modified CDS sequence (opt2) from neuraminidase__InfluenzaA__ACD85454
augaaccccaaccagaagaucaucaccaucggcuccgucucccucaccaucuccaccaucggcuucuucaugcagaccgccauccucaucaccaccgucacccuccacuucaagcaguacgaguucaacuccccccccaacaaccaggucaugcucugcgagcccaccaucaucgagcgcaacaucaccgagaucgucuaccucaccaacaccaccaucgagaaggagaucugccccaagcucgccgaguaccgcaacugguccaagccccagugcgacaucaccggcuucgcccccuucuccaaggacaacuccauccgccucuccgccggcggcgacaucugggucacccgcgagcccuacgucuccugcgaccccgacaagugcuaccaguucgcccucggccagggcaccacccucaacaacguccacuccaacgacaccguccgcaaccgcacccccuaccgcacccuccucaugaacgagcucggcguccccuuccaccucggcaccaagcaggucugcaucgccugguccuccuccuccugccacgacggcaaggccuggcuccacgucugcaucaccggcgacgacaagaacgccaccgccuccuucaucuacaacggccgccucgucgacuccaucgucuccugguccaaggagauccuccgcacccaggaguccgagugcgucugcaucaacggcaccugcaccgucgucaugaccgacggcuccgccuccggcaaggccgacaccaagauccucuucaucgaggagggcaagaucguccacaccuccacccucuccggcuccgcccagcacgucgaggagugcuccugcuacccccgcuaccccggcguccgcugcgucugccgcgacaacuggaagggcuccaaccgccccaucgucgacaucaacaucaaggaccacuccaucgucuccuccuacgucugcuccggccucgucggcgacaccccccgcaagaacgacuccuccuccuccucccacugccucgaccccaacaacgaggagggcggccacggcgucaagggcugggccuucgacgacggcaacgacgucuggaugggccgcaccaucuccgagaagucccgccucggcuacgagaccuucaaggucaucgagggcugguccaaccccaaguccaagcuccagaucaaccgccaggucaucgucgaccgcggcaaccgcuccggcuacuccggcaucuucuccgucgagggcaaguccugcaucaaccgcugcuucuacgucgagcucauccgcggccgcaaggaggagaccgagguccucuggaccuccaacuccaucgucgucuucugcggcaccuccggcaccuacggcaccggcuccuggcccgacggcgccgacaucaaccucaugcccaucuga

SEQ ID NO: 112450 - RNA, 1410 nt, Artificial Sequence
  derived and/or modified CDS sequence (opt2) from neuraminidase__InfluenzaA__ACD85465
augaaccccaaccagaagaucaucaccaucggcuccgucucccucaccaucuccaccaucggcuucuucaugcagaccgccauccucaucaccaccgucacccuccacuucaagcaguacgaguucaacuccccccccaacaaccaggucaugcucugcgagcccaccaucaucgagcgcaacaucaccgagaucgucuaccucaccaacaccaccaucgagaaggagaucugccccaagcucgccgaguaccgcaacugguccaagccccagugcgacaucaccggcuucgcccccuucuccaaggacaacuccauccgccucuccgccggcggcgacaucugggucacccgcgagcccuacgucuccugcgaccccgacaagugcuaccaguucgcccucggccagggcaccacccucaacaacguccacuccaacgacaccguccgcgaccgcacccccuaccgcacccuccucaugaacgagcucggcguccccuuccaccucggcaccaagcaggucugcaucgccugguccuccuccuccugccacgacggcaaggccuggcuccacgucugcaucaccggcgacgacaagaacgccaccgccuccuucaucuacaacggccgccucgucgacuccaucgucuccugguccaaggagauccuccgcacccaggaguccgagugcgucugcaucaacggcaccugcaccgucgucaugaccgacggcuccgccuccggcaaggccgacaccaagauccucuucaucgaggagggcaagaucguccacaccuccacccucuccggcuccgcccagcacgucgaggagugcuccugcuacccccgcuaccccggcguccgcugcgucugccgcgacaacuggaagggcuccaaccgccccaucgucgacaucaacaucaaggaccacuccaucgucuccuccuacgucugcuccggccucgucggcgacaccccccgcaagaacgacuccuccuccuccucccacugccucgaccccaacaacgaggagggcggccacggcgucaagggcugggccuucgacgacggcaacgacgucuggaugggccgcaccaucuccgagaagucccgccucggcuacgagaccuucaaggucaucgagggcugguccaaccccaaguccaagcuccagaucaaccgccaggucaucgucgaccgcggcaaccgcuccggcuacuccggcaucuucuccgucgagggcaaguccugcaucaaccgcugcuucuacgucgagcucauccgcggccgcaaggaggagaccgagguccucuggaccuccaacuccaucgucgucuucugcggcaccuccggcaccuacggcaccggcuccuggcccgacggcgccgacaucaaccucaugcccaucuga

SEQ ID NO: 112451 - RNA, 1410 nt, Artificial Sequence
  derived and/or modified CDS sequence (opt2) from neuraminidase__InfluenzaA__ACD85487
augaaccccaaccagaagaucaucaccaucggcuccgucucccucaucaucuccaccaucugcuucuucaugcagaccgccauccucaucaccaccgucacccuccacuucaagcaguacgaguucaacuccccccccaacaaccaggucaugcucugcgagcccaccaucaucgagcgcaacaucaccgagaucgucuaccucaccaacaccaccaucgagaaggagaucugccccaagcucgccgaguaccgcaacugguccaagccccagugcgacaucaccggcuucgcccccuucuccaaggacaacuccauccgccucuccgccggcggcgacaucugggucacccgcgagcccuacgucuccugcgaccccgacaagugcuaccaguucgcccucggccagggcaccacccucaacaacguccacuccaacgacaccguccgcaaccgcacccccuaccgcacccuccucaugaacgagcucggcguccccuuccaccucggcaccaagcaggucugcaucgccugguccuccuccuccugccacgacggcaaggccuggcuccacgucugcaucaccggcgacgacaagaacgccaccgccuccuucaucuacaacggccgccucgucgacuccaucgucuccugguccaaggagauccuccgcacccaggaguccgagugcgucugcaucaacggcaccugcaccgucgucaugaccgacggcuccgccuccggcaaggccgacaccaagauccucuucaucgaggagggcaagaucguccacaccuccacccucuccggcuccgcccagcacgucgaggagugcuccugcuacccccgcuaccccggcguccgcugcgucugccgcgacaacuggaagggcuccaaccgccccaucgucgacaucaacaucaaggaccacuccaucgucuccuccuacgucugcuccggccucgucggcgacaccccccgcaagaacgacuccuccuccuccucccacugccucgaccccaacaacgaggagggcggccacggcgucaagggcugggccuucgacgacggcaacgacgucuggaugggccgcaccaucuccgagaagucccgccucggcuacgagaccuucaaggucaucgagggcugguccaaccccaacuccaagcuccagaucaaccgccaggucaucgucgaccgcggcaaccgcuccggcuacuccggcaucuucuccgucgagggcaaguccugcaucaaccgcugcuucuacgucgagcucauccgcggccgcaaggaggagaccgagguccucuggaccuccaacuccaucgucgucuucugcggcaccuccggcaccuacggcaccggcuccuggcccgacggcgccgacaucaaccucaugcccaucuga

SEQ ID NO: 112452 - RNA, 1410 nt, Artificial Sequence
  derived and/or modified CDS sequence (opt2) from neuraminidase__InfluenzaA__ACD85498
augaaccccaaccagaagaucaucaccaucggcuccgucucccucaucaucuccaccaucugcuucuucaugcagaccgccauccucaucaccaccgucacccuccacuucaagcaguacgaguucaacuccccccccaacaaccaggucaugcucugcgagcccaccaucaucgagcgcaacaucaccgagaucgucuaccucaccaacaccaccaucgagaaggagaucugccccaagcucgccgaguaccgcaacugguccaagccccagugcgacaucaccggcuucgcccccuucuccaaggacaacuccauccgccucuccgccggcggcgacaucugggucacccgcgagcccuacgucuccugcgaccccgacaagugcuaccaguucgcccucggccagggcaccacccucaacaacguccacuccaacgacaccguccgcgaccgcacccccuaccgcacccuccucaugaacgagcucggcguccccuuccaccucggcaccaagcaggucugcaucgccugguccuccuccuccugccacgacggcaaggccuggcuccacgucugcaucaccggcgacgacaagaacgccaccgccuccuucaucuacaacggccgccucgucgacuccaucgucuccugguccaaggagauccuccgcacccaggaguccgagugcgucugcaucaacggcaccugcaccgucgucaugaccgacggcuccgccuccggcaaggccgacaccaagauccucuucaucgaggagggcaagaucguccacaccuccacccucuccggcuccgcccagcacgucgaggagugcuccugcuacccccgcuaccccggcguccgcugcgucugccgcgacaacuggaagggcuccaaccgccccaucgucgacaucaacaucaaggaccacuccaucgucuccuccuacgucugcuccggccucgucggcgacaccccccgcaagaacgacuccuccuccuccucccacugccucgaccccaacaacgaggagggcggccacggcgucaagggcugggccuucgacgacggcaacgacgucuggaugggccgcaccaucuccgagaagucccgccucggcuacgagaccuucaaggucaucgagggcugguccaaccccaaguccaagcuccagaucaaccgccaggucaucgucgaccgcggcaaccgcuccggcuacuccggcaucuucuccgucgagggcaaguccugcaucaaccgcugcuucuacgucgagcucauccgcggccgcaaggaggagaccgagguccucuggaccuccaacuccaucgucgucuucugcggcaccuccggcaccuacggcaccggcuccuggcccgacggcgccgacaucaaccucaugcccaucuga

SEQ ID NO: 112453 - RNA, 1410 nt, Artificial Sequence
  derived and/or modified CDS sequence (opt2) from neuraminidase__InfluenzaA__ACD85509
augaaccccaaccagaagaucaucaccaucggcuccgucucccucaccaucuccaccaucugcuucuucaugcagaccgccauccucaucaccaccgucacccuccacuucaagcaguacgaguucaacuccccccccaacaaccaggucaugcucugcgagcccaccaucaucgagcgcaacaucaccgagaucgucuaccucaccaacaccaccaucgagaaggagaucugccccaagcucgccgaguaccgcaacugguccaagccccagugcgacaucaccggcuucgcccccuucuccaaggacaacuccauccgccucuccgccggcggcgacaucugggucacccgcgagcccuacgucuccugcgaccccgacaagugcuaccaguucgcccucggccagggcaccacccucaacaacguccacuccaacgacaccguccgcaaccgcacccccuaccgcacccuccucaugaacgagcucggcguccccuuccaccucggcaccaagcaggucugcaucgccugguccuccuccuccugccacgacggcaaggccuggcuccacgucugcaucaccggcgacgacaagaacgccaccgccuccuucaucuacaacggccgccucgucgacuccaucgucuccugguccaaggagauccuccgcacccaggaguccgagugcgucugcaucaacggcaccugcaccgucgucaugaccgacggcuccgccuccggcaaggccgacaccaagauccucuucaucgaggagggcaagaucguccacaccuccacccucuccggcuccgcccagcacgucgaggagugcuccugcuacccccgcuaccccggcguccgcugcgucugccgcgacaacuggaagggcuccaaccgccccaucgucgacaucaacaucaaggaccacuccaucgucuccuccuacgucugcuccggccucgucggcgacaccccccgcaagaacgacuccuccuccuccucccacugccucgaccccaacaacgaggagggcucccgcggcgucaagggcugggccuucgacgacggcaacgacgucuggaugggccgcaccaucuccgagaagucccgccucggcuacgagaccuucaaggucaucgagggcugguccaaccccaaguccaagcuccagaucaaccgccaggucaucgucgaccgcggcaaccgcuccggcuacuccggcaucuucuccgucgagggcaaguccugcaucaaccgcugcuucuacgucgagcucauccgcggccgcaaggaggagaccgagguccucuggaccuccaacuccaucgucgucuucugcggcaccuccggcaccuacggcaccggcuccuggcccgacggcgccgacaucaaccucaugcccaucuga

SEQ ID NO: 112454 - RNA, 1410 nt, Artificial Sequence
  derived and/or modified CDS sequence (opt2) from neuraminidase__InfluenzaA__ACD85520
augaaccccaaccagaagaucaucaccaucggcuccgucucccucaucaucuccaccaucggcuucuucaugcagaccgccauccucaucaccaccgucacccuccacuucaagcaguacgaguucaacuccccccccaacaaccaggucaugcucugcgagcccaccaucaucgagcgcaacaucaccgagaucgucuaccucaccaacaccaccaucgagaaggagaucugccccaagcucgccgaguaccgcaacugguccaagccccagugcgacaucaccggcuucgcccccuucuccaaggacaacuccauccgccucuccgccggcggcgacaucugggucacccgcgagcccuacgucuccugcgaccccgacaagugcuaccaguucgcccucggccagggcaccacccucaacaacguccacuccaacgacaccguccgcgaccgcacccccuaccgcacccuccucaugaacgagcucggcguccccuuccaccucggcaccaagcaggucugcaucgccugguccuccuccuccugccacgacggcaaggccuggcuccacgucugcaucaccggcgacgacaagaacgccaccgccuccuucaucuacaacggccgccucgucgacuccaucgucuccugguccaaggagauccuccgcacccaggaguccgagugcgucugcaucaacggcaccugcaccgucgucaugaccgacggcuccgccuccggcaaggccgacaccaagauccucuucaucgaggagggcaagaucguccacaccuccacccucuccggcuccgcccagcacgucgaggagugcuccugcuacccccgcuaccccggcguccgcugcgucugccgcgacaacuggaagggcuccaaccgccccaucgucgacaucaacaucaaggaccacuccaucgucuccuccuacgucugcuccggccucgucggcgacaccccccgcaagaacgacuccuccuccuccucccacugccucgaccccaacaacgaggagggcggccacggcgucaagggcugggccuucgacgacggcaacgacgucuggaugggccgcaccaucuccgagaagucccgccucggcuacgagaccuucaaggucaucgagggcugguccaaccccaaguccaagcuccagaucaaccgccaggucaucgucgaccgcggcaaccgcuccggcuacuccggcaucuucuccgucgagggcaaguccugcaucaaccgcugcuucuacgucgagcucauccgcggccgcaaggaggagaccgagguccucuggaccuccaacuccaucgucgucuucugcggcaccuccggcaccuacggcaccggcuccuggcccgacggcgccgacaucaaccucaugcccaucuga

SEQ ID NO: 112455 - RNA, 1410 nt, Artificial Sequence; identical to SEQ ID NO: 112450
  derived and/or modified CDS sequence (opt2) from neuraminidase__InfluenzaA__ACD85553

SEQ ID NO: 112456 - RNA, 1410 nt, Artificial Sequence
  derived and/or modified CDS sequence (opt2) from neuraminidase__InfluenzaA__ACD85564
augaaccccaaccagaagaucaucaccaucggcuccgucucccucaucaucuccaccaucugcuucuucaugcagaccgccauccucaucaccaccgucacccuccacuucaagcaguacgaguucaacuccccccccaacaaccaggucaugcucugcgagcccaccaucaucgagcgcaacaucaccgagaccgcccaccucaccaacaccaccaucgagaaggagaucugccccaagcucgccgaguaccgcaacugguccaagccccagugcgacaucaccggcuucgcccccuucuccaaggacaacuccauccgccucuccgccggcggcgacaucugggucacccgcgagcccuacgucuccugcgaccccgacaagugcuaccaguucgcccucggccagggcaccacccucaacaacguccacuccaacgacaccguccgcgaccgcacccccuaccgcacccuccucaugaacgagcucggcguccccuuccaccucggcaccaagcaggucugcaucgccugguccuccuccuccugccacgacggcaaggccuggcuccacgucugcaucaccggcgacgacaagaacgccaccgccuccuucaucuacaacggccgccucgucgacuccaucgucuccugguccaaggagauccuccgcacccaggaguccgagugcgucugcaucaacggcaccugcaccgucgucaugaccgacggcuccgccuccggcaaggccgacaccaagauccucuucaucgaggagggcaagaucguccacaccuccacccucuccggcuccgcccagcacgucgaggagugcuccugcuacccccgcuaccccggcguccgcugcgucugccgcgacaacuggaagggcuccaaccgccccaucgucgacaucaacaucaaggaccacuccaucgucuccuccuacgucugcuccggccucgucggcgacaccccccgcaagaacgacuccuccuccuccucccacugccucgaccccaacaacgaggagggcggccacggcgucaagggcugggccuucgacgacggcaacgacgucuggaugggccgcaccaucuccgagaagucccgccucggcuacgagaccuucaaggucaucgagggcugguccaaccccaaguccaagcuccagaucaaccgccaggucaucgucgaccgcggcaaccgcuccggcuacuccggcaucuucuccgucgagggcaaguccugcaucaaccgcugcuucuacgucgagcucauccgcggccgcaaggaggagaccgagguccucuggaccuccaacuccaucgucgucuucugcggcaccuccggcaccuacggcaccggcuccuggcccgacggcgccgacaucaaccucaugcccaucuga

SEQ ID NO: 112457 - RNA, 1410 nt, Artificial Sequence
  derived and/or modified CDS sequence (opt2) from neuraminidase__InfluenzaA__ACD85575
augaaccccaaccagaagaucaucaccaucggcuccgucucccucaucaucuccaccaucugcuucuucaugcagaccgccauccucaucaccaccgucacccuccacuucaagcaguacgaguucaacuccccccccaacaaccaggucaugcucugcgagcccaccaucaucgagcgcaacaucaccgagaucgucuaccucaccaacaccaccaucgagaaggagaucugccccaagcucgccgaguaccgcaacugguccaagccccagugcgacaucaccggcuucgcccccuucuccaaggacaacuccauccgccucuccgccggcggcgacaucugggucacccgcgagcccuacgucuccugcgaccccgacaagugcuaccaguucgcccucggccagggcaccacccucaacaacguccacuccaacgacaccguccgcgaccgcacccccuaccgcacccuccucaugaacgagcucggcguccccuuccaccucggcaccaagcaggucugcaucgccugguccuccuccuccugccacgacggcaaggccuggcuccacgucugcaucaccggcgacgacaagaacgccaccgccuccuucaucuacaacggccgccucgucgacuccaucgucuccugguccaaggagauccuccgcacccaggaguccgagugcgucugcaucaacggcaccugcaccgucgucaugaccgacggcuccgccuccggcaaggccgacaccaagauccucuucaucgaggagggcaagaucguccacaccuccacccucuccggcuccgcccagcacgucgaggagugcuccugcuacccccgcuaccccggcguccgcugcgucugccgcgacaacuggaagggcuccaaccgccccaucgucgacaucaacaucaaggaccacuccaucgucuccuccuacgucugcuccggccucgucggcgacaccccccgcaagaacgacuccuccuccuccucccacugccucgaccccaacaacgaggagggcggccacggcgucaagggcugggccuucgacgacggcaacgacgucuggaugggccgcaccaucuccgagaagucccgccucggcuacgagaccuucaaggucaucgagggcugguccaaccacaaguccaagcuccagaucaaccgccaggucaucgucgaccgcggcaaccgcuccggcuacuccggcaucuucuccgucgagggcaaguccugcaucaaccgcugcuucuacgucgagcucauccgcggccgcaaggaggagaccgagguccucuggaccuccaacuccaucgucgucuucugcggcaccuccggcaccuacggcaccggcuccuggcccgacggcgccgacaucaaccucaugcccaucuga

SEQ ID NO: 112458 - RNA, 1410 nt, Artificial Sequence
  derived and/or modified CDS sequence (opt2) from neuraminidase__InfluenzaA__ACD85586
augaaccccaaccagaagaucaucaccaucggcuccgucucccucaccaucuccaccaucugcuucuucaugcagaccgccauccucaucaccaccgucacccuccacuucaagcaguacgaguucaacuccccccccaacaaccaggucaugcucugcgagcccaccaucaucgagcgcaacaucaccgagaucgucuaccucaccaacaccaccaucgagaaggagaucugccccaagcucgccgaguaccgcaacugguccaagccccagugcgacaucaccggcuucgcccccuucuccaaggacaacuccauccgccucuccgccggcggcgacaucugggucacccgcgagcccuacgucuccugcgaccccgacaagugcuaccaguucgcccucggccagggcaccacccucaacaacguccacuccaacgacaccguccgcgaccgcacccccuaccgcacccuccucaugaacgagcucggcguccccuuccaccucggcaccaagcaggucugcaucgccugguccuccuccuccugccacgacggcaaggccuggcuccacgucugcaucaccggcgacgacaagaacgccaccgccuccuucaucuacaacggccgccucgucgacuccaucgucuccugguccaaggagauccuccgcacccaggaguccgagugcgucugcaucaacggcaccugcaccgucgucaugaccgacggcuccgccuccggcaaggccgacaccaagauccucuucaucgaggagggcaagaucguccacaccuccacccucuccggcuccgcccagcacgucgaggagugcuccugcuacccccgcuaccccggcguccgcugcgucugccgcgacaacuggaagggcuccaaccgccccaucgucgacaucaacaucaaggaccacuccaucgucuccuccuacgucugcuccggccucgucggcgacaccccccgcaagaacgacuccuccuccuccucccacugccucgaccccaacaacgaggagggcggccgcggcgucaagggcugggccuucgacgacggcaacgacgucuggaugggccgcaccaucuccgagaagucccgccucggcuacgagaccuucaaggucaucgagggcugguccaaccccaaguccaagcuccagaccaaccgccaggucaucgucgaccgcggcaaccgcuccggcuacuccggcaucuucuccgucgagggcaaguccugcaucaaccgcugcuucuacgucgagcucauccgcggccgcaaggaggagaccgagguccucuggaccuccaacuccaucgucgucuucugcggcaccuccggcaccuacggcaccggcuccuggcccgacggcgccgacaucaaccucaugcccaucuga

SEQ ID NO: 112459 - RNA, 1410 nt, Artificial Sequence
  derived and/or modified CDS sequence (opt2) from neuraminidase__InfluenzaA__ACD93582
augaaccccaaccagaagaucaucaccaucggcuccgucucccucaccaucuccaccaucugcuucuucaugcagaucgccauccucgccaccaccgucacccuccacuucaagcaguacgaguucaacuccccccccaacaaccaggucaugcucugcgagcccaccaucaucgagcgcaacaucaccgagaucgucuaccucaccaacaccaccaucgagaaggagaucugccccaagcucgccgaguaccgcaacugguccaagccccagugcgacaucaccggcuucgcccccuucuccaaggacaacuccauccgccucuccgccggcggcgacaucugggucacccgcgagcccuacgucuccugcgaccccgacaagugcuaccaguucgcccucggccagggcaccacccucaacaacguccacuccaacgacaccguccgcggccgcacccccuaccgcacccuccucaugaacgagcucggcguccccuuccaccucggcaccaagcaggucugcaucgccugguccuccuccuccugccacgacggcaaggccuggcuccacgucugcaucaccggcgacgacaagaacgccaccgccuccuucaucuacaacggccgccucgucgacuccaucgucuccugguccaaggagauccuccgcacccaggaguccgagugcgucugcaucaacggcaccugcaccgucgucaugaccgacggcuccgccuccggcaaggccgacaccaagauccucuucaucgaggagggcaagaucguccacaccuccacccucuccggcuccgcccagcacgucgaggagugcuccugcuacccccgcuaccccggcguccgcugcgucugccgcgacaacuggaagggcuccaaccgccccaucgucgacaucaacaucaaggaccacuccaucgucuccuccuacgucugcuccggccucgucggcgacaccccccgcaagaacgacuccuccuccuccucccacugccucgaccccaacaacgaggagggcggccacggcgucaagggcugggccuucgacgacggcaacgacgucuggaugggccgcaccaucuccgagaagucccgccucggcuacgagaccuucaaggucaucgagggcugguccaaccccaaguccaagcuccagaucaaccgccaggucaucgucgacaagggcaaccgcuccggcuacuccggcaucuucuccgucgagggcaaguccugcaucaaccgcugcuucuacgucgagcucauccgcggccgcaaggaggagaccgagguccucuggaccuccaacuccaucgucgucuucugcggcaccuccggcaccuacggcaccggcuccuggcccgacggcgccgacaucaaccucaugcccaucuga

SEQ ID NO: 112460 - RNA, 1410 nt, Artificial Sequence; identical to SEQ ID NO: 110748
  derived and/or modified CDS sequence (opt2) from neuraminidase__InfluenzaA__ACF09403

SEQ ID NO: 112461 - RNA, 1410 nt, Artificial Sequence; identical to SEQ ID NO: 111965
  derived and/or modified CDS sequence (opt2) from neuraminidase__InfluenzaA__ACF22151

SEQ ID NO: 112462 - RNA, 1410 nt, Artificial Sequence; identical to SEQ ID NO: 110131
  derived and/or modified CDS sequence (opt2) from neuraminidase__InfluenzaA__ACF22246

SEQ ID NO: 112463 - RNA, 1410 nt, Artificial Sequence; identical to SEQ ID NO: 110131
  derived and/or modified CDS sequence (opt2) from neuraminidase__InfluenzaA__ACF22257

SEQ ID NO: 112464 - RNA, 1410 nt, Artificial Sequence; identical to SEQ ID NO: 110131
  derived and/or modified CDS sequence (opt2) from neuraminidase__InfluenzaA__ACF22279

SEQ ID NO: 112465 - RNA, 1410 nt, Artificial Sequence; identical to SEQ ID NO: 110131
  derived and/or modified CDS sequence (opt2) from neuraminidase__InfluenzaA__ACF22290

SEQ ID NO: 112466 - RNA, 1410 nt, Artificial Sequence; identical to SEQ ID NO: 110131
  derived and/or modified CDS sequence (opt2) from neuraminidase__InfluenzaA__ACF22301

SEQ ID NO: 112467 - RNA, 1410 nt, Artificial Sequence; identical to SEQ ID NO: 110131
  derived and/or modified CDS sequence (opt2) from neuraminidase__InfluenzaA__ACF22312

SEQ ID NO: 112468 - RNA, 1410 nt, Artificial Sequence
  derived and/or modified CDS sequence (opt2) from neuraminidase__InfluenzaA__ACF22323
augaaccccaaccagaagaucaucaccaucggcuccgucucccucaccaucgccaccgucugcuuccucaugcagaucgccauccucgucaccaccgucacccuccacuucaagcaguacgagugcgacucccccgccuccaaccaggucaugcccuacgagcccaucaucaucgagcgcaacaucaccgagaucgucuaccucaacaacaccaccaucgagaaggagaucugccccaaggucgucgaguaccgcaacugguccaagccccagugccagaucaccggcuucgcccccuucuccaaggacaacuccauccgccucuccgccggcggcgacaucugggucacccgcgagcccuacgucuccugcgaccacggcaagugcuaccaguucgcccucggccagggcaccacccucgacaacaagcacuccaacgacaccauccacgaccgcaucccccaccgcacccuccucaugaacgagcucggcguccccuuccaccucggcacccgccaggucugcaucgccugguccuccuccuccugccacgacggcaaggccuggcuccacgucugcaucaccggcgacgacaagaacgccaccgccuccuucaucuacgacggccgccucgucgacuccaucggcuccuggucccagaacauccuccgcacccaggaguccgagugcgucugcaucaacggcaccugcaccgucgucaugaccgacggcuccgccuccggccgcgccgacacccgcauccucuucaucgaggagggcaagaucguccacaucuccccccucuccggcuccgcccagcacgucgaggagugcuccugcuacccccgcuaccccggcguccgcugcaucugccgcgacaacuggaagggcuccaaccgccccgucgucgacaucaacauggaggacuacuccaucgacuccuccuacgucugcuccggccucgucggcgacaccccccgcaacgacgaccgcuccuccaacuccaacugccgcaaccccaacaacgagcgcggcaaccagggcgucaagggcugggccuucgacaacggcgacgacgucuggaugggccgcaccaucuccaaggaccuccgcuccggcuacgagaccuucaaggucaucggcggcugguccacccccaacuccaagucccagaucaaccgccaggucaucgucgacuccgacaaccgcuccggcuacuccggcaucuucuccgucgagggcaaguccugcaucaaccgcugcuucuacgucgagcucauccgcggccgcaagcaggagacccgcgucugguggaccuccaacuccaucgucgucuucugcggcaccuccggcaccuacggcaccggcuccuggcccgacggcgccaacaucaacuucaugcccaucuga

SEQ ID NO: 112469 - RNA, 1410 nt, Artificial Sequence; identical to SEQ ID NO: 110131
  derived and/or modified CDS sequence (opt2) from neuraminidase__InfluenzaA__ACF22334

SEQ ID NO: 112470 - RNA, 1410 nt, Artificial Sequence; identical to SEQ ID NO: 110131
  derived and/or modified CDS sequence (opt2) from neuraminidase__InfluenzaA__ACF22367

SEQ ID NO: 112471 - RNA, 1410 nt, Artificial Sequence
  derived and/or modified CDS sequence (opt2) from neuraminidase__InfluenzaA__ACF22378
augaaccccaaccagaagaucaucaccaucggcuccgucucccucaccaucgccaccgucugcuuccucaugcagaucgccauccucgucaccaccgucacccuccacuucaagcaguacgagugcgacucccccgccuccaaccaggucaugcccugcgagcccaucaucaucgagcgcaacaucaccgagaucgucuaccucaacaacaccaccaucgagaaggagaucugccccaaggucgucgaguaccgcaacugguccaagccccagugccagaucaccggcuucgcccccuucuccaaggacaacuccauccgccucuccgccggcggcgacaucugggucacccgcgagcccuacgucuccugcgaccacggcaagugcuaccaguucgcccucggccagggcaccacccucgacaacaagcacuccaacgacaccauccacgaccgcaucccccaccgcacccuccucaugaacgagcucggcguccccuuccaccucggcacccgccaggucugcaucgccugguccuccuccuccugccacgacggcaaggccuggcuccacgucugcaucaccggcgacgacaagaacgccaccgccuccuucaucuacgacggccgccucgucgacuccaucggcuccuggucccagaacauccuccgcacccaggaguccgagugcgucugcaucaacggcaccugcaccgucgucaugaccgacggcuccgccuccggccgcgccgacacccgcauccucuucaucgaggagggcaagaucguccacaucuccccccucuccggcuccgcccagcacgucgaggagugcuccugcuacccccgcuaccccggcguccgcugcaucugccgcgacaacuggaagggcuccaaccgccccgucgucgacaucaacauggaggacuacuccaucgacuccuccuacgucugcuccggccucgucggcgacaccccccgcaacgacgaccgcuccuccaacuccaacugcaagaaccccaacaacgagcgcggcaaccagggcgucaagggcugggccuucgacaacggcgacgacgucuggaugggccgcaccaucuccaaggaccuccgcuccggcuacgagaccuucaaggucaucggcggcugguccacccccaacuccaagucccagaucaaccgccaggucaucgucgacuccgacaaccgcuccggcuacuccggcaucuucuccgucgagggcaaguccugcaucaaccgcugcuucuacgucgagcucauccgcggccgcaagcaggagacccgcgucugguggaccuccaacuccaucgucgucuucugcggcaccuccggcaccuacggcaccggcuccuggcccgacggcgccaacaucaacuucaugcccaucuga

SEQ ID NO: 112472 - RNA, 1410 nt, Artificial Sequence
  derived and/or modified CDS sequence (opt2) from neuraminidase__InfluenzaA__ACF22389
augaaccccaaccagaagaucaucaccaucggcuccgucucccucaccaucgccaccgucugcuuccucaugcagaucgccauccucgucaccaccgucacccuccacuucaagcaguacgagugcgacucccccgccuccaaccaggucaugcccugcgagcccaucaucaucgagcgcaacaucaccgagaucgucuaccucaacaacaccaccaucgagaaggagaucugccccaaggucgucgaguaccgcaacugguccaagccccagugccagaucaccggcuucguccccuucuccaaggacaacuccauccgccucuccgccggcggcgacaucugggucacccgcgagcccuacgucuccugcgaccacggcaagugcuaccaguucgcccucggccagggcaccacccucgacaacaagcacuccaacgacaccauccacgaccgcaucccccaccgcacccuccucaugaacgagcucggcguccccuuccaccucggcacccgccaggucugcaucgccugguccuccuccuccugccacgacggcaaggccuggcuccacgucugcaucaccggcgacgacaagaacgccaccgccuccuucaucuacgacggccgccucgucgacuccaucggcuccuggucccagaacauccuccgcacccaggaguccgagugcgucugcaucaacggcaccugcaccgucgucaugaccgacggcuccgccuccggccgcgccgacacccgcauccucuucaucgaggagggcaagaucguccacaucuccccccucuccggcuccgcccagcacgucgaggagugcuccugcuacccccgcuaccccggcguccgcugcaucugccgcgacaacuggaagggcuccaaccgccccgucgucgacaucaacauggaggacuacuccaucgacuccuccuacgucugcuccggccucgucggcgacaccccccgcaacgacgaccgcuccuccaacuccaacugccgcaaccccaacaacgagcgcggcaaccagggcgucaagggcugggccuucgacaacggcgacgacgucuggaugggccgcaccaucuccaaggaccuccgcuccggcuacgagaccuucaaggucaucggcggcugguccacccccaacuccaagucccagaucaaccgccaggucaucgucgacuccgacaaccgcuccggcuacuccggcaucuucuccgucgagggcaaguccugcaucaaccgcugcuucuacgucgagcucauccgcggccgcaagcaggagacccgcgucugguggaccuccaacuccaucgucgucuucugcggcaccuccggcaccuacggcaccggcuccuggcccgacggcgccaacaucaacuucaugcccaucuga

SEQ ID NO: 112473 - RNA, 1410 nt, Artificial Sequence
  derived and/or modified CDS sequence (opt2) from neuraminidase__InfluenzaA__ACF22400
augaaccccaaccagaagaucaucaccaucggcuccgucucccucaccaucgccaccgucugcuuccucaugcagaucgccauccucgucaccaccgucacccuccacuucaagcaguacgagugcgacucccccgccuccaaccaggucaugcccugcgagcccaucaucaucgagcgcaacaucaccgagaucgucuaccucaacaacaccaccaucgagaaggagaucugccccaaggucgucgaguaccgcaacugguccaagccccagugccagaucaccggcuucgcccccuucuccaaggacaacuccauccgccucuccgccggcggcgacaucugggucacccgcgagcccuacgucuccugcgaccacggcaagugcuaccaguucgcccucggccagggcaccacccucgacaacaagcacuccaacgacaccauccacgaccgcaucccccaccgcacccuccucaugaacgagcucggcguccccuuccaccucggcacccgccaggucugcaucgccugguccuccuccuccugccacgacggcaaggccuggcuccacgucugcaucaccggcgacgacaagaacgccaccgccuccuucaucuacgacggccgccucauggacuccaucggcuccuggucccagaacauccuccgcacccaggaguccgagugcgucugcaucaacggcaccugcaccgucgucaugaccgacggcuccgccuccggccgcgccgacacccgcauccucuucaucgaggagggcaagaucguccacaucuccccccucuccggcuccgcccagcacgucgaggagugcuccugcuacccccgcuaccccggcguccgcugcaucugccgcgacaacuggaagggcuccaaccgccccgucgucgacaucaacauggaggacuacuccaucgacuccuccuacgucugcuccggccucgucggcgacaccccccgcaacgacgaccgcuccuccaacuccaacugccgcaaccccaacaacgagcgcggcaaccagggcgucaagggcugggccuucgacaacggcgacgacgucuggaugggccgcaccaucuccaaggaccuccgcuccggcuacgagaccuucaaggucaucggcggcugguccacccccaacuccaagucccagaucaaccgccaggucaucgucgacuccgacaaccgcuccggcuacuccggcaucuucuccgucgagggcaaguccugcaucaaccgcugcuucuacgucgagcucauccgcggccgcaagcaggagacccgcgucugguggaccuccaacuccaucgucgucuucugcggcaccuccggcaccuacggcaccggcuccuggcccgacggcgccaacaucaacuucaugcccaucuga

SEQ ID NO: 112474 - RNA, 1410 nt, Artificial Sequence; identical to SEQ ID NO: 112102
  derived and/or modified CDS sequence (opt2) from neuraminidase__InfluenzaA__ACF22411

SEQ ID NO: 112475 - RNA, 1413 nt, Artificial Sequence
  derived and/or modified CDS sequence (opt2) from neuraminidase__InfluenzaA__ACF33772
augaaccccaaccagaagaucaucaccaucggcuccaucuccaucgccaucggcaucaucucccucaugcuccagaucggcaacaucaucuccaucugggccucccacuccauccagaccggcucccagaaccacaccggcaucugcaaccagcgcaucaucaccuacgagaacuccaccugggucaaccacaccuacgucaacaucaacaacaccaacgucgucgccggcaaggacaagacccccgucacccucgccggcaacuccucccucugcuccaucuccggcugggccaucuacaccaaggacaacuccauccgcaucggcuccaagggcgacgucuucgucauccgcgagcccuucaucuccugcucccaccucgagugcaagaccuucuuccucacccagggcgcccuccucaacgacaagcacuccaacggcaccgucaaggaccgcucccccuaccgcgcccucauguccugcccccucggcgaggcccccucccccuacaacuccaaguucgaguccgucgccugguccgccuccgccugccacgacggcaucggcuggcucaccaucggcaucuccggccccgacaacggcgccgucgccguccucaaguacaacggcaucaucaccggcaccaucaaguccuggaagaagcagauccuccgcacccaggaguccgagugcgucugcaugaacggcuccugcuucaccaucaugaccgacggccccuccaacggcgccgccuccuacaagaucuucaagaucgagaagggcaaggucaccaaguccauggagcucaacgcccccaacuucuacuacgaggagugcuccugcuaccccgacaccggcaccgucaugugcgucugccgcgacaacuggcacggcuccaaccgccccugggucuccuucaaccagaaccucgacuaccagaucggcuacaucugcuccggcgucuucggcgacaacccccgccccaaggacggcgagggcuccugcaaccccgucaccgucgacggcgccaacggcgucaagggcuucuccuacaaguacggcaacggcgucuggaucggccgcaccaaguccaaccgcauccgcaagggcuucgagaugaucugggaccccaacggcuggaccaacaccgacuccgacuucuccgucaagcaggacaucgucgccaucaccgacugguccggcuacuccggcuccuucguccagcaccccgagcucaccggccucgacugcauccgccccugcuucugggucgagcucguccgcggccucccccgcgagaacaccaccaucuggaccuccggcuccuccaucuccuucugcggcgucaacuccgacaucgccaacugguccuggcccgacggcgccgagcuccccuucaccaucgacaaguga

SEQ ID NO: 112476 - RNA, 1410 nt, Artificial Sequence
  derived and/or modified CDS sequence (opt2) from neuraminidase__InfluenzaA__ACF33778
augaaccccaaccagaagaucaucaccaucggcuccgucucccucaccaucuccaccaucugcuucuucaugcagaucgccauccucaucaccaccgucacccuccacuucaagcaguacgaguucuccuccccccccaacaaccaggucaugcucugcgagcccaccaucaucgagcgcaacaucaccgagaucgucuaccucaccaacaccaccaucgagaaggagaucugccccaagcucgccgaguaccgcaacugguccaagccccagugcgacaucaccggcuucgcccccuucuccaaggacaacuccauccgccucuccgccggcggcgacaucugggucacccgcgagcccuacgucuccugcgaccccgacaagugcuaccaguucgcccucggccagggcaccacccucaacaacguccacuccaacgacaccguccacgaccgcacccccuaccgcacccuccucaugaacgagcucggcauccccuuccaccucggcaccaagcaggucugcaucgccugguccuccuccuccugccacgacggcaaggccuggcuccacgucugcgucaccggcgacgacaagaacgccaccgccuccuucaucuacaacggccgccucgucgacuccaucgucuccugguccaaggagauccuccgcacccaggaguccgagugcgucugcaucaacggcaccugcaccgucgucaugaccgacggcuccgccuccggcaaggccgacaccaagauccucuucaucgaggagggcaagaucguccacaccuccacccucuccggcuccgcccagaacgucgaggagugcuccugcuacccccgcuaccccggcguccgcugcgucugccgcgacaacuggaagggcuccaaccgccccaucgucgacaucaacaucaaggacuacuccaucgucucccgcuacgucugcuccggccucgucggcgacaccccccgcaagaacgacuccuccuccuccucccacugccucaaccccaacaacgaggagggcggccacggcgucaagggcugggccuucgacgacggcaacgacgucuggaugggccgcaccaucuccgagaagucccgcuccggcuacgagaccuucaaggucaucgagggcugguccaaccccaacuccaagcuccagaucaaccgccaggucaucgucgaccgcggcaaccgcuccggcuacuccggcaucuucuccgucgagggcaaguccugcaucaaccgcugcuucuacgucgagcucauccgcggccgcaaggaggagaccgagguccucuggaccuccaacuccaucgucgucuucugcggcaccuccggcaccuacggcaccggcuccuggcccgacggcgccgacaucaaccucaugcccaucuga

SEQ ID NO: 112477 - RNA, 1410 nt, Artificial Sequence
  derived and/or modified CDS sequence (opt2) from neuraminidase__InfluenzaA__ACF33785
augaaccccaaccagaagaucaucaccaucggcuccgucucccucaccaucuccaccaucugcuucuucaugcagaucgccauccucaucaccaccgucacccuccacuucaagcaguacgaguucaacuccccccccaacaaccaggucaugcucugcgagcccaccaucaucgagcgcaacaucaccgagaucgucuaccucaccaacaccaccaucgagaaggagaugugccccaagcucgccgaguaccgcaacugguccaagccccagugcgacaucaccggcuucgcccccuucuccaaggacaacuccauccgccucuccgccggcggcgacaucugggucacccgcgagcccuacgucuccugcgaccccgacaagugcuaccaguucgcccucggccagggcaccacccucaacaacguccacuccaacgacaccguccacguccgcacccccuaccgcacccuccucaugaacgagcucggcguccccuuccaccucggcaccaagcaggucugcaucgccugguccuccuccuccugccacgacggcaaggccuggcuccacgucugcgucaccggcgacgacaagaacgccaccgccuccuucaucuacaacggccgccucgucgacuccaucgucuccugguccaaggacauccuccgcacccaggaguccgagugcgucugcaucaacggcaccugcaccgucgucaugaccgacggcuccgccuccggcaaggccgacaccaagauccucuucaucgaggagggcaagaucguccacaccuccacccucuccggcuccgcccagcacgucgaggagugcuccugcuacccccgcuaccccggcguccgcugcgucugccgcgacaacuggaagggcuccaaccgccccaucgucgacaucaacaucaaggacuacuccaucgucuccuccuacgucugcuccggccucgucggcgacaccccccgcaagaccgacuccuccuccuccucccacugccucgaccccaacaacgaggagggcggccacggcgucaagggcugggccuucgacgacggcaacgacgucuggaugggccgcaccaucuccgagaagcuccgccucggcuacgagaccuucaaggucaucgagggcugguccaaccccaacuccaagcuccagaucaaccgccaggucaucgucgaccgcggcaaccgcuccggcuacuccggcaucuucuccgucgagggcaaguccugcaucaaccgcugcuucuacgucgagcucauccgcggccgcaaggaggagaccgagguccucuggaccuccaacuccaucgucgucuucugcggcaccuccggcaccuacggcaccggcuccuggcccgacggcgccgacaucaaccucaugcccaucuga

SEQ ID NO: 112478 - RNA, 1413 nt, Artificial Sequence
  derived and/or modified CDS sequence (opt2) from neuraminidase__InfluenzaA__ACF33787
augaaccccaaccagaagaucaucaccaucggcuccaucuccaucgccaucggcaucaucucccucaugcuccagaucggcaacaucaucuccaucugggccucccacuccauccagaccggcucccagaaccacaccggcaucugcaaccagcgcaucaucaccuacgagaacuccaccugggucaaccacaccuacgucaacaucaacaacaccaacgucgucgccggcaaggacaagacccccgucacccucgccggcaacuccucccucugcuccaucuccggcugggccaucuacaccaaggacaacuccauccgcaucggcuccaagggcgacgucuucgucauccgcgagcccuucaucuccugcucccaccucgagugcaagaccuucuuccucacccagggcgcccuccucaacgacaagcacuccaacggcaccgucaaggaccgcucccccuaccgcgcccucauguccugcccccucggcgaggcccccucccccuacaacuccaaguucgaguccgucgccugguccgccuccgccugccacgacggcaucggcuggcucaccaucggcaucuccggccccgacaacggcgccgucgccguccucaaguacaacggcaucaucaccggcaccaucaaguccuggaagaagcagauccuccgcacccaggaguccgagugcgucugcaugaacggcuccugcuucaccaucaugaccgacggccccggcaacggcgccgccuccuacaagaucuucaagaucgagaagggcaaggucaccaaguccauggagcucaacgcccccaacuuccacuacgaggagugcuccugcuaccccgacaccggcaccgucaugugcgucugccgcgacaacuggcacggcuccaaccgccccugggucuccuucaaccagaaccucgacuaccagaucggcuacaucugcuccggcgucuucggcgacaacccccgccccaaggacggcgagggcuccugcaaccccgucaccgucgacggcgccaacggcgucaagggcuucuccuacaaguacggcaacggcgucuggaucggccgcaccaaguccaaccgcauccgcaagggcuucgagaugaucugggaccccaacggcuggaccaacaccgacuccgacuucuccgucaagcaggacaucgucgccaucaccgacugguccggcuacuccggcuccuucguccagcaccccgagcucaccggccucgacugcauccgccccugcuucugggucgagcucguccgcggccuccccaaggagaacaccaccaucuggaccuccggcuccuccaucuccuucugcggcgucaacuccggcaucgccaacugguccuggcccgacggcgccgagcuccccuucaccaucgacaaguga

SEQ ID NO: 112479 - RNA, 1410 nt, Artificial Sequence; identical to SEQ ID NO: 111920
  derived and/or modified CDS sequence (opt2) from neuraminidase__InfluenzaA__ACF33798

SEQ ID NO: 112480 - RNA, 1410 nt, Artificial Sequence; identical to SEQ ID NO: 112093
  derived and/or modified CDS sequence (opt2) from neuraminidase__InfluenzaA__ACF41672

SEQ ID NO: 112481 - RNA, 1413 nt, Artificial Sequence; identical to SEQ ID NO: 112066
  derived and/or modified CDS sequence (opt2) from neuraminidase__InfluenzaA__ACF41683

SEQ ID NO: 112482 - RNA, 1410 nt, Artificial Sequence
  derived and/or modified CDS sequence (opt2) from neuraminidase__InfluenzaA__ACF41749
augaaccccaaccagaagaucaucaccaucggcuccgucucccucaccaucgccaccgucugcuuccucaugcagaucgccauccucgucaccaccgucacccuccacuucaagcaguacgagugcgacucccccgccuccaaccaggucaugcccugcgagcccaucaucaucgagcgcaacaucaccggcaucgucuaccucaacaacaccaccaucgagaaggagaucugccccaaggucgucgaguaccgcaacugguccaagccccagugccagaucaccggcuucgcccccuucuccaaggacaacuccauccgccucuccgccggcggcgacaucugggucacccgcgagcccuacgucuccugcgaccacggcaagugcuaccaguucgcccucggccagggcaccacccucgacaacaagcacuccaacgacaccauccacgaccgcaucccccaccgcacccuccucaugaacgagcucggcguccccuuccaccucggcacccgccaggucugcaucgccugguccuccuccuccugccacgacggcaaggccuggcuccacgucugcaucaccggcgacgacaagaacgccaccgccuccuucaucuacgacggccgccucgucgacuccaucggcuccuggucccagaacauccuccgcacccaggaguccgagugcgucugcaucaacggcaccugcaccgucgucaugaccgacggcuccgccuccggccgcgccgacacccgcauccucuucaucgaggagggcaagaucguccacaucuccccccucuccggcuccgcccagcacgucgaggagugcuccugcuacccccgcuaccccggcguccgcugcaucugccgcgacaacuggaagggcuccaaccgccccgucgucgacaucaacauggaggacuacuccaucgacuccuccuacgucugcuccggccucgucggcgacaccccccgcaacgacgaccgcuccuccaacuccaacugccgcaaccccaacaacgagcgcggcaaccagggcgucaagggcugggccuucgacaacggcgacgacgucuggaugggccgcaccaucuccaaggaccuccgcuccggcuacgagaccuucaaggucaucggcggcugguccacccccaacuccaagucccagaucaaccgccaggucaucgucgacuccgacaaccgcuccggcuacuccggcaucuucuccgucgagggcaaguccugcaucaaccgcugcuucuacgucgagcucauccgcggccgcaagcaggagacccgcgucugguggaccuccaacuccaucgucgucuucugcggcaccuccggcaccuacggcaccggcuccuggcccgacggcgccaacaucaacuucaugcccaucuga

SEQ ID NO: 112483 - RNA, 1410 nt, Artificial Sequence
  derived and/or modified CDS sequence (opt2) from neuraminidase__InfluenzaA__ACF41760
augaaccccaaccagaagaucaucaccaucggcuccgucucccucaccaucgccaccgucugcuuccucaugcagaucgccauccucgucaccaccgucacccuccacuucaagcaguacgagugcgacucccccgccuccaaccaggucaugcccugcgagcccaucaucaucgagcgcaacaucaccgagaucgucuaccucaacaacaccaccaucgagaaggagaucugccccaaggucgucgaguaccgcaacugguccaagccccagugccagaucaccggcuucgcccccuucuccaaggacaacuccauccgccucuccgccggcggcgacaucugggucacccgcgagcccuacgucuccugcgaccgcggcaagugcuaccaguucgcccucggccagggcaccacccucgacaacaagcacuccaacgacaccauccacgaccgcaucccccaccgcacccuccucaugaacgagcucggcguccccuuccaccucggcacccgccaggucugcaucgccugguccuccuccuccugccacgacggcaaggccuggcuccacgucugcaucaccggcgacgacaagaacgccaccgccuccuucaucuacgacggccgccucgucgacuccaucggcuccuggucccagaacauccuccgcacccaggaguccgagugcgucugcaucaacggcaccugcaccgucgucaugaccgacggcuccgccuccggccgcgccgacacccgcauccucuucaucgaggagggcaagaucguccacaucuccccccucuccggcuccgcccagcacgucgaggagugcuccugcuacccccgcuaccccggcguccgcugcaucugccgcgacaacuggaagggcuccaaccgccccgucgucgacaucaacauggaggacuacuccaucgacuccuccuacgucugcuccggccucgucggcgacaccccccgcaacgacgaccgcuccuccaacuccaacugccgcaaccccaacaacgagcgcggcaaccagggcgucaagggcugggccuucgacaacggcgacgacgucuggaugggccgcaccaucuccaaggaccuccgcuccggcuacgagaccuucaaggucaucggcggcugguccacccccaacuccaagucccagaucaaccgccaggucaucgucgacuccgacaaccgcuccggcuacuccggcaucuucuccgucgagggcaaguccugcaucaaccgcugcuucuacgucgagcucauccgcggccgcaagcaggagacccgcgucugguggaccuccaacuccaucgucgucuucugcggcaccuccggcaccuacggcaccggcuccuggcccgacggcgccaacaucaacuucaugcccaucuga

SEQ ID NO: 112484 - RNA, 1410 nt, Artificial Sequence
  derived and/or modified CDS sequence (opt2) from neuraminidase__InfluenzaA__ACF41771
augaaccccaaccagaagaucaucaccaucggcuccgucucccucaccaucgccaccgucugcuuccucaugcagaucgccauccucgucaccaccgucacccuccacuucaagcaguacgagugcgacucccccgccuccaaccaggucaugcccugcgagcccaucaucaucgagcgcaacaucaccgagaucgucuaccucaacaacaccaccaucgagaaggagaucugccccaaggucgucgaguaccgcaacugguccaagccccagugccagaucaccggcuucgcccccuucuccaaggacaacuccauccgccucuccgccggcggcgacaucugggucacccgcgagcccuacgucuccugcgaccacggcaagugcuaccaguucgcccucggccagggcaccacccucgacaacaagcacuccaacgacaccauccacgaccgcaucccccaccgcacccuccucaugaacgagcucggcguccccuuccaccucggcacccgccaggucugcaucgccugguccuccuccuccugccacgacggcaaggccuggcuccacgucugcaucaccggcgacgacaagaacgccaccgccuccuucaucuacgacggccgccucgucgacuccaucggcuccuggucccagaacauccuccgcacccaggaguccgagugcgucugcaucaacggcaccugcaccgucgucaucaccgacggcuccgccuccggccgcgccgacacccgcauccucuucaucgaggagggcaagaucguccacaucuccccccucuccggcuccgcccagcacgucgaggagugcuccugcuacccccgcuaccccggcguccgcugcaucugccgcgacaacuggaagggcuccaaccgccccgucgucgacaucaacauggaggacuacuccaucgacuccuccuacgucugcuccggccucgucggcgacaccccccgcaacgacgaccgcuccuccaacuccaacugccgcaaccccaacaacgagcgcggcaaccagggcgucaagggcugggccuucgacaacggcgacgacgucuggaugggccgcaccaucuccaaggaccuccgcuccggcuacgagaccuucaaggucaucggcggcugguccacccccaacuccaagucccagaucaaccgccaggucaucgucgacuccgacaaccgcuccggcuacuccggcaucuucuccgucgagggcaaguccugcaucaaccgcugcuucuacgucgagcucauccgcggccgcaagcaggagacccgcgucugguggaccuccaacuccaucgucgucuucugcggcaccuccggcaccuacggcaccggcuccuggcccgacggcgccaacaucaacuucaugcccaucuga

SEQ ID NO: 112485 - RNA, 1410 nt, Artificial Sequence; identical to SEQ ID NO: 110131
  derived and/or modified CDS sequence (opt2) from neuraminidase__InfluenzaA__ACF41793

SEQ ID NO: 112486 - RNA, 1410 nt, Artificial Sequence; identical to SEQ ID NO: 110131
  derived and/or modified CDS sequence (opt2) from neuraminidase__InfluenzaA__ACF41804

SEQ ID NO: 112487 - RNA, 1410 nt, Artificial Sequence; identical to SEQ ID NO: 110131
  derived and/or modified CDS sequence (opt2) from neuraminidase__InfluenzaA__ACF41826

SEQ ID NO: 112488 - RNA, 1365 nt, Artificial Sequence; identical to SEQ ID NO: 111755
  derived and/or modified CDS sequence (opt2) from neuraminidase__InfluenzaA__ACF41837

SEQ ID NO: 112489 - RNA, 1413 nt, Artificial Sequence
  derived and/or modified CDS sequence (opt2) from neuraminidase__InfluenzaA__ACF41881
augaaccccaaccagaagaucaucaccaucggcuccaucuccaucgccaucggcaucaucucccucaugcuccagaucggcaacaucaucuccaucugggccucccacuccauccagaccggcucccagaaccacaccggcgucugcaaccagcgcaucaucaccuacgagaacuccaccugggucaaccacaccuacgucaacaucaacaacaccaacgucgucgccggcaaggacaagaccuccgucacccucgccggcaacuccucccucugcuccaucuccggcugggccaucuacaccaaggacaacuccauccgcaucggcuccaagggcgacgucuucgucauccgcgagcccuucaucuccugcucccaccucgagugccgcaccuucuuccucacccagggcgcccuccucaacgacaagcacuccaacggcaccgucaaggaccgcucccccuaccgcgcccucauguccugcccccucggcgaggcccccucccccuacaacuccaaguucgaguccgucgccugguccgccuccgccugccacgacggcaugggcuggcucaccaucggcaucuccggccccgacaacggcgccgucgccguccucaaguacaacggcaucaucaccgagaccaucaaguccuggaagaagcgcauccuccgcacccaggaguccgagugcgucugcgucaacggcuccugcuucaccaucaugaccgacggccccuccaacggcgccgccuccuacaagaucuucaagaucgagaagggcaaggucaccaaguccaucgagcucaacgcccccaacuuccacuacgaggagugcuccugcuaccccgacaccggcaccgucaugugcgucugccgcgacaacuggcacggcuccaaccgccccugggucuccuucaaccagaaccucgacuaccagaucggcuacaucugcuccggcgucuucggcgacaacccccgccccaaggacggcgagggcuccugcaaccccgucaccgucgacggcgccgacggcgucaagggcuucuccuacaaguacggcaacggcgucuggaucggccgcaccaaguccaaccgccuccgcaagggcuucgagaugaucugggaccccaacggcuggaccgacaccgacuccgacuucuccgucaagcaggacgucgucgccaucaccgacugguccggcuacuccggcuccuucguccagcaccccgagcucaccggccucgacugcauccgccccugcuucugggucgagcucguccgcggccucccccgcgagaacaccaccaucuggaccuccggcuccuccaucuccuucugcggcgucaacuccgacaccgccaacugguccuggcccgacggcgccgagcuccccuucaccaucgacaaguga

SEQ ID NO: 112490 - RNA, 1410 nt, Artificial Sequence; identical to SEQ ID NO: 111965
  derived and/or modified CDS sequence (opt2) from neuraminidase__InfluenzaA__ACF41892

SEQ ID NO: 112491 - RNA, 1410 nt, Artificial Sequence; identical to SEQ ID NO: 110363
  derived and/or modified CDS sequence (opt2) from neuraminidase__InfluenzaA__ACF41903

SEQ ID NO: 112492 - RNA, 1410 nt, Artificial Sequence
  derived and/or modified CDS sequence (opt2) from neuraminidase__InfluenzaA__ACF41914
augaaccccaaccagaagaucaucaccaucggcuccgucucccucaccaucuccaccaucugcuucuucaugcagaucgccauccucaucaccaccgucacccuccacuucaagcaguacgaguucaacuccccccccaacaaccaggucaugcucugcgagcccaccaucaucgagcgcaacaucaccgagaucgucuaccucaccaacaccaccaucgagaaggagaucugccccaagcucgccgaguaccgcaacugguccaagccccagugcaacaucaccggcuucgcccccuucuccaaggacaacuccauccgccucuccgccggcggcgacaucugggucacccgcgagcccuacgucuccugcgaccccgacaagugcuaccaguucgcccucggccagggcaccacccucaacaacguccacuccaacgacaccguccacgaccgcacccccuaccgcacccuccucaugaacgagcucggcguccccuuccaccucggcaccaagcaggucugcaucgccugguccuccuccuccugccacgacggcaaggccuggcuccacgucugcgucaccggcgacgacaagaacgccaccgccuccuucaucuacaacggccgccucgucgacuccaucgucuccugguccaaggagauccuccgcacccaggaguccgagugcgucugcaucaacggcaccugcaccgucgucaugaccgacggcuccgccuccggcaaggccgacaccaagauccucuucaucgaggagggcaagaucguccacaccuccacccucuccggcuccgcccagcacgucgaggagugcuccugcuacccccgcuaccucggcguccgcugcgucugccgcgacaacuggaagggcuccaaccgccccaucgucgacaucaacaucaaggacuacuccaucgucuccuccuacgucugcuccggccucgucggcgacaccccccgcaagaacgacuccuccuccuccucccacugccucgaccccaacaacgaggagggcggccacggcgucaagggcugggccuucgacgacggcaacgacgucuggaugggccgcaccaucuccgagaagcuccgcuccggcuacgagaccuucaaggucaucgagggcugguccaaccccaacuccaagcuccagaucaaccgccaggucaucgucgaccgcggcaaccgcuccggcuacuccggcaucuucuccgucgagggcaaguccugcaucaaccgcugcuucuacgucgagcucauccgcggccgcaaggaggagaccgagguccucuggaccuccaacuccaucgucgucuucugcggcaccuccggcaccuacggcaccggcuccuggcccgacggcgccgacaucaaccucaugcccaucuga

SEQ ID NO: 112493 - RNA, 1413 nt, Artificial Sequence
  derived and/or modified CDS sequence (opt2) from neuraminidase__InfluenzaA__ACF41925
augaaccccaaccagaagaucaucaccaucggcuccaucuccauggccaucggcaucaucucccucauccuccagaucggcaacaucaucuccaucugggccucccacuccauccagaccggcucccagaaccacaccggcaucugcaaccagcgcaucaucaccuacgagaacuccaccugggucaaccagaccuacgucaacaucaacaacaccaacgucgucgccggcaaggacaagaccuccgucacccucgccggcaacuccucccucugccccauccgcggcugggccaucuacaccaaggacaacuccauccgcaucggcuccaagggcgacgucuucgucauccgcgagcccuucaucuccugcucccaccucgagugccgcaccuucuuccucacccagggcgcccuccucaacgacaagcacuccaacggcaccgucaaggaccgcucccccuaccgcgcccucauguccugcccccucggcgaggcccccucccccuacaacucccgcuucgaguccgucgccugguccgccuccgccugccacgacggcaugggcuggcucaccaucggcaucuccggccccgacaacggcgccgucgccguccucaaguacaacggcaucaucaccgagaccaucaaguccuggaagaagcgcauccuccgcacccaggaguccgagugcgucugcgucaacggcuccugcuucaccaucaugaccgacggccccuccaacggcgccgccuccuaccgcaucuucaagaucgagaagggcaaggucaccaaguccaucgagcucgacgcccccaacuaccacuacgaggagugcuccugcuaccccgacaccggcaccgucaugugcgucugccgcgacaacuggcacggcuccaaccgccccugggucuccuucaaccagaaccucgacuaccagaucggcuacaucugcuccggcgucuucggcgacaacccccgccccaaggacggcgagggcuccugcaaccccgucaccgucgacggcgccgacggcgucaagggcuucuccuaccgcuacggcaacggcgucuggaucggccgcaccaaguccaaccgccuccgcaagggcuucgagaugaucugggaccccaacggcuggaccgacaccgacuccgacuucuccgucaagcaggacgucgucgccaugaccgacugguccggcuacuccggcuccuucguccagcaccccgagcucaccggccucgacugcaugcgccccugcuucugggucgagcucauccgcggccgcccccgcgagaacaccaccaucuggaccuccggcuccuccaucuccuucugcggcgucaacuccgacaccgccaacugguccuggcccgacggcgccgagcuccccuucaccaucgacaaguga

SEQ ID NO: 112494 - RNA, 1413 nt, Artificial Sequence; identical to SEQ ID NO: 112493
  derived and/or modified CDS sequence (opt2) from neuraminidase__InfluenzaA__ACF41936

SEQ ID NO: 112495 - RNA, 1410 nt, Artificial Sequence
  derived and/or modified CDS sequence (opt2) from neuraminidase__InfluenzaA__ACF54392
augaaccccaaccagaagaucaucaccaucggcuccgucucccucaccaccgccaccgccugcuuccucacccagaucgccauccucgucaccaccgucacccuccacuucaagcagcacgagugcgacucccccgccuccaaccaggucaugcccugcgagcccaucaucaucgagcgcaacaucaccgagaucgucuaccucaacaacaccaccaucgagaaggagaucugccccaaggucgucgaguaccgcaacugguccaagccccagugccagaucaccggcuucgcccccuucuccaaggacaacuccauccgccucuccgccggcggcgacaucugggucacccgcgagcccuacgucuccugcgacuccggcaagugcuaccaguucgcccucggccagggcaccacccucgacaacaagcacuccaacgacaccauccacgaccgcaucccccaccgcacccuccucaugaacgagcucggcguccccuuccaccucggcacccgccaggucugcaucgccugguccuccuccuccugccacgacggcaaggccuggcuccacgucugcaucaccggcgacgacaagaacgccaccgccuccuucaucuacgacggccgccucgucgacuccaucggcuccuggucccagaacauccuccgcacccaggaguccgagugcgucugcaucaacggcaccugcaccgucgucaugaccgacggcuccgccuccggccgcgccgacacccgcauccucuucaucgaggagggcaagaucguccacaucuccccccucuccggcuccgcccagcacgucgaggagugcuccugcuacccccgcuaccccggcguccgcugcaucugccgcgacaacuggaagggcuccaaccgccccgucgucgacaucaacauggaggacuacuccaucgacuccuccuacgucugcuccggccucgucggcgacaccccccgcaacgacgaccgcuucuccaacuccaacugccgcaaccccaacaacgagcgcggcaaccagggcgucaagggcugggccuucgacaacggcgacgacgucuggaugggccgcaccaucuccaaggaccuccgcuccggcuacgagaccuucaaggucaucggcggcugguccacccccaacuccaagucccagaucaaccgccaggucaucgucgacuccgacaaccgcuccggcuacuccggcaucuucuccgucgagggcaaguccugcaucaaccgcugcuucuacgucgagcucauccgcggccgcaagcaggagacccgcgucugguggaccuccaacuccaucgucgucuucugcggcaccuccggcaccuacggcaccggcuccuggcccgacggcgccaacaucaacuucaugcccaucuga

SEQ ID NO: 112496 - RNA, 1410 nt, Artificial Sequence; identical to SEQ ID NO: 110131
  derived and/or modified CDS sequence (opt2) from neuraminidase__InfluenzaA__ACF54403

SEQ ID NO: 112497 - RNA, 1410 nt, Artificial Sequence; identical to SEQ ID NO: 110131
  derived and/or modified CDS sequence (opt2) from neuraminidase__InfluenzaA__ACF54414

SEQ ID NO: 112498 - RNA, 1410 nt, Artificial Sequence; identical to SEQ ID NO: 110131
  derived and/or modified CDS sequence (opt2) from neuraminidase__InfluenzaA__ACF54425

SEQ ID NO: 112499 - RNA, 1410 nt, Artificial Sequence; identical to SEQ ID NO: 110131
  derived and/or modified CDS sequence (opt2) from neuraminidase__InfluenzaA__ACF54436

SEQ ID NO: 112500 - RNA, 1410 nt, Artificial Sequence
  derived and/or modified CDS sequence (opt2) from neuraminidase__InfluenzaA__ACF54447
augaaccccaaccagaagaucaucaccaucggcuccgucucccucaccaucgccaccgucugcuuccucaugcagaucgccauccucgucaccaccgucacccuccacuucaagcaguacgagugcgacucccccgccuccaaccaggucaugcccugcgagcccaucaucaucgagcgcaacaucaccgagaucgucuaccucaacaacaccaccaucgagaaggagaucugccccaaggucgucgaguaccgcaacugguccaagccccagugccagaucaccggcuucgcccccuucuccaaggacaacuccauccgccucuccgccggcggcgacaucugggucacccgcgagcccuacgucuccugcgaccacggcaagugcuaccaguucgcccucggccagggcaccacccucgacaacaagcacuccaacgacaccauccacgaccgcaucccccaccgcacccuccucaugaacgagcucggcguccccuuccaccucggcaccaagcaggucugcaucgccugguccuccuccuccugccacgacggcaaggccuggcuccacgucugcaucaccggcgacgacaagaacgccaccgccuccuucaucuacgacggccgccucgucgacuccaucggcuccuggucccagaacauccuccgcacccaggaguccgagugcgucugcaucaacggcaccugcaccgucgucaugaccgacggcuccgccuccggccgcgccgacacccgcauccucuucaucgaggagggcaagaucguccacaucuccccccucuccggcuccgcccagcacgucgaggagugcuccugcuacccccgcuaccccggcguccgcugcaucugccgcgacaacuggaagggcuccaaccgccccgucgucgacaucaacauggaggacuacuccaucgacuccuccuacgucugcuccggccucgucggcgacaccccccgcaacgacgaccgcuccuccaacuccaacugccgcaaccccaacaacgagcgcggcaaccagggcgucaagggcugggccuucgacaacggcgacgacgucuggaugggccgcaccaucuccaaggaccuccgcuccggcuacgagaccuucaaggucaucggcggcugguccacccccaacuccaagucccagaucaaccgccaggucaucgucgacuccgacaaccgcuccggcuacuccggcaucuucuccgucgagggcaaguccugcaucaaccgcugcuucuacgucgagcucauccgcggccgcaagcaggagacccgcgucugguggaccuccaacuccaucgucgucuucugcggcaccuccggcaccuacggcaccggcuccuggcccgacggcgccaacaucaacuucaugcccaucuga

SEQ ID NO: 112501 - RNA, 1410 nt, Artificial Sequence
  derived and/or modified CDS sequence (opt2) from neuraminidase__InfluenzaA__ACF54469
augaaccccaaccagaagaucaucaccaucggcuccgucucccucaccaucgccaccgucugcuuccucaugcagaucgccauccucgucaccaccgucacccuccacuucaagcaguacgagugcgacucccccgccuccaaccaggucaugcccugcgagcccaucaucaucgagcgcaacaucaccgagaucgucuaccucaacaacaccaccaucgagaaggagaucugccccaaggucgucgaguaccgcaacugguccaagccccagugccagaucaccggcuucgcccccuucuccaaggacaacuccauccgccucuccgccggcggcgacaucugggucacccgcgagcccuacgucuccugcgaccacggcaagugcuaccaguucgcccucggccagggcaccacccucgacaacaagcacuccaacgacaccauccacgaccgcaucccccaccgcacccuccucaugaacgagcucggcguccccuuccaccucggcacccgccaggucugcauggccugguccuccuccuccugccacgacggcaaggccuggcuccacgucugcaucaccggcgacgacaagaacgccaccgccuccuucaucuacgacggccgccucgucgacuccaucggcuccuggucccagaacauccuccgcacccaggaguccgagugcgucugcaucaacggcaccugcaccgucgucaugaccgacggcuccgccuccggccgcgccgacacccgcauccucuucaucgaggagggcaagaucguccacaucuccccccucuccggcuccgcccagcacgucgaggagugcuccugcuacccccgcuaccccggcguccgcugcaucugccgcgacaacuggaagggcuccaaccgccccgucgucgacaucaacauggaggacuacuccaucgacuccuccuacgucugcuccggccucgucggcgacaccccccgcaacgacgaccgcuccuccaacuccaacugccgcaaccccaacaacgagcgcggcaaccagggcgucaagggcugggccuucgacaacggcgacgacgucuggaugggccgcaccaucuccaaggaccuccgcuccggcuacgagaccuucaaggucaucggcggcugguccacccccaacuccaagucccagaucaaccgccaggucaucgucgacuccgacaaccgcuccggcuacuccggcaucuucuccgucgagggcaaguccugcaucaaccgcugcuucuacgucgagcucauccgcggccgcaagcaggagacccgcgucugguggaccuccaacuccaucgucgucuucugcggcaccuccggcaccuacggcaccggcuccuggcccgacggcgccaacaucaacuucaugcccaucuga

SEQ ID NO: 112502 - RNA, 1410 nt, Artificial Sequence; identical to SEQ ID NO: 111796
  derived and/or modified CDS sequence (opt2) from neuraminidase__InfluenzaA__ACF54480

SEQ ID NO: 112503 - RNA, 1410 nt, Artificial Sequence
  derived and/or modified CDS sequence (opt2) from neuraminidase__InfluenzaA__ACF54502
augaaccccaaccagaagaucaucaccaucggcuccgucucccucaccaucgccaccgucugcuuccucaugcagaucgccauccucgccaccaccgucacccuccacuucaagcagcacgagugcgacucccccgccuccaaccaggucaugcccugcgagcccaucaucaucgagcgcaacaucaccgagaucgucuaccucaacaacaccaccaucgagaaggagaucugccccgaggucgucgaguaccgcaacugguccaagccccagugccagaucaccggcuucgcccccuucuccaaggacaacuccauccgccucuccgccggcggcgacaucugggucacccgcgagcccuacgucuccugcgaccccggcaagugcuaccaguucgcccucggccagggcaccacccucgacaacaagcacuccaacggcaccauccacgaccgcaucccccaccgcacccuccucaugaacgagcucggcgucuccuuccaccucggcaccaagcaggucugcgucgccugguccuccuccuccugccacgacggcaaggccuggcuccacgucugcgucaccggcgacgaccgcaacgccaccgccuccuucaucuacgacggccgccucgucgacuccaucggcuccuggucccagaacauccuccgcacccaggaguccgagugcgucugcaucaacggcaccugcaccgucgucaugaccgacggcuccgccuccggccgcgccgacacccgcauccucuucaucaaggagggcaagaucguccacaucuccccccucuccggcuccgcccagcacaucgaggagugcuccugcuacccccgcuaccccgacguccgcugcaucugccgcgacaacuggaagggcuccaaccgccccgucaucgacaucaacauggaggacuacuccaucgacuccuccuacgucugcuccggccucgucggcgacaccccccgcaacgacgacuccuccuccaacuccaacugccgcgaccccaacaacgagcgcggcaaccccggcgucaagggcugggccuucgacaacggcgacgacgucuggaugggccgcaccaucaacaaggacucccgcuccggcuacgagaccuucaaggucaucggcggcugguccacccccaacuccaagucccaggucaaccgccaggucaucgucgacaacaacaacugguccggcuacuccggcaucuucuccgucgagggcaaguccugcaucaaccgcugcuucuacgucgagcucauccgcggccgcccccaggagacccgcgucugguggaccuccaacuccaucgucgucuucugcggcaccuccggcaccuacggcaccggcuccuggcccgacggcgccaacaucaacuucaugcccaucuga

SEQ ID NO: 112504 - RNA, 1410 nt, Artificial Sequence; identical to SEQ ID NO: 112503
  derived and/or modified CDS sequence (opt2) from neuraminidase__InfluenzaA__ACF54513

SEQ ID NO: 112505 - RNA, 1410 nt, Artificial Sequence
  derived and/or modified CDS sequence (opt2) from neuraminidase__InfluenzaA__ACF54524
augaaccccaaccagaagaucaucaccaucggcuccgucucccucaccaucgccaccgucugcuucuucaugcagaucgccauccucgccaccaccgucacccuccacuucaagcagcacgagugcgacucccccgccuccaaccaggucaugcccugcgagcccaucaucaucgagcgcaacaucaccgagaucgucuaccucaacaacaccaccaucgagaaggagaucugccccgaggucgucgaguaccgcaacugguccaagccccagugccagaucaccggcuucgcccccuucuccaaggacaacuccauccgccucuccgccggcggcgacaucugggucacccgcgagcccuacgucuccugcgaccccggcaagugcuaccaguucgcccucggccagggcaccacccucgacaacaagcacuccaacggcaccauccacgaccgcaucccccaccgcacccuccucaugaacgagcucggcgucuccuuccaccucggcaccaagcaggucugcgucgccugguccuccuccuccugccacgacggcaaggccuggcuccacgucugcgucaccggcgacgaccgcaacgccaccgccuccuucaucuacgacggccgccucgucgacuccaucggcuccuggucccagaacauccuccgcacccaggaguccgagugcgucugcaucaacggcaccugcaccgucgucaugaccgacggcuccgccuccggccgcgccgacacccgcauccucuucaucaaggagggcaagaucguccacaucuccccccucuccggcuccgcccagcacaucgaggagugcuccugcuacccccgcuaccccgacguccgcugcaucugccgcgacaacuggaagggcuccaaccgccccgucaucgacaucaacauggaggacuacuccaucgacuccuccuacgucugcuccggccucgucggcgacaccccccgcaacgacgacuccuccuccaacuccaacugccgcgaccccaacaacgagcgcggcaaccccggcgucaagggcugggccuucgacaacggcgacgacgucuggaugggccgcaccaucaacaaggacucccgcuccggcuacgagaccuucaaggucaucggcggcugguccacccccaacuccaagucccaggucaaccgccaggucaucgucgacaacaacaacugguccggcuacuccggcaucuucuccgucgagggcaaguccugcaucaaccgcugcuucuacgucgagcucauccgcggccgcccccaggagacccgcgucugguggaccuccaacuccaucgucgucuucugcggcaccuccggcaccuacggcaccggcuccuggcccgacggcgccaacaucaacuucaugcccaucuga

SEQ ID NO: 112506 - RNA, 1410 nt, Artificial Sequence
  derived and/or modified CDS sequence (opt2) from neuraminidase__InfluenzaA__ACF54535
augaaccccaaccagaagaucaucaccaucggcuccgucucccucaucaucuccaccaucugcuucuucaugcagaccgccauccucaucaccaccgucacccuccacuucaagcaguacgaguucaacuccccccccaacaaccaggucaugcucugcgagcccaccaucaucgagcgcaacaucaccaagaucgucuaccucaccaacaccaccaucgagaaggagaucugccccaagcucgccgaguaccgcaacugguccaagccccagugcgacaucaccggcuucgcccccuucuccaaggacaacuccauccgccucuccgccggcggcgacaucugggucacccgcgagcccuacgucuccugcgaccccgacaagugcuaccaguucgcccucggccagggcaccacccucaacaacguccacuccaacgacaccguccgcgaccgcacccccuaccgcacccuccucaugaacgagcucggcguccccuuccaccucggcaccaagcaggucugcaucgccugguccuccuccuccugccacgacggcaaggccuggcuccacgucugcaucaccggcgacgacaagaacgccaccgccuccuucaucuacaacggccgccucgucgacuccaucgucuccugguccaaggagauccuccgcacccaggaguccgagugcgucugcaucaacggcaccugcaccgucgucaugaccgacggcuccgccuccggcaaggccgacaccaagauccucuucaucgaggagggcaagaucguccacaccuccacccucuccggcuccgcccagcacgucgaggagugcuccugcuacccccgcuaccccggcguccgcugcgucugccgcgacaacuggaagggcuccaaccgccccaucgucgacaucaacaucaaggaccacuccaucgucuccuccuacgucugcuccggccucgucggcgacaccccccgcaagaacgacuccuccuccuccucccacugccucgaccccaacaacgaggagggcggccacggcgucaagggcugggccuucgacgacggcaacgacgucuggaugggccgcaccaucuccgagaagucccgccucggcuacgagaccuucaaggucaucgagggcugguccaaccccaaguccaagcuccagaucaaccgccaggucaucgucgaccgcggcaaccgcuccggcuacuccggcaucuucuccgucgagggcaaguccugcaucaaccgcugcuucuacgucgagcucauccgcggccgcaaggaggagaccgagguccucuggaccuccaacuccaucgucgucuucugcggcaccuccggcaccuacggcaccggcuccuggcccgacggcgccgacaucaaccucaugcccaucuga

SEQ ID NO: 112507 - RNA, 1410 nt, Artificial Sequence; identical to SEQ ID NO: 110320
  derived and/or modified CDS sequence (opt2) from neuraminidase__InfluenzaA__ACF54557

SEQ ID NO: 112508 - RNA, 1410 nt, Artificial Sequence; identical to SEQ ID NO: 111965
  derived and/or modified CDS sequence (opt2) from neuraminidase__InfluenzaA__ACF54568

SEQ ID NO: 112509 - RNA, 1410 nt, Artificial Sequence
  derived and/or modified CDS sequence (opt2) from neuraminidase__InfluenzaA__ACF54579
augaaccccaaccagaagaucaucaccaucggcuccgucucccucaccaucuccaccaucugcuucuucaugcagaucgccauccucaucaccaccgucacccuccacuucaagcaguacgaguucaacuccccccccaacaaccaggucaugcucugcgagcccaccaucaucgagcgcaacaucaccgagaucgucuaccucaccaacaccaccaucgagaaggagaucugccccaagcucgccgaguaccgcaacugguccaagccccagugcaacaucaccggcuucgcccccuucuccaaggacaacuccauccgccucuccgccggcggcgacaucugggucacccgcgagcccuacgucuccugcgaccccgacaagugcuaccaguucgcccucggccagggcaccacccucaacaacguccacuccaacgacaccguccacgaccgcacccccuaccgcacccuccucaugaacgagcucggcguccccuuccaccucggcaccaagcaggucugcaucgccugguccuccuccuccugccacgacggcaaggccuggcuccacgucugcgucaccggcgacgacaagaacgccaccgccuccuucaucuacaacggccgccucgucgacuccaucgucuccugguccaaggagauccuccgcacccaggaguccgagugcgucugcaucaacggcaccugcaccgucgucaucaccgacggcuccgccuccggcaaggccgacaccaagauccucuucaucgaggagggcaagaucguccacaccuccacccucuccggcuccgcccagcacgucgaggagugcuccugcuacccccgcuaccccggcguccgcugcgucugccgcgacaacuggaagggcuccaaccgccccaucgucgacaucaacaucaaggacuacuccaucgucuccuccuacgucugcuccggccucgucggcgacaccccccgcaagaacgacuccuccuccuccucccacugccucgaccccaacaacgaggagggcggccacggcgucaagggcugggccuucgacgacggcaacgacgucuggaugggccgcaccaucuccgagaagcuccgcuccggcuacgagaccuucaaggucaucgagggcugguccaaccccaacuccaagcuccagaucaaccgccaggucaucgucgaccgcggcaaccgcuccggcuacuccggcaucuucuccgucgagggcaaguccugcaucaaccgcugcuucuacgucgagcucauccgcggccgcaaggaggagaccgagguccucuggaccuccaacuccaucgucgucuucugcggcaccuccggcaccuacggcaccggcuccuggcccgacggcgccgacaucaaccucaugcccaucuga

SEQ ID NO: 112510 - RNA, 1362 nt, Artificial Sequence
  derived and/or modified CDS sequence (opt2) from neuraminidase__InfluenzaA__ACF54601
augaaccccaaccagaagaucaucaccaucggcuccaucugcauggucgucggcaucaucucccucauccuccagaucggcaacaucaucuccaucuggaucucccacuccauccagaccggcaaccagaaccacaccggcaucugcaaccagggcuccaucaccuacaaggucgucgccggccaggacuccaccuccgucauccucaccggcaacuccucccucugccccauccgcggcugggccauccacuccaaggacaacggcauccgcaucggcuccaagggcgacgucuucgucauccgcgagcccuucaucuccugcucccaccucgagugccgcaccuucuuccucacccagggcgcccuccucaacgacaagcacucccgcggcaccuucaaggaccgcucccccuaccgcgcccucauguccugccccgucggcgaggcccccucccccuacaacucccgcuucgaguccgucgccugguccgccuccgccugccacgacggcaugggcuggcucaccaucggcaucuccggccccgacgacggcgccgucgccguccucaaguacaacggcaucaucaccgagaccaucaaguccuggcgcaagaacauccuccgcacccaggaguccgagugcaccugcgucaacggcuccugcuucaccaucaugaccgacggccccuccgacggccucgccuccuacaagaucuucaagaucgagaagggcaaggucaccaaguccaucgagcucaacgcccccaacucccacuacgaggagugcuccugcuaccccgacaccggcaaggucaugugcgucugccgcgacaacuggcacggcuccaaccgccccugggucuccuucgaccagaaccucgacuacaagaucggcuacaucugcuccggcgucuucggcgacaacccccgccccaaggacggcaccggcuccugcggccccgucuccgccgacggcgccaacggcgucaagggcuucuccuacaaguacggcaacggcgucuggaucggccgcaccaaguccgacuccucccgccacggcuucgagaugaucugggaccccaacggcuggaccgagaccgacucccgcuucuccaugcgccaggacgucgucgccaugaccgaccgcuccggcuacuccggcuccuucguccagcaccccgagcucaccggccucgacugcaugcgccccugcuucugggucgagcucauccgcggccuccccgaggagaacgccaucuggaccuccggcuccaucaucuccuucugcggcgucaacuccgacaccgucgacugguccuggcccgacggcgccgagcuccccuucaccaucgacaaguga

SEQ ID NO: 112511 - RNA, 1350 nt, Artificial Sequence
  derived and/or modified CDS sequence (opt2) from neuraminidase__InfluenzaA__ACG50700
augaaccccaaccagaagaucaucaccaucggcuccaucugcauggucaucggcaucgucucccucaugcuccagaucggcaacaugaucuccaucugggucucccacuccauccagaccggcaaccagcaccaggccgagcccaucuccaacaccaacuuccucaccgagaaggccgucgccuccgucacccucgccggcaacuccccccucugccccaucuccggcugggccguccacuccaaggacaacuccauccgcaucggcuccaagggcgacgucuucgucauccgcgagcccuucaucuccugcucccaccucgagugccgcaccuucuuccucacccagggcgcccuccucaacgacaagcacuccaacggcaccgucaaggaccgcuccccccaccgcacccucauguccugccccgucggcgaggcccccucccccuacaacucccgcuucgaguccgucgccugguccgccuccgccugccacgacggcaccuccuggcucaccaucggcaucuccggccccgacaacggcgccgucgccguccucaaguacaacggcaucaucaccgacaccaucaaguccuggcgcaacaacauccuccgcacccaggaguccgagugcgccugcgucaacggcuccugcuucaccgucaugaccgacggccccuccaacggccaggccuccuacaagaucuucaagauggagaagggcaaggucgucaaguccgucgagcucgacgcccccaacuaccacuacgaggagugcuccugcuaccccgacgccuccgaggucaccugcgucugccgcgacaacuggcacggcuccaaccgccccugggucuccuucaaccagaaccucgaguaccagaucggcuacaucugcuccggcgucuucggcgacaacccccgccccaacgacggcaccggcuccugcggccccgucuccaccaacggcgccuacggcgucaagggcuucuccuucaaguacggcaacggcgucuggaucggccgcaccaaguccaccaacucccgcuccggcuucgagaugaucugggacuccaacggcuggaccggcaccgacuccuccuucuccgucaagcaggacaucgucgccaucaccgacugguccggcuacuccggcuccuucguccagcaccccgagcucaccggccucgacugcauccgccccugcuucugggucgagcucauccgcggccgccccaaggaguccaccaucuggaccuccggcuccuccaucuccuucugcggcgucaacuccgacaccgucggcugguccuggcccgacggcgccgagcuccccuucaccaucgacaaguga

SEQ ID NO: 112512 - RNA, 1410 nt, Artificial Sequence; identical to SEQ ID NO: 112093
  derived and/or modified CDS sequence (opt2) from neuraminidase__InfluenzaA__ACG70145

SEQ ID NO: 112513 - RNA, 1410 nt, Artificial Sequence; identical to SEQ ID NO: 111920
  derived and/or modified CDS sequence (opt2) from neuraminidase__InfluenzaA__ACG70156

SEQ ID NO: 112514 - RNA, 1410 nt, Artificial Sequence
  derived and/or modified CDS sequence (opt2) from neuraminidase__InfluenzaA__ACG80407
augaaccccaaccagaagaucaucaccaucggcuccgucucccucaccaucuccaccaucugcuucuucaugcagaucgccauccucaucaccaccgucacccuccacuucaagcaguacgaguucaacuccccccccaacaaccagaugaugcucugcgagcccaccaucaucgagcgcaacaucaccgagaucgucuaccucaccaacaccaccaucgagaaggagaucugccccaagcucgccaaguaccgcaacugguccaagccccagugcgacaucaccggcuucgcccccuucuccaaggacaacuccauccgccucuccgccggcggcgacaucugggucacccgcgagcccuacgucuccugcgaccccgacaagugcuaccaguucgcccucggccagggcaccacccucaacaacguccacuccaacgacaccgcccgcggccgcacccccuaccgcacccuccucaugaacgagcucggcguccccuuccaccucggcaccaagcaggucugcaucgccugguccuccuccuccugccacgacggcaaggccuggcuccacgucugcaucaccggcgacgacaagaacgccaccgccuccuucaucuacaacggccgccucgucgacuccgucgucuccugguccaaggagauccuccgcacccaggaguccgagugcgucugcaucaacggcaccugcaccgucgucaugaccgacggcuccgccuccggcgaggccgacaccaagauccucuucaucgaggagggcaagaucguccacaccuccacccucuccggcuccgcccagcacgucgaggagugcuccugcuacccccgcuaccccggcguccgcugcgucugccgcgacaacuggaagggcuccaaccgccccaucgucgacaucaacaucaaggaccacuccaucgucuccuccuacgucugcuccggccucgucggcgacaccccccgcaagaacgacuccuccuccuccucccacugccucgaccccaacaacgaggagggcggccacggcgucaagggcugggccuucgacgacggcaacgacgucuggaugggccgcaccaucuccgagaagucccgccucggcuacgagaccuucaaggucaucgagggcugguccaaccccaaguccaagcuccagaucaaccgccaggucaucgucgaccgcggcaaccgcuccggcuacuccggcaucuucuccgucgagggcaaguccugcaucaaccgcugcuucuacgucgagcucauccgcggccgcaaggaggagaccgagguccucuggaccuccaacuccaucgucgucuucugcggcaccuccggcaccuacggcaccggcuccuggcccgacggcgccgacaucaaccucaugcccaucuga

SEQ ID NO: 112515 - RNA, 1410 nt, Artificial Sequence
  derived and/or modified CDS sequence (opt2) from neuraminidase__InfluenzaA__ACG80411
auggacuccaacuccaagaucaucaccaucggcuccgucucccucaccaucuccaccaucugcuucuucaugcagaucgccauccucaucaccaccgucacccuccacuucaagcaguacgaguucaacuccccccccaacaaccagaugaugcucugcgagcccaccaucaucgagcgcaacaucaccgagaucgucuaccucaccaacaccaccaucgagaaggagaucugccccaagcucgccgaguaccgcaacugguccaagccccagugcgacaucaccggcuucgcccccuucuccaaggacaacuccauccgccucuccgccggcggcgacaucugggucacccgcgagcccuacgucuccugcgaccccgacaagugcuaccaguucgcccucggccagggcaccacccucaacaacguccacuccaacgacaccgccggcggccgcacccccuaccgcacccuccucaugaacgagcucggcguccccuuccaccucggcaccaagcaggucugcaucgccugguccuccuccuccugccacgacggcaaggccuggcuccacgucugcaucaccggcgacgacaagaacgccaccgccuccuucaucuacgacggccgccucgucgacggcgucgucuccugguccaaggagauccuccgcacccaggaguccgagugcgucugcaucaacggcaccugcaccgucgucaugaccgacggcuccgccuccggcgaggccgacaccaagauccucuucaucgaggagggcaagaucguccacaccuccacccucuccggcuccgcccagcacgucgaggagugcuccugcuacccccgcuaccccggcguccgcugcgucugccgcgacaacuggaagggcuccaaccgccccaucgucgacaucaacaucaaggaccacuccaucgucuccuccuacgucugcuccggccucgucggcgacaccccccgcaagaacgacuccuccuccuccucccacugccucgaccccaacaacgaggagggcggccacggcgucaagggcugggccuucgacgacggcaacgacgucuggaugggccgcaccaucuccgagaagucccgccucggcuacgagaccuucaaggucaucgagggcugguccaaccccaaguccaagcuccagaucaaccgccaggucaucgucgaccgcggcaaccgcuccggcuacuccggcaucuucuccgucgagggcaaguccugcaucaaccgcugcuucuacgucgagcucauccgcggccgcaaggaggagaccgagguccucuggaccuccaacuccaucgucgucuucugcggcaccuccggcaccuacggcaccggcuccuggcccgacggcgccgacaucaaccucaugcccaucuga

SEQ ID NO: 112516 - RNA, 1407 nt, Artificial Sequence
  derived and/or modified CDS sequence (opt2) from neuraminidase__InfluenzaA__ACG80421
augaaccccauccagaagaucaucaccaucggcuccgucucccucaccaucuccaccaucugcuucuucaugcagaucgccauccucaucaccaccgucacccuccacuucaagcaguacgaguucaacuccccccccaacaaccagaugaugcucugcgagcccaccaucaucgagcgcaacaucaccgagaucgucuaccucaccaacaccaccaucgagaaggagaucugccccaagcucgccgaguaccgcaacugguccaagccccagugcgacaucaccggcuucgcccccuucuccaaggacaacuccauccgccucuccgccggcggcgacaucugggucacccgcgagcccuacgucuccugcgaccccgacaagugcuaccaguucgcccucggccagggcaccacccucaacaacguccacuccgacaccgcccgcgaccgcacccccuaccgcacccuccucaugaacgagcucggcguccccuuccaccucggcaccaagcaggucugcaucgccugguccuccuccuccugccacgacggcaaggccuggcuccacgucugcaucaccggcgacgacaagaacgccaccgccuccuucaucuacaacggccgccucgucgacuccgucgucuccugguccaaggagauccuccgcacccaggaguccgagugcgucugcaucaacggcaccugcaccgucgucaugaccgacggcuccgccuccggcgaggccgacaccaagauccucuucaucgaggagggcaagaucguccacaccuccacccucuccggcuccgcccagcacgucgaggagugcuccugcuacccccgcuaccccggcguccgcugcgucugccgcgacaacuggaagggcuccaaccgccccaucgucgacaucaacaucaaggaccacuccaucgucuccuccuacgucugcuccggccucgucggcgacaccccccgcaagaacgacuccuccuccuccucccacugccucgaccccaacaacgaggagggcggccacggcgucaagggcugggccuucgacgacggcaacgacgucuggaugggccgcaccaucuccgagaagucccgccucggcuacgagaccuucaaggucaucgagggcugguccaaccccaaguccaagcuccagaucaaccgccaggucaucgucgaccgcggcaaccgcuccggcuacuccggcaucuucuccgucgagggcaaguccugcaucaaccgcugcuucuacgucgagcucauccgcggccgcaaggaggagaccgagguccucuggaccuccaacuccaucgucgucuucugcggcaccuccggcaccuacggcaccggcuccuggcccgacggcgccgacaucaaccucaugcccaucuga

SEQ ID NO: 112517 - RNA, 1407 nt, Artificial Sequence
  derived and/or modified CDS sequence (opt2) from neuraminidase__InfluenzaA__ACG80427
auggaccccaacuccaagaucaucaccaucggcuccgucucccucaccaucuccaccaucugcuucuucaugcagaucgccauccucaucaccaccgucacccuccacuucaagcaguacgaguucaacuccccccccaacaaccagaugaugcucugcgagcccaccaucaucgagcgcaacaucaccgagaucgucuaccucaccaacaccaccaucgagaaggagaucugccccaagcucgccgaguaccgcaacugguccaagccccagugcgacaucaccggcuucgcccccuucuccaaggacaacuccauccgccucuccgccggcggcgacaucugggucacccgcgagcccuacgucuccugcgaccccgacaagugcuaccaguucgcccucggccagggcaccacccucaacaacguccacuccgacaccgcccgcgaccgcacccccuaccgcacccuccucaugaacgagcucggcguccccuuccaccucggcaccaagcaggucugcaucgccugguccuccuccuccugccacgacggcaaggccuggcuccacgucugcaucaccggcgacgacaagaacgccaccgccuccuucaucuacaacggccgccucgucgacuccgucgucuccugguccaaggagauccuccgcacccaggaguccgagugcgucugcaucaacggcaccugcaccgucgucaugaccgacggcuccgccuccggcgaggccgacaccaagauccucuucaucgaggagggcaagaucguccacaccuccacccucuccggcuccgcccagcacgucgaggagugcuccugcuacccccgcuaccccggcguccgcugcgucugccgcgacaacuggaagggcuccaaccgccccaucgucgacaucaacaucaaggaccacuccaucgucuccuccuacgucugcuccggccucgucggcgacaccccccgcaagaacgacuccuccuccuccucccacugccucgaccccaacaacgaggagggcggccacggcgucaagggcugggccuucgacgacggcaacgacgucuggaugggccgcaccaucuccgagaagucccgccucggcuacgagaccuucaaggucaucgagggcugguccaaccccaaguccaagcuccagaucaaccgccaggucaucgucgaccgcggcaaccgcuccggcuacuccggcaucuucuccgucgagggcaaguccugcaucaaccgcugcuucuacgucgagcucauccgcggccgcaaggaggagaccgagguccucuggaccuccaacuccaucgucgucuucugcggcaccuccggcaccuacggcaccggcuccuggcccgacggcgccgacaucaaccucaugcccaucuga

SEQ ID NO: 112518 - RNA, 1410 nt, Artificial Sequence
  derived and/or modified CDS sequence (opt2) from neuraminidase__InfluenzaA__ACG80437
augaaccccaaccagaagaucaucaccaucggcuccgucucccucaccaucuccaccaucugcuucuucaugcagaucgccauccucaucaccaccgucacccuccacuucaagcaguacgaguucaacuccucccccaacaaccaggucaugcucugcgagcccaccaucaucgagcgcaacaucaccgagaucgucuaccucaccaacaccaccaucgagaaggagaucugccccaagcucgccgaguaccgcaacugguccaagccccagugcgacaucaccggcuucgcccccuucuccaaggacaacuccauccgccucuccgccggcggcgacaucugggucacccgcgagcccuacgucuccugcgaccccgacaagugcuaccaguucgcccucggccagggcaccacccucaacaacguccacuccaacaacaccguccgcgaccgcacccccuaccgcacccuccucaugaacgagcucggcguccccuuccaccucggcaccaagcaggucugcaucgccugguccuccuccuccugccacgacggcaaggccuggcuccacgucugcaucaccggcgacgacaagaacgccaccgccaacuucaucuacaacggccgccucgucgacuccaucgucuccugguccaaggagaucuuccgcacccaggaguccgagugcgucugcaucaacggcaccugcaccgucgucaugaccgacggcuccgccuccggcaaggccgacaccaagauccucuucaucgaggagggcaagaucguccacaccuccacccucuccggcuccgcccagcacgucgaggagugcuccugcuacccccgcuaccccggcguccgcugcgucugccgcgacaacuggaagggcuccaaccgccccaucgucgacaucaacaucaaggaccacuccaucgucuccuccuacgucugcuccggccucgucggcgacaccccccgcaagaacgacuccuccuccuccucccacugccucgaccccaacaacgaggagggcggccacggcgucaagggcugggccuucgacgacggcaacgacgucuggaugggccgcaccaucuccgagaagucccgcuccggcuacgagaccuucaaggucaucgagggcugguccaaccccaaguccaagcuccagaucaaccgccaggucaucgucgaccgcggcaaccgcuccggcuacuccggcaucuucuccgucgagggcaaguccugcaucaaccgcugcuucuacgucgagcucauccgcggccgcaaggaggagaccgagguccucuggaccuccaacuccaucgucgucuucugcggcaccuccggcaccuacggcaccggcuccuggcccgacggcgccgacaucaaccucaugcccaucuga

SEQ ID NO: 112519 - RNA, 1407 nt, Artificial Sequence
  derived and/or modified CDS sequence (opt2) from neuraminidase__InfluenzaA__ACG80446
augaaccccaaccagaagaucaucaccaucggcuccgucucccucaccaucuccaccaucugcuucuucaugcagaucgccauccucaucaccaccgucacccuccacuucaagcaguacgaguucaacuccccccccaacaaccagaugaugcucugcgagcccaccaucaucgagcgcaacaucaccgagaucgucuaccucaccaacaccaccaucgagaaggagaucugccccaagcucgccgaguaccgcaacugguccaagccccagugcgacaucaccggcuucgcccccuucuccaaggacaacuccauccgccucuccgccggcggcgacaucugggucacccgcgagcccuacgucuccugcgaccccgacaagugcuaccaguucgcccucggccagggcaccacccucaacaacguccacuccgacaccgcccgcgaccgcacccccuaccgcacccuccucaugaacgagcucggcguccccuuccaccucggcaccaagcaggucugcaucgccugguccuccuccuccugccacgacggcaaggccuggcuccacgucugcaucaccggcgacgacaagaacgccaccgccuccuucaucuacaacggccgccucgucgacuccgucgucuccugguccaaggagauccuccgcacccaggaguccgagugcgucugcaucaacggcaccugcaccgucgucaugaccgacggcuccgccuccggcgaggccgacaccaagauccucuucaucgaggagggcaagaucguccacaccuccacccucuccggcuccgcccagcacgucgaggagugcuccugcuacccccgcuaccccggcguccgcugcgucugccgcgacaacuggaagggcuccaaccgccccaucgucgacaucaacaucaaggaccacuccaucgucuccuccuacgucugcuccggccucgucggcgacaccccccgcaagaacgacuccuccuccuccucccacugccucgaccccaacaacgaggagggcggccacggcgucaagggcugggccuucgacgacggcaacgacgucuggaugggccgcaccaucuccgagaagucccgccucggcuacgagaccuucaaggucaucgagggcugguccaaccccaaguccaagcuccagaucaaccgccaggucaucgucgaccgcggcaaccgcuccggcuacuccggcaucuucuccgucgagggcaaguccugcaucaaccgcugcuucuacgucgagcucauccgcggccgcaaggaggagaccgagguccucuggaccuccaacuccaucgucgucuucugcggcaccuccggcaccuacggcaccggcuccuggcccgacggcgccgacaucaaccucaugcccaucuga

SEQ ID NO: 112520 - RNA, 1410 nt, Artificial Sequence
  derived and/or modified CDS sequence (opt2) from neuraminidase__InfluenzaA__ACG80455
augaaccccaaccagaagaucaucaccaucggcuccgucuccuucaucaucuccuccaucugcuucuucaugcagaucgccauccucaucaccaccgucacccuccacuucaagcaguacgaguucaacuccccccccaacaaccagaugaugcucugcgagcccaccaucaucgagcgcaacaucaccgagaucgucuaccucaccaacaccaccaucgagaaggagaucugccccaagcucgccgaguaccgcaacugguccaagccccagugcgacaucaccggcuucgcccccuucuccaaggacaacuccauccgccucuccgccggcggcgacaucugggucacccgcgagcccuacgucuccugcgaccccgacaagugcuaccaguucgcccucggccagggcaccacccucaacaacguccacuccaacgacaccgcccgcggccgcacccccuaccgcacccuccucaugaacgagcucggcguccccuuccaccucggcaccaagcaggucugcaucgccugguccuccuccuccugccacgacggcaaggccuggcuccacgucugcaucaccggcgacgacaagaacgccaccgccuccuucaucuacgacggccgccucgucgacuccgucgucuccugguccaaggagauccuccgcacccaggaguccgagugcgucugcaucaacggcaccugcaccgucgucaugaccgacggcuccgccuccggcgaggccgacaccaagauccucuucaucgaggagggcaagaucguccacaccuccacccucuccggcuccgcccagcacgucgaggagugcuccugcuacccccgcuaccccggcguccgcugcgucugccgcgacaacuggaagggcuccaaccgccccaucgucgacaucaacaucaaggaccacuccaucgucuccuccuacgucugcuccggccucgucggcgacaccccccgcaagaacgacuccuccuccuccucccacugccucgaccccaacaacgaggagggcggccacggcgucaagggcugggccuucgacgacggcaacgacgucuggaugggccgcaccaucuccgagaagucccgccucggcuacgagaccuucaaggucaucgagggcugguccaaccccaaguccaagcuccagaucaaccgccaggucaucgucgaccgcggcaaccgcuccggcuacuccggcaucuucuccgucgagggcaaguccugcaucaaccgcugcuucuacgucgagcucauccgcggccgcaaggaggagaccgagguccucuggaccuccaacuccaucgucgucuucugcggcaccuccggcaccuacggcaccggcuccuggcccgacggcgccgacaucaaccucaugcccaucuga

SEQ ID NO: 112521 - RNA, 1407 nt, Artificial Sequence; identical to SEQ ID NO: 112519
  derived and/or modified CDS sequence (opt2) from neuraminidase__InfluenzaA__ACG80464

SEQ ID NO: 112522 - RNA, 1410 nt, Artificial Sequence
  derived and/or modified CDS sequence (opt2) from neuraminidase__InfluenzaA__ACG80473
auggaccccauccagaagaucaucaccaucggcuccgucucccucaccaucuccaccaucugcuucuucaugcagaucgccauccucaucaccaccgucacccuccacuucaagcaguacgaguucaacuccccccccaacaaccagaugaugcucugcgagcccaccaucaucgagcgcaacaucaccgagaucgucuaccucaccaacaccaccaucgagaaggagaucugccccaagcucgccgaguaccgcaacugguccaagccccagugcgacaucaccggcuucgcccccuucuccaaggacaacuccauccgccucuccgccggcggcgacaucugggucacccgcgagcccuacgucuccugcgaccccgacaagugcuaccaguucgcccucggccagggcaccacccucaacaacguccacuccaacgacaccgcccgcggccgcacccccuaccgcacccuccucaugaacgagcucggcguccccuuccaccucggcaccaagcaggucugcaucgccugguccuccuccuccugccacgacggcaaggccuggcuccacgucugcaucaccggcgacgacaagaacgccaccgccuccuucaucuacgacggccgccucgucgacuccgucgucuccugguccaaggagauccuccgcacccaggaguccgagugcgucugcaucaacggcaccugcaccgucgucaugaccgacggcuccgccuccggcgaggccgacaccaagauccucuucaucgaggagggcaagaucguccacaccuccacccucuccggcuccgcccagcacgucgaggagugcuccugcuacccccgcuaccccggcguccgcugcgucugccgcgacaacuggaagggcuccaaccgccccaucgucgacaucaacaucaaggaccacuccaucgucuccuccuacgucugcuccggccucgucggcgacaccccccgcaagaacgacuccuccuccuccucccacugccucgaccccaacaacgaggagggcggccacggcgucaagggcugggccuucgacgacggcaacgacgucuggaugggccgcaccaucuccgagaagucccgccucggcuacgagaccuucaaggucaucgagggcugguccaaccccaaguccaagcuccagaucaaccgccaggucaucgucgaccgcggcaaccgcuccggcuacuccggcaucuucuccgucgagggcaaguccugcaucaaccgcugcuucuacgucgagcucauccgcggccgcaaggaggagaccgagguccucuggaccuccaacuccaucgucgucuucugcggcaccuccggcaccuacggcaccggcuccuggcccgacggcgccgacaucaaccucaugcccaucuga

SEQ ID NO: 112523 - RNA, 1410 nt, Artificial Sequence; identical to SEQ ID NO: 110748
  derived and/or modified CDS sequence (opt2) from neuraminidase__InfluenzaA__ACH69559

SEQ ID NO: 112524 - RNA, 1410 nt, Artificial Sequence
  derived and/or modified CDS sequence (opt2) from neuraminidase__InfluenzaA__ACH69570
augaaccccaaccagaagaucaucaccaucggcuccgucucccucaccaucuccaccaucugcuucuucaugcagaucgccauccucaucaccaccgucacccuccacuucaagcaguacgaguucaacuccccccccaacaaccaggucaugcucugcgagcccaccaucaucgagcgcaacaucaccgagaucgucuaccucaccaacaccaccaucgagaaggagaucugccccaagcucgccgaguaccgcaacugguccaagccccagugcaacaucaccggcuucgcccccuucuccaaggacaacuccauccgccucuccgccggcggcgacaucugggucacccgcgagcccuacgucuccugcgaccccgacaagugcuaccaguucgcccucggccagggcaccacccucaacaacguccacuccaacgacaccguccacgaccgcacccccuaccgcacccuccucaugaacgagcucggcguccccuuccaccucggcaccaagcaggucugcaucgccugguccuccuccuccugccacgacggcaaggccuggcuccacgucugcgucaccggcgacgacaagaacgccaccgccuccuucaucuacaacggccgccucgucgacuccaucgucuccugguccaaggagauccuccgcacccaggaguccgagugcgucugcaucaacggcaccugcaccgucgucaugaccgacggcuccgccuccggcaaggccgacaccaagauccucuucaucgaggagggcaagaucguccacaccuccacccucuccggcuccgcccagcacgucgaggagugcuccugcuacccccgcuaccccggcguccgcugcgucugccgcgacaacuggaagggcuccaaccgccccaucgucgacaucaacaucaaggacuacuccaucgucuccuccuacgucugcuccggccucgucggcgacaccccccgcaacaacgacuccuccuccuccucccacugccucgaccccaacaacgaggagggcggccacggcgucaagggcugggccuucgacgacggcaacgacgucuggaugggccgcaccaucuccgagaagcuccgcuccggcuacgagaccuucaaggucaucgagggcugguccaaccccaacuccaagcuccagaucaaccgccaggucaucgucgaccgcggcaaccgcuccggcuacuccggcaucuucuccgucgagggcaaguccugcaucaaccgcugcuucuacgucgagcucauccgcggccgcaaggaggagaccgagguccucuggaccuccaacuccaucgucgucuucugcggcaccuccggcaccuacggcaccggcuccuggcccgacggcgccgacaucaaccucaugcccaucuga

SEQ ID NO: 112525 - RNA, 1410 nt, Artificial Sequence; identical to SEQ ID NO: 110748
  derived and/or modified CDS sequence (opt2) from neuraminidase__InfluenzaA__ACH69581

SEQ ID NO: 112526 - RNA, 1410 nt, Artificial Sequence
  derived and/or modified CDS sequence (opt2) from neuraminidase__InfluenzaA__ACH69592
augaaccccaaccagaagaucaucaccaucggcuccgucucccucaccaucgccaccaucugcuuccucaugcagaucgccauccucgucaccaccgucacccuccacuucaagcaguacgagugcaacuccccccccaacaaccaggucaugcucugcgagcccaccaucaucgagcgcaacaucaccgagaucgucuaccucaccaacaccaccaucgagaaggagaucugccccaagcucgccgaguaccgcaacugguccaagccccagugcaacaucaccggcuucgcccccuucuccaaggacaacuccauccgccucuccgccggcggcgacaucugggucacccgcgagcccuacgucuccugcgaccccgacaagugcuaccaguucgcccucggccagggcaccacccucaacaacggccacuccaacgacaccguccacgaccgcacccccuaccgcacccuccucaugaacgagcucggcguccccuuccaccucggcaccaagcaggucugcaucgccugguccuccuccuccugccacgacggcaaggccuggcuccacgucugcgucaccggcgacgacgagaacgccaccgccuccuucaucuacaacggccgccucgucgacuccaucggcuccugguccaagaagauccuccgcacccaggaguccgagugcgucugcaucaacggcaccugcaccgucgucaugaccgacggcuccgccuccggcaaggccgacaccaagauccucuucaucgaggagggcaagaucguccacaccuccccccucuccggcuccgcccagcacgucgaggagugcuccugcuacccccgcuaccccggcguccgcugcgucugccgcgacaacuggaagggcuccaaccgccccaucgucgacaucaacgucaaggacuacuccaucgucuccuccuacgucugcuccggccucgucggcgacaccccccgcaagaacgacuccuccuccuccucccacugccucgaccccaacaacgaggagggcggccacggcgucaagggcugggccuucgacgacggcaacgacgucuggaugggccgcaccaucuccgagaagucccgcuccggcuacgagaccuucaaggucaucgagggcugguccaagcccaacuccaagcuccagaucaaccgccaggucaucgucgaccgcggcaaccgcuccggcuacuccggcaucuucuccgucgagggcaaguccugcaucaaccagugcuucuacgucgagcucauccgcggccgcaagcaggagaccgagguccucuggaccuccaacuccaucgucgucuucugcggcaccuccggcaccuacggcaccggcuccuggcccgacggcgccgaccucaaccucaugcccaucuga

SEQ ID NO: 112527 - RNA, 1410 nt, Artificial Sequence
  derived and/or modified CDS sequence (opt2) from neuraminidase__InfluenzaA__ACH69603
augaaccccaaccagaagaucaucaccaucggcuccgucucccucaccaucgccaccaucugcuuccucaugcagaucgucauccucgucaccaccgucacccuccacuucaagcaguacgagugcaacuccccccccaacaaccaggucaugcucugcgagcccaccaucaucgagcgcaacaucaccgagaucgucuaccucaccaacaccaccaucgagaaggagaucugccccaagcucgccgaguaccgcaacugguccaagccccagugcaacaucaccggcuucgcccccuucuccaaggacaacuccauccgccucuccgccggcggcgacaucugggucacccgcgagcccuacgucuccugcgaccccgacaagugcuaccaguucgcccucggccagggcaccacccucaacaacggccacuccaacgacaccguccacgaccgcacccccuaccgcacccuccucaugaacgagcucggcguccccuuccaccucggcaccaagcaggucugcaucgccugguccuccuccuccugccacgacggcaaggccuggcuccacgucugcgucaccggcgacgacgagaacgccaccgccuccuucaucuacaacggccgccucgucgacuccaucggcuccugguccaagaagauccuccgcacccaggaguccgagugcgucugcaucaacggcaccugcaccgucgucaugaccgacggcuccgccuccggcaaggccgacaccaagauccucuucaucgaggagggcaagaucguccacaccuccccccucuccggcuccgcccagcacgucgaggagugcuccugcuacccccgcuaccccggcguccgcugcgucugccgcgacaacuggaagggcuccaaccgccccaucgucgacaucaacgucaaggacuacuccaucgucuccuccuacgucugcuccggccucgucggcgacaccccccgcaagaacgacuccuccuccuccucccacugccucgaccccaacaacgaggagggcggccacggcgucaagggcugggccuucgacgacggcaacgacgucuggaugggccgcaccaucuccgagaagucccgcuccggcuacgagaccuucaaggucaucgagggcugguccaagcccaacuccaagcuccagaucaaccgccaggucaucgucgaccgcggcaaccgcuccggcuacuccggcaucuucuccgucgagggcaaguccugcaucaaccgcugcuucuacgucgagcucauccgcggccgcaagcaggagaccgagguccucuggaccuccaacuccaucgucgucuucugcggcaccuccggcaccuacggcaccggcuccuggcccgacggcgccgaccucaaccucaugcccaucuga

SEQ ID NO: 112528 - RNA, 1410 nt, Artificial Sequence
  derived and/or modified CDS sequence (opt2) from neuraminidase__InfluenzaA__ACH69614
augaaccccaaccagaagaucaucaccaucggcuccgucucccucaccaucgccaccaucugcuuccucaugcagaucgccauccucgucaccaccgucacccuccacuucaagcaguacgagugcaacuccccccccaacaaccaggucaugcucugcgagcccaccaucaucgagcgcaacaucaccgagaucgucuaccucaccaacaccaccaucgagaaggagaucugccccaagcucgccgaguaccgcaacugguccaagccccagugcaacaucaccggcuucgcccccuucuccaaggacaacuccauccgccucuccgccggcggcgacaucugggucacccgcgagcccuacgucuccugcgaccccgacaagugcuaccaguucgcccucggccagggcaccacccucaacaacggccacuccaacgacaccguccacgaccgcacccccuaccgcacccuccucaugaacgagcucggcguccccuuccaccucggcaccaagcaggucugcaucgccugguccuccuccuccugccacgacggcaaggccuggcuccacgucugcgucaccggcgacgacgagaacgccaccgccuccuucaucuacaacggccgccucgucgacuccaucggcuccugguccaagaagauccuccgcacccaggaguccgagugcgucugcaucaacggcaccugcaccgucgucaugaccgacggcuccgccuccggcaaggccgacaccaagauccucuucaucgaggagggcaagaucguccacaccuccccccucuccggcuccgcccagcacgucgaggagugcuccugcuacccccgcuaccccggcguccgcugcgucugccgcgacaacuggaagggcuccaaccgccccaucgucgacaucaacgucaaggacuacuccaucgucuccuccuacgucugcuccggccucgucggcgacaccccccgcaagaacgacuccuccuccuccucccacugccucgaccccaacaacgaggagggcggccacggcgucaagggcugggccuucgacgacggcaacgacgucuggaugggccgcaccaucuccgagaagucccgcuccggcuacgagaccuucaaggucaucgagggcugguccaagcccaacuccaagcuccagaucaaccgccaggucaucgucgaccgcggcaaccgcuccggcuacuccggcaucuucuccgucgagggcaaguccugcaucaaccgcugcuucuacgucgagcucauccgcggccgcaagcaggagaccgagguccucuggaccuccaacuccaucgucgucuucugcggcaccuccggcaccuacggcaccggcuccuggcccgacggcgccgaccucaaccucaugcccaucuga

SEQ ID NO: 112529 - RNA, 1413 nt, Artificial Sequence
  derived and/or modified CDS sequence (opt2) from neuraminidase__InfluenzaA__ACI22525
augaaccccaaccagaagaucaucaccaucggcuccaucuccaucgccaucggcaucaucucccucaugcuccagaucggcaacaucaucuccaucugggccucccacuccauccagaccggcucccagaaccacaccggcaucugcaaccagcgcaucaucaccuacgagaacuccaccugggucaacaacaccuacgucaacaucaacaacaccaacgucgucgccgagaaggacaagaccuccgucacccucgccggcaacuccucccucugcuccaucuccggcugggccaucuacaccaaggacaacuccauccgcaucggcuccaagggcgacgucuucgucauccgcgagcccuucaucuccugcucccaccucgagugccgcaccuucuuccucacccagggcgcccuccucaacgacaagcacuccaacggcaccgucaaggaccgcucccccuaccgcgcccucauguccugcccccucggcgaggcccccucccccuacaacuccaaguucgaguccgucgccugguccgccuccgccugccacgacggcaugggcuggcucaccaucggcaucuccggccccgacaacggcgccgucgccguccucaaguacaacggcaucaucaccgagaccaucaaguccuggaagaagcgcauccuccgcacccaggaguccgagugcgucugcaugaacggcuccugcuucaccaucaugaccgacggccccuccaacggcgccgccuccuacaagaucuucaagaucgagaagggcaaggucaccaaguccaucgagcucaacgcccccaacuuccacuacgaggagugcuccugcuaccccgacaccggcaccgucaugugcgucugccgcgacaacuggcacggcuccaaccgccccugggucuccuucaaccagaaccucgacuaccagaucggcuacaucugcuccggcgucuucggcgacaacccccgccccaaggacggcgagggcuccugcaaccccgucaccgucgacggcgccgacggcgucaagggcuucuccuacaaguacggcaacggcgucuggaucggccgcaccaaguccaaccgccuccgcaagggcuucgagaugaucugggaccccaacggcuggaccaacaccgacuccgacuucuccgucaagcaggacgucgucgccaucaccgacugguccggcuacuccggcuccuucguccagcaccccgagcucaccggccucgacugcauccgccccugcuucugggucgagcucguccgcggccucccccgcgagaacaccaccaucuggaccuccggcuccuccaucuccuucugcggcgucaacuccgacaccgccaacugguccuggcccgacggcgccgagcuccccuucaccaucgacaaguga

SEQ ID NO: 112530 - RNA, 1413 nt, Artificial Sequence; identical to SEQ ID NO: 112529
  derived and/or modified CDS sequence (opt2) from neuraminidase__InfluenzaA__ACI22526

SEQ ID NO: 112531 - RNA, 1413 nt, Artificial Sequence; identical to SEQ ID NO: 112529
  derived and/or modified CDS sequence (opt2) from neuraminidase__InfluenzaA__ACI22527

SEQ ID NO: 112532 - RNA, 1413 nt, Artificial Sequence; identical to SEQ ID NO: 112529
  derived and/or modified CDS sequence (opt2) from neuraminidase__InfluenzaA__ACI22528

SEQ ID NO: 112533 - RNA, 1413 nt, Artificial Sequence; identical to SEQ ID NO: 112529
  derived and/or modified CDS sequence (opt2) from neuraminidase__InfluenzaA__ACI22529

SEQ ID NO: 112534 - RNA, 1413 nt, Artificial Sequence; identical to SEQ ID NO: 112529
  derived and/or modified CDS sequence (opt2) from neuraminidase__InfluenzaA__ACI22530

SEQ ID NO: 112535 - RNA, 1413 nt, Artificial Sequence
  derived and/or modified CDS sequence (opt2) from neuraminidase__InfluenzaA__ACI22532
augaaccccaaccagaagaucaucaccaucggcuccaucuccaucgccaucggcaucaucucccucaugcuccagaucggcaacaucaucuccaucugggccucccacuccauccagaccggcucccagaaccacaccggcaucugcaaccagcgcaucaucaccuacgagaacuccaccugggucaacaacaccuacgucaacaucaacaacaccaacgucgucgccggcaaggacaagaccuccgucacccucgccggcaacuccucccucugcuccaucuccggcugggccaucuacaccaaggacaacuccauccgcaucggcuccaagggcgacgucuucgucauccgcgagcccuucaucuccugcucccaccucgagugccgcaccuucuuccucacccagggcgcccuccucaacgacaagcacuccaacggcaccgucaaggaccgcucccccuaccgcgcccucauguccugcccccucggcgaggcccccucccccuacaacuccaaguucgaguccgucgccugguccgccuccgccugccacgacggcaugggcuggcucaccaucggcaucuccggccccgacaacggcgccgucgccguccucaaguacaacggcaucaucaccgagaccaucaaguccuggaagaagcgcauccuccgcacccaggaguccgagugcgucugcaugaacggcuccugcuucaccaucaugaccgacggccccuccaacggcgccgccuccuacaagaucuucaagaucgagaagggcaaggucaccaaguccaucgagcucaacgcccccaacuuccacuacgaggagugcuccugcuaccccgacaccggcaccgucaugugcgucugccgcgacaacuggcacggcuccaaccgccccugggucuccuucaaccagaaccucgacuaccagaucggcuacaucugcuccggcgucuucggcgacaacccccgccccaaggacggcgagggcuccugcaaccccgucaccgucgacggcgccgacggcgucaagggcuucuccuacaaguacggcaacggcgucuggaucggccgcaccaaguccaaccgccuccgcaagggcuucgagaugaucugggaccccaacggcuggaccaacaccgacuccgacuucuccgucaagcaggacgucgucgccaucaccgacugguccggcuacuccggcuccuucguccagcaccccgagcucaccggccucgacugcauccgccccugcuucugggucgagcucguccgcggccucccccgcgagaacaccaccaucuggaccuccggcuccuccaucuccuucugcggcgucaacuccgacaccgccaacugguccuggcccgacggcgccgagcuccccuucaccaucgacaaguga

SEQ ID NO: 112536 - RNA, 1413 nt, Artificial Sequence; identical to SEQ ID NO: 112535
  derived and/or modified CDS sequence (opt2) from neuraminidase__InfluenzaA__ACI22533

SEQ ID NO: 112537 - RNA, 1413 nt, Artificial Sequence; identical to SEQ ID NO: 112529
  derived and/or modified CDS sequence (opt2) from neuraminidase__InfluenzaA__ACI22534

SEQ ID NO: 112538 - RNA, 1410 nt, Artificial Sequence
  derived and/or modified CDS sequence (opt2) from neuraminidase__InfluenzaA__ACI25727
augaaccccaaccagaagaucaucaccaucggcuccgucucccucaccaucgccaccgucugcuuccucaugcagaucgccauccucgucaccaccgucacccuccacuucaagcagcacgagugcaacucccccgccuccaaccaggucaugcccugcgagcccaucaucaucgagcgcaacaucaccgagaucgucuaccucaacaacaccaccaucgagaaggagaucugccccaaggucgucgaguaccgcaacugguccaagccccagugccagaucaccggcuucgcccccuucuccaaggacaacuccauccgccucuccgccggcggcgacaucugggucacccgcgagcccuacgucuccugcgaccccggcaagugcuaccaguucgcccucggccagggcaccacccucgacaacaagcacuccaacgacaccauccacgaccgcaucccccaccgcacccuccucaugaacgagcucggcguccccuuccaccucggcacccgccaggucugcaucgccugguccuccuccuccugccacgacggcaaggccuggcuccacgucugcaucaccggcgacgacaagaacgccaccgccuccuucaucuacgacggccgccucgucgacuccaucggcuccuggucccagaacauccuccgcacccaggaguccgagugcgucugcaucaacggcaccugcaccgucgucaugaccgacggcuccgccuccggccgcgccgacacccgcauccucuucaucaaggagggcaagaucguccacaucuccccccucuccggcuccgcccagcacgucgaggagugcuccugcuacccccgcuaccccggcguccgcugcaucugccgcgacaacuggaagggcuccaaccgccccgucgucgacaucaacauggaggacuacuccaucgacuccuccuacgucugcuccggccucgucggcgacaccccccgcaacgacgaccgcuccuccaacuccaacugccgcaaccccaacaacgagcgcggcaaccagggcgucaagggcugggccuucgacaacggcgacgacgucuggaugggccgcaccaucuccaaggaccuccgcuccggcuacgagaccuucaaggucaucggcggcugguccacccccaacuccaagucccagaucaaccgccaggucaucgucgacuccgacaaccgcuccggcuacuccggcaucuucuccgucgagggcaaguccugcaucaaccgcugcuucuacgucgagcucauccgcggccgcaagcaggagacccgcgucugguggaccuccaacuccaucgucgucuucugcggcaccuccggcaccuacggcaccggcuccuggcccgacggcgccaacaucaacuucaugcccaucuga

SEQ ID NO: 112539 - RNA, 1410 nt, Artificial Sequence
  derived and/or modified CDS sequence (opt2) from neuraminidase__InfluenzaA__ACI25749
augaaccccaaccagaagaucaucaccaucggcuccgucucccucaccaucgccaccgucugcuuccucaugcagaucgccauccucgucaccaccgucacccuccacuucaagcaguacgagugcgacucccccgccuccaaccaggucaugcccugcgagcccaucaucaucgagcgcaacaucaccgagaucgucuaccucaacaacaccaccaucgagaaggagaucugccccaaggucgucgaguaccgcaacugguccaagccccagugccagaucaccggcuucgcccccuucuccaaggacaacuccauccgccucuccgccggcggcgacaucugggucacccgcgagcccuacgucuccugcgaccacggcaagugcuaccaguucgcccucggccagggcaccacccucgacaacaagcacuccaacgacaccauccacgaccgcaucccccaccgcacccuccucaugaacgagcucggcguccccuuccaccucggcacccgccaggucugcaucgccugguccuccuccuccugccacgacggcaaggccuggcuccacgucugcaucaccggcgacgacaagaacgccaccgccuccuucaucuacgacggccgccucgucgacuccaucggcuccuggucccagaacauccuccgcacccaggaguccgagugcgucugcaucaacggcaccugcaccgucgucaugaccgacggcuccgccuccggccgcgccgacacccgcauccucuucaucgaggagggcaagaucguccacaucuccccccucuccggcuccgcccagcacgucgaggagugcuccugcuacccccgcuaccccggcguccgcugcaucugccgcgacaacuggaagggcuccaaccgccccgucgucgacaucaacauggaggacuacuccaucgacuccuccuacgucugcuccggccucgucggcgacaccccccgcaacgacgaccgcuccuccaacuccaacugccgcaaccccaacaacgagcgcggcaaccagggcgucaagggcugggccuucgacaacggcgacgacgucuggaugggccgcaccaucuccaaggaccuccgcuccggcuacgagaccuucaaggucaucggcggcugguccacccccaacuccaagucccagaucaaccgccaggucaucgucgacuccgacaaccgcuccggcuacuccggcaucuucuccgucgagggcaaguccugcaucaaccgcugcuucuacgucgagcucauccgcggccgcaagcaggagacccgcgucugguggaccuccaacuccaucgucgucuucugcggcaccuccggcaccuacggcaccggcuccuggcccgacggcgccaacaucaacuucaugcacaucuga

SEQ ID NO: 112540 - RNA, 1410 nt, Artificial Sequence; identical to SEQ ID NO: 112539
  derived and/or modified CDS sequence (opt2) from neuraminidase__InfluenzaA__ACI25760

SEQ ID NO: 112541 - RNA, 1410 nt, Artificial Sequence; identical to SEQ ID NO: 112539
  derived and/or modified CDS sequence (opt2) from neuraminidase__InfluenzaA__ACI25771

SEQ ID NO: 112542 - RNA, 1410 nt, Artificial Sequence; identical to SEQ ID NO: 110131
  derived and/or modified CDS sequence (opt2) from neuraminidase__InfluenzaA__ACI25782

SEQ ID NO: 112543 - RNA, 1410 nt, Artificial Sequence
  derived and/or modified CDS sequence (opt2) from neuraminidase__InfluenzaA__ACI25793
augaaccccaaccagaagaucaucaccaucggcuccgucucccucaccaucgccaccgucugcuuccucaugcagaucgccauccucgucaccaccgucacccuccacuucaagcaguacgagugcgacucccccgccuccaaccaggucaugcccugcgagcccaucaucaucgagcgcaacaucaccgagaucgucuaccucaacaacaccaccaucgagaaggagaucugccccaaggucgucgaguaccgcaacugguccaagccccagugccagaucaccggcuucgcccccuucuccaaggacaacuccauccgccucuccgucggcggcgacaucugggucacccgcgagcccuacgucuccugcgaccacggcaagugcuaccaguucgcccucggccagggcaccacccucgacaacaagcacuccaacgacaccauccacgaccgcaucccccaccgcacccuccucaugaacgagcucggcguccccuuccaccucggcacccgccaggucugcaucgccugguccuccuccuccugccacgacggcaaggccuggcuccacgucugcaucaccggcgacgacaagaacgccaccgccuccuucaucuacgacggccgccucgucgacuccaucggcuccuggucccagaacauccuccgcacccaggaguccgagugcgucugcaucaacggcaccugcaccgucgucaugaccgacggcuccgccuccggccgcgccgacacccgcauccucuucaucgaggagggcaagaucguccacaucuccccccucuccggcuccgcccagcacgucgaggagugcuccugcuacccccgcuaccccggcguccgcugcaucugccgcgacaacuggaagggcuccaaccgccccgucgucgacaucaacauggaggacuacuccaucgacuccuccuacgucugcuccggccucgucggcgacaccccccgcaacgacgaccgcuccuccaacuccaacugccgcaaccccaacaacgagcgcggcaaccagggcgucaagggcugggccuucgacaacggcgacgacgucuggaugggccgcaccaucuccaaggaccuccgcuccggcuacgagaccuucaaggucaucggcggcugguccacccccaacuccaagucccagaucaaccgccaggucaucgucgacuccgacaaccgcuccggcuacuccggcaucuucuccgucgagggcaaguccugcaucaaccgcugcuucuacgucgagcucauccgcggccgcaagcaggagacccgcgucugguggaccuccaacuccaucgucgucuucugcggcaccuccggcaccuacggcaccggcuccuggcccgacggcgccaacaucaacuucaugcccaucuga

SEQ ID NO: 112544 - RNA, 1410 nt, Artificial Sequence
  derived and/or modified CDS sequence (opt2) from neuraminidase__InfluenzaA__ACI25804
augaaccccaaccagaagaucaucaccaucggcuccgucucccucaccaucgccaccgucugcuuccucaugcagaucgccauccucgucaccaccgucacccuccacuucaagcaguacgagugcgacucccccgccuccaaccaggucaugcccugcgagcccaucaucaucgagcgcaacaucaccgagaucgucuaccucaacaacaccaccaucgagaaggagaucugccccaaggucgucgaguaccgcaacugguccaagccccagugccagaucaccggcuucgcccccuucuccaaggacaacuccauccgccucuccgccggcggcgacaucugggucacccgcgagcccuacgucuccugcgaccacggcaagugcuaccaguucgcccucggccagggcaccacccucgacaacaagcacuccaacgacaccauccacgaccgcaucccccaccgcacccuccucaugaacgagcucggcguccccuuccaccucggcacccgccaggucugcaucgccugguccuccuccuccugccacgacggcaaggccuggcuccacgucugcaucaccggcgacgacaagaacgccaccgccuccuucaucuacgacggccgccucgucgacuccaucggcuccuggucccagaacauccuccgcacccaggaguccgagugcgucugcaucaacggcaccugcaccgucgucaugaccgacggcuccgccuccggccgcgccgacacccgcauccucuucaucgaggagggcaagaucguccacaucuccccccucuccggcuccgcccagcacgucgaggagugcuccugcuacccccgcuaccccggcguccgcugcaucugccgcgacaacuggaagggcuccaaccgccccgucgucgacaucaacauggaggacuacuccaucgacuccuccuacgucugcuccggccucgucggcgacaccccccgcaacgacgaccgcuccuccaacuccaacugccgcaaccccaacaacgagcgcggcaaccagggcgucaagggcugggccuucgacaacggcgacgacgucuggaugggccgcaccaucuccaaggaccuccgcuccggcuacgagaccuucaaggucaucggcggcugguccacccccaacuccaagucccagaucaaccgccaggucaucgucgacuccgaccaccgcuccggcuacuccggcaucuucuccgucgagggcaaguccugcaucaaccgcugcuucuacgucgagcucauccgcggccgcaagcaggagacccgcgucugguggaccuccaacuccaucgucgucuucugcggcaccuccggcaccuacggcaccggcuccuggcccgacggcgccaacaucaacuucaugcccaucuga

SEQ ID NO: 112545 - RNA, 1410 nt, Artificial Sequence; identical to SEQ ID NO: 112503
  derived and/or modified CDS sequence (opt2) from neuraminidase__InfluenzaA__ACI26277

SEQ ID NO: 112546 - RNA, 1410 nt, Artificial Sequence; identical to SEQ ID NO: 110363
  derived and/or modified CDS sequence (opt2) from neuraminidase__InfluenzaA__ACI26299

SEQ ID NO: 112547 - RNA, 1410 nt, Artificial Sequence
  derived and/or modified CDS sequence (opt2) from neuraminidase__InfluenzaA__ACI26321
augaaccccaaccagaagaucaucaccaucggcuccgucucccucaccaucuccaccaucugcuucuucaugcagaucgccauccucaucaccaccgucacccuccacuucaagcaguacgaguucaacuccccccccaacaaccaggucaugcucugcgagcccaccaucaucgagcgcaacaucaccgagaucgucuaccucaccaacaccaccaucgagaaggagaucugccccaagcucgccgaguaccgcaacugguccaagccccagugcgacaucaccggcuucgcccccuucuccaaggacaacuccauccgccucuccgccggcggcgacaucugggucacccgcgagcccuacgucuccugcgaccccgacaagugcuaccaguucgcccucggccagggcaccacccucaacaacguccacuccaacgacaccguccgcgaccgcacccccuaccgcacccuccucaugaacgagcucggcguccccuuccaccucggcaccaagcaggucugcaucgccugguccuccuccuccugccacgacggcaaggccuggcuccacgucugcaucaccggcgacgacaagaacgccaccgccuccuucaucuacaacggccgccucgucgacuccaucgucuccugguccaaggagauccuccgcacccaggaguccgagugcgucugcaucaacggcaccugcaccgucgucaugaccgacggcuccgccuccggcaaggccgacaccaagauccucuucaucgaggagggcaagaucguccacaccuccacccucuccggcuccgcccagcacgucgaggagugcuccugcuacccccgcuaccccggcguccgcugcgucugccgcgacaacuggaagggcuccaaccgccccaucgucgacaucaacaucaaggaccacuccaccgucuccuccuacgucugcuccggccucgucggcgacaccccccgcaagaacgacuccuccuccuccucccacugccucgaccccaacaacgaggagggcggccacggcgucaagggcugggccuucgacgacggcaacgacgucuggaugggccgcaccaucuccgagaagucccgccucggcuacgagaccuucaaggucaucgagggcugguccaaccccaaguccaagcuccagaucaaccgccaggucaucgucgaccgcggcaaccgcuccggcuacuccggcaucuucuccgucgagggcaaguccugcaucaaccgcugcuucuacgucgagcucauccgcggccgcaaggaggagaccgagguccucuggaccuccaacuccaucgucgucuucugcggcaccuccggcaccuacggcaccggcuccuggcccgacggcgccgacaucaaccucaugcccaucuga

SEQ ID NO: 112548 - RNA, 1410 nt, Artificial Sequence
  derived and/or modified CDS sequence (opt2) from neuraminidase__InfluenzaA__ACI26354
augaaccccaaccagaagaucaucaccaucggcuccgucucccucaccaucuccaccaucugcuucuucaugcagaucgccauccucaucaccaccgucacccuccacuucaagcaguacgaguucaacuccccccccaacaaccaggucaugcucugcgagcccaccaucaucgagcgcaacaucaccgagaucgucuaccucaccaacaccaccaucgagaaggagaucugccccaagcucgccgaguaccgcaacugguccaagccccagugcgacaucaccggcuucgcccccuucuccaaggacaacuccauccgccucuccgccggcggcgacaucugggucacccgcgagcccuacgucuccugcgaccccgacaagugcuaccaguucgcccucggccagggcaccacccucaacaacguccacuccaacgacaccguccgcgaccgcacccccuaccgcacccuccucaugaacgagcucggcguccccuuccaccucggcaccaagcaggucugcaucgccugguccuccuccuccugccacgacggcaaggccuggcuccacgucugcaucaccggcgacgacaagaacgccaccgccuccuucaucuacaacggccgccucgucgacuccgucgucuccugguccaaggagauccuccgcacccaggaguccgagugcgucugcaucaacggcaccugcaccgucgucaugaccgacggcuccgccuccggcaaggccgacaccaagauccucuucaucgaggagggcaagaucguccacaccuccacccucuccggcuccgcccagcacgucgaggagugcuccugcuacccccgcuaccccggcguccgcugcgucugccgcgacaacuggaagggcuccaaccgccccaucgucgacaucaacaucaaggaccacuccaucgucuccuccuacgucugcuccggccucgucggcgacaccccccgcaagaacgacuccuccuccuccucccacugccucgaccccaacaacgaggagggcggccacggcgucaagggcugggccuucgacgacggcaacgacgucuggaugggccgcaccaucuccgagaagucccgccucggcuacgagaccuucaaggucaucgagggcugguccaaccccaaguccaagcuccagaucaaccgccaggucaucgucgaccgcggcaaccgcuccggcuacuccggcaucuucuccgucgagggcaaguccugcaucaaccgcugcuucuacgucgagcucauccgcggccgcaaggaggagaccgagguccucuggaccuccaacuccaucgucgucuucugcggcaccuccggcaccuacggcaccggcuccuggcccgacggcgccgacaucaaccucaugcccaucuga

SEQ ID NO: 112549 - RNA, 1410 nt, Artificial Sequence
  derived and/or modified CDS sequence (opt2) from neuraminidase__InfluenzaA__ACI26365
augaaccccaaccagaagaucaucaccaucggcuccgucucccucaccaucuccaccaucugcuucuucaugcagaucgccauccucaucaccaccgucacccuccacuucaagcaguacgaguucaacuccccccccaacaaccaggucaugcucugcgagcccaccaucaucgagcgcaacaucaccgagaucgucuaccucaccaacaccaccaucgagaaggagaucugccccaagcucgccgaguaccgcaacugguccaagccccagugcgacaucaccggcuucgcccccuucuccaaggacaacuccauccgccucuccgccggcggcgacaucugggucacccgcgagcccuacgucuccugcgaccccgacaagugcuaccaguucgcccucggccagggcaccacccucaacaacguccacuccaacgacaccguccgcgaccgcacccccuaccgcacccuccucaugaacgagcucggcguccccuuccaccucggcaccaagcaggucugcaucgccugguccuccuccuccugccacgacggcaaggccuggcuccacgucugcaucaccggcgacgacaagaacgccaccgccuccuucaucuacaacggccgccucgucgacuccgucgucuccugguccaaggagauccuccgcacccaggaguccgagugcgucugcaucaacggcaccugcaccgucgucaugaccgacggcuccgccuccggcaaggccgacaccaagauccucuucaucgaggagggcaagaucguccacaccuccacccucaccggcuccgcccagcacgucgaggagugcuccugcuacccccgcuaccccggcguccgcugcgucugccgcgacaacuggaagggcuccaaccgccccaucgucgacaucaacaucaaggaccacuccaucgucuccuccuacgucugcuccggccucgucggcgacaccccccgcaagaacgacuccuccuccuccucccacugccucgaccccaacaacgaggagggcguccacggcgucaagggcugggccuucgacgacggcaacgacgucuggaugggccgcaccaucuccgagaagucccgccucggcuacgagaccuucaaggucaucgagggcugguccaaccccaaguccaagcuccagaucaaccgccaggucaucgucgaccgcggcaaccgcuccggcuacuccggcaucuucuccgucgagggcaaguccugcaucaaccgcugcuucuacgucgagcucauccgcggccgcaaggaggagaccgagguccucuggaccuccaacuccaucgucgucuucugcggcaccuccggcaccuacggcaccggcuccuggcccgacggcgccgacaucaaccucaugcccaucuga

SEQ ID NO: 112550 - RNA, 1410 nt, Artificial Sequence; identical to SEQ ID NO: 112548
  derived and/or modified CDS sequence (opt2) from neuraminidase__InfluenzaA__ACI26376

SEQ ID NO: 112551 - RNA, 1410 nt, Artificial Sequence; identical to SEQ ID NO: 112440
  derived and/or modified CDS sequence (opt2) from neuraminidase__InfluenzaA__ACI26387

SEQ ID NO: 112552 - RNA, 1410 nt, Artificial Sequence; identical to SEQ ID NO: 112452
  derived and/or modified CDS sequence (opt2) from neuraminidase__InfluenzaA__ACI26420

SEQ ID NO: 112553 - RNA, 1410 nt, Artificial Sequence; identical to SEQ ID NO: 110363
  derived and/or modified CDS sequence (opt2) from neuraminidase__InfluenzaA__ACI26431

SEQ ID NO: 112554 - RNA, 1413 nt, Artificial Sequence
  derived and/or modified CDS sequence (opt2) from neuraminidase__InfluenzaA__ACI26442
augaaccccaaccagaagaucaucaccaucggcuccaucuccaucgccaucggcaucaucucccucaugcuccagaucggcaacaucaucuccaucugggccucccacuccauccagaccggcucccagaaccacaccggcaucugcaaccagcgcaucaucaccuacgagaacuccaccugggucaaccacaccuacgucaacaucaacaacaccaacgucgucgccggcaaggacaagaccuccgucacccucgccggcaacuccucccucugcuccaucuccggcugggccaucuacaccaaggacaacuccauccgcaucggcuccaagggcgacgucuucgucauccgcgagcccuucaucuccugcucccaccucgagugcaagaccuucuuccucacccagggcgcccuccucaacgacaagcacuccaacggcaccgucaaggaccgcucccccuaccgcgcccucauguccugcccccucggcgaggcccccucccccuacaacuccaaguucgaguccgucgccugguccgccuccgccugccacgacggcaugggcuggcucaccaucggcaucuccggccccgacaacggcgccgucgccguccucaaguacaacggcaucaucaccggcaccaucaaguccuggaagaagcagauccuccgcacccaggaguccgagugcgucugcaugaacggcuccugcuucaccaucaugaccgacggccccuccaacggcgccgccuccuacaagaucuucaagaucgagaagggcaaggucaccaaguccaucgagcucaacgcccccaacuuccacuacgaggagugcuccugcuaccccgacaccggcaccgucaugugcgucugccgcgacaacuggcacggcuccaaccgccccugggucuccuucaaccagaaccucgacuaccagaucggcuacaucugcuccggcgucuucggcgacaacccccgccccaaggaccgcgagggcuccugcaaccccgucaccaucgacggcgccgacggcgucaagggcuucuccuacaaguacggcaacggcgucuggaucggccgcaccaaguccaaccgccuccgcaagggcuucgagaugaucugggaccccaacggcuggaccaacaccgacuccgacuucuccgucaagcaggacgucgucgccaucaccgacugguccggcuacuccggcuccuucguccagcaccccgagcucaccggccucgacugcauccgccccugcuucugggucgagcucguccgcggccucccccgcgagaacaccaccaucuggaccuccggcuccuccaucuccuucugcggcgucaacuccgacaccgccaacugguccuggcccgacggcgccgagcuccccuucaccaucgacaaguga

SEQ ID NO: 112555 - RNA, 1413 nt, Artificial Sequence; identical to SEQ ID NO: 112554
  derived and/or modified CDS sequence (opt2) from neuraminidase__InfluenzaA__ACI26453

SEQ ID NO: 112556 - RNA, 1410 nt, Artificial Sequence
  derived and/or modified CDS sequence (opt2) from neuraminidase__InfluenzaA__ACI26464
augaaccccaaccagaagaucaucaccaucggcuccgucucccucaccaucuccaccaucugcuucuucaugcagaucgccauccucaucgccaccgucacccuccacuucaagcaguacgaguucaacuccccccccaacaaccaggucaugcucugcgagcccaccaucaucgagcgcaacaucaccgagaucgucuaccucaccaacaccaccaucgagaaggagaucugccccaagcucgccgaguaccgcaacugguccaagccccagugcgacaucaccggcuucgcccccuucuccaaggacaacuccauccgccucuccgccggcggcgacaucugggucacccgcgagcccuacgucuccugcgaccccgacaagugcuaccaguucgcccucggccagggcaccacccucaacaacguccacuccaacgacaccguccgcgaccgcacccccuaccgcacccuccucaugaacgagcucggcguccccuuccaccucggcaccaagcaggucugcaucgccugguccuccuccuccugccacgacggcaaggccuggcuccacgucugcaucaccggcgacgacaagaacgccaccgccuccuucaucuacaacggccgccucgucgacuccaucgucuccugguccaaggagauccuccgcacccaggaguccgagugcgucugcaucaacggcaccugcaccgucgucaugaccgacggcuccgccuccggcaaggccgacaccaagauccucuucaucgaggagggcaagaucguccacaccuccacccucuccggcuccgcccagcacgucgaggagugcuccugcuacccccgcuaccccggcguccgcugcgucugccgcgacaacuggaagggcuccaaccgccccaucgucgacaucaacaucaaggaccacuccaccgucuccuccuacgucugcuccggccucgucggcgacaccccccgcaagaacgacuccuccuccuccucccacugccucgaccccaacaacgaggagggcggccacggcgucaagggcugggccuucgacgacggcaacgacgucuggaugggccgcaccaucuccgagaagucccgccucggcuacgagaccuucaaggucaucgagggcugguccaaccccaaguccaagcuccagaucaaccgccaggucaucgucgaccgcggcaaccgcuccggcuacuccggcaucuucuccgucgagggcaaguccugcaucaaccgcugcuucuacgucgagcucauccgcggccgcaaggaggagaccgagguccucuggaccuccaacuccaucgucgucuucugcggcaccuccggcaccuacggcaccggcuccuggcccgacggcgccgacaucaaccucaugcccaucuga

SEQ ID NO: 112557 - RNA, 1410 nt, Artificial Sequence; identical to SEQ ID NO: 112547
  derived and/or modified CDS sequence (opt2) from neuraminidase__InfluenzaA__ACI26475

SEQ ID NO: 112558 - RNA, 1410 nt, Artificial Sequence; identical to SEQ ID NO: 112548
  derived and/or modified CDS sequence (opt2) from neuraminidase__InfluenzaA__ACI26486

SEQ ID NO: 112559 - RNA, 1410 nt, Artificial Sequence; identical to SEQ ID NO: 112548
  derived and/or modified CDS sequence (opt2) from neuraminidase__InfluenzaA__ACI26497

SEQ ID NO: 112560 - RNA, 1410 nt, Artificial Sequence; identical to SEQ ID NO: 112548
  derived and/or modified CDS sequence (opt2) from neuraminidase__InfluenzaA__ACI26508

SEQ ID NO: 112561 - RNA, 1410 nt, Artificial Sequence
  derived and/or modified CDS sequence (opt2) from neuraminidase__InfluenzaA__ACI26519
augaaccccaaccagaagaucaucaccaucggcuccgucucccucaccaucuccaccaucugcuucuucaugcagaucgccauccucaucaccaccgucacccuccacuucaagcaguacgaguucaacuccccccccaacaaccaggucaugcucugcgagcccaccaucaucgagcgcaacaucaccgagaucgucuaccucaccaacaccaccaucgagaaggagaucugccccaagcucgccgaguaccgcaacugguccaagccccagugcgacaucaccggcuucgcccccuucuccaaggacaacuccauccgccucuccgccggcggcgacaucugggucacccgcgagcccuacgucuccugcgaccccgacaagugcuaccaguucgcccucggccagggcaccacccucaacaacguccacuccaacgacaccguccgcgaccgcacccccuaccgcacccuccucaugaacgagcucggcguccccuuccaccucggcaccaagcaggucugcaucgccugguccuccuccuccugccacgacggcaaggccuggcuccacgucugcaucaccggcgacgacaagaacgccaccgccuccuucaucuacaacggccgccucgucgacuccgucgucuccugguccaaggagauccuccgcacccaggaguccgagugcgucugcaucaacggcaccugcaccgucgucaugaccgacggcuccgccuccggcaaggccgacaccaagauccucuucaucgaggagggcaagaucguccacaccuccacccucuccggcuccgcccagcacgucgaggagugcuccugcuacccccgcuaccccggcguccgcugcgucugccgcgacaacuggaagggcuccaaccgccccaucgucgacaucaacaucaaggaccacuccaucgucuccuccuacgucugcuccggccucgucggcgacaccccccgcaagaacgacuccuccuccuccucccacugccucgaccccaacaacgaggagggcggccacggcgucaagggcugggccuucgacgacggcaacgacgucuggaugggccgcaccaucuccgagaagucccgccucggcuacgagaccuucaaggucaucgagggcugguccaaccccaaguccaagcuccagaucaaccgccaggucaucgucgaccgcggcaaccgcuccggcuacuccggcaucuucuccgucgagggcaaguccugcaucaaccgcugcuucuacgucgagcucauccgcggccgcaaggaggagaccgagguccucuggaccuccaacuccaucgucgucuucugcggcaccuccggcaccuacggcaccggcuccuggcccgacggcgccaacaucaaccucaugcccaucuga

SEQ ID NO: 112562 - RNA, 1410 nt, Artificial Sequence; identical to SEQ ID NO: 112548
  derived and/or modified CDS sequence (opt2) from neuraminidase__InfluenzaA__ACI26530

SEQ ID NO: 112563 - RNA, 1410 nt, Artificial Sequence; identical to SEQ ID NO: 112548
  derived and/or modified CDS sequence (opt2) from neuraminidase__InfluenzaA__ACI26541

SEQ ID NO: 112564 - RNA, 1410 nt, Artificial Sequence
  derived and/or modified CDS sequence (opt2) from neuraminidase__InfluenzaA__ACI26552
augaaccccaaccagaagaucaucaccaucggcuccgucucccucaccaucgccaccaugugcuuccucaugcagaucgccauccucgucaccaccgucacccuccacuucaagcaguacgagugcuccuccccccccaacaaccaggucaugcccugcgagcccaccaucaucgagcgcaacaucaccgagaucgucuaccucaccaacaccaccaucgagaaggagaucugccccaagcucgucgaguaccgcaacugguccaagccccagugcaagaucaccggcuucgcccccuucuccaaggacaacuccauccgccucuccgccggcggcgacaucugggucacccgcgagcccuacgucuccugcgaccccggcaagugcuaccaguucgcccucggccagggcaccacccucaacaaccgccacuccaacgacaccguccacgaccgcacccccuaccgcacccuccucaugaacgagcucggcguccccuuccaccucggcaccaagcaggucugcaucgccugguccuccuccuccugccacgacggcaaggccuggcuccacgucugcgucaccggccacgacaagaacgccaccgccuccuucaucuacgacggccgccucgucgacuccaucggcuccugguccaagaacauccuccgcacccaggaguccgagugcgucugcaucaacggcaccugcaccgucgucaugaccgacggcuccgccuccgagcgcgccgacaccaagauccucuucaucgaggagggcaagaucguccacaucuccccccucuccggcuccgcccagcacgucgaggagugcuccugcuacccccgcuaccccggcguccgcugcgucugccgcgacaacuggaagggcuccaaccgccccaucgucgacaucaacgucaaggacuacuccaucgucuccuccuacgucugcuccggccucgucggcgacaccccccgcaagaacgaccgcuccuccuccuccuacugccgcaaccccaacaacgagaagggcucccacggcgucaagggcugggccuucgacgacggcaacgacgucuggaugggccgcaccaucuccgaggagcuccgcuccggcuacgagaccuucaaggucaucggcggcugguccacccccaacuccaagcuccagaucaaccgccaggucaucgucgacuccggcaaccgcuccggcuacuccggcaucuucuccgucgagggcaaguccugcaucaaccgcugcuucuacgucgagcucauccgcggccgcgagcaggagacccgcgucugguggaccuccaacuccaucgucgucuucugcggcaccuccggcaccuacggcaccggcuccuggcccgacggcgccgacaucaaccucaugcccaucuga

SEQ ID NO: 112565 - RNA, 1410 nt, Artificial Sequence
  derived and/or modified CDS sequence (opt2) from neuraminidase__InfluenzaA__ACI26574
augaaccccaaccagaagaucaucaccaucggcuccgucucccucacccucgccaccaucugcuuccucaugcagaucgccauccucgucaccaccgucacccuccacuucaagcaguacgagugcuccuccccccccaacaaccaggucaugcccugcgagcccaccaucaucgagcgcaacaucaccgagaucgucuaccucaccaacaucaccaucgagaaggagaucugccccaagcucgucgaguaccgcaacugguccaagccccagugcaagaucaccggcuucgcccccuucuccaaggacaacuccauccgccucuccgccggcggcgacaucugggucacccgcgagcccuacgucuccugcgaccccuccaagugcuaccaguucgcccucggccagggcaccacccucaacaaccgccacuccaacgacaccguccacgaccgcacccccuaccgcacccuccucaugaacgagcucggcguccccuuccaccucggcacccgccaggucugcauggccugguccuccuccuccugccacgacggcaaggccuggcuccacgucugcgucaccggccacgacgagaacgccaccgccuccuucaucuacgacggccgccucgucgacuccaucggcuccugguccaagaacauccuccgcacccaggaguccgagugcgucugcaucaacggcaccugcaccgucgucaugaccgacggcuccgccuccgagcgcgccgacaccaagauccucuucaucgaggagggcaagaucguccacaucuccccccucuccggcuccgcccagcacgucgaggagugcuccugcuacccccgcuaccccggcguccgcugcgucugccgcgacaacuggaagggcuccaaccgccccaucgucgacaucaacgucaaggacuacuccaucgucuccuccuacgucugcuccggccucgucggcgacaccccccgcaagaacgaccgcuccuccuccuccuacugccgcaaccccaacaacgagaagggcucccacggcgucaagggcugggccuucgacgacggcaacgacgucuggaugggccgcaccaucggcgaggagcuccgcuccggcuacgagaccuucaaggucaucggcggcugguccacccccaacuccaagcuccagaucaaccgccaggucaucgucgacuccggcaaccgcuccggcuacuccggcaucuucuccgucgagggcaaguccugcaucaaccgcugcuucuacgucgagcucauccgcggccgcaagcaggagacccgcgucugguggaccuccaacuccaucgucgucuucugcggcaccuccggcaccuacggcaccggcuccuggcccgacggcgccgacaucaaccucaugcccaucuga

SEQ ID NO: 112566 - RNA, 1410 nt, Artificial Sequence
  derived and/or modified CDS sequence (opt2) from neuraminidase__InfluenzaA__ACI26585
augaaccccaaccagaagaucaucaccaucggcuccgucucccucaccaucgccaccaucugcuuccucaugcagaucgccauccucgucaccaccgucacccuccacuucaagcagcacgagugcaacuccccccccaacaaccaggucaugcccugcgagcccaccaucaucgagcgcaacaucaccgagaucgucuaccucaccaacaccaccaucgagaaggagaucugccccaagcucgucgaguaccgcaacugguccaagccccagugcaagaucaccggcuucgcccccuucuccaaggacaacuccauccgccucuccgccggcggcgacaucugggucacccgcgagcccuacgucuccugcgaccccggcaagugcuaccaguucgcccucggccagggcaccacccucaacaaccgccacuccaacgacaccguccacgaccgcacccccuaccgcacccuccucaugaacgagcucggcguccccuuccaccucggcaccaagcaggucugcaucgccugguccuccuccuccugccacgacggcaaggccuggcuccacgucugcgucaccggccacgacgagaacgccaccgccuccuucaucuacgacggccgccucgucgacuccaucgucuccugguccaagaacguccuccgcacccaggaguccgagugcgucugcaucaacggcaccugcaccgucgucaugaccgacggcuccgccuccgagcgcgccgacaccaagauccucuucaucgaggagggcaagaucguccacaucuccccccucuccggcuccgcccagcacgucgaggagugcuccugcuacccccgcuaccccggcguccgcugcgucugccgcgacaacuggaagggcuccaaccgccccaucgucgacaucaacgucaaggacuacuccaucgucuccuccuacgucugcuccggccucgucggcgacaccccccgcaagaacgacuccuccuccuccuccuacugccgcaaccccaacaacgagaagggcucccacggcgucaagggcugggccuucgacgacggcaacgacgucuggaugggccgcaccaucggcgaggagcuccgcuccggcuacgagaccuucaaggucaucggcggcugguccacccccaacuccaagcuccagaccaaccgccaggucaucgucgaccgcggcaaccgcuccggcuacuccggcaucuucuccgucgagggcaaguccugcaucaaccgcugcuucuacgucgagcucauccgcggccgcaagcaggagaccaaggucugguggaccuccaacuccaucgucgucuucugcggcaccuccggcaccuacggcaccggcuccuggcccgacggcgccgacaucaaccucaugcccaucuga

SEQ ID NO: 112567 - RNA, 1413 nt, Artificial Sequence
  derived and/or modified CDS sequence (opt2) from neuraminidase__InfluenzaA__ACI32764
augaaccccaaccagaagaucaucaccaucggcuccaucuccauggccaucggcaucaucucccucaugcuccagaucggcaacaucaucuccaucugggccucccacuccauccagaccggcucccagaaccacaccggcaucugcaaccagcgcaucaucaccuacgagaacuccaccugggucaaccacaccuacgucaacaucaacaacaccaacgucgucgccggcaaggacaagaccuccgucacccucgccggcaacuccucccucugcuccaucuccggcugggccaucuacaccaaggacaacuccauccgcaucggcuccaagggcgacgucuucgucauccgcgagcccuucaucuccugcucccaccucgagugccgcaccuucuuccucacccagggcgcccuccucaacgacaagcacuccaacggcaccgucaaggaccgcucccccuaccgcgcccucauguccugcccccucggcgaggcccccucccccuacaacuccaaguucgaguccgucgccugguccgccuccgccugccacgacggcaugggcuggcucaccaucggcaucuccggccccgacaacggcgccgucgccguccucaaguacaacggcaucaucaccgagaccaucaaguccuggaagaagcgcauccuccgcacccaggaguccgagugcgucugcgucaacggcuccugcuucaccaucaugaccgacggccccuccaacggcgccgccuccuacaagaucuucaagaucgagaagggcaaggucaccaaguccaucgagcucaacgcccccaacuuccacuacgaggagugcuccugcuaccccgacaccggcaccgucaugugcgucugccgcgacaacuggcacggcuccaaccgccccugggucuccuucaaccagaaccucgacuaccagaucggcuacaucugcuccggcgucuucggcgacaacccccgccccaaggacggcaagggcuccugcaaccccgucaccgucgacggcgccgacggcgucaagggcuucuccuacaaguacggcaacggcgucuggaucggccgcaccaaguccaaccgccuccgcaagggcuucgagaugaucugggaccccaacggcuggaccgacaccgacuccgacuucuccgucaagcaggacgucgucgccaucaccgacugguccggcuacuccggcuccuucguccagcaccccgagcucaccggccucgacugcauccgccccugcuucugggucgagcucguccgcggccucccccgcgagaacaccaccaucuggaccuccggcuccuccaucuccuucugcggcgucgacuccgacaccgccaacugguccuggcccgacggcgccgagcuccccuucaccaucgacaaguga

SEQ ID NO: 112568 - RNA, 1413 nt, Artificial Sequence
  derived and/or modified CDS sequence (opt2) from neuraminidase__InfluenzaA__ACI32765
augaaccccaaccagaagaucaucaccaucggcuccaucuccaucgccaucggcaucaucucccucaugcuccagaucggcaacaucaucuccaucugggccucccacuccauccagaccggcucccagaaccacaccggcaucugcaaccagcgcaucaucaccuacgagaacaacaccugggucaaccacaccuacgucaacaucaacaacaccaacgucgucgcccgcaaggacaagaccuccgucacccucgccggcaacuccucccucugcuccaucuccggcugggccaucuacaccaaggacaacuccauccgcaucggcuccaagggcgacgucuucgucauccgcgagcccuucaucuccugcucccaccucgagugccgcaccuucuucaugacccagggcgcccuccucaacgacaagcacuccaacggcaccgucaaggaccgcucccccuaccgcgcccucauguccugcccccucggcgaggcccccucccccuacaacuccaaguucgaguccgucgccugguccgccuccgccugccacgacggcaugggcuggcucaccaucggcaucuccggccccgacaacggcgccgucgccguccucaaguacaacggcaucaucaccgagaccaucaaguccuggaagaagcgcauccuccgcacccaggaguccgagugcgucugcgucaacggcuccugcuucaccaucaugaccgacggccccuccaacggcgccgccuccuacaagaucuucaagaucgagaagggcaaggucaccaaguccgucgagcucaacgcccccaacuuccacuacgaggagugcuccugcuaccccgacaccggcaccgucaugugcgucugccgcgacaacuggcacggcuccaaccgccccugggucuccuucaaccagaaccucgacuaccagaucggcuacaucugcuccggcgucuucggcgacaacccccgccccaaggacggcaagggcuccugcaaccccgucaccgucgacggcgccgacggcgucaagggcuucuccuacaaguacggcaacggcgucuggaucggccgcaccaaguccaaccgccuccgcaagggcuucgagaugaucugggaccccaacggcuggaccgacaccgacuccgacuucuccgucaagcaggacgucgucgccaucaccgacugguccggcuacuccggcuccuucguccagcaccccgagcucaccggccucgacugcauccgccccugcuucugggucgagcucguccgcggccucccccgcgagaacaccaccaucuggaccuccggcuccuccaucuccuucugcggcgucgacuccgacaccgccaacugguccuggcccgacggcgccgagcuccccuucaccaucgacaaguga

SEQ ID NO: 112569 - RNA, 1413 nt, Artificial Sequence; identical to SEQ ID NO: 110422
  derived and/or modified CDS sequence (opt2) from neuraminidase__InfluenzaA__ACI32766

SEQ ID NO: 112570 - RNA, 1413 nt, Artificial Sequence
  derived and/or modified CDS sequence (opt2) from neuraminidase__InfluenzaA__ACI32767
augaaccccaaccagaagaucaucaccaucggcuccaucuccaucgccaucggcaucaucucccucaugcuccagaucggcaacaucaucuccaucugggccucccacuccacccagaccggcucccagaaccacaccggcaucugcaaccagcgcaucaucaccuacgagaacuccaccugggucaaccacaccuacgucaacaucaacaacaccaacgucgucgccggcaaggacaagaccuccgucacccucgccggcaacuccucccucugcuccaucuccggcugggccaucuacaccaaggacaacuccguccgcaucggcuccaagggcgacgucuucgucauccgcgagcccuucaucuccugcucccaccucgagugccgcaccuucuuccucacccagggcgcccuccucaacgacaagcacuccaacggcaccgucaaggaccgcucccccuaccgcgcccucauguccugcccccucggcgaggcccccucccccuacaacuccaaguucgaguccgucgccugguccgccuccgccugccacgacggcaugggcuggcucaccaucggcaucuccggccccgacaacggcgccgucgccguccucaaguacaacggcaucaucaccgagaccaucaaguccuggaagaagcgcauccuccgcacccaggaguccgagugcgucugcgucaacggcuccugcuucaccaucaugaccgacggccccuccaacggcgccgccuccuacaagaucuucaagaucgagaagggcaaggucaccaaguccaucgagcucaacgcccccaacuuccacuacgaggagugcuccugcuaccccgacaccggcaccgucaugugcgucugccgcgacaacuggcacggcuccaaccgccccugggucuccuucaaccagaaccucgacuaccagaucggcuacaucugcuccggcgucuucggcgacaacccccgccccaaggacggcaagggcuccugcaaccccgucaccgucgacggcgccgacggcgucaagggcuucuccuacaaguacggcaacggcgucuggaucggccgcaccaaguccaaccgccuccgcaagggcuucgagaugaucugggaccccaacggcuggaccgacaccgacuccgacuucuccgucaagcaggacgucgucgccaucaccgacugguccggcuacuccggcuccuucguccagcaccccgagcucaccggccucgacugcauccgccccugcuucugggucgagcucguccgcggccucccccgcgagaacaccaccaucuggaccuccggcuccuccaucuccuucugcggcgucgacuccgacaccgccaacugguccuggcccgacggcgccgagcuccccuucaccaucgacaaguga

SEQ ID NO: 112571 - RNA, 1413 nt, Artificial Sequence
  derived and/or modified CDS sequence (opt2) from neuraminidase__InfluenzaA__ACI32768
augaaccccaaccagaagaucaucaccaucggcuccaucuccaucgccaucggcaucaucucccucaugucccagaucggcaacaucaucuccaucugggccucccacuccauccagaccggcucccagaaccacaccggcaucugcaaccagcgcaucaucaccuacgagaacuccaccugggucaaccacaccuacgucaacaucaacaacaccaacgucgucgccggcaaggacaagaccuccgucacccucgccggcaacuccucccucugcuccaucuccggcugggccaucuacaccaaggacaacuccauccgcaucggcuccaagggcgacgucuucgucauccgcgagcccuucaucuccugcucccaccucgagugccgcaccuucuuccucacccagggcgcccuccucaacgacaagcacuccaacggcaccgucaaggaccgcucccccuaccgcgcccucauguccugcccccucggcgaggcccccucccccuacaacuccaaguucgaguccgucgccugguccgccuccgccugccacgacggcaugggcuggcucaccaucggcaucuccggccccgacaacggcgccgucgccguccucaaguacaacggcaucaucaccgagaccaucaaguccuggaagaagcgcauccuccgcacccaggaguccgagugcgucugcgucaacggcuccugcuucaccaucaugaccgacggccccuccaacggcgccgccuccuacaagaucuucaagaucgagaagggcaaggucaccaaguccaucgagcucaacgcccccaacuuccacuacgaggagugcuccugcuaccccgacaccggcaccgucaugugcgucugccgcgacaacuggcacggcuccaaccgccccugggucuccuucaaccagaaccucgacuaccagaucggcuacaucugcuccggcgucuucggcgacaacccccgccccaaggacggcaagggcuccugcaaccccgucaccgucgacggcgccgacggcgucaagggcuucuccuacaaguacggcaacggcgucuggaucggccgcaccaaguccaaccgccuccgcaagggcuucgagaugaucugggaccccaacggcuggaccgacaccgacuccgacuucuccgucaagcaggacgucgucgccaucaccgacugguccggcuacuccggcuccuucguccagcaccccgagcucaccggccucgacugcauccgccccugcuucugggucgagcucguccgcggccucccccgcgagaacaccaccaucuggaccuccggcuccuccaucuccuucugcggcgucgacuccgacaccgccaacugguccuggcccgacggcgccgagcuccccuucaccaucgacaaguga

SEQ ID NO: 112572 - RNA, 1413 nt, Artificial Sequence
  derived and/or modified CDS sequence (opt2) from neuraminidase__InfluenzaA__ACI32769
augaaccccaaccagaagaucaucaccaucggcuccaucuccaucgccaucggcaucaucucccucaugcuccagaucggcaacaucaucuccaucugggccucccacuccauccagaccggcucccagaaccacaccggcaucugcaaccagcgcaucaucaccuacgagaacuccaccugggucaaccacaccuacgucaacaucaacaacaccaacgucgucgccggcaaggacaagaucuccgucacccucgccggcaacuccucccucugcuccaucuccggcugggccaucuacaccaaggacaacuccauccgcaucggcuccaagggcgacgucuucgucauccgcgagcccuucaucuccugcucccaccucgagugccgcaccuucuuccucacccagggcgcccuccucaacgacaagcacuccaacggcaccgucaaggaccgcucccccuaccgcgcccucauguccugcccccucggcgaggcccccucccccuacaacuccaaguucgaguccgucgccugguccgccuccgccugccacgacggcaugggcuggcucaccaucggcaucuccggccccgacaacggcgccgucgccguccucaaguacaacggcaucaucaccgagaccaucaaguccuggaagaagcgcauccuccgcacccaggaguccgagugcgucugcgucaacggcuccugcuucaccaucaugaccgacggccccuccaacggcgccgccuccuacaagaucuucaagaucgagaagggcaaggucaccaaguccaucgagcucaacgcccccaacuuccacuacgaggagugcuccugcuaccccgacaccggcaccgucaugugcgucugccgcgacaacuggcacggcuccaaccgccccugggucuccuucaaccagaaccucgacuaccagaucggcuacaucugcuccggcgucuucggcgacaacccccgccccaaggacggcaagggcuccugcaaccccgucaccgucgacggcgccgacggcgucaagggcuucuccuacaaguacggcaacggcgucuggaucggccgcaccaaguccaaccgccuccgcaagggcuucgagaugaucugggaccccaacggcuggaccgacaccgacuccgacuucuccgucaagcaggacgucgucgccaucaccgacugguccggcuacuccggcuccuucguccagcaccccgagcucaccggccucgacugcauccgccccugcuucugggucgagcucguccgcggccucccccgcgagaacaccaccaucuggaccuccggcuccuccaucuccuucugcggcgucgacuccgacaccgccaacugguccuggcccgacggcgccgagcuccccuucaccaucgacaaguga

SEQ ID NO: 112573 - RNA, 1413 nt, Artificial Sequence; identical to SEQ ID NO: 110422
  derived and/or modified CDS sequence (opt2) from neuraminidase__InfluenzaA__ACI32770

SEQ ID NO: 112574 - RNA, 1413 nt, Artificial Sequence
  derived and/or modified CDS sequence (opt2) from neuraminidase__InfluenzaA__ACI32771
augaaccccaaccagaagaucaucaccaucggcuccaucuccaucgccaucggcaucaucucccucaugcuccagaucggcaacaucaucuccaucugggccucccacuccauccagaccggcucccagaaccacaccggcaucugcaaccagcgcaucaucaccuacaagaacuccaccugggucaaccacaccuacgucaacaucaacaacaccaacgucgucgccggcaagggcaagaccuccgucacccucgccggcaacuccucccucugcuccaucuccggcugggccaucuacaccaaggacaacuccauccgcaucggcuccaagggcgacgucuucgucauccgcgagcccuucaucuccugcucccaccucgagugccgcaccuucuuccucacccagggcgcccuccucaacgacaagcacuccaacggcaccgucaaggaccgcucccccuaccgcgcccucauguccugcccccucggcgaggcccccucccccuacaacuccaaguucgaguccgucgccugguccgccuccgccugccacgacggcaugggcuggcucaccaucggcaucuccggccccgacaacggcgccgucgccguccucaaguacaacggcaucaucaccgagaccaucaaguccuggaagaagcgcauccuccgcacccaggaguccgagugcgucugcgucaacggcuccugcuucaccaucaugaccgacggccccuccaacggcgccgccuccuacaagaucuucaagaucgagaagggcaaggucaccaaguccaucgagcucaacgcccccaacuuccacuacgaggagugcuccugcuaccccgacaccggcaccgucaugugcgucugccgcgacaacuggcacggcuccaaccgccccugggucuccuucaaccagaaccucgacuaccagaucggcuacaucugcuccggcgucuucggcgacaacccccgccccaaggacggcaagggcuccugcaaccccgucaccgucgacggcgccgacggcgucaagggcuucuccuacaaguacggcaacggcgucuggaucggccgcaccaaguccaaccgccuccgcaagggcuucgagaugaucugggaccccaacggcuggaccgacaccgacuccgacuucuccgucaagcaggacgucgucgccaucaccgacugguccggcuacuccggcuccuucguccagcaccccgagcucaccggccucgacugcauccgccccugcuucugggucgagcucguccgcggccucccccgcgagaacaccaccaucuggaccuccggcuccuccaucuccuucugcggcgucgacuccgacaccgccaacugguccuggcccgacggcgccgagcuccccuucaccaucgacaaguga

SEQ ID NO: 112575 - RNA, 1413 nt, Artificial Sequence; identical to SEQ ID NO: 110422
  derived and/or modified CDS sequence (opt2) from neuraminidase__InfluenzaA__ACI32772

SEQ ID NO: 112576 - RNA, 1413 nt, Artificial Sequence; identical to SEQ ID NO: 110422
  derived and/or modified CDS sequence (opt2) from neuraminidase__InfluenzaA__ACI32773

SEQ ID NO: 112577 - RNA, 1413 nt, Artificial Sequence; identical to SEQ ID NO: 110422
  derived and/or modified CDS sequence (opt2) from neuraminidase__InfluenzaA__ACI32774

SEQ ID NO: 112578 - RNA, 1413 nt, Artificial Sequence; identical to SEQ ID NO: 110422
  derived and/or modified CDS sequence (opt2) from neuraminidase__InfluenzaA__ACI32775

SEQ ID NO: 112579 - RNA, 1413 nt, Artificial Sequence
  derived and/or modified CDS sequence (opt2) from neuraminidase__InfluenzaA__ACI32776
augaaccccaaccagaagaucaucaccaucggcuccaucuccaucgccaucggcaucaucucccucaugcuccagaucggcaacaucaucuccaucugggccucccacuccauccagaccggcucccagaaccacaccggcaucugcaaccagcgcaucaucaccuacaagaacuccaccugggucaaccacaccuacgucaacaucaacaacaccaacgucgucgccggcaaggacaagaccuccgucacccucgccggcaacuccucccucugcuccaucuccggcugggccaucuacaccaaggacaacuccauccgcaucggcuccaagggcgacgucuucgucauccgcgagcccuucaucuccugcucccaccucgagugccgcaccuucuuccucacccagggcgcccuccucaacgacaagcacuccaacggcaccgucaaggaccgcucccccuaccgcgcccucauguccugcccccucggcgaggcccccucccccuacaacuccaaguucgaguccgucgccugguccgccuccgccugccacgacggcaugggcuggcucaccaucggcaucuccggccccgacaacggcgccgucgccguccucaaguacaacggcaucaucaccgagaccaucaaguccuggaagaagcgcauccuccgcacccaggaguccgagugcgucugcgucaacggcuccugcuucaccaucaugaccgacggccccuccaacggcgccgccuccuacaagaucuucaagaucgagaagggcaaggucaccaaguccaucgagcucaacgcccccaacuuccacuacgaggagugcuccugcuaccccgacaccggcaccgucaugugcgucugccgcgacaacuggcacggcuccaaccgccccugggucuccuucaaccagaaccucgacuaccagaucggcuacaucugcuccggcgucuucggcgacaacccccgccccaaggacggcaagggcuccugcaaccccgucaccgucgacggcgccgacggcgucaagggcuucuccuacaaguacggcaacggcgucuggaucggccgcaccaaguccaaccgccuccgcaagggcuucgagaugaucugggaccccaacggcuggaccgacaccgacuccgacuucuccgucaagcaggacgucgucgccaucaccgacugguccggcuacuccggcuccuucguccagcaccccgagcucaccggccucgacugcauccgccccugcuucugggucgagcucguccgcggccucccccgcgagaacaccaccaucuggaccuccggcuccuccaucuccuucugcggcgucgacuccgacaccgccaacugguccuggcccgacggcgccgagcuccccuucaccaucgacaaguga

SEQ ID NO: 112580 - RNA, 1413 nt, Artificial Sequence
  derived and/or modified CDS sequence (opt2) from neuraminidase__InfluenzaA__ACI32777
augaaccccaaccagaagaucaucaccaucggcuccaucuccaucgccaucggcaucaucucccucaugcuccagaucggcaacaucaucuccaucugggccucccacuccauccagaccggcucccagaaccacaccggcaucugcaaccagcgcaucaucaccuacaagaacuccaccugggucaaccacaccuacgucaacaucaacaacaccaacgucgucgccggcaaggacaagaccuccgucacccucgccggcaacuccucccucugcuccaucuccggcugggccaucuacaccaaggacaacuccauccgcaucggcuccaagggcgacgucuucgucauccgcgagcccuucaucuccugcucccaccucgagugccgcaccuucuuccucacccagggcgcccuccucaacgacaagcacuccaacggcaccgucaaggaccgcucccccuaccgcgcccucauguccugcccccucggcgaggcccccucccccuacaacuccaaguucgaguccgucgccugguccgccuccgccugccacgacggcaugggcuggcucaccaucggcaucuccggccccgacaacggcgccgucgccguccucaaguacaacggcaucaucaccgagaccaucaaguccuggaagaagcgcauccuccgcacccaggaguccgagugcgucugcgucaacggcuccugcuucaccaucaugaccgacggccccuccaacggcgccgccuccuacaagaucuucaagaucgagaagggcaaggucaccaaguccaucgagcucaacgcccccaacuuccacuacgaggagugcuccugcuaccccgacaccggcaccgucaugugcgucugccgcgacaacuggcacggcuccaaccgccccugggucuccuucaaccagaaccucgacuaccagaucggcuacaucugcuccggcgucuucggcgacaacccccgccccaaggacggcaagggcuccugcaaccccgucaccgucgacggcgccgacggcgucaagggcuucuccuacaaguacggcaacggcgucuggaucggccgcaccaaguccaaccgccuccgcaagggcuucgagaugaucugggaccccaacggcuggaccgacaccgacuccgacuucuccgucaagcaggacgucgucgccaucaccgacugguccggcuacuccggcuccuucguccagcaccccgagcucaccggccucgacugcauccgccccugcuucugggucgagcucguccgcggccucccccgcgagaacaccaccaucuggaccuccggcuccuccaucuccuucugcggcgucgacuccgacaccgccaacugguccuggcccgacggcgccgagcuccccuucgccaucgacaaguga

SEQ ID NO: 112581 - RNA, 1413 nt, Artificial Sequence; identical to SEQ ID NO: 110422
  derived and/or modified CDS sequence (opt2) from neuraminidase__InfluenzaA__ACI32778

SEQ ID NO: 112582 - RNA, 1413 nt, Artificial Sequence; identical to SEQ ID NO: 110422
  derived and/or modified CDS sequence (opt2) from neuraminidase__InfluenzaA__ACI32779

SEQ ID NO: 112583 - RNA, 1413 nt, Artificial Sequence; identical to SEQ ID NO: 110422
  derived and/or modified CDS sequence (opt2) from neuraminidase__InfluenzaA__ACI32780

SEQ ID NO: 112584 - RNA, 1413 nt, Artificial Sequence; identical to SEQ ID NO: 110422
  derived and/or modified CDS sequence (opt2) from neuraminidase__InfluenzaA__ACI32781

SEQ ID NO: 112585 - RNA, 1413 nt, Artificial Sequence
  derived and/or modified CDS sequence (opt2) from neuraminidase__InfluenzaA__ACI32782
augaaccccaaccagaagaucaucaccaucggcuccaucuccaucgccaucggcaucaucucccucaugcuccagaucggcaacaucaucuccaucugggccucccacuccauccagaccggcucccagaaccacaccggcaucugcaaccagcgcaucaucaccuacgagaacuccaccugggucaaccacaccuacgucaacaucaacaacaccaacgucgucgccggcaaggacaagaccuccgucacccucgccggcaacuccucccucugcuccaucuccggcugggccaucuacaccaaggacaacuccauccgcaucggcuccaagggcgacgucuucgucauccgcgagcccuucaucuccugcucccaccucgagugccgcaccuucuuccucacccagggcgcccuccucaacgacaagcacuccaacggcaccgucaaggaccgcucccccuaccgcgcccucauguccugcccccucggcgaggcccccucccccuacaacuccaaguucgaguccgucgccugguccgccuccgccugccacgacggcaugggcuggcucaccaucggcaucuccggccccgacaacggcgccgucgccguccucaaguacaacggcaucaucaccggcaccaucaaguccuggaagaagcagauccuccgcacccaggaguccgagugcgucugcaugaacggcuccugcuucaccaucaugaccgacggccccuccaacggcgccgccuccuacaagaucuucaagaucgagaagggcaaggccaccaaguccaucgagcucaacgcccccaacuuccacuacgaggagugcuccugcuaccccgacaccggcaccgucaugugcgucugccgcgacaacuggcacggcuccaaccgccccugggucuccuucaaccagaaccucgacuaccagaucggcuacaucugcuccggcgucuucggcgacaacccccgccccaaggaccgcaagggcuccugcaaccccgucaccgucgacggcgccgacggcgucaagggcuucuccuacaaguacggcaacggcgucuggaucggccgcaccaaguccaaccgccuccgcaagggcuucgagaugaucugggaccccaacggcuggaccaacaccgacuccgacuucuccgucaagcaggacgucgucgccaucaccgacugguccggcuacuccggcuccuucguccagcaccccgagcucaccggccucgacugcauccgccccugcuucugggucgagcucguccgcggccucccccgcgagaacaccaccaucuggaccuccggcuccuccaucuccuucugcggcgucaacuccgacaccgccaacugguccuggcccgacggcgccgagcuccccuucaccaucgacaaguga

SEQ ID NO: 112586 - RNA, 1413 nt, Artificial Sequence
  derived and/or modified CDS sequence (opt2) from neuraminidase__InfluenzaA__ACI32783
augaaccccaaccagaagaucaucaccaucggcuccaucuccaucgccaucggcaucaucucccucaugcuccagaucggcaacaucaucuccaucugggccucccacuccauccagaccggcucccagaaccacaccggcaucugcaaccagcgcaucaucaccuacgagaacuccaccugggucaaccacaccuacgucaacaucaacaacaccaacgucgucgccggcaaggacaagaccuccgucacccucgccggcaacuccucccucugcuccaucuccggcugggccaucuacaccaaggacaacuccauccgcaucggcuccaagggcgacgucuucgucauccgcgagcccuucaucuccugcucccaccucgagugccgcaccuucuuccucacccagggcgcccuccucaacgacaagcacuccaacggcaccgucaaggaccgcucccccuaccgcgcccucauguccugcccccucggcgaggcccccucccccuacaacuccaaguucgaguccgucgccugguccgccuccgccugccacgacggcaugggcuggcucaccaucggcaucuccggccccgacaacggcgccgucgccguccucaaguacaacggcaucaucaccgagaccaucaaguccuggaagaagcagauccuccgcacccaggaguccgagugcgucugcgucaacggcuccugcuucaccaucaugaccgacggccccuccaacggcgccgccuccuacaagaucuucaagaucgagaagggcaaggucaccaaguccaucgagcucaacgcccccaacuuccacuacgaggagugcuccugcuaccccgacaccggcaccgucaugugcgucugccgcgacaacuggcacggcuccaaccgccccuggcucuccuucaaccagaaccucgacuaccagaucggcuacaucugcuccggcgucaucggcgacaacccccgccccaaggacggcaagggcuccugcaaccccgucaccgucgacggcgccgacggcgucaagggcuucuccuacaaguacggcaacggcgucuggaucggccgcaccaaguccaaccgccuccgcaagggcuucgagaugaucugggaccccaacggcuggaccgacaccgacuccgacuucuccgucaagcaggacgucgucgccaucaccgacugguccggcuacuccggcuccuucguccagcaccccgagcucaccggccucgacugcauccgccccugcuucugggucgagcucguccgcggccucccccgcgagaacaccaccaucuggaccuccggcuccuccaucuccuucugcggcgucgacggcgacaccgccaacugguccuggcccgacggcgccgagcuccccuucaccaucgacaaguga

SEQ ID NO: 112587 - RNA, 1413 nt, Artificial Sequence
  derived and/or modified CDS sequence (opt2) from neuraminidase__InfluenzaA__ACI32784
augaaccccaaccagaagaucaucaccaucggcuccaucuccaucgccaucggcaucaucucccucaugcuccagaucggcaacaucaucuccaucugggccucccacuccauccagaccggcucccagaaccacaccggcaucugcaaccagcgcaucaucaccuacgagaacuccaccugggucaaccacaccuacgucaacaucaacaacaccaacgucgucgccggcaaggacaagaccuccgucacccucgccggcaacuccucccucugcuccaucuccggcugggccaucuacaccaaggacaacuccauccgcaucggcuccaagggcgacgucuucgucauccgcgagcccuucaucuccugcucccaccucgagugccgcaccuucuuccucacccagggcgcccuccucaacgacaagcacuccaacggcaccgucaaggaccgcucccccuaccgcgcccucauguccugcccccucggcgaggcccccucccccuacaacuccaaguucgaguccgucgccugguccgccuccgccugccacgacggcaugggcuggcucaccaucggcaucuccggccccgacaacggcgccgucgccguccucaaguacaacggcaucaucaccggcaccaucaaguccuggaagaagcagauccuccgcacccaggaguccgagugcgucugcaugaacggcuccugcuucaccaucaugaccgacggccccuccaacggcgccgccuccuacaagaucuucaagaucgagaagggcaaggccaccaaguccaucgagcucaacgcccccaacuuccacuacgaggagugcuccugcuaccccgacaccggcaccgucaugugcgucugccgcgacaacuggcacggcuccaaccgccccugggucuccuucaaccagaaccucgacuaccagaucggcuacaucugcuccggcgucuucggcgacaacccccgccccaaggaccgcgagggcuccugcaaccccgucaccgucgacggcgccgacggcgucaagggcuucuccuacaaguacggcaacggcgucuggaucggccgcaccaaguccaaccgccuccgcaagggcuucgagaugaucugggaccccaacggcuggaccaacaccgacuccgacuucuccgucaagcaggacgucgucgccaucaccgacugguccggcuacuccggcuccuucguccagcaccccgagcucaccggccucgacugcauccgccccugcuucugggucgagcucguccgcggccucccccgcgagaacaccaccaucuggaccuccggcuccuccaucuccuucugcggcgucaacuccgacaccgccaacugguccuggcccgacggcgccgagcuccccuucaccaucgacaaguga

SEQ ID NO: 112588 - RNA, 1413 nt, Artificial Sequence
  derived and/or modified CDS sequence (opt2) from neuraminidase__InfluenzaA__ACI32785
augaaccccaaccagaagaucaucaccaucggcuccaucuccaucgccaucggcaucaucucccucaugcuccagaucggcaacaucaucuccaucugggccucccacuccauccagaccggcucccagaaccacaccggcaugugcaaccagcgcaucaucaccuacgagaacuccaccugggucaaccacaccuacgucaacaucaacaacaccaacgucgucgccgagaaggacaagaccuccgucacccucgccggcaacuccucccucugcuccaucuccggcugggccaucuacaccaaggacaacuccauccgcaucggcuccaagggcgacgucuucgucauccgcgagcccuucaucuccugcucccaccucgagugccgcaccuucuuccucacccagggcgcccuccucaacgacaagcacuccaacggcaccgucaaggaccgcucccccuaccgcgcccucauguccugcccccucggcgaggcccccucccccuacaacuccaaguucgaguccgucgccugguccgccuccgccugccacgacggcaugggcuggcucaccaucggcaucuccggccccgacaacggcgccgucgccguccucaaguacaacggcaucaucaccgagaccaucaaguccuggaagaagcgcauccuccgcacccaggaguccgagugcgucugcgucaacggcuccugcuucaccaucaugaccgacggccccuccaacggcgccgccuccuacaagaucuucaagaucgagaagggcaaggucaccaaguccaucgagcucaacgcccccaacuuccacuacgaggagugcuccugcuaccccgacaccggcaccgucaugugcgucugccgcgacaacuggcacggcuccaaccgccccugggucuccuucaaccagaaccucgacuaccagaucggcuacaucugcuccggcgucuucggcgacaacccccgccccaaggacggcaagggcuccugcaaccccgucaccgucgacggcgccgacggcgucaagggcuucuccuacaaguacggcaacggcgucuggaucggccgcaccaaguccaaccgccuccgcaagggcuucgagaugaucugggaccccaacggcugggccgacaccgacuccgacuucuccgucaagcaggacgucgucgccaucaccgacugguccggcuacuccggcuccuucguccagcaccccgagcucaccggccucaacugcauccgccccugcuucugggucgagcucguccgcggccucccccgcgagaacaccaccaucuggaccuccggcuccuccaucuccuucugcggcgucgacuccgacaccgccaacugguccuggcccgacggcgccgagcuccccuucaccaucgacaaguga

SEQ ID NO: 112589 - RNA, 1413 nt, Artificial Sequence
  derived and/or modified CDS sequence (opt2) from neuraminidase__InfluenzaA__ACI32787
augaaccccaaccagaagaucaucaccaucggcuccaucuccaucgccaucggcaucaucucccucauccuccagaucggcaacaucaucuccaucugggccucccacuccauccagaccggcucccagaaccacaccggcaucugcaaccagcgcaucaucaccuacgagaacuccaccugggucaacaacaccuacgucaacaucaacaacaccaacgucgucgccgagaaggacaagaccuccgucacccucgccggcaacuccucccucugcuccaucuccggcugggccaucuacaccaaggacaacuccauccgcaucggcuccaagggcgacgucuucgucauccgcgagcccuucaucuccugcucccaccucgagugccgcaccuucuuccucacccagggcgcccuccucaacgacaagcacuccaacggcaccgucaaggaccgcucccccuaccgcgcccucauguccugcccccucggcgaggcccccucccccuacaacucccgcuucgaguccgucgccugguccgccuccgccugccacgacggcaugggcuggcucaccaucggcaucuccggccccgacaacggcgccgucgccguccucaaguacaacggcaucaucaccgagaccaucaaguccuggaagaagcgcauccuccgcacccaggaguccgagugcgucugcaugaacggcuccugcuucaccaucaugaccgacggccccuccaacggcgccgccuccuacaagaucuucaagaucgagaagggcaaggucaccaagaccaucgagcucaacgcccccaacuuccacuacgaggagugcuccugcuaccccgacaccggcaccgucaugugcgucugccgcgacaacuggcacggcuccaaccgccccugggucuccuucaaccagaaccucgacuaccagaucggcuacaucugcuccggcgucuucggcgacaacccccgccccaaggacggcgagggcuccugcaaccccgucaccgucgacggcgccgacggcgucaagggcuucuccuacaaguacggcaacggcgucuggaucggccgcaccaaguccaaccgccuccgcaagggcuucgagaugaucugggaccccaacggcuggaccaacaccgacuccgacuucuccgucaagcaggacgucgucgccaucaccgacugguccggcuacuccggcuccuucguccagcaccccgagcucaccggccucgacugcauccgccccugcuucugggucgagcucguccgcggccucccccgcgagaacaccaccaucuggaccuccggcuccuccaucuccuucugcggcgucaacggcggcaccgccgacugguccuggcccgacggcgccgagcuccccuucaccaucgacaaguga

SEQ ID NO: 112590 - RNA, 1413 nt, Artificial Sequence
  derived and/or modified CDS sequence (opt2) from neuraminidase__InfluenzaA__ACI32788
augaaccccaaccagaagaucaucaccaucggcuccaucuccaucgccaucggcaucaucucccucaugcuccagaucggcaacaucaucuccaucugggccucccacuccauccagaccggcucccagaaccacaccggcaccugcaaccagcgcaucaucaccuacgagaacaacaccugggucaaccacaccugcgucaacaucaacaacaccaacgucgucgccggcaaggacaagaccuccgucacccucgucggcaacuccucccucugcuccaucuccggcugggccaucuacaccaaggacaacuccauccgcaucggcuccaagggcgacgucuucgucauccgcgagcccuucaucuccugcucccaccucgagugccgcaccuucuuccucacccagggcgcccuccucaacgacaagcacuccaacggcaccgucaaggaccgcucccccuaccgcgcccucauguccugcccccucggcgaggcccccucccccuacaacuccaaguucgaguccgucgccugguccgccuccgccugccacgacggcaagggcuggcucaccaucggcaucuccggccccgacaacggcgccgucgccguccucaaguacaacggcaucaucaccgagaccaucaaguccuggaagaagcgcauccuccgcacccaggaguccgagugcgucugcgucaacggcuccugcuucaccaucaugaccgacggccccuccaacggcgccgccuccuacaagaucuucaagaucgagaagggcaaggucaccaaguccaucgagcucaacgcccccaacuuccacuacgaggagugcuccugcuaccccgacaccggcaccgucaugugcgucugccgcgacaacuggcacggcuccaaccgccccugggucuccuucaaccagaaccucgacuaccagaucggcuacaucugcuccggcgucuucggcgacaacccccgccccaaggacggcaagggcuccugcaaccccaugaccgucgacggcgccgacggcgucaagggcuucuccuacaaguacggcaacggcgucuggaucggccgcaccaaguccaaccgccuccgcaagggcuucgagaugaucugggaccccaacggcuggaccgacaccgacuccgacuucuccgucaagcaggacgucgucgccaucaccgacugguccggcuacuccggcuccuucguccagcaccccgagcucaccggccucgacugcauccgccccugcuucugggucgagcucguccgcggccucccccgcgagaacaccaccaucuggaccuccggcuccuccaucuccuucugcggcgucgacuccgacaccgccaacugguccuggcccgacggcgccgagcuccccuucaccaucgacaaguga

SEQ ID NO: 112591 - RNA, 1410 nt, Artificial Sequence
  derived and/or modified CDS sequence (opt2) from neuraminidase__InfluenzaA__ACI32790
augaaccccaaccagaagaucaucaccaucggcuccgucucccucaccaucgccaccaucugcuuccucacccagaucgccauccucgucaccaccgucacccuccacuucaagcaguacgagugcaacuccccccccaacaaccaggucaugcucugcgagcccaccaucaucgagcgcaacaucaccgagaucgucuaccucaccaacaccaccaucgagaaggagaucugccccaagcucgccgaguaccgcaacugguccaagccccagugcaacaucaccggcuucgcccccuucuccaaggacaacuccauccgccucuccgccggcggcgacaucugggucacccgcgagcccuacgucuccugcgaccccgacaagugcuaccaguucgcccucggccagggcaccacccucaacaacggccacuccaacgacaccguccacgaccgcacccccuaccgcacccuccucaugaacgagcucggcguccccuuccaccucggcaccaagcaggucugcaucgccugguccuccuccuccugccacgacggcaaggccuggcuccacgucugcgucaccggcgacgacaagaacgccaccgccuccuucaucuacaacggccgccucgucgacuccaucggcuccugguccaagaagauccuccgcacccaggaguccgagugcgucugcaucaacggcaccugcaccgucgucaugaccgacggcuccgccuccggcaaggccgacaccaagauccucuucaucgaggagggcaagaucguccacaccucccuccucuccggcuccgcccagcacgucgaggagugcuccugcuacccccgcuaccccggcguccgcugcgucugccgcgacaacuggaagggcuccaaccgccccaucgucgacaucaacgucaaggacuacuccaucgucuccuccuacgucugcuccggccucgucggcgacaccccccgcaagaacgacuccuccuccuccucccacugccucgaccccaacaacgaggagggcggccacggcgucaagggcugggccuucgacgacggcaacgacgucuggaugggccgcaccaucuccgagaagcuccgcuccggcuacgagaccuucaaggucaucgagggcugguccaagcccaacuccaagcuccagaucaaccgccaggucaucgucgaccgcggcaaccgcuccggcuacuccggcaucuucuccgucgagggcaaguccugcaucaaccgcugcuucuacgucgagcucauccgcggccgcaaccaggagaccgagguccucuggaccuccaacuccaucgucgucuucugcggcaccuccggcaccuacggcaccggcuccuggcccgacggcgccgacaucaaccucaugcccaucuga

SEQ ID NO: 112592 - RNA, 1410 nt, Artificial Sequence; identical to SEQ ID NO: 110418
  derived and/or modified CDS sequence (opt2) from neuraminidase__InfluenzaA__ACI32791

SEQ ID NO: 112593 - RNA, 1410 nt, Artificial Sequence; identical to SEQ ID NO: 110418
  derived and/or modified CDS sequence (opt2) from neuraminidase__InfluenzaA__ACI32793

SEQ ID NO: 112594 - RNA, 1410 nt, Artificial Sequence; identical to SEQ ID NO: 110418
  derived and/or modified CDS sequence (opt2) from neuraminidase__InfluenzaA__ACI32794

SEQ ID NO: 112595 - RNA, 1410 nt, Artificial Sequence; identical to SEQ ID NO: 110748
  derived and/or modified CDS sequence (opt2) from neuraminidase__InfluenzaA__ACI32795

SEQ ID NO: 112596 - RNA, 1410 nt, Artificial Sequence
  derived and/or modified CDS sequence (opt2) from neuraminidase__InfluenzaA__ACI32796
augaaccccaaccagaagaucaucaccaucggcuccgucucccucaccaucuccaccaucugcuucuucaugcagaucgccauccucaucaccaccgucacccuccacuucaagcaguacgaguucaacuccccccccaacaaccaggucaugcucugcgagcccaccaucaucgagcgcaacaucaccgagaucgucuaccucaccaacaccaccaucgagaaggagaucugccccaagcucgccgaguaccgcaacugguccaagccccagugcuccaucaccggcuucgcccccuucuccaaggacaacuccauccgccucuccgccggcggcgacaucugggucacccgcgagcccuacgucuccugcgaccccgacaagugcuaccaguucgcccucggccagggcaccacccucaacaacguccacuccaacgacaccguccacgaccgcacccccuaccgcacccuccucaugaacgagcucggcguccccuuccaccucggcaccaagcaggucugcaucgccugguccuccuccuccugccacgacggcaaggccuggcuccacgucugcgucaccggcgacgacaagaacgccaccgccuccuucaucuacaacggccgccucgucgacuccaucgucuccugguccaaggagauccuccgcacccaggaguccgagugcgucugcaucaacggcaccugcaccgucgucaugaccgacggcuccgccuccggcaaggccgacaccaagauccucuucaucgaggagggcaagaucguccacaccuccacccucuccggcuccgcccagcacgucgaggagugcuccugcuacccccgcuaccccggcguccgcugcgucugccgcgacaacuggaagggcuccaaccgccccaucgucgacaucaacaucaaggacuacuccaucgucuccuccuacgucugcuccggccucgucggcgacaccccccgcaagaacgacuccuccuccuccucccacugccucgaccccaacaacgaggagggcggccacggcgucaagggcugggccuucgacgacggcaacgacgucuggaugggccgcaccaucuccgagaagucccgcuccggcuacgagaccuucaaggucaucgagggcugguccaaccccaacuccaagcuccagaucaaccgccaggucaucgucgaccgcggcaaccgcuccggcuacuccggcaucuucuccgucgagggcaaguccugcaucaaccgcugcuucuacgucgagcucauccgcggccgcaaggaggagaccgagguccucuggaccuccaacuccaucgucgucuucugcggcaccuccggcaccuacggcaccggcuccuggcccgacggcgccgacaucaaccucaugcccaucuga

SEQ ID NO: 112597 - RNA, 1410 nt, Artificial Sequence
  derived and/or modified CDS sequence (opt2) from neuraminidase__InfluenzaA__ACI32797
augaaccccaaccagaugaucaucaccaucggcuccgucucccucaccaucuccaccaucugcuucuucaugcagaucgccauccucaucaccaccgucacccuccacuucaagcaguacgaguucaacuccccccccaacaaccaggucaugcucugcgagcccaccaucaucgagcgcaacaucaccgagaucgucuaccucaccaacaccaccaucgagaaggagaucugccccaagcucgccgaguaccgcaacugguccaagccccagugcuccaucaccggcuucgcccccuucuccaaggacaacuccauccgccucuccgccggcggcgacaucugggucacccgcgagcccuacgucuccugcgaccccgacaagugcuaccaguucgcccucggccagggcaccacccucaacaacguccacuccaacgacaccguccacgaccgcacccccuaccgcacccuccucaugaacgagcucggcguccccuuccaccucggcaccaagcaggucugcaucgccugguccuccuccuccugccacgacggcaaggccuggcuccacgucugcgucaccggcgacgacaagaacgccaccgccuccuucaucuacaacggccgccucgucgacuccaucgucuccugguccaaggagauccuccgcacccaggaguccgagugcgucugcaucaacggcaccugcaccgucgucaugaccgacggcuccgccuccggcaaggccgacaccaagauccucuucaucgaggagggcaagaucguccacaccuccacccucuccggcuccgcccagcacgucgaggagugcuccugcuacccccgcuaccccggcguccgcugcgucugccgcgacaacuggaagggcuccaaccgccccaucgucgacaucaacaucaaggacuacuccaucgucuccuccuacgucugcuccggccucgucggcgacaccccccgcaagaacgacuccuccuccuccucccacugccucgaccccaacaacgaggagggcggccacggcgucaagggcugggccuucgacgacggcaacgacgucuggaugggccgcaccaucuccgagaagucccgcuccggcuacgagaccuucaaggucaucgagggcugguccaaccccaacuccaagcuccagaucaaccgccaggucaucgucgaccgcggcaaccgcuccggcuacuccggcaucuucuccgucgagggcaaguccugcaucaaccgcugcuucuacgucgagcucauccgcggccgcaaggaggagaccgagguccucuggaccuccaacuccaucgucgucuucugcggcaccuccggcaccuacggcaccggcuccuggcccgacggcgccgacaucaaccucaugcccaucuga

SEQ ID NO: 112598 - RNA, 1410 nt, Artificial Sequence
  derived and/or modified CDS sequence (opt2) from neuraminidase__InfluenzaA__ACI32798
augaaccccaaccagaagaucaucaccaucggcuccgucucccucaccaucuccaccaucugcuucuucaugcagaucgccauccucaucaccaccgucacccuccacuucaagcaguacgaguucaacuccccccccaacaaccaggucaugcucugcgagcccaccaucaucgagcgcaacaucaccgagaucgucuaccucaccaacaccaccaucgagaaggagaucugccccaagcucgccgaguaccgcaacugguccaagccccagugcaacaucaccggcuucgcccccuucuccaaggacaacuccauccgccucuccgccggcggcgacaucugggucacccgcgagcccuacgucuccugcgaccccgacaagugcuaccaguucgcccucggccagggcaccacccucaacaacguccacuccaacgacaccguccacgaccgcacccccuaccgcacccuccucaugaacgagcucggcguccccuuccaccucggcaccaagcaggucugcaucgccugguccuccuccuccugccacgacggcaaggccuggcuccacgucugcgucaccggcgacgacaagaacgccaccgccuccuucaucuacaacggccgccucgucgacuccaucgucuccugguccaacgagauccuccgcacccaggaguccgagugcgucugcaucaacggcaccugcaccgucgucaugaccgacggcuccgccuccggcaaggccgacaccaagauccucuucaucgaggagggcaagaucguccacaccuccacccucuccggcuccgcccagcacgucgaggagugcuccugcuacccccgcuaccccggcguccgcugcgucugccgcgacaacuggaagggcuccaaccgccccaucgucgacaucaacaucaaggacuacuccaucgucuccuccuacgucugcuccggccucgucggcgacaccccccgcaagaacgacuccuccuccuccucccacugccucgaccccaacaacgaggagggcggccacggcgucaagggcugggccuucgacgacggcaacgacgucuggaugggccgcaccaucuccgagaagcuccgcuccggcuacgagaccuucaaggucaucgagggcugguccaaccccaacuccaagcuccagaucaaccgccaggucaucgucgaccgcggcaaccgcuccggcuacuccggcaucuucuccgucgagggcaaguccugcaucaaccgcugcuucuacgucgagcucauccgcggccgcaaggaggagaccgagguccucuggaccuccaacuccaucgucgucuucugcggcaccuccggcaccuacggcaccggcuccuggcccgacggcgccgacaucaaccucaugcccaucuga

SEQ ID NO: 112599 - RNA, 1410 nt, Artificial Sequence
  derived and/or modified CDS sequence (opt2) from neuraminidase__InfluenzaA__ACI32799
augaaccccaaccagcgcaucaucaccaucggcuccgucucccucaccaucuccaccaucugcuucuucaugcagaucgccauccucaucaccaccgucacccuccacuucaagcaguacgaguucaacuccccccccaacaaccaggucaugcucugcgagcccaccaucaucgagcgcaacaucaccgagaucgucuaccucaccaacaccaccaucgagaaggagaucugccccaagcucgccgaguaccgcaacugguccaagccccagugcgacaucaccggcuucgcccccuucuccaaggacaacuccauccgccucuccgccggcggcgacaucugggucacccgcgagcccuacgucuccugcgaccccgacaagugcuaccaguucgcccucggccagggcaccacccucaacaacguccacuccaacgacaccguccacgaccgcacccccuaccgcacccuccucaugaacgagcucggcguccccuuccaccucggcaccaagcaggucugcaucgccugguccuccuccuccugccacgacggcaaggccuggcuccacgucugcgucaccggcgacgacaagaacgccaccgccuccuucaucuacaacggccgccucgucgacuccgucgucuccugguccaaggacauccuccgcacccaggaguccgagugcgucugcaucaacggcaccugcaccgucgucaugaccgacggcuccgccuccggcaaggccaacaccaagauccucuucaucgaggagggcaagaucguccacaccuccacccucuccggcuccgcccagcacgucgaggagugcuccugcuacccccgcuaccccggcguccgcugcgucugccgcgacaacuggaagggcuccaaccgccccaucgucgacaucaacaucaagaacuacuccaucgucuccuccuacgucugcuccggccucgucggcgacaccccccgcaagaccgacuccuccuccuccucccacugccucgaccccaacaacgaggagggcggccacggcgucaagggcugggccuucgacgacggcaacgacgucuggaugggccgcaccaucuccgagaagcuccgccucggcuacgagaccuucaaggucaucgagggcugguccaaccccaacuccaagcuccagaucaaccgccaggucaucgucgaccgcggcaaccgcuccggcuacuccggcaucuucuccgucgagggcaaguccugcaucaaccgcugcuucuacgucgagcucauccgcggccgcaaggaggagaccgagguccucuggaccuccaacuccaucgucgucuucugcggcaccuccggcaccuacggcaccggcuccuggcccgacggcgccgacaucaaccucaugcccaucuga

SEQ ID NO: 112600 - RNA, 1410 nt, Artificial Sequence
  derived and/or modified CDS sequence (opt2) from neuraminidase__InfluenzaA__ACI32800
augaaccccaaccagaagaucaucaccaucggcuccgucucccucaccaucuccaccaucugcuucuucaugcagaucgccauccucaucaccaccgucacccuccacuucaagcaguacgaguucaacuccccccccaacaaccaggucaugcucugcgagcccaccaucaucgagcgcaacaucaccgagaucgucuaccucaccaacaccaccaucgagaaggagaucugccccaagcucgccgaguaccgcaacugguccaagccccagugcaacaucaccggcuucgcccccuucuccaaggacaacuccauccgccucuccgccggcggcgacaucugggucacccgcgagcccuacgucuccugcgaccccgacaagugcuaccaguucgcccucggccagggcaccacccucaacaacguccacuccaacgacaccguccacgaccgcacccccuaccgcacccuccucaugaacgagcucggcguccccuuccaccucggcaccaagcaggucugcaucgccugguccuccuccuccugccacgacggcaaggccuggcuccacgucugcgucaccggcgacgacaagaacgccaccgccuccuucaucuacaacggccgccucgucgacuccaucgucuccugguccaaggagauccuccgcacccaggaguccgagugcgucugcaucaacggcaccugcaccgucgucaugaccgacggcuccgccuccggcaaggccgacaccaagauccucuucaucgaggagggcaagaucguccacaccuccacccucuccggcuccgcccagcacgucgaggagugcuccugcuacccccgcuaccccggcguccgcugcgucugccgcgacaacuggaagggcuccaaccgccccaucgucgacaucaacaucaaggacuacuccaucgucuccuccuacgucugcuccggccucgucggcgacaccccccgcaagaacgacuccuccuccuccucccacugccucgaccccaacaacgaggagggcggccacggcgucaagggcugggccuucgacgacggcaacgacgucuggaugggccgcaccaucuccgagaagcuccgcuccggcuacgagaccuucaaggucaucgagggcugguccaaccccaacuccaagcuccagaccaaccgccaggucaucgucgaccgcggcaaccgcuccggcuacuccggcaucuucuccgucgagggcaaguccugcaucaaccgcugcuucuacgucgagcucauccgcggccgcaaggaggagaccgagguccucuggaccuccaacuccaucgucgucuucugcggcaccuccggcaccuacggcaccggcuccuggcccgacggcgccgacaucaaccucaugcccaucuga

SEQ ID NO: 112601 - RNA, 1410 nt, Artificial Sequence; identical to SEQ ID NO: 112600
  derived and/or modified CDS sequence (opt2) from neuraminidase__InfluenzaA__ACI32802

SEQ ID NO: 112602 - RNA, 1410 nt, Artificial Sequence; identical to SEQ ID NO: 112600
  derived and/or modified CDS sequence (opt2) from neuraminidase__InfluenzaA__ACI32803

SEQ ID NO: 112603 - RNA, 1410 nt, Artificial Sequence; identical to SEQ ID NO: 111743
  derived and/or modified CDS sequence (opt2) from neuraminidase__InfluenzaA__ACI32804

SEQ ID NO: 112604 - RNA, 1410 nt, Artificial Sequence
  derived and/or modified CDS sequence (opt2) from neuraminidase__InfluenzaA__ACI32805
augaaccccaaccagaagaucaucaccaucggcuccgucucccucaccaucuccaccaucugcuucuucaugcagaucgccauccucaucaccaccgucacccuccacuucaagcaguacgaguucaacuccccccccaacaaccaggucaugcucugcgagcccaccaucaucgagcgcaacaucaccgagaucgucuaccucaccaacaccaccaucgagaaggagaucugccccaagcucgccgaguaccgcaacugguccaagccccagugcaacaucaccggcuucgcccccuucuccaaggacaacuccauccgccucuccgccggcggcgacaucugggucacccgcgagcccuacgucuccugcgaccccgacaagugcuaccaguucgcccucggccagggcaccacccucaacaacguccacuccaacgacaccguccacgaccgcacccccuaccgcacccuccucaugaacgagcucggcguccccuuccaccucggcaccaagcaggucugcaucgccugguccuccuccuccugccacgacggcaaggccuggcuccacgucugcgucaccggcgacgacaagaacgccaccgccuccuucaucuacaacggccgccucgucgacuccaucgucuccugguccaaggagauccuccgcacccaggaguccgagugcgucugcaucaacggcaccugcaccgucgucaugaccgacggcuccgccuccggcaaggccgucaccaagauccucuucaucgaggagggcaagaucguccacaccuccacccucuccggcuccgcccagcacgucgaggagugcuccugcuacccccgcuaccccggcguccgcugcgucugccgcgacaacuggaagggcuccaaccgccccaucgucgacaucaacaucaaggacuacuccaucgucuccuccuacgucugcuccggccucgucggcgacaccccccgcaagaacgaccgcuccuccuccucccacugccucgaccccaacaacgaggagggcggccacggcgucaagggcugggccuucgacgacggcaacgacgucuggaugggccgcaccaucuccgagaagucccgcuccggcuacgagaccuucaaggucaucgagggcugguccaaccccaacuccaagcuccagaccaaccgccaggucaucgucgaccgcggcaaccgcuccggcuacuccggcaucuucuccgucgagggcaaguccugcaucaaccgcugcuucuacgucgagcucauccgcggccgcaaggaggagaccgagguccucuggaccuccaacuccaucgucgucuucugcggcaccuccggcaccuacggcaccggcuccuggcccgacggcgccgacaucaaccucaugcccaucuga

SEQ ID NO: 112605 - RNA, 1410 nt, Artificial Sequence; identical to SEQ ID NO: 110748
  derived and/or modified CDS sequence (opt2) from neuraminidase__InfluenzaA__ACI32806

SEQ ID NO: 112606 - RNA, 1410 nt, Artificial Sequence
  derived and/or modified CDS sequence (opt2) from neuraminidase__InfluenzaA__ACI32807
augaaccccaaccagaagaucaucaccaucggcuccgucucccucaccaucuccaccaucugcuucuucaugcagaucgccauccucaucaccaccgucacccuccacuucaagcaguacgaguucaacuccccccccaacaaccaggucaugcucugcgagcccaccaucaucgagcgcaacaucaccgagaucgucuaccucaccaacaccaccaucgagaaggaggucugccccaagcucgccgaguaccgcaacugguccaagccccagugcgacaucaccggcuucgcccccuucuccaaggacaacuccauccgccucuccgccggcggcgacaucugggucacccgcgagcccuacgucuccugcgaccccgacaagugcuaccaguucgcccucggccagggcaccacccucaacaacguccacuccaacgacaccguccgcgaccgcacccccuaccgcacccuccucaugaacgagcucggcguccccuuccaccucggcaccaagcaggucugcaucgccugguccuccuccuccugccacgacggcaaggccuggcuccacgucugcaucaccggcgacgacaagaacgccaccgccuccuucaucuacaacggccgccucgucgacuccaucgucuccugguccaaggagauccuccgcacccaggaguccgagugcgucugcaucaacggcaccugcaccgucgucaugaccgacggcuccgccuccggcaaggccgacaccaagauccucuucaucgaggagggcaagaucguccacaccuccacccucuccggcuccgcccagcacgucgaggagugcuccugcuacccccgcuaccccggcguccgcugcgucugccgcgacaacuggaagggcuccaaccgccccaucgucgacaucaacaucaaggaccacuccaucgucuccuccuacgucugcuccggccucgucggcgacaccccccgcaagaacgacuccuccuccuccucccacugccucgaccccaacaacgaggagggcggccacggcgucaagggcugggccuucgacgacggcaacgacgucuggaugggccgcaccaucuccgagaagucccgccucggcuacgagaccuucaaggucaucgagggcugguccaaccccaacuccaagcuccagaucaaccgccaggucaucgucgaccgcggcaaccgcuccggcuacuccggcaucuucuccgucgagggcaaguccugcaucaaccgcugcuucuacgucgagcucauccgcggccgcaaggaggagaccgagguccucuggaccuccaacuccaucgucgucuucugcggcaccuccggcaccuacggcaccggcuccuggcccgacggcgccgacaucaaccucaugcccaucuga

SEQ ID NO: 112607 - RNA, 1410 nt, Artificial Sequence
  derived and/or modified CDS sequence (opt2) from neuraminidase__InfluenzaA__ACI32808
augaaccccaaccagaagaucaucaccaucggcuccgucucccucaccaucuccaccaucugcuucuucaugcagaucgccauccucaucaccaccgucacccuccacuucaagcaguacgaguucaacuccccccccaacaaccaggucaugcucugcgagcccaccaucaucgagcgcaacaucaccgagaucgucuaccucaccaacaccaccaucgagaaggagaucugccccaagcucgccgaguaccgcaacugguccaagccccagugcgacaucaccggcuucgcccccuucuccaaggacaacuccauccgccucuccgccggcggcgacaucugggucacccgcgagcccuacgucuccugcgaccccgacaagugcuaccaguucgcccucggccagggcaccacccucaacaacguccacuccaacgacaccguccacgaccgcacccccuaccgcacccuccucaugaacgagcucggcguccccuuccaccucggcaccaagcaggucugcaucgccugguccuccuccuccugccacgacggcaaggccuggcuccacgucugcgucaccggcgacgacaagaacgccaccgccuccuucaucuacaacggccgccucgucgacuccgucgucuccugguccaaggacauccuccgcacccaggaguccgagugcgucugcaucaacggcaccugcaccgucgucaugaccgacggcuccgccuccggcaaggccgacaccaagauccucuucaucgaggagggcaagaucguccacaccuccacccucuccggcuccgcccagcacgucgaggagugcuccugcuacccccgcuaccccggcguccgcugcgucugccgcgacaacuggaagggcuccaaccgccccaucgucgacaucaacaucaagaacuacuccaucgucuccuccuacgucugcuccggccucgucggcgacaccccccgcaagaccgacuccuccuccuccucccacugccucgaccccaacaacgaggagggcggccacggcgucaagggcugggccuucgacgacggcaacgacgucuggaugggccgcaccaucuccgagaagcuccgccucggcuacgagaccuucaaggucaucgagggcugguccaaccccaacuccaagcuccagaucaaccgccaggucaucgucgaccgcggcaaccgcuccggcuacuccggcaucuucuccgucgagggcaaguccugcaucaaccgcugcuucuacgucgagcucauccgcggccgcaaggagaagaccgagguccucuggaccuccaacuccaucgucgucuucugcggcaccuccggcaccuacggcaccggcuccuggcccgacggcgccgacaucaaccucaugcccaucuga

SEQ ID NO: 112608 - RNA, 1410 nt, Artificial Sequence; identical to SEQ ID NO: 111743
  derived and/or modified CDS sequence (opt2) from neuraminidase__InfluenzaA__ACI32809

SEQ ID NO: 112609 - RNA, 1410 nt, Artificial Sequence
  derived and/or modified CDS sequence (opt2) from neuraminidase__InfluenzaA__ACI32810
augaaccccaaccagaagaucaucaccaucggcuccgucucccucaccaucuccaccaucugcuucuucaugcagaucgccauccucaucaccaccgucacccuccacuucaagcaguacgaguucaacuccccccccaacaaccaggucaugcucugcgagcccaccaucaucgagcgcaacaucaccgagaucgucuaccucaccaacaccaccaucgagaaggagaucugccccaagcucgccgaguaccgcaacugguccaagccccagugcgacaucaccggcuucgcccccuucuccaaggacaacuccauccgccucuccgccggcggcgacaucugggucacccgcgagcccuacgucuccugcgaccccgacaagugcuaccaguucgcccucggccagggcaccacccucaacaacguccacuccaacgacaccguccacgaccgcaccccccaccgcacccuccucaugaacgagcucggcguccccuuccaccucggcaccaagcaggucugcaucgccugguccuccuccuccugccacgacggcaaggccuggcuccacgucugcgucaccggcgacgacaagaacgccaccgccuccuucaucuacaacggccgccucgucgacuccgucgucuccugguccaaggacauccuccgcacccaggaguccgagugcgucugcaucaacggcaccugcaccgucgucaugaccgacggcuccgccuccggcaaggccgacaccaagauccucuucaucgaggagggcaagaucguccacaccuccacccucuccggcuccgcccagcacgucgaggagugcuccugcuacccccgcuaccccggcguccgcugcgucugccgcgacaacuggaagggcuccaaccgccccaucgucgacaucaacaucaagaacuacuccaucgucuccuccuacgucugcuccggccucgucggcgacaccccccgcaagaccgacuccuccuccuccucccacugccucgaccccaacaacgaggagggcggccacggcgucaagggcugggccuucgacgacggcaacgacgucuggaugggccgcaccaucuccgagaagcuccgccucggcuacgagaccuucaaggucaucgagggcugguccaaccccaacuccaagcuccagaucaaccgccaggucaucgucgaccgcggcaaccgcuccggcuacuccggcaucuucuccgucgagggcaaguccugcaucaaccgcugcuucuacgucgagcucauccgcggccgcaaggaggagaccgagguccucuggaccuccaacuccaucgucgucuucugcggcaccuccggcaccuacggcaccggcuccuggcccgacggcgccgacaucaaccucaugcccaucuga

SEQ ID NO: 112610 - RNA, 1410 nt, Artificial Sequence
  derived and/or modified CDS sequence (opt2) from neuraminidase__InfluenzaA__ACI32811
augaaccccaaccagaagaucaucaccaucggcuccgucucccucaccaucuccaccaucugcuucuucaugcagaucgccauccucaucaccaccgucacccuccacuucaagcaguacgaguucaacuccccccccaacaaccaggucaugcucugcgagcccaccaucaucgagcgcaacaucaccgagaucgucuaccucaccaacaccaccaucgagaaggagaucugccccaagcucgccgaguaccgcaacugguccaagccccagugcaacaucaccggcuucgcccccuucuccaaggacaacuccauccgccucuccgccggcggcgacaucugggucacccgcgagcccuacgucuccugcgaccccgacaagugcuaccaguucgcccucggccagggcaccacccucaacaacguccacuccaacgacaccguccacgaccgcacccccuaccgcacccuccucaugaacgagcucggcguccccuuccaccucggcaccaagcaggucugcaucgccugguccuccuccuccugccacgacggcaaggccuggcuccacgucugcgucaccggcgacgacaagaacgccaccgccuccuucaucuacaacggccgccucgucgacuccaucgucuccugguccaaggagauccuccgcacccaggaguccgagugcgucugcaucaacggcaccugcaccgucgucaugaccgacggcuccgccuccggcaaggccgacaccaagauccucuucaucgaggagggcaagaucguccacaccuccacccucuccggcuccgcccagcacgucgaggagugcuccugcuacccccgcuaccccggcguccgcugcgucugccgcgacaacuggaagggcuccaaccgccccaucgucgacaucaacaucaaggacuacuccaucgucuccuccuacgucugcuccggccucgucggcgacaccccccgcaagaacgacuccuccuccuccucccacugccucgaccccaacaacgaggagggcggccacggcgucaagggcugggccuucgacgacggcaacgacgucuggaugggccgcaccaucuccgagaagcuccgcuccggcuacgagaccuucaaggucaucgagggcugguccaaccccaaguccaagcuccagaucaaccgccaggucaucgucgaccgcggcaaccgcuccggcuacuccggcaucuucuccgucgagggcaaguccugcaucaaccgcugcuucuacgucgagcucauccgcggccgcaaggaggagaccgagguccucuggaccuccaacuccaucgucgucuucugcggcaccuccggcaccuacggcaccggcuccuggcccgacggcgccgacaucaaccucaugcccaucuga

SEQ ID NO: 112611 - RNA, 1410 nt, Artificial Sequence
  derived and/or modified CDS sequence (opt2) from neuraminidase__InfluenzaA__ACI32812
augaaccccaaccagaagaucaucaccaucggcuccgucucccucaccaucuccaccaucugcuucuucaugcagaucgccauccucaucaccaccgucacccuccacuucaagcaguacgaguucaacuccccccccaacaaccaggucaugcucugcgagcccaccaucaucgagcgcaacaucaccgagaucgucuaccucaccaacaccaccaucgagaaggagaucugccccaagcucgccgaguaccgcaacugguccaagccccagugcgacaucaccggcuucgcccccuucuccaaggacaacuccauccgccucuccgccggcggcgacaucugggucacccgcgagcccuacgucuccugcgaccccgacaagugcuaccaguucgcccucggccagggcaccacccucaacaacguccacuccaacgacaccguccacgaccgcacccccuaccgcacccuccucaugaacgagcucggcguccccuuccaccucggcaccaagcaggucugcaucgccugguccuccuccuccugccacgacggcaaggccuggcuccacgucugcgucaccggcgacgacaagaacgccaccgccuccuucaucuacaacggccgccucgucgacuccgucgucuccugguccaaggacauccuccgcacccaggaguccgagugcgucugcaucaacggcaccugcaccgucgucaugaccgacggcuccgccuccggcaaggccaacaccaagauccucuucaucgaggagggcaagaucguccacaccuccacccucuccggcuccgcccagcacgucgaggagugcuccugcuacccccgcuaccccggcguccgcugcgucugccgcgacaacuggaagggcuccaaccgccccaucgucgacaucaacaucaagaacuacuccaucgucuccuccuacgucugcuccggccucgucggcgacaccccccgcaagaccgacuccuccuccuccucccacugccucgaccccaacaacgaggagggcggccacggcgucaagggcugggccuucgacgacggcaacgacgucuggaugggccgcaccaucuccgagaagcuccgccucggcuacgagaccuucaaggucaucgagggcugguccaaccccaacuccaagcuccagaucaaccgccaggucaucgucgaccgcggcaaccgcuccggcuacuccggcaucuucuccgucgagggcaaguccugcaucaaccgcugcuucuacgucgagcucauccgcggccgcaaggaggagaccgagguccucuggaccuccaacuccaucgucgucuucugcggcaccuccggcaccuacggcaccggcuccuggcccgacggcgccgacaucaaccucaugcccaucuga

SEQ ID NO: 112612 - RNA, 1410 nt, Artificial Sequence; identical to SEQ ID NO: 110835
  derived and/or modified CDS sequence (opt2) from neuraminidase__InfluenzaA__ACI32814

SEQ ID NO: 112613 - RNA, 1350 nt, Artificial Sequence
  derived and/or modified CDS sequence (opt2) from neuraminidase__InfluenzaA__ACJ53848
augaaccccaaccagaagaucaucaccaucggcuccaucugcauggucaucggcaucgucucccucaugcuccagaucggcaacaugaucuccaucugggucucccacuccauccagaccggcaaccagugccaggccgagcccaucuccaacaccaaguuccucaccgagaaggccgucgccuccgucacccucgccggcaacuccucccucugccccaucuccggcugggccgucuacuccaaggacaacuccauccgcaucggcucccgcggcgacgucuucgucauccgcgagcccuucaucuccugcucccaccucgagugccgcaccuucuuccucacccagggcgcccuccucaacgacaagcacuccaacggcaccgucaaggaccgcuccccccaccgcacccucauguccugccccgucggcgaggcccccucccccuacaacucccgcuucgaguccgucgccugguccgccuccgccugccacgacggcaccuccuggcucaccaucggcaucuccggccccgacaacggcgccgucgccguccucaaguacaacggcaucaucaccgacaccaucaaguccuggcgcaacaacauccuccgcacccaggaguccgagugcgccugcgucaacggcuccugcuucaccgucaugaccgacggccccuccuccggccaggccuccuacaagaucuucaagauggagaagggcaaggucgucaaguccgucgagcucgacgcccccaacuaccacuacgaggagugcuccugcuaccccgacgccggcgagaucaccugcgucugccgcgacaacuggcacggcuccaaccgccccugggucuccuucaaccagaaccucgaguaccagaucggcuacaucugcuccggcgucuucggcgacaacccccgccccaacgacggcaccggcuccugcggccccgucucccccaacggcgccuacggcgucaagggcuucuccuucaaguacggcaacggcgucuggaucggccgcaccaaguccaccaacucccgcuccggcuucgagaugaucugggaccccaacggcuggaccggcaccgacuccuccuucuccgucaagcaggacaucgucgccaucaccgacugguccggcuacuccggcuccuucguccagcaccccgagcucaccggccucgacugcauccgccccugcuucugggucgagcucauccgcggccgccccaaggaguccaccaucuggaccuccggcuccuccaucuccuucugcggcgucaacuccgacaccgucuccugguccuggcccgacggcgccgagcuccccuucaccaucgacaaguga

SEQ ID NO: 112614 - RNA, 1350 nt, Artificial Sequence
  derived and/or modified CDS sequence (opt2) from neuraminidase__InfluenzaA__ACJ53849
augaaccccaaccagaagaucaucaccaucggcuccaucugcauggucaucggcaucgucucccucaugcuccagaucggcaacaugaucuccaucugggucucccacuccauccagaccggcaaccagugccaggccgagcccaucuccaacaccaaguuccucaccgagaaggccgucgccuccgucacccucgccggcaacuccucccucugccccaucuccggcugggccgucuacuccaaggacaacuccauccgcaucggcucccgcggcgacgucuucgucauccgcgagcccuucaucuccugcucccaccucgagugccgcaccuucuuccucacccagggcgcccuccucaacgacaagcacuccaacggcaccgucaaggaccgcuccccccaccgcacccucauguccugccccgucggcgaggcccccucccccuacaacucccgcuucgaguccgucgccugguccgccuccgccugccacgacggcaccuccuggcucaccaucggcaucuccggccccgacaacggcgccgucgccguccucaaguacaacggcaucaucaccgacaccaucaaguccuggcgcaacaacauccuccgcacccaggaguccgagugcgccugcgucaacggcuccugcuucaccgucaugaccgacggccccuccuccggccaggccuccuacaagaucuucaagauggagaagggcaaggucgucaaguccgucgagcucgacgcccccaacuaccacuacgaggagugcuccugcuaccccgacgccggcgagaucaccugcgucugccgcgacaacuggcacggcuccaaccgccccugggucuccuucaaccagaaccucgaguaccagaucggcuacaucugcuccggcgucuucggcgacaacccccgccccaacgacggcaccggcuccugcucccccgucucccccaacggcgccuacggcgucaagggcuucuccuucaaguacggcaacggcgucuggaucggccgcaccaaguccaccaacucccgcuccggcuucgagaugaucugggaccccaacggcuggaccggcaccgacuccuccuucuccgucaagcaggacaucgucgccaucaccgacugguccggcuacuccggcuccuucguccagcaccccgagcucaccggccucgacugcauccgccccugcuucugggucgagcucauccgcggccgccccaaggaguccaccaucuggaccuccggcuccuccaucuccuucugcggcgucaacuccgacaccgucuccugguccuggcccgacggcgccgagcuccccuucaccaucgacaaguga

SEQ ID NO: 112615 - RNA, 1350 nt, Artificial Sequence
  derived and/or modified CDS sequence (opt2) from neuraminidase__InfluenzaA__ACJ53853
augaaccccaaccagaagaucaucaccaucggcuccaucugcauggucaucggcaucgucucccucaugcuccagaucggcaacaugaucuccaucugggucucccacuccauccagaccggcaaccagugccaggacgagcccaucuccaacaccaaguuccucaccgagaaggccgucgccuccgucacccucgccggcaacuccucccucugccccaucuccggcugggccgucuacuccaaggacaacuccauccgcaucggcucccgcggcgacgucuucgucauccgcgagcccuucaucuccugcucccaccucgagugccgcaccuucuuccucacccagggcgcccuccucaacgacaagcacuccaacggcaccgucaaggaccgcuccccccaccgcacccucauguccugccccgucggcgaggcccccucccccuacaacucccgcuucgaguccgucgccugguccgccuccgccugccacgacggcaccuccuggcucaccaucggcaucuccggccccgacaacggcgccgucgccguccucaaguacaacggcaucaucaccgacaccaucaaguccuggcgcaacaacauccuccgcacccaggaguccgagugcgccugcgucaacggcuccugcuucaccgucaugaccgacggccccuccuccggccaggccuccuacaagaucuucaagauggagaagggcaaggucgucaaguccgucgagcucgacgcccccaacuaccacuacgaggagugcuccugcuaccccgacgccggcgagaucaccugcgucugccgcgacaacuggcacggcuccaaccgccccugggucuccuucaaccagaaccucgaguaccagaucggcuacaucugcuccggcgucuucggcgacaacccccgccccaacgacggcaccggcuccugcggccccgucuuccccaacggcgccuacggcgucaagggcuucuccuucaaguacggcaacggcgucuggaucggccgcaccaaguccaccaacucccgcuccggcuucgagaugaucugggaccccaacggcuggaccggcaccgacuccuccuucuccgucaagcaggacaucgucgccaucaccgacugguccggcuacuccggcuccuucguccagcaccccgagcucaccggccucgacugcauccgccccugcuucugggucgagcucauccgcggccgccccaaggaguccaccaucuggaccuccggcuccuccaucuccuucugcggcgucaacuccgacaccgucuccugguccuggcccgacggcgccgagcuccccuucaccaucgacaaguga

SEQ ID NO: 112616 - RNA, 1350 nt, Artificial Sequence; identical to SEQ ID NO: 112615
  derived and/or modified CDS sequence (opt2) from neuraminidase__InfluenzaA__ACJ53866

SEQ ID NO: 112617 - RNA, 1350 nt, Artificial Sequence
  derived and/or modified CDS sequence (opt2) from neuraminidase__InfluenzaA__ACJ53867
augaaccccaaccagaagaucaucaccaucggcuccaucugcauggccaucggcaucgucucccucaugcuccagaucggcaacaugaucucccucugggucucccacuccauccagaccggcaaccagugccaggccgagcccaucuccaacaccaaguuccucaccgagaaggccgucgccuccgucacccucgccggcaacuccucccucugccccaucuccggcugggccgucuacuccaaggacaacuccauccgcaucggcucccgcggcgacgucuucgucauccgcgagcccuucaucuccugcucccaccucgagugccgcaccuucuuccucacccagggcgcccuccucaacgacaagcacuccaacggcaccgucaaggaccgcuccccccaccgcacccucauguccugccccgucggcgaggcccccucccccuacaacucccgcuucgaguccgucgccugguccgccuccgccugccacgacggcaccuccuggcucaccaucggcaucuccggccccgacaacggcgccgucgccguccucaaguacaacggcaucaucaccgacaccaucaaguccuggcgcaacaacauccuccgcacccaggaguccgagugcgccugcgucaacggcuccugcuucaccgucaugaccgacggccccuccuccggccaggccuccuacaagaucuucaagauggagaagggcaaggucgucaaguccgucgagcucgacgcccccaacuaccacuacgaggagugcuccugcuaccccgacgccggcgagaucaccugcgucugccgcgacaacuggcacggcuccaaccgccccugggucuccuucaaccagaaccucgaguaccagaucggcuacaucugcuccggcgucuucggcgacaacccccgccccaacgacggcaccggcuccugcggccccgucucccccaacggcgccuacggcgucaagggcuucuccuucaaguacggcaacggcgucuggaucggccgcaccaaguccaccaacucccgcuccggcuucgagaugaucugggaccccaacggcuggaccggcaccgacuccuccuucuccgucaagcaggacaucgucgccaucaccgacugguccggcuacuccggcuccuucguccagcaccccgagcucaccggccucgacugcauccgccccugcuucugggucgagcucauccgcggccgccccaaggaguccaccaucuggaccuccggcuccuccaucuccuucugcggcgucaacuccgacaccgucuccugguccuggcccgacggcgccgagcuccccuucaccaucgacaaguga

SEQ ID NO: 112618 - RNA, 1350 nt, Artificial Sequence
  derived and/or modified CDS sequence (opt2) from neuraminidase__InfluenzaA__ACJ53875
augaaccccaaccagaagaucaucaccaucggcuccaucugcauggucaucggcaucgucucccucaugcuccagaucggcaacaugaucuccaucugggucucccacuccauccagaccggcaaccagugccaggccgagcccaucuccaacaccaaguuccucaccgagaaggccgucgccuccgucacccucgccggcaacuccucccucugccccaucuccggcugggccgucuacuccaaggacaacuccauccgcaucggcucccgcggcgacgucuucgucauccgcgagcccuucaucuccugcucccaccucgagugccgcaccuucuuccucacccagggcgcccuccucaacgacaagcacuccaacggcaccgucaaggaccgcuccccccaccgcacccucauguccugccccgucggcgaggcccccucccccuacaacucccgcuucgaguccgucgccugguccgccuccgccugccacgacggcaucuccuggcucaccaucggcaucuccggccccgacaacggcgccgucgccguccucaaguacaacggcaucaucaccgacaccaucaaguccuggcgcaacaacauccuccgcacccaggaguccgagugcgccugcgucaacggcuccugcuucaccgucaugaccgacggccccuccuccggccaggccuccuacaagaucuucaagauggagaagggcaaggucgucaaguccgucgagcucgaggcccccaacuaccacuacgaggagugcuccugcuaccccgacgccggcgagaucaccugcgucugccgcgacaacuggcacggcuccaaccgccccugggucuccuucaaccagaaccucgaguaccagaucggcuacaucugcuccggcgucuucggcgacaacccccgccccaacgacggcaccggcuccugcggccccgucucccccaacggcgccuacggcgucaagggcuucuccuucaaguacggcaacggcgucuggaucggccgcaccaaguccaccaacucccgcuccggcuucgagaugaucugggaccccaacggcuggaccggcaccgacuccuccuucuccgucaagcaggacaucgucgccaucaccgacugguccggcuacuccggcuccuucguccagcaccccgagcucaccggccucgacugcauccgccccugcuucugggucgagcucauccgcggccgccccaaggaguccaccaucuggaccuccggcuccuccaucuccuucugcggcgucaacuccgacaccgucuccugguccuggcccgacggcgccgagcuccccuucaccaucgacaaguga

SEQ ID NO: 112619 - RNA, 1350 nt, Artificial Sequence
  derived and/or modified CDS sequence (opt2) from neuraminidase__InfluenzaA__ACJ53876
augaaccccaaccagaagaucaucaccaucggcuccaucugcauggucaucggcaucgucucccucaugcuccagaucggcaacaucaucuccaucugggucucccacuccauccagaccggcaaccagugccaggccgagcccaucuccaacaccaaguuccucaccgagaaggccgucgccuccgucacccucgccggcaacuccucccucugccccaucuccggcugggccgucuacuccaaggacaacuccauccgcaucggcucccgcggcgacgucuucgucauccgcgagcccuucaucuccugcucccaccucgagugccgcaccuucuuccucacccagggcgcccuccucaacgacaagcacuccaacggcaccgucaaggaccgcuccccccaccgcacccucauguccugccccgucggcgaggcccccucccccuacaacucccgcuucgaguccgucgccugguccgccuccgccugccacgacggcaccuccuggcucaccaucggcaucuccggccccgacaacggcgccgucgccguccucaaguacaacggcaucaucaccgacaccaucaaguccuggcgcaacaacauccuccgcacccaggaguccgagugcgccugcgucaacggcuccugcuucaccgucaugaccgacggccccuccuccggccaggccuccuacaagaucuucaagauggagaagggcaaggucgucaaguccgucgagcucgacgcccccaacuaccacuacgaggagugcuccugcuaccccgacgccggcgagaucaccugcgucugccgcgacaacuggcacggcuccaaccgccccugggucuccuucaaccagaaccucgaguaccagaucggcuacaucugcuccggcgucuucggcgacaacccccgccccaacgacggcaccggcuccugcggccccgucucccccaacggcgccuacggcgucaagggcuucuccuucaaguacggcaacggcgucuggaucggccgcaccaaguccaccaacucccgcuccggcuucgagaugaucugggaccccaacggcuggaccggcaccgacuccuccuucuccgucaagcaggacaucgucgccaucaccgacugguccggcuacuccggcuccuucguccagcaccccgagcucaccggccucgacugcauccgccccugcuucugggucgagcucauccgcggccgccccaaggaguccaccaucuggaccuccggcuccuccaucuccuucugcggcgucaacuccgacaccgucggcugguccuggcccgacggcgccgagcuccccuucaccaucgacaaguga

SEQ ID NO: 112620 - RNA, 1404 nt, Artificial Sequence
  derived and/or modified CDS sequence (opt2) from neuraminidase__InfluenzaA__ACJ67535
augaaccccaaccagaagaucaucgcccucggcuccgucuccaucaccaucgccaccaucugccucaucaugcagaucgccguccucgccaccaccaugacccuccacuucaacgagugcaccaaccccuccaacaaccaggccaugcccugcgagcccaucaucaucgagcgcaacaugaccgagaucguccaccucaacaacaccaccaucgagaaggaguccugccccaaggucgccgaguacaagaacugguccaagccccagugccagaucaccggcuucgcccccuucuccaaggacaacuccauccgccucuccgccggcggcgacaucugggucacccgcgagcccuacgucuccugcggccucggcaacugcuaccaguucgcccucggccagggcaccacccucaacaacaagcacuccaacgacaccauccacgaccgcuccccccaccgcacccuccucaugaacgagcucggcguccccuuccaccucggcaccaagcaggucugcaucgccugguccuccuccuccugccacgacggcaaggccuggcuccacgucugcgucaccggcgacgaccgcaacgccaccgccuccaucaucuacgacggcaugcucaccgacuccaucggcuccugguccaagaacauccuccgcacccaggaguccgagugcgucugcaucaacggcaccugcaccgucgucaugaccgacggcuccgccuccggccgcgccgacaccaagauccucuucauccgcgagggcaagaucguccacaucuccccccucuccggcuccgcccagcacgucgaggagugcuccugcuacccccgcuaccccgagguccgcugcgucugccgcgacaacuggaagggcuccaaccgccccguccucuacaucaacgucgccgacuacuccgucgacuccuccuacgucugcuccggccucgucggcgacaccccccgcaacgacgacuccuccuccuccuccaacugccgcgaccccaacaacgagcgcggcggccccggcgucaagggcugggccuucgacaacggcaacgacgucuggaugggccgcaccaucaagaaggacucccgcuccggcuacgagaccuuccgcgucgucggcggcuggaccaccgccaacuccaagucccagaucaaccgccaggucaucgucgacuccgacaacugguccggcuacuccggcaucuucuccgucgagggcaagaccugcaucaaccgcugcuucuacgucgagcucauccgcggccgcccccaggagacccgcgucugguggaccuccaacuccaucaucgucuucugcggcaccuccggcaccuacggcaccggcuccuggcccgacggcgccaacaucaacuucauguccaucuga

SEQ ID NO: 112621 - RNA, 1410 nt, Artificial Sequence
  derived and/or modified CDS sequence (opt2) from neuraminidase__InfluenzaA__ACK99424
augaaccccaaccagaagaucaucaccaucggcuccgucucccucaccaucgccaccaucugcuuccucaugcagaucgccauccucgucaccaccgucacccuccacuucaagcaguacgagugcuccuccccccccaacaaccaggucauccccugccagcccaccaucaucgagcgcaacaucaccgagaucgucuaccucaccaacaccaccaucgagaaggagaucugccccaagcucgucgaguaccgcaacugguccaagccccagugcaagaucaccggcuucgcccccuucuccaaggacaacuccauccgccucuccgccggcggcgacaucugggucacccgcgagcccuacgucuccugcgaccccuccaagugcuaccaguucgcccucggccagggcaccacccucaacaaccgccacuccaacgacaccguccacgaccgcacccccuaccgcacccuccucaugaacgagcucggcguccccuuccaccucggcaccaagcaggucugcaucgccugguccuccuccuccugccacgacggcaaggccuggcuccacgucugcgucaccggccacgacgagaacgccaccgccuccuucaucuacgacggccgccucgucgacuccaucggcuccugguccaagaacauccuccgcacccaggaguccgagugcgucugcaucaacggcaccugcaccgucgucaugaccgacggcuccgccuccgagcgcgccgacaccaagauccucuucaucgaggagggcaaggucguccacaucuccccccucuccggcuccgcccagcacgucgaggagugcuccugcuacccccgcuaccccggcguccgcugcgucugccgcgacaacuggaagggcuccaaccgccccaucgucgacaucaacgucaaggacuacuccaucgucuccuccuacgucugcuccggccucgucggcgacaccccccgcaagaacgacuccuccuccuccuccuacugccgcaaccccaacaacgagaagggcucccacggcgucaagggcugggccuucgacgacggcaacgacgucuggaugggccgcaccaucuccgaggagcuccgcuccggcuacgagaccuucaaggucaucggcggcugguccacccccaacuccaagcuccagaucaaccgccaggucaucgucgacuccggcaaccgcuccggcuacuccggcaucuucuccgucgagggcaaguccugcaucaaccgcugcuucuacgucgagcucauccgcggccgcaagcaggagaccaaggucugguggaccuccaacuccaucgucgucuucugcggcaccuccggcaccuacggcaccggcuccuggcccgacggcgccgacaucaaccucaugcccaucuga

SEQ ID NO: 112622 - RNA, 1410 nt, Artificial Sequence; identical to SEQ ID NO: 112441
  derived and/or modified CDS sequence (opt2) from neuraminidase__InfluenzaA__ACK99435

SEQ ID NO: 112623 - RNA, 1413 nt, Artificial Sequence
  derived and/or modified CDS sequence (opt2) from neuraminidase__InfluenzaA__ACK99446
augaaccccaaccagaagaucaucaccaucggcuccaucuccauggccaucggcaucaucucccucacccuccagaucggcaacaucaucuccaucugggucucccacuccauccagaccggcucccagaaccacaccggcaucugcaaccagcgcaucaucaccuacgagaacuccaccugggucaaccagaccuacgucaacaucaacaacaccaacgucgucgccggcaaggacaagaccuccgucacccucgccggcaacuccucccucugccccauccgcggcugggccaucuacaccaaggacaacuccauccgcaucggcuccaagggcgacgucuucgucauccgcgagcccuucaucuccugcucccaccucgagugccgcaccuucuuccucacccagggcgcccuccucaacgacaagcacuccaacggcaccgucaaggaccgcuccccccaccgcgcccucauguccugcccccucggcgaggcccccucccccuacaacucccgcuucgaguccgucgccugguccgccuccgccugccacgacggcaugggcuggcucaccaucggcaucuccggccccgacgacggcgccgucgccguccucaaguacaacggcaucaucaccgagaccaucaaguccuggaagaagcgcauccuccgcacccaggaguccgagugcgucugcgucaacggcuccugcuucaccaucaugaccgacggccccuccaacggcgccgccuccuaccgcaucuucaagaucgagaagggcaaggucaccaaguccaucgagcucgacgcccccaacucccacuacgaggagugcuccugcuaccccgacaccggcaccgucaugugcgucugccgcgacaacuggcacggcuccaaccgccccugggucuccuucaaccagaaccucgacuaccagaucggcuacaucugcuccggcgucuucggcgacaacccccgccccaaggacggcaagggcuccugcaaccccgucaccgucgacggcgccgacggcgucaagggcuucuccuaccgcuacggcaacggcgucuggaucggccgcaccaaguccaaccgcuuccgcaagggcuucgagaugaucugggaccccaacggcuggaccgacaccgacuccgacuucuccgucaagcaggacgucgucgccaugaccgacugguccggcuacuccggcuccuucguccagcaccccgagcucaccggccucgacugcaugcgccccugcuucugggucgagcucguccgcggccgcccccgcgagaacaccaccaucuggaccuccggcuccuccaucuccuucugcggcgucaacuccgacaccgccaacugguccuggcccgacggcgccgagcuccccuucaccaucgacaaguga

SEQ ID NO: 112624 - RNA, 1410 nt, Artificial Sequence
  derived and/or modified CDS sequence (opt2) from neuraminidase__InfluenzaA__ACK99457
augaaccccaaccagaagaucaucaccaucggcuccgucucccucaccaucgccaccaucugcuuccucaugcagaucgccauccucgucaccaccgucacccuccacuucaagcagcacgagugcaacuccccccccaacaaccaggucaugcccugcgagcccaccaucaucgagcgcaacaucaccgagaucgucuaccucaccaacaccaccaucgagaaggagaucugccccaagcucgucgaguaccgcaacugguccaagccccagugcaagaucaccggcuucgcccccuucuccaaggacaacuccauccgccucuccgccggcggcgacaucugggucacccgcgagcccuacgucuccugcgaccccggcaagugcuaccaguucgcccucggccagggcaccacccucaacaaccgccacuccaacgacaccguccacgaccgcacccccuaccgcacccuccucaugaacgagcucggcguccccuuccaccucggcaccaagcaggucugcaucgccugguccuccuccuccugccacgacggcaaggccuggcuccacgucugcgucaccggccacgacgagaacgccaccgccuccuucaucuacgacggccgccucgucgacuccaucgucuccugguccaagaacauccuccgcacccaggaguccgagugcgucugcaucaacggcaccugcaccgucgucaugaccgacggcuccgccuccgagcgcgccgacaccaagauccucuucaucgaggagggcaagaucguccacaucuccccccucuccggcuccgcccagcacgucgaggagugcuccugcuacccccgcuaccccggcguccgcugcgucugccgcgacaacuggaagggcuccaaccgccccaucgucgacaucaacgucaaggacuacuccaucgucuccuccuacgucugcuccggccucgucggcgacaccccccgcaagaacgacuccuccuccuccuccuacugccgcaaccccaacaacgagaagggcucccacggcgucaagggcugggccuucgacgacggcaacgacgucuggaugggccgcaccaucggcgaggagcuccgcuccggcuacgagaccuucaaggucaucggcggcugguccacccccaacuccaagcuccagaccaaccgccaggucaucgucgaccgcggcaaccgcuccggcuacuccggcaucuucuccgucgagggcaaguccugcaucaaccgcugcuucuacgucgagcucauccgcggccgcaagcaggagaccaaggucugguggaccuccaacuccaucgucgucuucugcggcaccuccggcaccuacggcaccggcuccuggcccgacggcgccgacaucaaccucaugcccaucuga

SEQ ID NO: 112625 - RNA, 1413 nt, Artificial Sequence
  derived and/or modified CDS sequence (opt2) from neuraminidase__InfluenzaA__ACK99468
augaaccccaaccagaagaucaucaccaucggcuccaucuccaucgccaucggcaucaucucccucauccuccagaucggcaacaucaucuccaucugggccucccacuccauccagaccggcucccagaaccacaccggcaucugcaaccagcgcaucaucaccuacgagaacuccaccugggucaaccagaccuacgucaacaucaacaacaccaacgucgucgccggcaaggacaagaccuccaugacccucgccggcaacuccucccucugccccauccgcggcugggccaucuacaccaaggacaacuccauccgcaucggcuccaagggcgacgucuucgucauccgcgagcccuucaucuccugcucccaccucgagugccgcaccuucuuccucacccagggcgcccuccucaacgacaagcacuccaacggcaccgucaaggaccgcucccccuaccgcgcccucauguccugcccccucggcgaggcccccucccccuacaacucccgcuucgaguccgucgccugguccgccuccgccugccacgacggccucggcuggcucaccaucggcaucuccggccccgacaacggcgccgucgccguccucaaguacaacggcaucaucaccgagaccaucaaguccuggaagaagcgcauccuccgcacccaggaguccgagugcgucugcaugaacuccuccugcuucaccaucaugaccgacggccccuccaacggcgccgccuccuaccgcaucuucaagaucgagaagggccgcgucaccaaguccaucgagcucgacgcccccaacuaccacuacgaggagugcuccugcuaccccgacaccggcaccgucaugugcgucugccgcgacaacuggcacggcuccaaccgccccugggucuccuucaaccagaaccucgacuaccagaucggcuacaucugcuccggcgucuucggcgacaacccccgccccaaggacggcgagggcuccugcaaccccgucaccgucgacggcgccgacggcgucaagggcuucuccuaccgcuacggcaacggcgucuggaucggccgcaccaaguccaaccgccuccgcaagggcuucgagaugaucugggaccccaacggcuggaccgacaccgacuccgacuucuccaugaagcaggacaucgucgccaugaccgacugguccggcuacuccggcuccuucguccagcaccccgagcucaccggccucgacugcaugcgccccugcuucugggucgagcucguccgcggccucccccgcgagaacaccaccaucuggaccuccggcuccuccaucuccuucugcggcgucaacuccgacaccgccaacugguccuggcccgacggcgccgagcuccccuucaccaucgacaaguga

SEQ ID NO: 112626 - RNA, 1410 nt, Artificial Sequence
  derived and/or modified CDS sequence (opt2) from neuraminidase__InfluenzaA__ACK99479
augaaccccaaccagaagaucaucaccaucggcuccgucucccucaccaucgccaccaucugcuuccucaugcagaucgccauccucgucaccaccgucacccuccacuucaagcaguacgagugcaacuccccccccaacaaccaggucaugcucugcgagcccaccaucaucgagcgcaacaucaccgagaucgucuaccucaccaacaccaccaucgagaaggagaucugccccaagcucgccgaguaccgcaacugguccaagccccagugcaagaucaccggcuucgcccccuucuccaaggacaacuccauccgccucuccgccggcggcgacaucugggucacccgcgagcccuacgucuccugcgaccccgacaagugcuaccaguucgcccucggccagggcaccacccucaacaaccgccacuccaacgacaccguccacgaccgcacccccuaccgcacccuccucaugaacgagcucggcguccccuuccaccucggcaccaagcaggucugcaucgccugguccuccuccuccugccacgacggcaaggccuggcuccacgucugcgucaccggccacgacgagaacgccaccgccuccuucaucuacgacggccgccucgucgacuccaucggcuccugguccaagaagauccuccgcacccaggaguccgagugcgucugcaucaacggcaccugcaccgucgucaugaccgacggcuccgccuccggccgcgccgacaccaagauccucuucaucgaggagggcaagaucguccacaucuccccccuccucggcuccgcccagcacgucgaggagugcuccugcuacccccgcuaccccggcguccgcugcgucugccgcgacaacuggaagggcuccaaccgccccaucgucgacaucaacgucaaggacuacuccaucgucuccuccuacgucugcuccggccucgucggcgacaccccccgcaagaacgacuccuccuccuccucccacugccucaaccccaacaacgaggagggcggccacggcgucaagggcugggccuucgacgacggcaacgacgucuggaugggccgcaccaucuccgagaagcuccgcuccggcuacgagaccuucaaggucaucgagggcugguccaagcccaacuccaagcuccagaucaaccgccaggucaucgucgaccgcggcaaccgcuccggcuacuccggcaucuucuccgucgagggcaaguccugcaucaaccgcugcuucuacgucgagcucauccgcggccgcaagcaggagaccgaggucugguggaccuccaacuccaucgucgucuucugcggcaccuccggcaccuacggcaccggcuccuggcccgacggcgccaacaucaaccucaugcccaucuga

SEQ ID NO: 112627 - RNA, 1413 nt, Artificial Sequence; identical to SEQ ID NO: 112320
  derived and/or modified CDS sequence (opt2) from neuraminidase__InfluenzaA__ACL12066

SEQ ID NO: 112628 - RNA, 1410 nt, Artificial Sequence; identical to SEQ ID NO: 111221
  derived and/or modified CDS sequence (opt2) from neuraminidase__InfluenzaA__ACL12132

SEQ ID NO: 112629 - RNA, 1413 nt, Artificial Sequence; identical to SEQ ID NO: 112554
  derived and/or modified CDS sequence (opt2) from neuraminidase__InfluenzaA__ACL12154

SEQ ID NO: 112630 - RNA, 1410 nt, Artificial Sequence; identical to SEQ ID NO: 112548
  derived and/or modified CDS sequence (opt2) from neuraminidase__InfluenzaA__ACL12165

SEQ ID NO: 112631 - RNA, 1410 nt, Artificial Sequence; identical to SEQ ID NO: 112548
  derived and/or modified CDS sequence (opt2) from neuraminidase__InfluenzaA__ACL12176

SEQ ID NO: 112632 - RNA, 1410 nt, Artificial Sequence
  derived and/or modified CDS sequence (opt2) from neuraminidase__InfluenzaA__ACL12198
augaaccccaaccagaagaucaucaccaucggcuccgucucccucaccaucuccaccaucugcuucuucaugcagaucgccauccucaucaccaccgucacccuccacuucaagcaguacgaguucaacuccacccccaacaaccaggucaugcucugcgagcccaccaucaucgagcgcaacaucaccgagaucgucuaccucaccaacaccaccaucgagaaggagaucugccccaagcucgccgaguaccgcaacugguccaagccccagugcgacaucaccggcuucgcccccuucuccaaggacaacuccauccgccucuccgccggcggcgacaucugggucacccgcgagcccuacgucuccugcgaccccgacaagugcuaccaguucgcccucggccagggcaccacccucaacaacguccacuccaacgacaccguccgcgaccgcacccccuaccgcacccuccucaugaacgagcucggcguccccuuccaccucggcaccaagcaggucugcaucgccugguccuccuccuccugccacgacggcaaggccuggcuccacgucugcaucaccggcgacgacaagaacgccaccgccuccuucaucuacaacggccgccucgucgacuccgucgucuccugguccaaggagauccuccgcacccaggaguccgagugcgucugcaucaacggcaccugcaccgucgucaugaccgacggcuccgccuccggcaaggccgacaccaagauccucuucaucgaggagggcaagaucguccacaccuccacccucuccggcuccgcccagcacgucgaggagugcuccugcuacccccgcuaccccggcguccgcugcgucugccgcgacaacuggaagggcuccaaccgccccaucgucgacaucaacaucaaggaccacuccaucgucuccuccuacgucugcuccggccucgucggcgacaccccccgcaagaacgacuccuccuccuccucccacugccucgaccccaacaacgaggagggcggccacggcgucaagggcugggccuucgacgacggcaacgacgucuggaugggccgcaccaucuccgagaagucccgccucggcuacgagaccuucaaggucaucgagggcugguccaaccccaaguccaagcuccagaucaaccgccaggucaucgucgaccgcggcaaccgcuccggcuacuccggcaucuucuccgucgagggcaaguccugcaucaaccgcugcuucuacgucgagcucauccgcggccgcaaggaggagaccgagguccucuggaccuccaacuccaucgucgucuucugcggcaccuccggcaccuacggcaccggcuccuggcccgacggcgccgacaucaaccucaugcccaucuga

SEQ ID NO: 112633 - RNA, 1410 nt, Artificial Sequence; identical to SEQ ID NO: 112126
  derived and/or modified CDS sequence (opt2) from neuraminidase__InfluenzaA__ACL12209

SEQ ID NO: 112634 - RNA, 1410 nt, Artificial Sequence; identical to SEQ ID NO: 112548
  derived and/or modified CDS sequence (opt2) from neuraminidase__InfluenzaA__ACL12220

SEQ ID NO: 112635 - RNA, 1410 nt, Artificial Sequence
  derived and/or modified CDS sequence (opt2) from neuraminidase__InfluenzaA__ACL12242
augaaccccaaccagaagaucaucaccaucggcuccgucucccucaccaucuccaccaucugcuucuucaugcagaucgccauccucaucaccaccgucacccuccacuucaagcaguacgaguucaacuccccccccaacaaccaggucaugcucugcgagcccaccaucaucgagcgcaacaucaccgagaucgucuaccucaccaacaccaccaucgagaaggagaucugccccaagcucgccgaguaccgcaacugguccaagccccagugcgacaucaccggcuucgcccccuucuccaaggacaacuccauccgccucuccgccggcggcgacaucugggucacccgcgagcccuacgucuccugcgaccccgacaagugcuaccaguucgcccucggccagggcaccacccucaacaacguccacuccaacaacaccguccgcgaccgcacccccuaccgcacccuccucaugaacgagcucggcguccccuuccaccucggcaccaagcaggucugcaucgccugguccuccuccuccugccacgacggcaaggccuggcuccacgucugcaucaccggcgacgacaagaacgccaccgccuccuucaucuacaacggccgccucgucgacuccgucgucuccugguccaaggagauccuccgcacccaggaguccgagugcgucugcaucaacggcaccugcaccgucgucaugaccgacggcuccgccuccggcaaggccgacaccaagauccucuucaucgaggagggcaagaucguccacaccuccacccucuccggcuccgcccagcacgucgaggagugcuccugcuacccccgcuaccccggcguccgcugcgucugccgcgacaacuggaagggcuccaaccgccccaucgucgacaucaacaucaaggaccacuccaucgucuccuccuacgucugcuccggccucgucggcgacaccccccgcaagaacgacuccuccuccuccucccacugccucgaccccaacaacgaggagggcggccacggcgucaagggcugggccuucgacgacggcaacgacgucuggaugggccgcaccaucuccgagaagucccgccucggcuacgagaccuucaaggucaucgagggcugguccaaccccaaguccaagcuccagaucaaccgccaggucaucgucgaccgcggcaaccgcuccggcuacuccggcaucuucuccgucgagggcaaguccugcaucaaccgcugcuucuacgucgagcucauccgcggccgcaaggaggagaccgagguccucuggaccuccaacuccaucgucgucuucugcggcaccuccggcaccuacggcaccggcuccuggcccgacggcgccgacaucaaccucaugcccaucuga

SEQ ID NO: 112636 - RNA, 1413 nt, Artificial Sequence
  derived and/or modified CDS sequence (opt2) from neuraminidase__InfluenzaA__ACL12264
augaaccccaaccagaagaucaucaccaucggcuccaucuccauggccaucggcaucaucucccucauccuccagaucgucaacaucaucuccaucugggucucccacuccauccagaccggcucccagaaccacaccggcaucugcaaccagcgcaucaucaccuacgagaacuccaccugggucaaccagaccuacgucaacaucaacaacaccaacgucgucgccggcaaggacaagaccuccgucacccucgccggcaacuccucccucugccccauccgcggcugggccaucuacaccaaggacaacuccauccgcaucggcuccaagggcgacgucuucgucauccgcgagcccuucaucuccugcucccaccucgagugccgcaccuucuuccucacccagggcgcccuccucaacgacaagcacuccaacggcaccgucaaggaccgcucccccuaccgcgcccucauguccugcccccucggcgaggcccccucccccuacaacucccgcuucgaguccgucgccugguccgccuccgccugccacgacggcaugggcuggcucaccaucggcaucuccggccccgacgacggcgccgucgccguccucaaguacaacggcaucaucaccgagaccaucaaguccuggaagaagcgcauccuccgcacccaggaguccgagugcgucugcgucaacggcuccugcuucaccaucaugaccgacggccccuccaacggcgccgccuccuaccgcaucuucaagaucgagaagggcaaggucaccaaguccaucgagcucgacgcccccaacucccacuacgaggagugcuccugcuaccccgacaccggcaccgucaugugcgucugccgcgacaacuggcacggcuccaaccgccccugggucuccuucaaccagaaccucgacuaccagaucggcuacaucugcuccggcgucuucggcgacaacccccgccccaaggacggcaagggcuccugcgaccccgucaccgucgacggcgccgacggcgucaagggcuucuccuaccgcuacggcaacggcgucuggaucggccgcaccaaguccaaccgcuuccgcaagggcuucgagaugaucugggaccccaacggcuggaccgacaccgacuccgacuucuccgucaagcaggacgucgucgccaugaccgacugguccggcuacuccggcuccuucguccagcaccccgagcucaccggccucgacugcaugcgccccugcuucugggucgagcucguccgcggccgcccccgcgagaacaccaccaucuggaccuccggcuccuccaucuccuucugcggcgucaacuccgacaccgccaacugguccuggcccgacggcgccgagcuccccuucaccaucgacaaguga

SEQ ID NO: 112637 - RNA, 1410 nt, Artificial Sequence; identical to SEQ ID NO: 112441
  derived and/or modified CDS sequence (opt2) from neuraminidase__InfluenzaA__ACN32275

SEQ ID NO: 112638 - RNA, 1410 nt, Artificial Sequence
  derived and/or modified CDS sequence (opt2) from neuraminidase__InfluenzaA__ACN32286
augaaccccaacaagaagaucaucaccaucggcuccgucucccucaccaucuccaccaucugcuucuucaugcagaucgccauccucaucaccaccgucacccuccacuucaagcaguacgaguucaacuccccccccaacaaccaggucaugcucugcgagcccaccaucaucgagcgcaacaucaccgagaucgucuaccucaccaacaccaccaucgagaaggagaucugccccaagcucgccgaguaccgcaacugguccaagccccagugcgacaucaccggcuucgcccccuucuccaaggacaacuccauccgccucuccgccggcggcgacaucugggucacccgcgagcccuacgucuccugcgaccccgacaagugcuaccaguucgcccucggccagggcaccacccucaacaacguccacuccaacgacaccguccgcgaccgcacccccuaccgcacccuccucaugaacgagcucggcguccccuuccaccucggcaccaagcaggucugcaucgccugguccuccuccuccugccacgacggcaaggccuggcuccacgucugcaucaccggcgacgacaagaacgccaccgccuccuucaucuacaacggccgccucgucgacuccaucgucuccugguccaaggagauccuccgcacccaggaguccgagugcgucugcaucaacggcaccugcaccgucgucaugaccgacggcuccgccuccggcaaggccgacaccaagauccucuucaucgaggagggcaagaucguccacaccuccacccuccucggcuccgcccagcacgucgaggagugcuccugcuacccccgcuaccccggcguccgcugcgucugccgcgacaacuggaagggcuccaaccgccccaucgucgacaucaacaucaaggaccacuccaucgucuccuccuacgucugcuccggccucgucggcgacaccccccgcaagaacgacuccuccuccuccggccacugccucgaccccaacaacgaggagggcggccacggcgucaagggcugggccuucgacgacggcaacgacgucuggaugggccgcaccaucuccgagaagucccgccucggcuacgagaccuucaaggucaucgagggcugguccaaccccaaguccaagcuccagaucaaccgccaggucaucgucgaccgcggcaaccgcuccggcuacuccggcaucuucuccgucgagggcaaguccugcaucaaccgcugcuucuacgucgagcucauccgcggccgcaaggaggagaccgagguccucuggaccuccaacuccaucgucgucuucugcggcaccuccggcaccuacggcaccggcuccuggcccgacggcgccgacaucaaccucaugcccaucuga

SEQ ID NO: 112639 - RNA, 1410 nt, Artificial Sequence
  derived and/or modified CDS sequence (opt2) from neuraminidase__InfluenzaA__ACN32493
augaaccccaaccagaagaucaucaccaucggcuccgucucccucaccaucuccaccaucugcuucuucaugcagaucgccauccucaucaccaccgucacccuccacuucaagcaguacgaguucaacuccucccccaacaaccaggucaugcucugcgagcccaccaucaucgagcgcaacaucaccgagaucgucuaccucaccaacaccaccaucgagaaggagaucugccccaagcucgccgaguaccgcaacugguccaagccccagugcgacaucaccggcuucgcccccuucuccaaggacaacuccauccgccucuccgccggcggcgacaucugggucacccgcgagcccuacgucuccugcgaccccgacaagugcuaccaguucgcccucggccagggcaccacccucaacaacguccacuccaacaacaccguccgcgaccgcacccccuaccgcacccuccucaugaacgagcucggcguccccuuccaccucggcaccaagcaggucugcaucgccugguccuccuccuccugccacgacggcaaggccuggcuccacgucugcaucaccggcgacgacaagaacgccaccgccuccuucaucuacaacggccgccucgucgacuccaucgucuccugguccaaggagauccuccgcacccaggaguccgagugcgucugcaucaacggcaccugcaccgucgucaugaccgacggcuccgccuccggcaaggccgacaccaagauccucuucaucgaggagggcaagaucguccacaccuccacccucuccggcuccgcccagcacgucgaggagugcuccugcuacccccgcuaccccggcguccgcugcgucugccgcgacaacuggaagggcuccaaccgccccaucgucgacaucaacaucaaggaccacuccaucgucuccuccuacgucugcuccggccucgucggcgacaccccccgcaagaacgacuccuccuccuccucccacugccucgaccccaacaacgaggagggcggccacggcgucaagggcugggccuucgacgacggcaacgacgucuggaugggccgcaccaucuccgagaagucccgccucggcuacgagaccuucaaggucaucgagggcugguccaaccccaaguccaagcuccagaucaaccgccaggucaucgucgaccgcggcaaccgcuccggcuacuccggcaucuucuccgucgagggcaaguccugcaucaaccgcugcuucuacgucgagcucauccgcggccgcaaggaggagaccgagguccucuggaccuccaacuccaucgucgucuucugcggcaccuccggcaccuacggcaccggcuccuggcccgacggcgccgacaucaaccucaugcccaucuga

SEQ ID NO: 112640 - RNA, 1410 nt, Artificial Sequence; identical to SEQ ID NO: 110190
  derived and/or modified CDS sequence (opt2) from neuraminidase__InfluenzaA__ACN32526

SEQ ID NO: 112641 - RNA, 1410 nt, Artificial Sequence
  derived and/or modified CDS sequence (opt2) from neuraminidase__InfluenzaA__ACN32537
augaaccccaaccagaagaucaucaccaucggcuccgucucccucaccaucgccaccaucugcuuccucaugcagaucgccauccucgucaccaccgucacccuccacuucaagcaguacgagugcaacuccccccccaacaaccaggucaugcucugcgagcccaccaucaucgagcgcaacaucaccgagaucgucuaccucaccaacaccaccaucgagaaggagaucugccccaagcucgccgaguaccgcaacugguccaagccccagugcaacaucaccggcuucgcccccuucuccaaggacaacuccauccgccucuccgccggcggcgacaucugggucacccgcgagcccuacgucuccugcgaccccgacaagugcuaccaguucgcccucggccagggcaccacccucaacaacggccacuccaacgacaccguccacgaccgcacccccuaccgcacccuccucaugaacgagcucggcguccccuuccaccucggcacccgccaggucugcaucgccugguccuccuccuccugccacgacggcaaggccuggcuccacgucugcgucaccggcgacgacgagaacgccaccgccuccuucaucuacaacggccgccucgucgacuccaucggcuccugguccaagaagauccuccgcacccaggaguccgagugcgucugcaucaacggcaccugcaccgucgucaugaccgacggcuccgccuccggcaaggccgacaccaagauccucuucaucgaggagggcaagaucguccacaucuccacccucuccggcuccgcccagcacgucgaggagugcuccugcuacccccgcuaccccgacguccgcugcgucugccgcgacaacuggaagggcuccaaccgccccaucgucgacaucaacgucaaggacuacuccaucgucuccuccuacgucugcuccggccucgucggcgacaccccccgcaagaacgacuccuucuccuccucccacugccucgaccccaacaacgaggagggcggccacggcgucaagggcugggccuucgacgacggcaacgacgucuggaugggccgcaccaucuccgagaagcuccgcuccggcuacgagaccuucaaggucaucgacggcugguccaagcccaacuccaagcuccagaucaaccgccaggucaucgucgagcgcggcaaccgcuccggcuacuccggcaucuucuccgucgagggcaaguccugcaucaaccgcugcuucuacgucgagcucauccgcggccgcaaggaggagaccgaggucugguggaccuccaacuccaucgucgucuucugcggcaccuccggcaccuacggcaccggcuccuggcccgacggcgccgacaucaaccucaugcccaucuga

SEQ ID NO: 112642 - RNA, 1413 nt, Artificial Sequence; identical to SEQ ID NO: 112118
  derived and/or modified CDS sequence (opt2) from neuraminidase__InfluenzaA__ACN32807

SEQ ID NO: 112643 - RNA, 1413 nt, Artificial Sequence; identical to SEQ ID NO: 112066
  derived and/or modified CDS sequence (opt2) from neuraminidase__InfluenzaA__ACN32818

SEQ ID NO: 112644 - RNA, 1413 nt, Artificial Sequence; identical to SEQ ID NO: 112066
  derived and/or modified CDS sequence (opt2) from neuraminidase__InfluenzaA__ACN32829

SEQ ID NO: 112645 - RNA, 1413 nt, Artificial Sequence
  derived and/or modified CDS sequence (opt2) from neuraminidase__InfluenzaA__ACN32840
augaaccccaaccagaagaucaucaccaucggcuccaucuccaucgccaucggcaucaucucccucaugcuccagaucggcaacaucaucuccaucugggccucccacuccauccagaccggcucccagaaccacaccggcaucugcaaccagcgcaucaucaccuacgagaacuccaccugggucaaccacaccuacgucuccaucaacaacaccaacgucgucgccggcaaggacaagaccuccgucacccucgccggcaacuccucccucugcuccaucuccggcugggccaucuacaccaaggacaacuccauccgcaucggcuccaagggcgacgucuucgucauccgcgagcccuucaucuccugcucccaccucgagugccgcaccuucuuccucacccagggcgcccuccucaacgacaagcacuccaacggcaccgucaaggaccgcucccccuaccgcgcccucauguccugcccccucggcgaggcccccucccccuacaacuccaaguucgaguccgucgccugguccgccuccgccugccacgacggcaugggcuggcucaccaucggcaucuccggccccgacaacggcgccgucgccguccucaaguacaacggcaucaucaccgagaccaucaaguccuggaagaagcgcauccuccgcacccaggaguccgagugcgucugcgucaacggcuccugcuucaccaucaugaccgacggccccuccaacggcgccgccuccuacaagaucuucaagaucgagaagggcaaggucaccaaguccaucgagcucaacgcccccaacuuccacuacgaggagugcuccugcuaccccgacaccggcaccgucaugugcgucugccgcgacaacuggcacggcuccaaccgccccugggucuccuucaaccagaaccucgacuaccagaucggcuacaucugcuccggcgucuucggcgacaacccccgccccaaggacggcaagggcuccugcaaccccgucaccgucgacggcgccgacggcgucaagggcuucuccuacaaguacggcaacggcgucuggaucggccgcaccaaguccaaccgccuccgcaagggcuucgagaugaucugggaccccaacggcuggaccgacaccgacuccgacuucuccgucaagcaggacgucgucgccaucaccgacugguccggcuacuccggcuccuucguccagcaccccgagcucaccggccucgacugcauccgccccugcuucugggucgagcucguccgcggccucccccgcgagaacaccaccaucuggaccuccggcuccuccaucuccuucugcggcgucgacuccgacaccgucaacugguccuggcccgacggcgccgagcuccccuucaccaucgacaaguga

SEQ ID NO: 112646 - RNA, 1410 nt, Artificial Sequence; identical to SEQ ID NO: 112548
  derived and/or modified CDS sequence (opt2) from neuraminidase__InfluenzaA__ACN32851

SEQ ID NO: 112647 - RNA, 1410 nt, Artificial Sequence; identical to SEQ ID NO: 112635
  derived and/or modified CDS sequence (opt2) from neuraminidase__InfluenzaA__ACN32862

SEQ ID NO: 112648 - RNA, 1410 nt, Artificial Sequence; identical to SEQ ID NO: 112639
  derived and/or modified CDS sequence (opt2) from neuraminidase__InfluenzaA__ACN32873

SEQ ID NO: 112649 - RNA, 1410 nt, Artificial Sequence; identical to SEQ ID NO: 112635
  derived and/or modified CDS sequence (opt2) from neuraminidase__InfluenzaA__ACN32884

SEQ ID NO: 112650 - RNA, 1410 nt, Artificial Sequence; identical to SEQ ID NO: 112639
  derived and/or modified CDS sequence (opt2) from neuraminidase__InfluenzaA__ACN32895

SEQ ID NO: 112651 - RNA, 1410 nt, Artificial Sequence; identical to SEQ ID NO: 112548
  derived and/or modified CDS sequence (opt2) from neuraminidase__InfluenzaA__ACN32906

SEQ ID NO: 112652 - RNA, 1410 nt, Artificial Sequence
  derived and/or modified CDS sequence (opt2) from neuraminidase__InfluenzaA__ACN32917
augaaccccaaccagaagaucaucaccaucggcuccgucucccucaccaucuccaccaucugcuucuucaugcagaucgccauccucaucaccaccgucacccuccacuucaagcaguacgaguucaacuccccccccaacaaccaggucaugcucugcaagcccaccaucaucgagcgcaacaucaccgagaucgucuaccucaccaacaccaccaucgagaaggagaucugccccaagcucgccgaguaccgcaacugguccaagccccagugcgacaucaccggcuucgcccccuucuccaaggacaacuccauccgccucuccgccggcggcgacaucugggucacccgcgagcccuacgucuccugcgaccccgacaagugcuaccaguucgcccucggccagggcaccacccucaacaacguccacuccaacaacaccguccgcgaccgcacccccuaccgcacccuccucaugaacgagcucggcguccccuuccaccucggcaccaagcaggucugcaucgccugguccuccuccuccugccacgacggcaaggccuggcuccacgucugcaucaccggcgacgacaagaacgccaccgccuccuucaucuacaacggccgccucgucgacuccgucgucuccugguccaaggagauccuccgcacccaggaguccgagugcgucugcaucaacggcaccugcaccgucgucaugaccgacggcuccgccuccggcaaggccgacaccaagauccucuucaucgaggagggcaagaucguccacaccuccacccucuccggcuccgcccagcacgucgaggagugcuccugcuacccccgcuaccccggcguccgcugcgucugccgcgacaacuggaagggcuccaaccgccccaucgucgacaucaacaucaccgaccacuccaucgucuccuccuacgucugcuccggccucgucggcgacaccccccgcaagaacgacuccuccuccuccucccacugccucgaccccaacaacgaggagggcggccacggcgucaagggcugggccuucgacgacggcaacgacgucuggaugggccgcaccaucuccgagaagucccgccucggcuacgagaccuucaaggucaucgagggcugguccaaccccaaguccaagcuccagaucaaccgccaggucaucgucgaccgcggcaaccgcuccggcuacuccggcaucuucuccgucgagggcaaguccugcaucaaccgcugcuucuacgucgagcucauccgcggccgcaaggaggagaccgagguccucuggaccuccaacuccaucgucgucuucugcggcaccuccggcaccuacggcaccggcuccuggcccgacggcgccgacaucaaccucaugcccaucuga

SEQ ID NO: 112653 - RNA, 1410 nt, Artificial Sequence
  derived and/or modified CDS sequence (opt2) from neuraminidase__InfluenzaA__ACN32928
augaaccccaaccagaagaucaucaccaucggcuccgucucccucaccaucuccaccaucugcuucuucaugcagaucgccauccucaucaccaccgucacccuccacuucaagcaguacgaguucaacuccccccccaacaaccaggucaugcucugcgagcccaccaucaucgagcgcaacaucaccgagaucgucuaccucaccaacaccaccaucgagaaggagaucugccccaagcucgccgaguaccgcaacugguccaagccccagugcgacaucaccggcuucgcccccuucuccaaggacaacuccauccgccucuccgccggcggcgacaucugggucacccgcgagcccuacgucuccugcgaccccgacaagugcuaccaguucgcccucggccagggcaccacccucaacaacguccacuccaacaacaccguccgcgaccgcacccccuaccgcacccuccucaugaacgagcucggcguccccuuccaccucggcaccaagcaggucugcaucgccugguccuccuccuccugccacgacggcaaggccuggcuccacgucugcaucaccggcgacgacaagaacgccaccgccuccuucaucuacaacggccgccucgucgacuccgucgucuccugguccaaggagauccuccgcacccaggaguccgagugcgucugcaucaacggcaccugcaccgucgucaugaccgacggcuccgccuccggcaaggccgacaccaagauccucuucaucgaggagggcaagaucguccacaccuccacccucuccggcuccgcccagcacgucgaggagugcuccugcuacccccgcuaccccggcguccgcugcgucugccgcgacaacuggaagggcuccaaccgccccaucgucgacaucaacaucaccgaccacuccaucgucuccuccuacgucugcuccggccucgucggcgacaccccccgcaagaacgacuccuccuccuccucccacugccucgaccccaacaacgaggagggcggccacggcgucaagggcugggccuucgacgacggcaacgacgucuggaugggccgcaccaucuccgagaagucccgccucggcuacgagaccuucaaggucaucgagggcugguccaaccccaaguccaagcuccagaucaaccgccaggucaucgucgaccgcggcaaccgcuccggcuacuccggcaucuucuccgucgagggcaaguccugcaucaaccgcugcuucuacgucgagcucauccgcggccgcaaggaggagaccgagguccucuggaccuccaacuccaucgucgucuucugcggcaccuccggcaccuacggcaccggcuccuggcccgacggcgccgacaucaaccucaugcccaucuga

SEQ ID NO: 112654 - RNA, 1410 nt, Artificial Sequence; identical to SEQ ID NO: 112639
  derived and/or modified CDS sequence (opt2) from neuraminidase__InfluenzaA__ACN32939

SEQ ID NO: 112655 - RNA, 1410 nt, Artificial Sequence; identical to SEQ ID NO: 112548
  derived and/or modified CDS sequence (opt2) from neuraminidase__InfluenzaA__ACN32950

SEQ ID NO: 112656 - RNA, 1410 nt, Artificial Sequence
  derived and/or modified CDS sequence (opt2) from neuraminidase__InfluenzaA__ACN32961
augaaccccaaccagaagaucaucaccaucggcuccgucucccucaccaucuccaccaucugcuucuucaugcagaucgccauccucaucaccaccgucacccuccacuucaagcaguacgaguucaacuccccccccaacaaccaggucaugcucugcgagcccaccaucaucgagcgcaacaucaccgagaucgucuaccucaccaacaccaccaucgagaaggagaucugccccaagcucgccgaguaccgcaacugguccaagccccagugcgacaucaccggcuucgcccccuucuccaaggacaacuccauccgccucuccgccggcggcgacaucugggucacccgcgagcccuacgucuccugcgaccccgacaagugcuaccaguucgcccucggccagggcaccacccucaacaacguccacuccaacaacaccguccgcgaccgcacccccuaccgcacccuccucaugaacgagcucggcguccccuuccaccucggcaccaagcaggucugcaucgccugguccuccuccuccugccacgacggcaaggccuggcuccacgucugcaucaccggcgacgacaagaacgccaccgccuccuucaucuacaacggccgccucgucgacuccgucgucuccugguccaaggagauccuccgcacccaggaguccgagugcgucugcaucaacggcaccugcaccgucgucaugaccgacggcuccgccuccggcaaggccgacaccaagauccucuucaucgaggagggcaagaucguccacaccuccacccucuccggcuccgcccagcacgucgaggagugcuccugcuacccccgcuaccccggcguccgcugcgucugccgcgacaacuggaagggcuccaaccgccccaucgucgacaucaacaucaccgaccacuccaucgucuccuccuacgucugcuccggccucgucggcgacaccccccgcaagaacgacuccuccuccuccucccacugccucgaccccaacaacgaggagggcggccacggcgucaagggcugggccuucgacgacggcaacgacgucuggaugggccgcaccaucuccgagaagucccgccucggcuacgagaccuucaaggucaucgagggcugguccaaccccaaguccaagcuccagaucaaccgccaggucaucgucgaccgcggcaaccgcuccggcuacuccggcaucuucuccgucgagggcaaguccugcaucaaccgcugcuucuacgucgagcucauccgcggccgcaaggaggagaccgagguccucuggaccuccaacuccaucgucgucuucugcggcaccuccggcaccuacggcaccggcuccuggcccgacggcgccgacaucaacaucaugcccaucuga

SEQ ID NO: 112657 - RNA, 1410 nt, Artificial Sequence; identical to SEQ ID NO: 112635
  derived and/or modified CDS sequence (opt2) from neuraminidase__InfluenzaA__ACN32972

SEQ ID NO: 112658 - RNA, 1410 nt, Artificial Sequence; identical to SEQ ID NO: 112635
  derived and/or modified CDS sequence (opt2) from neuraminidase__InfluenzaA__ACN32994

SEQ ID NO: 112659 - RNA, 1410 nt, Artificial Sequence
  derived and/or modified CDS sequence (opt2) from neuraminidase__InfluenzaA__ACN33005
augaaccccaaccagaagaucaucaccaucggcuccgucucccucaccaucuccaccaucugcuucuucaugcagaucgccauccucaucaccaccgucacccuccacuucaagcaguacgaguucaacuccccccccaacaaccaggucaugcucugcgagcccaccaucaucgagcgcaacaucaccgagaucgucuaccucaccaacaccaccaucgagaaggagaucugccccaagcucgccgaguaccgcaacugguccaagccccagugcgacaucaccggcuucgcccccuucuccaaggacaacuccauccgccucuccgccggcggcgacaucugggucacccgcgagcccuacgucuccugcgaccccgacaagugcuaccaguucgcccucggccagggcaccacccucaacaacguccacuccaacgacaccguccgcgaccgcacccccuaccgcacccuccucaugaacgagcucggcguccccuuccaccucggcaccaagcaggucugcaucgccugguccuccuccuccugccacgacggcaaggccuggcuccacgucugcaucaccggcgacgacaagaacgccaccgccuccuucaucuacaacggccgccucgucgacuccgucgucuccugguccaaggagauccuccgcacccaggaguccgagugcgucugcaucaacggcaccugcaccgucgucaugaccgacggcuccgccuccggcaaggccgacaccaagauccucuucaucgaggagggcaagaucguccacaccuccacccucuccggcuccgcccagcacgucgaggagugcuccugcuacccccgcuaccccggcguccgcugcgucugccgcgacaacuggaagggcuccaaccgccccaucgucgacaucaacaucaaggaccacuccaucgucuccuccuacgucugcuccggccucgucggcgacaccccccgcaagaacgacuccuccuccuccucccacugccucgaccccaacaacgaggagggcggccacggcgucaagggcugggccuucgacgacggcaacgacgucuggaugggccgcaccaucuccgagaagucccgccucggcuacgagaccuucaaggucaucgagggcugguccaaccccaaguccaagcuccagaucaaccgccaggucaucgucgaccgcggcaaccgcuccggcuacuccggcaucuucuccgucgagggcgaguccugcaucaaccgcugcuucuacgucgagcucauccgcggccgcaaggaggagaccgagguccucuggaccuccaacuccaucgucgucuucugcggcaccuccggcaccuacggcaccggcuccuggcccgacggcgccgacaucaaccucaugcccaucuga

SEQ ID NO: 112660 - RNA, 1410 nt, Artificial Sequence; identical to SEQ ID NO: 112635
  derived and/or modified CDS sequence (opt2) from neuraminidase__InfluenzaA__ACN33016

SEQ ID NO: 112661 - RNA, 1410 nt, Artificial Sequence; identical to SEQ ID NO: 112635
  derived and/or modified CDS sequence (opt2) from neuraminidase__InfluenzaA__ACN33049

SEQ ID NO: 112662 - RNA, 1410 nt, Artificial Sequence; identical to SEQ ID NO: 112635
  derived and/or modified CDS sequence (opt2) from neuraminidase__InfluenzaA__ACN33060

SEQ ID NO: 112663 - RNA, 1410 nt, Artificial Sequence; identical to SEQ ID NO: 112639
  derived and/or modified CDS sequence (opt2) from neuraminidase__InfluenzaA__ACN33082

SEQ ID NO: 112664 - RNA, 1413 nt, Artificial Sequence; identical to SEQ ID NO: 112105
  derived and/or modified CDS sequence (opt2) from neuraminidase__InfluenzaA__ACN33093

SEQ ID NO: 112665 - RNA, 1413 nt, Artificial Sequence; identical to SEQ ID NO: 112066
  derived and/or modified CDS sequence (opt2) from neuraminidase__InfluenzaA__ACN33104

SEQ ID NO: 112666 - RNA, 1410 nt, Artificial Sequence; identical to SEQ ID NO: 112639
  derived and/or modified CDS sequence (opt2) from neuraminidase__InfluenzaA__ACN33115

SEQ ID NO: 112667 - RNA, 1413 nt, Artificial Sequence
  derived and/or modified CDS sequence (opt2) from neuraminidase__InfluenzaA__ACN33126
augaaccccaaccagaagaucaucaccaucggcuccaucuccaucgccaucggcaucaucucccucaugcuccagaucggcaacaucaucuccaucugggccucccacuccauccagaccggcucccagaacaacaccggcaucugcaaccagcgcaucaucaccuacgagaacuccaccugggucaaccacaccuacgucaacaucaacaacaccaacgucgucgccggcgaggacaagaccuccgucacccucgccggcuccuccucccucugcuccaucuccggcugggccaucuacaccaaggacaacuccauccgcaucggcuccaagggcgacgucuucgucauccgcgagcccuucaucuccugcucccaccucgagugccgcaccuucuuccucacccagggcgcccuccucaacgacaagcacuccaacggcaccgucaaggaccgcucccccuaccgcgcccucauguccugcccccucggcgaggcccccucccccuacaacuccaaguucgaguccgucgccugguccgccuccgccugccacgacggcaugggcuggcucaccaucggcaucuccggccccgacaacggcgccgucgccguccucaaguacaacggcaucaucaccggcaccaucaaguccuggaagaagcagauccuccgcacccaggaguccgagugcgucugcaugaacggcuccugcuucaccaucaugaccgacggccccuccaacaaggccgccuccuacaagaucuucaagaucgagaagggcaaggucaccaaguccaucgagcucaacgcccccaacuuccacuacgaggagugcuccugcuaccccgacaccggcaucgucaugugcgucugccgcgacaacuggcacggcuccaaccgccccugggucuccuucaaccagaaccucgacuaccagaucggcuacaucugcuccggcgucuucggcgacaacccccgccccgaggacggcgagggcuccugcaaccccgucaccgucgacggcgccaacggcgucaagggcuucuccuacaaguacgacaacggcgucuggaucggccgcaccaaguccaaccgccuccgcaagggcuucgagaugaucugggaccccaacggcuggaccaacaccgacuccgacuucuccgucaagcaggacgucgucgccaucaccgacugguccggcuacuccggcuccuucguccagcaccccgagcucaccggccucgacugcauccgccccugcuucugggucgagcucguccgcggccucccccgcgagaacaccaccaucuggaccuccggcuccuccaucuccuucugcggcgucaacuccgacaccgccaacugguccuggcccgacggcgccgagcuccccuucaccaucgacaaguga

SEQ ID NO: 112668 - RNA, 1413 nt, Artificial Sequence
  derived and/or modified CDS sequence (opt2) from neuraminidase__InfluenzaA__ACN33148
augaaccccaaccagaagaucaucaccaucggcuccaucuccaucgccaucggcaucaucucccucaugcuccagaucggcaacaucaucuccaucugggccucccacuccauccagaccggcucccagaacaacaccggcaucugcaaccagcgcaucaucaccuacgagaacuccaccugggucaaccacaccuacgucaacaucaacaacaccaacgucgucgccggcgaggacaagaccuccgucacccucgccggcaacuccucccucugcuccaucuccggcugggccaucuacaccaaggacaacuccauccgcaucggcuccaagggcgacgucuucgucauccgcgagcccuucaucuccugcucccaccucgagugccgcaccuucuuccucacccagggcgcccuccucaacgacaagcacuccaacggcaccgucaaggaccgcucccccuaccgcgcccucauguccugcccccucggcgaggcccccucccccuacaacuccaaguucgaguccgucgccugguccgccuccgccugccacgacggcaugggcuggcucaccaucggcaucuccggccccgacaacggcgccgucgccguccucaaguacaacggcaucaucaccggcaccaucaaguccuggaagaagcagauccuccgcacccaggaguccgagugcgucugcaugaacggcuccugcuucaccaucaugaccgacggccccuccaacaaggccgccuccuacaagaucuucaagaucgagaagggcaaggucaccaaguccaucgagcucaacgcccccaacuuccacuacgaggagugcuccugcuaccccgacaccggcaucgucaugugcgucugccgcgacaacuggcacggcuccaaccgccccugggucuccuucaaccagaaccucgacuaccagaucggcuacaucugcuccggcgucuucggcgacaacccccgccccgaggacggcgagggcuccugcaaccccgucaccgucgacggcgccaacggcgucaagggcuucuccuacaaguacgacaacggcgucuggaucggccgcaccaaguccaaccgccuccgcaagggcuucgagaugaucugggaccccaacggcuggaccaacaccgacuccgacuucuccgucaagcaggacgucgucgccaucaccgacugguccggcuacuccggcuccuucguccagcaccccgagcucaccggccucgacugcauccgccccugcuucugggucgagcucguccgcggccucccccgcgagaacaccaccaucuggaccuccggcuccuccaucuccuucugcggcgucaacuccgacaccgccaacugguccuggcccgacggcgccgagcuccccuucaccaucgacaaguga

SEQ ID NO: 112669 - RNA, 1410 nt, Artificial Sequence
  derived and/or modified CDS sequence (opt2) from neuraminidase__InfluenzaA__ACN33159
augaaccccaaccagaagaucaucaccaucggcuccgucucccucaccaucuccaccaucugcuucuucaugcagaucgccauccucaucaccaccgucacccuccacuucaagcaguacgaguucaacuccccccccaacaaccaggucaugcucugcgagcccaccaucaucgagcgcaacaucaccgagaucgucuaccucaccaacaccaccaucgagaaggagaagugccccaagcucgccgaguaccgcaacugguccaagccccagugcgacaucaccggcuucgcccccuucuccaaggacaacuccauccgccucuccgccggcggcgacaucugggucacccgcgagcccuacgucuccugcgaccccgacaagugcuaccaguucgcccucggccagggcaccacccucaacaacguccacuccaacaacaccguccgcgaccgcacccccuaccgcacccuccucaugaacgagcucggcguccccuuccaccucggcaccaagcaggucugcaucgccugguccuccuccuccugccacgacggcaaggccuggcuccacgucugcaucaccggcgacgacaagaacgccaccgccuccuucaucuacaacggccgccucgucgacuccgucgucuccugguccaaggagauccuccgcacccaggaguccgagugcgucugcaucaacggcaccugcaccgucgucaugaccgacggcuccgccuccggcaaggccgacaccaagauccucuucaucgaggagggcaagaucguccacaccuccacccucuccggcuccgcccagcacgucgaggagugcuccugcuacccccgcuaccccggcguccgcugcgucugccgcgacaacuggaagggcuccaaccgccccaucgucgacaucaacaucaaggaccacuccaucgucuccuccuacgucugcuccggccucgucggcgacaccccccgcaagaacgacuccuccuccuccucccacugccucgaccccaacaacgaggagggcggccacggcgucaagggcugggccuucgacgacggcaacgacgucuggaugggccgcaccaucuccgagaagucccgccucggcuacgagaccuucaaggucaucgagggcugguccaaccccaaguccaagcuccagaucaaccgccaggucaucgucgaccgcggcaaccgcuccggcuacuccggcaucuucuccgucgagggcaaguccugcaucaaccgcugcuucuacgucgagcucauccgcggccgcaaggaggagaccgagguccucuggaccuccaacuccaucgucgucuucugcggcaccuccggcaccuacggcaccggcuccuggcccgacggcgccgacaucaaccucaugcccaucuga

SEQ ID NO: 112670 - RNA, 1410 nt, Artificial Sequence; identical to SEQ ID NO: 112548
  derived and/or modified CDS sequence (opt2) from neuraminidase__InfluenzaA__ACN33170

SEQ ID NO: 112671 - RNA, 1410 nt, Artificial Sequence; identical to SEQ ID NO: 112639
  derived and/or modified CDS sequence (opt2) from neuraminidase__InfluenzaA__ACN33181

SEQ ID NO: 112672 - RNA, 1410 nt, Artificial Sequence; identical to SEQ ID NO: 112639
  derived and/or modified CDS sequence (opt2) from neuraminidase__InfluenzaA__ACN33203

SEQ ID NO: 112673 - RNA, 1410 nt, Artificial Sequence
  derived and/or modified CDS sequence (opt2) from neuraminidase__InfluenzaA__ACN33214
augaaccccaaccagaagaucaucaccaucggcuccgucucccucaccaucuccaccaucugcuucuucaugcagaucgccauccucaucaccaccgucacccuccacuucaagcaguacgaguucaacuccccccccaacaaccaggucaugcucugcgagcccaccaucaucgagcgcaacaucaccgagaccgucuaccucaccaacaccaccaucgagaaggagaucugccccaagcucgccgaguaccgcaacugguccaagccccagugcgacaucaccggcuucgcccccuucuccaaggacaacuccauccgccucuccgccggcggcgacaucugggucacccgcgagcccuacgucuccugcgaccccgacaagugcuaccaguucgcccucggccagggcaccacccucaacaacguccacuccaacaacaccguccgcgaccgcacccccuaccgcacccuccucaugaacgagcucggcguccccuuccaccucggcaccaagcaggucugcaucgccugguccuccuccuccugccacgacggcaaggccuggcuccacgucugcaucaccggcgacgacaagaacgccaccgccuccuucaucuacaacggccgccucgucgacuccgucgucuccugguccaaggagauccuccgcacccaggaguccgagugcgucugcaucaacggcaccugcaccgucgucaugaccgacggcuccgccuccggcaaggccgacaccaagauccucuucaucgaggagggcaagaucguccacaccuccacccucuccggcuccgcccagcacgucgaggagugcuccugcuacccccgcuaccccggcguccgcugcgucugccgcgacaacuggaagggcuccaaccgccccaucgucgacaucaacaucaaggaccacuccaucgucuccuccuacgucugcuccggccucgucggcgacaccccccgcaagaacgacuccuccuccuccucccacugccucgaccccaacaacgaggagggcggccacggcgucaagggcugggccuucgacgacggcaacgacgucuggaugggccgcaccaucuccgagaagucccgccucggcuacgagaccuucaaggucaucgagggcugguccaaccccaaguccaagcuccagaucaaccgccaggucaucgucgaccgcggcaaccgcuccggcuacuccggcaucuucuccgucgagggcaaguccugcaucaaccgcugcuucuacgucgagcucauccgcggccgcaaggaggagaccgagguccucuggaccuccaacuccaucgucgucuucugcggcaccuccggcaccuacggcaccggcuccuggcccgacggcgccgacaucaaccucaugcccaucuga

SEQ ID NO: 112674 - RNA, 1413 nt, Artificial Sequence; identical to SEQ ID NO: 112107
  derived and/or modified CDS sequence (opt2) from neuraminidase__InfluenzaA__ACN42984

SEQ ID NO: 112675 - RNA, 1413 nt, Artificial Sequence; identical to SEQ ID NO: 112107
  derived and/or modified CDS sequence (opt2) from neuraminidase__InfluenzaA__ACN42995

SEQ ID NO: 112676 - RNA, 1410 nt, Artificial Sequence
  derived and/or modified CDS sequence (opt2) from neuraminidase__InfluenzaA__ACN43006
augaaccccaaccagaagaucaucaccaucggcuccgucucccucaccaucuccaccaucugcuucuucaugcagaucgccauccucaucaccaccgucacccuccacuucaagcaguacgaguucaacuccccccccaacaaccgcgucaugcucugcgagcccaccaucaucgagcgcaacaucaccgagaucgucuaccucaccaacaccaccaucgagaaggagaucugccccaagcucgccgaguaccgcaacugguccaagccccagugcgacaucaccggcuucgcccccuucuccaaggacaacuccauccgccucuccgccggcggcgacaucugggucacccgcgagcccuacgucuccugcgaccccgacaagugcuaccaguucgcccucggccagggcaccacccucaacaacguccacuccaacaacaccguccgcgaccgcacccccuaccgcacccuccucaugaacgagcucggcguccccuuccaccucggcaccaagcaggucugcaucgccugguccuccuccuccugccacgacggcaaggccuggcuccacgucugcaucaccggcgacgacaagaacgccaccgccuccuucaucuacaacggccgccucgucgacuccgucgucuccugguccaaggagauccuccgcacccaggaguccgagugcgucugcaucaacggcaccugcaccgucgucaugaccgacggcuccgccuccggcaaggccgacaccaagauccucuucaucgaggagggcaagaucguccacaccuccacccucuccggcuccgcccagcacgucgaggagugcuccugcuacccccgcuaccccggcguccgcugcgucugccgcgacaacuggaagggcuccaaccgccccaucgucgacaucaacaucaaggaccacuccaucgucuccuccuacgucugcuccggccucgucggcgacaccccccgcaagaacgacuccuccuccuccucccacugccucgaccccaacaacgaggagggcggccacggcgucaagggcugggccuucgacgacggcaacgacgucuggaugggccgcaccaucuccgagaagucccgccucggcuacgagaccuucaaggucaucgagggcugguccaaccccaaguccaagcuccagaucaaccgccaggucaucgucgaccgcggcaaccgcuccggcuacuccggcaucuucuccgucgagggcaaguccugcaucaaccgcugcuucuacgucgagcucauccgcggccgcaaggaggagaccgagguccucuggaccuccaacuccaucgucgucuucugcggcaccuccggcaccuacggcaccggcuccuggcccgacggcgccgacaucaaccucaugcccaucuga

SEQ ID NO: 112677 - RNA, 1410 nt, Artificial Sequence; identical to SEQ ID NO: 112639
  derived and/or modified CDS sequence (opt2) from neuraminidase__InfluenzaA__ACN43017

SEQ ID NO: 112678 - RNA, 1410 nt, Artificial Sequence; identical to SEQ ID NO: 112635
  derived and/or modified CDS sequence (opt2) from neuraminidase__InfluenzaA__ACN43028

SEQ ID NO: 112679 - RNA, 1410 nt, Artificial Sequence
  derived and/or modified CDS sequence (opt2) from neuraminidase__InfluenzaA__ACN43039
augaaccccaaccagaagaucaucaccaucggcuccgucucccucaccaucuccaccaucugcuucuucaugcagaucgccauccucaucaccaccgucacccuccacuucaagcaguacgaguucaacuccccccccaacaaccaggucaugcucugcgagcccaccaucaucgagcgcaacaucaccgagaucgucuaccucaccaacaccaccaucgagaaggagaucugccccaagcucgccgaguaccgcaacugguccaagccccagugcgacaucaccggcuucgcccccuucuccaaggacaacuccauccgccucuccgccggcggcgacaucugggucacccgcgagcccuacgucuccugcgaccccgacaagugcuaccaguucgcccucggccagggcaccacccucaacaacguccacuccaacgacaccguccgcgaccgcacccccuaccgcacccuccucaugaacgagcucggcguccccuuccaccucgagaccaagcaggucugcaucgccugguccuccuccuccugccacgacggcaaggccuggcuccacgucugcaucaccggcgacgacaagaacgccaccgccuccuucaucuacaacggccgccucgucgacuccgucgucuccugguccaaggagauccuccgcacccaggaguccgagugcgucugcaucaacggcaccugcaccgucgucaugaccgacggcuccgccuccggcaaggccgacaccaagauccucuucaucgaggagggcaagaucguccacaccuccacccucuccggcuccgcccagcacgucgaggagugcuccugcuacccccgcuaccccggcguccgcugcgucugccgcgacaacuggaagggcuccaaccgccccaucgucgacaucaacaucaaggaccacuccaucgucuccuccuacgucugcuccggccucgucggcgacaccccccgcaagaacgacuccuccuccuccucccacugccucgaccccaacaacgaggagggcggccacggcgucaagggcugggccuucgacgacggcaacgacgucuggaugggccgcaccaucuccgagaagucccgccucggcuacgagaccuucaaggucaucgagggcugguccaaccccaaguccaagcuccagaucaaccgccaggucaucgucgaccgcggcaaccgcuccggcuacuccggcaucuucuccgucgagggcaaguccugcaucaaccgcugcuucuacgucgagcucauccgcggccgcaaggaggagaccgagguccucuggaccuccaacuccaucgucgucuucugcggcaccuccggcaccuacggcaccggcuccuggcccgacggcgccgacaucaaccucaugcccaucuga

SEQ ID NO: 112680 - RNA, 1410 nt, Artificial Sequence; identical to SEQ ID NO: 112548
  derived and/or modified CDS sequence (opt2) from neuraminidase__InfluenzaA__ACN43050

SEQ ID NO: 112681 - RNA, 1410 nt, Artificial Sequence; identical to SEQ ID NO: 112635
  derived and/or modified CDS sequence (opt2) from neuraminidase__InfluenzaA__ACN43061

SEQ ID NO: 112682 - RNA, 1410 nt, Artificial Sequence
  derived and/or modified CDS sequence (opt2) from neuraminidase__InfluenzaA__ACN43072
augaaccccaaccagaagaucaucaccaucggcuccgucucccucaccaucuccaccaucugcuucuucaugcagaucgccauccucaucaccaccgucacccuccacuucaagcaguacgaguucaacuccccccccaacaaccaggucaugcucugcgagcccaccaucaucgagcgcaacaucaccgagaucgucuaccucaccaacaccaccaucgagaaggagaucugccccaagcucgccgaguaccgcaacugguccaagccccagugcgacaucaccggcuucgcccccuucuccaaggacaacuccauccgccucuccgccggcggcgacaucugggucacccgcgagcccuacgucuccugcgaccccgacaagugcuaccaguucgcccucggccagggcaccacccucaacaacguccacuccaacaacaccguccgcgaccgcacccccuaccgcacccuccucaugaacgagcucggcguccccuuccaccucggcaccaagcaggucugcaucgccugguccuccuccuccugccacgacggcaaggccuggcuccacgucugcaucaccggcgacgacaagaacgccaccgccuccuucaucuacaacggccgccucgucgacuccgucgucuccugguccaaggagauccuccgcacccaggaguccgagugcgucugcaucaacggcaccugcaccgucgucaugaccgacggcuccgccuccggcaaggccgacaccaagauccucuucaucgaggagggcaagaucguccacaccuccacccucuccggcuccgcccagcacgucgaggagugcuccugcuacccccgcuaccccggcguccgcugcgucugccgcgacaacuggaagggcuccaaccgccccaucgucgacaucaacaucaaggaccacuccaucgucuccuccuacgucugcuccggccucgucggcgacaccccccgcaagaacgacuccuccuccuccucccacugccucgaccccaacaacgaggagggcggccacggcgucaagggcugggccuucgacgacggcaacgacgucuggaugggccgcaccaucuccgagaagucccgccucggcuacgagaccuucaaggucaucgagggcugguccaaccccaaguccaagcuccagaucaaccgccaggucaucgucgaccgcggcaaccgcuccggcuacuccggcaucuucuccgucgagggcaaguccugcaucaaccgcugcuucuacgucgagcucauccgcggccgcaaggaggagaccgagguccucuggaccuccaacuccgucgucgucuucugcggcaccuccggcaccuacggcaccggcuccuggcccgacggcgccgacaucaaccucaugcccaucuga

SEQ ID NO: 112683 - RNA, 1410 nt, Artificial Sequence
  derived and/or modified CDS sequence (opt2) from neuraminidase__InfluenzaA__ACN43083
augaaccccaaccagaagaucaucaccaucggcuccgucucccucaccaucuccaccaucugcuucuucaugcagaucgccauccucaucaccaccgucacccuccacuucaagcaguacgaguucaacuccucccccaacaaccaggucaugcucugcgagcccaccaucaucgagcgcaacaucaccgagaucgucuaccucaccaacaccaccaucgagaaggagaucugccccaagcucgccgaguaccgcaacugguccaagccccagugcgacaucaccggcuucgcccccuucuccaaggacaacuccauccgccucuccgccggcggcgacaucugggucacccgcgagcccuacgucuccugcgaccccgacaagugcuaccaguucgcccucggccagggcaccacccucaacaacguccacuccaacaacaccguccgcgaccgcacccccuaccgcacccuccucaugaacgagcucggcguccccuuccaccucggcaccaagcaggucugcaucgccugguccuccuccuccugccacgacggcaaggccuggcuccacgucugcaucaccggcgacgacaagaacgccaccgccuccuucaucuacaacggccgccucgucgacuccaucgucuccugguccaacgagauccuccgcacccaggaguccgagugcgucugcaucaacggcaccugcaccgucgucaugaccgacggcuccgccuccggcaaggccgacaccaagauccucuucaucgaggagggcaagaucguccacaccuccacccucuccggcuccgcccagcacgucgaggagugcuccugcuacccccgcuaccccggcguccgcugcgucugccgcgacaacuggaagggcuccaaccgccccaucgucgacaucaacaucaaggaccacuccaucgucuccuccuacgucugcuccggccucgucggcgacaccccccgcaagaacgacuccuccuccuccucccacugccucgaccccaacaacgaggagggcggccacggcgucaagggcugggccuucgacgacggcaacgacgucuggaugggccgcaccaucuccgagaagucccgccucggcuacgagaccuucaaggucaucgagggcugguccaaccccaaguccaagcuccagaucaaccgccaggucaucgucgaccgcggcaaccgcuccggcuacuccggcaucuucuccgucgagggcaaguccugcaucaaccgcugcuucuacgucgagcucauccgcggccgcaaggaggagaccgagguccucuggaccuccaacuccaucgucgucuucugcggcaccuccggcaccuacggcaccggcuccuggcccgacggcgccgacaucaaccucaugcccaucuga

SEQ ID NO: 112684 - RNA, 1410 nt, Artificial Sequence; identical to SEQ ID NO: 110363
  derived and/or modified CDS sequence (opt2) from neuraminidase__InfluenzaA__ACN50231

SEQ ID NO: 112685 - RNA, 1410 nt, Artificial Sequence
  derived and/or modified CDS sequence (opt2) from neuraminidase__InfluenzaA__ACN50233
augaaccccaaccagaagaucaucaccaucggcuccgucucccucaccaucuccaccaucugcuucuucaugcagaucgccauccucaucaccaccgucacccuccacuucaagcaguacgaguucaacuccccccccaacaaccaggucaugcucugcgagcccaccaucaucgagcgcaacaucaccgagaucgucuaccucaccaacaccaccaucgagaaggagaucugccccaagcucgccgaguaccgcaacugguccaagccccagugcgacaucaccggcuucgcccccuucuccaaggacaacuccauccgccucuccgccggcggcgacaucugggucacccgcgagcccuacgucuccugcgaccccgacaagugcuaccaguucgcccucggccagggcaccacccucaacaacguccacuccaacgacaccguccacgaccgcacccccuaccgcacccuccucaugaacgagcucggcguccccuuccaccucggcaccaagcaggucugcaucgccugguccuccuccuccugccacgacggcaaggccuggcuccacgucugcgucaccggcgacgacaagaacgccaccgccuccuucaucuacaacggccgccucgucgacuccaucgucuccugguccaaggagauccuccgcacccaggaguccgagugcgucugcaucaacggcaccugcaccgucguccucaccgacggcuccgccuccggcaaggccgacaccaagauccucuucaucgaggagggcaagaucguccacaccuccaagcucuccggcuccgcccagcacgucgaggagugcuccugcuacccccgcuaccccggcguccgcugcgucugccgcgacaacuggaagggcuccaaccgccccaucgucgacaucaacaucaaggacuacuccaucgucuccuccuacgucugcuccggccucgucggcgacaccccccgcaagaacgacuccuccuccuccggccacugccucgaccccaacaacgaggagggcggccacggcgucaagggcugggccuucgacgacggcaacgacgucuggaugggccgcaccaucuccgagaagcuccgcuccggcuacgagaccuucaaggucaucgagggcugguccaaccccaacuccaagcuccagaucaaccgccaggucaucgucgaccgcggcaaccgcuccggcuacuccggcaucuucuccgucgagggcaaguccugcaucaaccgcugcuucuacgucgagcucauccgcggccgcaaggaggagaccgagguccucuggaccuccaacuccaucgucgucuucugcggcaccuccggcaccuacggcaccggcuccuggcccgacggcgccgacaucaaccucaugcccaucuga

SEQ ID NO: 112686 - RNA, 1410 nt, Artificial Sequence
  derived and/or modified CDS sequence (opt2) from neuraminidase__InfluenzaA__ACN50245
augaaccccaaccagaagaucaucaccaucggcuccgucucccucaccaucuccaccaucugcuucuucaugcagaucgccauccucaucaccaccgucacccuccacuucaagcaguacgaguucaacuccccccccaacaaccaggucguccucugcgagcccaccaucaucgagcgcaacaucaccgagaucgucuaccucaccaacaccaccaucgagaaggagaucugccccaagcucgccgaguaccgcaacugguccaagccccagugcgacaucaccggcuucgcccccuucuccaaggacaacuccauccgccucuccgccggcggcgacaucugggucacccgcgagcccuacgucuccugcgaccccgacaagugcuaccaguucgcccucggccagggcaccacccucaacaacguccacuccaacgacaccguccgcgaccgcacccccuaccgcacccuccucaugaacgagcucggcguccccuuccaccucggcaccaagcaggucugcaucgccugguccuccuccuccugccacgacggcaaggccuggcuccacgucugcaucaccggcgacgacaagaacgccaccgccuccuucaucuacaacggccgccucgucgacuccaucgucuccugguccaaggagauccuccgcacccaggaguccgagugcgucugcaucaacggcaccugcaccgucgucaugaccgacggcuccgccuccggcaaggccgacaccaagauccucuucaucgaggagggcaagaucguccacaccuccacccucuccggcuccgcccagcacgucgaggagugcuccugcuacccccgcuaccccggcguccgcugcgucugccgcgacaacuggaagggcuccaaccgccccaucgucgacaucaacaucaaggaccacuccaucgucuccuccuacgucugcuccggccucgucggcgacaccccccgcaagaacgacuccuccuccuccucccacugccucgaccccaacaacgaggagggcggccacggcgucaagggcugggccuucgacgacggcaacgacgucuggaugggccgcaccaucuccgagaagucccgccucggcuacgagaccuucaaggucaucgagggcugguccaaccccaaguccaagcuccagaucaaccgccaggucaucgucgaccgcggcgaccgcuccggcuacuccggcaucuucuccgucgagggcaaguccugcaucaaccgcugcuucuacgucgagcucauccgcggccgcaaggaggagaccgagguccucuggaccuccaacuccaucgucgucuucugcggcaccuccggcaccuacggcaccggcuccuggcccgacggcgccgacaucaaccucaugcccaucuga

SEQ ID NO: 112687 - RNA, 1413 nt, Artificial Sequence
  derived and/or modified CDS sequence (opt2) from neuraminidase__InfluenzaA__ACN72609
augaaccccaaccagaagaucaucaccaucggcuccaucuccaucgccaucggcaucaucucccucaugcuccagaucggcaacaucaucuccaucugggccucccacuccauccagaccggcucccagaacaacaccggcaucugcaaccagcgcaucaucaccuacgagaacuccaccugggucaaccacaccuacgucaacaucaacaacaccaacgucgucgccggcgaggacaagaccuccgucacccucgccggcaacuccucccucugcuccaucuccggcugggccaucuacaccaaggacaacuccauccgcaucggcuccaagggcgacgucuucgucauccgcgagcccuucaucuccugcucccaccucgagugccgcaccuucuuccucacccagggcgcccuccucaacgacaagcacuccaacggcaccgucaaggaccgcucccccuaccgcgcccucauguccugcccccucggcgaggcccccucccccuacaacuccaaguucgaguccgucgccugguccgccuccgccugccacgacggcaugggcuggcucaccaucggcaucuccggccccgacaacggcgccgucgccguccucaaguacaacggcaucaucaccggcaccaucaaguccuggaagaagcagauccuccgcacccaggaguccgagugcgucugcaugaacggcuccugcuucaccaucaugaccgacggccccuccaacaaggccgccuccuacaagaucuucaagaucgagaagggcaaggucaccaaguccaucgagcucaacgcccccaacuuccacuacgaggagugcuccugcuaccccgacaccggcaucgucaugugcgucugccgcgacaacuggcacggcuccaaccgccccugggucuccuucaaccagaaccucgacuacaagaucggcuacaucugcuccggcgucuucggcgacaacccccgccccgaggacggcgagggcuccugcaaccccgucaccgucgacggcgccaacggcgucaagggcuucuccuacaaguacgacaacggcgucuggaucggccgcaccaaguccaaccgccuccgcaagggcuucgagaugaucugggaccccaacggcuggaccaacaccgacuccgacuucuccgucaagcaggacgucgucgccaucaccgacugguccggcuacuccggcuccuucguccagcaccccgagcucaccggccucgacugcauccgccccugcuucugggucgagcucguccgcggccucccccgcgagaacaccaccaucuggaccuccggcuccuccaucuccuucugcggcgucaacuccgacaccgccaacugguccuggcccgacggcgccgagcuccccuucaccaucgacaaguga

SEQ ID NO: 112688 - RNA, 1410 nt, Artificial Sequence
  derived and/or modified CDS sequence (opt2) from neuraminidase__InfluenzaA__ACN72621
augaaccccaaccagaagaucaucaucaucuccuccaucugcaugaccaacggcaucgccucccucauccuccagaucggcaacaucaucuccaucuggaucucccacuccauccagaccggcaaccagaaccagaccgagaccugcaaccaguccgucaucaucuacgagaacaacaccugggucaaccagaccuacgucaacaucuccaacaacaacuucgucgccgagcagaccgucguccccgucaagcucgucggcuccuccccccucugccccgucuccggcugggccaucuacuccaaggacaacuccguccgcaucggcuccaagggcgacgucuucgucauccgcgagcccuucaucuccugcucccaccucgagugccgcaccuucuuccucacccagggcgcccuccucaacgacaagcacuccaacggcaccgucaaggaccgcucccccuaccgcacccucauguccugccccaucggcgagguccccucccccuacaacucccgcuucgaguccgucgccugguccgccuccgccugccacgacggcuccuccuggcucaccaucggcaucuccggccccgacaacggcgccgucgccguccucaaguacaacgacaucaucaccgacaccaucaaguccuggaagaacaacauccuccgcacccaggaguccgagugcgccugccucaacggcuccugcuucaccgucaugaccgacggccccuccaacggccaggccuccuacaagaucuucaagaucgagaagggcaaggucgucaaguccgucgagcucaacgcccccaacuaccacuacgaggagugcuccugcuaccccgacuccggcgagaucaucugcgucugccgcgacaacuggcacggcuccaaccgccccugggucuccuucaaccagaaccucgaguaccagaucggcuacaucugcuccggcguccucggcgacaacccccgccccaacgaccgcaccggcaacugcggccccgucuccucccacggcgccaacggcgucaagggcuucuccuucaaguacggcgacggcaucuggaucggccgcaccaaguccaccuccucccgcuccggcuucgagaugaucugggaccccaacggcuggaccggcaccgacaacaacuucuccgucaagcaggacaucgucggcaucaccgacuggaccggcuacuccggcuccuucguccagcaccccgagcucaccggccucgacugcauccgccccugcuucugggucgagcucauccgcggccgccccaaggagaacaccaucuggaccuccggcuccuccaucuccuucugcggcgucaacuccgacaccgucggcugguccuggcccgacggcgccgagcuccccuucaccaucgacaaguga

SEQ ID NO: 112689 - RNA, 1410 nt, Artificial Sequence; identical to SEQ ID NO: 112548
  derived and/or modified CDS sequence (opt2) from neuraminidase__InfluenzaA__ACN76503

SEQ ID NO: 112690 - RNA, 1410 nt, Artificial Sequence
  derived and/or modified CDS sequence (opt2) from neuraminidase__InfluenzaA__ACO36345
augaaccccaaccagaagaucaucaccaucggcuccgucucccucaccaucuccaccaucugcuucuucaugcagaucgccauccucaucaccaccgucacccuccacuucaagcaguacgaguucaacuccucccccaacaaccaggucaugcagugcgagcccaccaucaucgagcgcaacaucaccgagaucgucuaccucaccaacaccaccaucgagaaggagaucugccccaagcucgccgaguaccgcaacugguccaagccccagugcgacaucaccggcuucgcccccuucuccaaggacaacuccauccgccucuccgccggcggcgacaucugggucacccgcgagcccuacgucuccugcgaccccgacaagugcuaccaguucgcccucggccagggcaccacccucaacaacguccacuccaacaacaccguccgcgaccgcacccccuaccgcacccuccucaugaacgagcucggcguccccuuccaccucggcaccaagcaggucugcaucgccugguccuccuccuccugccacgacggcaaggccuggcuccacgucugcaucaccggcgacgacaagaacgccaccgccuccuucaucuacaacggccgccucgucgacuccaucgucuccugguccaaggagauccuccgcacccaggaguccgagugcgucugcaucaacggcaccugcaccgucgucaugaccgacggcuccgccuccggcaaggccgacaccaagauccucuucaucgaggagggcaagaucguccacaccuccacccucuccggcuccgcccagcacgucgaggagugcuccugcuacccccgcuaccccggcguccgcugcgucugccgcgacaacuggaagggcuccaaccgccccaucgucgacaucaacaucaaggaccacuccaucgucuccuccuacgucugcuccggccucgucggcgacaccccccgcaagaacgacuccuccuccuccucccacugccucgaccccaacaacgaggagggcggccacggcgucaagggcugggccuucgacgacggcaacgacgucuggaugggccgcaccaucuccgagaagucccgccucggcuacgagaccuucaaggucaucgagggcugguccaaccccaaguccaagcuccagaucaaccgccaggucaucgucgaccgcggcaaccgcuccggcuacuccggcaucuucuccgucgagggcaaguccugcaucaaccgcugcuucuacgucgagcucauccgcggccgcaaggaggagaccgagguccucuggaccuccaacuccaucgucgucuucugcggcaccuccggcaccuacggcaccggcuccuggcccgacggcgccgacaucaaccucaugcccaucuga

SEQ ID NO: 112691 - RNA, 1410 nt, Artificial Sequence; identical to SEQ ID NO: 111016
  derived and/or modified CDS sequence (opt2) from neuraminidase__InfluenzaA__ACO36356

SEQ ID NO: 112692 - RNA, 1410 nt, Artificial Sequence
  derived and/or modified CDS sequence (opt2) from neuraminidase__InfluenzaA__ACO36367
augaaccccaaccagaagaucaucaccaucggcuccgucucccucaucaucuccaccaucugcuucuucaugcagaccgccauccucaucaccaccgucacccuccacuucaagcaguacgaguucaacuccccccccaacaaccaggucaugcucugcgagcccaccaucaucgagcgcaacaucaccgagaucgucuaccucaccaacaccaccaucgagaaggagaucugccccaagcucgccgaguaccgcaacugguccaagccccagugcgacaucaccggcuucgcccccuucuccaaggacaacuccauccgccucuccgccggcggcgacaucugggucacccgcgagcccuacgucuccugcgaccccgacaagugcuaccaguucgcccucggccagggcaccacccucaacaacguccacuccaacgacaccguccgcaaccgcacccccuaccgcacccuccucaugaacgagcucggcguccccuuccaccucggcaccaagcaggucugcaucgccugguccuccuccuccugccacgacggcaaggccuggcuccacgucugcaucaccggcgacgacaagaacgccaccgccuccuucaucuacaacggccgccucgucgacuccaucgucuccugguccaaggagauccuccgcacccaggaguccgagugcgucugcaucaacggcaccugcaccgucgucaugaccgacggcuccgccuccggcaaggccgacaccaagauccucuucaucgaggagggcaagaucguccacaccuccacccucuccggcuccgcccagcacgucgaggagugcuccugcuacccccgcuaccccggcguccgcugcgucugccgcgacaacuggaagggcuccaaccgccccaucgucgacaucaacaucaaggaccacuccaucgucuccuccuacgucugcuccggccucgucggcgacaccccccgcaagaacgacuccuccuccuccucccacugccucgaccccaacaacgaggagggcggccacggcgucaagggcugggccuucgacgacggcaacgacgucuggaugggccgcaccaucuccgagaagucccgccucggcuacgagaccuucaaggucaucgagggcugguccaaccccaaguccaagcuccagaucaaccgccaggucaucgucgaccgcggcaaccgcuccggcuacuccggcaucuucuccgucgagggcaaguccugcaucaaccgcugcuucuacgucgagcucauccgcggccgcaaggaggagaccgagguccucuggaccuccaacuccaucgucgucuucugcggcaccuccggcaccuucggcaccggcuccuggcccgacggcgccgacaucaaccucaugcccaucuga

SEQ ID NO: 112693 - RNA, 1413 nt, Artificial Sequence; identical to SEQ ID NO: 112668
  derived and/or modified CDS sequence (opt2) from neuraminidase__InfluenzaA__ACO36400

SEQ ID NO: 112694 - RNA, 1410 nt, Artificial Sequence
  derived and/or modified CDS sequence (opt2) from neuraminidase__InfluenzaA__ACO36411
augaaccccaaccagaagaucaucaccaucggcuccgucucccucaccaucuccaccaucggcuucuucaugcagaccgccauccucaucaccaccgucacccuccacuucaagcaguacgaguucaacuccccccccaacaaccaggucaugcucugcgagcccaccaucaucgagcgcaacaucaccgagaucgucuaccucaccaacaccaccaucgagaaggagaucugccccaagcucgccgaguaccgcaacugguccaagccccagugcgacaucaccggcuucgcccccuucuccaaggacaacuccauccgccucuccgccggcggcgacaucugggucacccgcgagcccuacgucuccugcgaccccgacaagugcuaccaguucgcccucggccagggcaccacccucaacaacguccacuccaacgacaccguccgcggccgcacccccuaccgcacccuccucaugaacgagcucggcguccccuuccaccucggcaccaagcaggucugcaucgccugguccuccuccuccugccacgacggcaaggccuggcuccacgucugcaucaccggcgacgacaagaacgccaccgccuccuucaucuacaacggccgccucgucgacuccaucgucuccugguccaaggagauccuccgcacccaggaguccgagugcgucugcaucaacggcaccugcaccgucgucaugaccgacggcuccgccuccggcaaggccgacaccaagauccucuucaucgaggagggcaagaucguccacaccuccacccucuccggcuccgcccagcacgucgaggagugcuccugcuacccccgcuaccccggcguccgcugcgucugccgcgacaacuggaagggcuccaaccgccccaucgucgacaucaacaucaaggaccacuccaucgucuccuccuacgucugcuccggccucgucggcgacaccccccgcaagaacgacuccuccuccuccucccacugccucgaccccaacaacgaggagggcggccacggcgucaagggcugggccuucgacgacggcaacgacgucuggaugggccgcaccaucuccgagaagucccgccucggcuacgagaccuucaaggucaucgagggcugguccaaccccaaguccaagcuccagaucaaccgccaggucaucgucgaccgcggcaaccgcuccggcuacuccggcaucuucuccgucgagggcaaguccugcaucaaccgcugcuucuacgucgagcucauccgcggccgcaaggaggagaccgagguccucuggaccuccaacuccaucgucgucuucugcggcaccuccggcaccuacggcaccggcuccuggcccgacggcgccgacaucaaccucaugcccaucuga

SEQ ID NO: 112695 - RNA, 1410 nt, Artificial Sequence
  derived and/or modified CDS sequence (opt2) from neuraminidase__InfluenzaA__ACO36422
augaaccccaaccagaagaucaucaccaucggcuccgucucccucaucaucuccaccaucugcuucuucaugcagaccgccauccucaucaccaccgucacccuccacuucaagcaguacgaguucaacuccccccccaacaaccaggucaugcucugcgagcccaccaucaucgagcgcaacaucaccgagaucgucuaccucaccaacaccaccaucgagaaggagaucugccccaagcucgccgaguaccgcaacugguccaagccccagugcgacaucaccggcuucgcccccuucuccaaggacaacuccauccgccucuccgccggcggcgacaucugggucacccgcgagcccuacgucuccugcgaccccgacaagugcuaccaguucgcccucggccagggcaccacccucaacaacguccacuccaacgacaccguccgcggccgcacccccuaccgcacccuccucaugaacgagcucggcguccccuuccaccucggcaccaagcaggucugcaucgccugguccuccuccuccugccacgacggcaaggccuggcuccacgucugcaucaccggcgacgacaagaacgccaccgccuccuucaucuacaacggccgccucgucgacuccaucgucuccugguccaaggagauccuccgcacccaggaguccgagugcgucugcaucaacggcaccugcaccgucgucaugaccgacggcuccgccuccggcaaggccgacaccaagauccucuucaucgaggagggcaagaucguccacaccuccacccucuccggcuccgcccagcacgucgaggagugcuccugcuacccccgcuaccccggcguccgcugcgucugccgcgacaacuggaagggcuccaaccgccccaucgucgacaucaacaucaaggaccacuccaucgucuccuccuacgucugcuccggccucgucggcgacaccccccgcaagaacgacuccuccuccuccucccacugccucgaccccaacaacgaggagggcggccacggcgucaagggcugggccuucgacgacggcaacgacgucuggaugggccgcaccaucuccgagaagucccgccucggcuacgagaccuucaaggucaucgagggcugguccaaccccaaguccaagcuccagaucaaccgccaggucaucgucgaccgcggcaaccgcuccggcuacuccggcaucuucuccgucgagggcaaguccugcaucaaccgcugcuucuacgucgagcucauccgcggccgcaaggaggagaccgagguccucuggaccuccaacuccaucgucgucuucugcggcaccuccggcaccuacggcaccggcuccuggcccgacggcgccgacaucaaccucaugcccaucuga

SEQ ID NO: 112696 - RNA, 1410 nt, Artificial Sequence; identical to SEQ ID NO: 112452
  derived and/or modified CDS sequence (opt2) from neuraminidase__InfluenzaA__ACO36433

SEQ ID NO: 112697 - RNA, 1410 nt, Artificial Sequence
  derived and/or modified CDS sequence (opt2) from neuraminidase__InfluenzaA__ACO36444
augaaccccaaccagaagaucaucaccaucggcuccgucucccucaccaucgccaccaucugcuuccucaugcagaucgccauccucgucaccaccgucacccuccacuucaagcagcacgagugcaacuccccccccaacaaccaggucaugcucugcgagcccaccaucaucgagcgcaacaucaccgagaucgucuaccucaccaacaccaccaucgagaaggagaagugccccaagcucgccgaguaccgcaacugguccaagccccagugcaacaucaccggcuucgcccccuucuccaaggacaacuccauccgccucuccgccggcggcgacaucugggucacccgcgagcccuacgucuccugcgaccccgacaagugcuaccaguucgcccucggccagggcaccacccucaacaacggccacuccaacaacaccguccacgaccgcacccccuaccgcacccuccucaugaacgagcucggcguccccuuccaccucggcacccgccaggucugcaucgccugguccuccuccuccugccacgacggcaaggccuggcuccacgucugcgucaccggcgacgacaagaacgccaccgccuccuucaucuacaacggccgccucgucgacuccaucggcuccugguccaagaagauccuccgcacccaggaguccgagugcgucugcaucaacggcaccugcaccgucgucaugaccgacggcuccgccuccgagaaggccgacaccaagauccucuucaucgaggagggcaagaucguccacaucuccacccucuccggcuccgcccagcacgucgaggagugcuccugcuacccccgcuaccccggcguccgcugcgucugccgcgacaacuggaagggcuccaaccgccccaucgucgacaucaacgucaaggacuacuccaucgucuccuccuacgucugcuccggccucgucggcgacaccccccgcaagaacgacuccuucuccuccucccacugccucgaccccaacaacgaggagggcggccacggcgucaagggcugggccuucgacgacggcaacgacgucuggaugggccgcaccaucuccgagaagcuccgcuccggcuacgagaccuucaaggucaucgagggcugguccaagcccaacuccaagcuccagaucaaccgccaggucaucgucgagcgcggcaaccgcuccggcuacuccggcaucuucuccgucgagggcaaguccugcaucaaccgcugcuucuacgucgagcucauccgcggccgcaaggaggagaccgaggucugguggaccuccaacuccaucgucgucuucugcggcaccuccggcaccuacggcaccggcuccuggcccgacggcgccgacaucaaccucaugcccaucuga

SEQ ID NO: 112698 - RNA, 1410 nt, Artificial Sequence
  derived and/or modified CDS sequence (opt2) from neuraminidase__InfluenzaA__ACO36466
augaaccccaaccagaagaucaucaccaucggcuccgucucccucaccaucuccaccaucugcuucuucaugcagaucgccauccucaucaccaccgucacccuccacuucaagcaguacgaguucaacuccccccccaacaaccaggucaugcucugcgagcccaccaucaucgagcgcaacaucaccgagaucgccuaccucaccaacaccaccaucgagaaggagaucugccccaagcucgccgaguaccgcaacugguccaagccccagugcaacaucaccggcuucgcccccuucuccaaggacaacuccauccgccucuccgccggcggcgacaucugggucacccgcgagcccuacgucuccugcgaccccgacaagugcuaccaguucgcccucggccagggcaccacccucaacaacguccacuccaacgacaccguccacgaccgcacccccuaccgcacccuccucaugaacgagcucggcguccccuuccaccucggcaccaagcaggucugcaucgccugguccuccuccuccugccacgacggcaaggccuggcuccacgucugcgucaccggcgacgacgagaacgccaccgccuccuucaucuacaacggccgccucgucgacuccgucgucuccugguccaagaagauccuccgcacccaggaguccgagugcgucugcaucaacggcaccugcaccgucgucaugaccgacggcuccgccuccggcaaggccgacaccaagauccucuucaucgaggagggcaagaucguccacaccuccacccucuccggcuccgcccagcacgucgaggagugcuccugcuacccccgcuaccccggcguccgcugcgucugccgcgacaacuggaagggcuccaaccgccccaucgucgacaucaacaucaaggacuacuccaucgucuccuccuacgucugcuccggccucgucggcgacaccccccgcaagaacgacuccuccuccuccucccacugccucgaccccaacaacgaggagggcggccacggcgucaagggcugggccuucgacgacggcaacgacgucuggaugggccgcaccaucuccgagaagcuccgcuccggcuacgagaccuucaaggucaucgagggcugguccaaccccaacuccaagcuccagaucaaccgccaggucaucgucgaccgcggcaaccgcuccggcuacuccggcaucuucuccgucgagggcaaguccugcaucaaccgcugcuucuacgucgagcucauccgcggccgcaaccaggagaccgagguccucuggaccuccaacuccaucgucgucuucugcggcaccuccggcaccuacggcaccggcuccuggcccgacggcgccgacaucaaccucaugcccaucuga

SEQ ID NO: 112699 - RNA, 1410 nt, Artificial Sequence
  derived and/or modified CDS sequence (opt2) from neuraminidase__InfluenzaA__ACO36477
augaaccccaaccagaagaucaucaccaucggcuccgucucccucaccaucgccaccaucugcuuccucaugcagaucgccauccucgucaccaccgucacccuccacuucaagcagcacgagugcaacuccccccccaacaaccaggucaugcucugcgagcccaccaucaucgagcgcaacaucaccgagaucgucuaccucaccaacaccaccaucgagaaggagaucugccccaagcucgccgaguaccgcaacugguccaagccccagugcaacaucaccggcuucgcccccuucuccaaggacaacuccauccgccucuccgccggcggcgacaucugggucacccgcgagcccuacgucuccugcgaccccgacaagugcuaccaguucgcccucggccagggcaccacccucaacaacggccacuccaacgacaccguccacgaccgcacccccuaccgcacccuccucaugaacgagcucggcguccccuuccaccucggcacccgccaggucugcaucgccugguccuccuccuccugccacgacggcaaggccuggcuccacgucugcgucaccggcgacgacaagaacgccaccgccuccuucaucuacaacggccgccucgucgacuccaucggcuccugguccaagaacauccuccgcacccaggaguccgagugcgucugcaucaacggcaccugcaccgucgucaugaccgacggcuccgccuccggcaaggccgacaccaagauccucuucaucgaggagggcaagaucguccacaucuccacccucuccggcuccgcccagcacgucgaggagugcuccugcuacccccgcuaccccggcguccgcugcgucugccgcgacaacuggaagggcuccaaccgccccaucgucgacaucaacgucaaggacuacuccaucgucuccuccuacgucugcuccggccucgucggcgacaccccccgcaagaacgacuccuucuccuccucccacugccucgaccccaacaacgaggagggcggccacggcgucaagggcugggccuucgacgacggcaacgacgucuggaugggccgcaccaucuccgagaagcuccgcuccggcuacgagaccuucaaggucaucgagggcugguccaagcccaacuccaagcuccagaucaaccgccaggucaucgucgagcgcggcaaccgcuccggcuacuccggcaucuucuccgucgagggcaaguccugcaucaaccgcugcuucuacgucgagcucauccgcggccgcaaggaggagaccgaggucugguggaccuccaacuccaucgucgucuucugcggcaccuccggcaccuacggcaccggcuccuggcccgacggcgccgacaucaaccucaugcccaucuga

SEQ ID NO: 112700 - RNA, 1410 nt, Artificial Sequence
  derived and/or modified CDS sequence (opt2) from neuraminidase__InfluenzaA__ACO36499
augaaccccaaccagaagaucaucaccaucggcuccgucucccucaccaucuccaccaucugcuucuucaugcagaucgccauccucaucaccaccgucacccuccacuucaagcaguacgaguucaacuccccccccaacaaccaggucaugcucugcgagcccaccaucaucgagcgcaacaucaccgagaucgucuaccucaccaacaccaccaucgagaaggagaucugccccaagcucgccgaguaccgcaacugguccaagccccagugcaacaucaccggcuucgcccccuucuccaaggacaacuccauccgccucuccgccggcggcgacaucugggucacccgcgagcccuacgucuccugcgaccccgacaagugcuaccaguucgcccucggccagggcaccacccucaacaacguccacuccaacgacaccguccacgaccgcacccccuaccgcacccuccucaugaacgagcucggcguccccuuccaccucggcaccaagcaggucugcaucgccugguccuccuccuccugccacgacggcaaggccuggcuccacgucugcgucaccggcgacgacaagaacgccaccgccuccuucaucuacaacggccgccucgucgacuccgucgucuccugguccaagaagauccuccgcacccaggaguccgagugcgucugcaucaacggcaccugcaccgucgucaugaccgacggcuccgccuccggcaaggccgacaccaagauccucuucaucgaggagggcaagaucguccacaccuccacccucuccggcuccgcccagcacgucgaggagugcuccugcuacccccgcuaccccggcguccgcugcgucugccgcgacaacuggaagggcuccaaccgccccaucgucgacaucaacaucaaggacuacuccaucgucuccuccuacgucugcuccggccucgucggcgacaccccccgcaagaacgacuccuccuccuccucccacugccucgaccccaacaacgaggagggcggccacggcgucaagggcugggccuucgacgacggcaacgacgucuggaugggccgcaccaucuccgagaagcuccgcuccggcuacgagaccuucaaggucaucgagggcugguccaaccccaacuccaagcuccagaucaaccgccaggucaucgucgaccgcggcaaccgcuccggcuacuccggcaucuucuccgucgagggcaaguccugcaucaaccgcugcuucuacgucgagcucauccgcggccgcaaccaggagaccgagguccucuggaccuccaacuccaucgucgucuucugcggcaccuccggcaccuacggcaccggcuccuggcccgacggcgccgacaucaaccucaugcccaucuga

SEQ ID NO: 112701 - RNA, 1410 nt, Artificial Sequence; identical to SEQ ID NO: 110363
  derived and/or modified CDS sequence (opt2) from neuraminidase__InfluenzaA__ACO36510

SEQ ID NO: 112702 - RNA, 1410 nt, Artificial Sequence; identical to SEQ ID NO: 110363
  derived and/or modified CDS sequence (opt2) from neuraminidase__InfluenzaA__ACO36543

SEQ ID NO: 112703 - RNA, 1410 nt, Artificial Sequence; identical to SEQ ID NO: 110363
  derived and/or modified CDS sequence (opt2) from neuraminidase__InfluenzaA__ACO36554

SEQ ID NO: 112704 - RNA, 1410 nt, Artificial Sequence; identical to SEQ ID NO: 110363
  derived and/or modified CDS sequence (opt2) from neuraminidase__InfluenzaA__ACO36565

SEQ ID NO: 112705 - RNA, 1410 nt, Artificial Sequence
  derived and/or modified CDS sequence (opt2) from neuraminidase__InfluenzaA__ACO36576
augaaccccaaccagaagaucaucaccaucggcuccgucucccucaccaucuccaccaucugcuucuucaugcagaucgccauccucaucaccaccgucacccuccacuucaagcaguacgaguucaacuccccccccaacaaccaggucaugcucugcgagcccaccaucaucgagcgcaacaucaccgagaucgucuaccucaccaacaccaccaucgagaaggagaucugccccaagcucgccgaguaccgcaacugguccaagccccagugcgacaucaccggcuucgcccccuucuccaaggacaacuccauccgccucuccgccggcggcgacaucugggucacccgcgagcccuacgucuccugcgaccccgacaagugcuaccaguucgcccucggccagggcaccacccucaacaacguccacuccaacgacaccguccacgaccgcacccccuaccgcacccuccucaugaacgagcucggcguccccuuccaccucggcaccaagcaggucugcaucgccugguccuccuccuccugccacgacggcaaggccuggcuccacgucugcgucaccggcgacgacaagaacgccaccgccuccuucaucuacaacggccgccucgucgacuccaucgucuccugguccaaggagauccuccgcacccaggaguccgagugcgucugcaucaacggcaccugcaccgucgucaugaccgacggcuccgccuccggcaaggccgacaccaagauccucuucaucgaggagggcaagaucguccacaccuccacccucuccggcuccgcccagcacgucgaggagugcuccugcuacccccgcuaccccggcguccgcugcgucugccgcgacaacuggaagggcuccaaccgccccaucgucgacaucaacaucaaggacuacuccaucgucuccuccuacgucugcuccggccucgucggcgacaccccccgcaagaacgacuccuccuccuccucccacugccucgaccccaacaacgaggagggcggccacggcgucaagggcugggccuucgacgacggcaacgacgucuggaugggccgcaccaucuccgagaagcuccgcuccggcuacgagaccuucaaggucaucgagggcugguccaaccccaacuccaagcuccagaucaaccgccaggucaucgucggccgcggcaaccgcuccggcuacuccggcaucuucuccgucgagggcaaguccugcaucaaccgcugcuucuacgucgagcucauccgcggccgcaaggaggagaccgagguccucuggaccuccaacuccaucgucgucuucugcggcaccuccggcaccuacggcaccggcuccuggcccgacggcgccgacaucaaccucaugcccaucuga

SEQ ID NO: 112706 - RNA, 1410 nt, Artificial Sequence; identical to SEQ ID NO: 110363
  derived and/or modified CDS sequence (opt2) from neuraminidase__InfluenzaA__ACO36587

SEQ ID NO: 112707 - RNA, 1410 nt, Artificial Sequence; identical to SEQ ID NO: 110748
  derived and/or modified CDS sequence (opt2) from neuraminidase__InfluenzaA__ACO36609

SEQ ID NO: 112708 - RNA, 1410 nt, Artificial Sequence
  derived and/or modified CDS sequence (opt2) from neuraminidase__InfluenzaA__ACO36620
augaaccccaaccagaagaucaucaccaucggcuccgucucccucaccaucuccaccaucugcuucuucaugcagaucgccauccucaucaccaccgucacccuccacuucaagcaguacgaguucaacuccccccccaacaaccaggucaugcucugcgagcccaccaucaucgagcgcaacaucaccgagaucgucuaccucaccaacaccaccaucgagaaggagaucugccccaagcucgccgaguaccgcaacugguccaagccccagugcaacaucaccggcuucgcccccuucuccaaggacaacuccauccgccucuccgccggcggcgacaucugggucacccgcgagcccuacgucuccugcgaccccgacaagugcuaccaguucgcccucggccagggcaccacccucaacaacguccacuccaacgacaccguccacgaccgcacccccuaccgcacccuccucaugaacgagcucggcguccccuuccaccucggcaccaagcaggucugcaucgccugguccuccuccuccugccacgacggcaaggccuggcuccacgucugcgucaccggcgacgacaagaacgccaccgccuccuucaucuacaacggccgccucgucgacuccaucgucuccugguccaaggagauccuccgcacccaggaguccgagugcgucugcaucaacggcaccugcaccgucgucaugaccgacggcuccgccuccggcaaggccgacaccaagauccucuucaucgaggagggcaagaucguccacaccuccacccucuccggcuccgcccagcacgucgaggagugcuccugcuacccccgcuaccccggcguccgcugcgucugccgcgacaacuggaagggcuccaaccgccccaucgucgacaucaacaucaaggacuacuccaucgucuccuccuacgucugcuccggccucgucggcgacaccccccgcaagaacgacuccuccuccuccucccacugccucgaccccaacaacgaggagggcggccacggcgucaagggcugggccuucgacgacggcaacgacgucuggaugggccgcaccaucuccgagaagcuccgcuccggcuacgagaccuucaaggucaucgagggcugguccaaccccaacuccaagcuccaggucaaccgccaggucaucgucgaccgcggcaaccgcuccggcuacuccggcaucuucuccgucgagggcaaguccugcaucaaccgcugcuucuacgucgagcucauccgcggccgcaaggaggagaccgagguccucuggaccuccaacuccaucgucgucuucugcggcaccuccggcaccuacggcaccggcuccuggcccgacggcgccgacaucaaccucaugcccaucuga

SEQ ID NO: 112709 - RNA, 1410 nt, Artificial Sequence; identical to SEQ ID NO: 110748
  derived and/or modified CDS sequence (opt2) from neuraminidase__InfluenzaA__ACO36631

SEQ ID NO: 112710 - RNA, 1410 nt, Artificial Sequence; identical to SEQ ID NO: 110748
  derived and/or modified CDS sequence (opt2) from neuraminidase__InfluenzaA__ACO36653

SEQ ID NO: 112711 - RNA, 1410 nt, Artificial Sequence
  derived and/or modified CDS sequence (opt2) from neuraminidase__InfluenzaA__ACO36675
augaaccccaaccagaagaucaucaccaucggcuccgucucccucaccaucuccaccaucugccucuucaugcagaucgccauccucaucaccaccgucacccuccacuucaagcaguacgaguucaacuccccccccaacaaccaggucaugcucugcgagcccaccaucaucgagcgcaacaucaccgagaucgucuaccucaccaacaccaccaucgagaaggagaucugccccaagcucgccgaguaccgcaacugguccaagccccagugcaacaucaccggcuucgcccccuucuccaaggacaacuccauccgccucuccgccggcggcgacaucugggucacccgcgagcccuacgucuccugcgaccccgacaagugcuaccaguucgcccucggccagggcaccacccucaacaacguccacuccaacgacaccguccacgaccgcacccccuaccgcacccuccucaugaacgagcucggcguccccuuccaccucggcaccaagcaggucugcaucgccugguccuccuccuccugccacgacggcaaggccuggcuccacgucugcgucaccggcgacgacaagaacgccaccgccuccuucaucuacaacggccgccucgucgacuccaucgucuccugguccaaggagauccuccgcacccaggaguccgagugcgucugcaucaacggcaccugcaccgucgucaugaccgacggcuccgccuccggcaaggccgacaccaagauccucuucaucgaggagggcaagaucguccacaccuccacccucuccggcuccgcccagcacgucgaggagugcuccugcuacccccgcuaccccggcguccgcugcgucugccgcgacaacuggaagggcuccaaccgccccaucgucgacaucaacaucaaggacuacuccaucgucuccuccuacgucugcuccggccucgucggcgacaccccccgcaagaacgacuccuccuccuccucccacugccucgaccccaacaacgaggagggcggccacggcgucaagggcugggccuucgacgacggcaacgacgucuggaugggccgcaccaucuccgagaagcuccgcuccggcuacgagaccuucaaggucaucgagggcugguccaaccccaacuccaagcuccagaucaaccgccaggucaucgucgaccgcggcaaccgcuccggcuacuccggcaucuucuccgucgagggcaaguccugcaucaaccgcugcuucuacgucgagcucauccgcggccgcaaggaggagaccgagguccucuggaccuccaacuccaucgucgucuucugcggcaccuccggcaccuacggcaccggcuccuggcccgacggcgccgacaucaaccucaugcccaucuga

SEQ ID NO: 112712 - RNA, 1410 nt, Artificial Sequence
  derived and/or modified CDS sequence (opt2) from neuraminidase__InfluenzaA__ACO36686
augaaccccaaccagaagaucaucaccaucggcuccgucucccucaccaucuccaccaucugcuucuucaugcagaucgccauccucaucaccaccgucacccuccacuucaagcaguacgaguucaacuccccccccaacaaccaggucaugcucugcgagcccaccaucaucgagcgcaacaucaccgagaucgucuaccucaccaacaccaccaucgagaaggagaucugccccaagcucgccgaguaccgcaacugguccaagccccagugcaacaucaccggcuucgcccccuucuccaaggacaacuccauccgccucuccgccggcggcgacaucugggucacccgcgagcccuacgucuccugcgaccacgacaagugcuaccaguucgcccucggccagggcaccacccucaacaacguccacuccaacgacaccguccacgaccgcacccccuaccgcacccuccucaugaacgagcucggcguccccuuccaccucggcaccaagcaggucugcaucgccugguccuccuccuccugccacgacggcaaggccuggcuccacgucugcgucaccggcgacgacaagaacgccaccgccuccuucaucuacaacggccgccucgucgacuccaucgucuccugguccaaggagauccuccgcacccaggaguccgagugcgucugcaucaacggcaccugcaccgucgucaugaccgacggcuccgccuccggcaaggccgacaccaagauccucuucaucgaggagggcaagaucguccacaccuccacccucuccggcuccgcccagcacgucgaggagugcuccugcuacccccgcuaccccggcguccgcugcgucugccgcgacaacuggaagggcuccaaccgccccaucgucgacaucaacaucaaggacuacuccaucgucuccuccuacgucugcuccggccucgucggcgacaccccccgcaagaacgacuccuccuccuccucccacugccucgaccccaacaacgaggagggcggccacggcgucaagggcugggccuucgacgacggcaacgacgucuggaugggccgcaccaucuccgagaagcuccgcuccggcuacgagaccuucaaggucaucgagggcugguccaaccccaacuccaagcuccagaucaaccgccaggucaucgucgaccgcggcaaccgcuccggcuacuccggcaucuucuccgucgagggcaaguccugcaucaaccgcugcuucuacgucgagcucauccgcggccgcaaggaggagaccgagguccucuggaccuccaacuccaucgucgucuucugcggcaccuccggcaccuacggcaccggcuccuggcccgacggcgccgacaucaaccucaugcccaucuga

SEQ ID NO: 112713 - RNA, 1410 nt, Artificial Sequence
  derived and/or modified CDS sequence (opt2) from neuraminidase__InfluenzaA__ACO37125
augaaccccaaccagaagaucaucaccaucggcuccgucucccucaccaucuccaccaucugcuucuucaugcagaucgccauccucaucaccaccgucacccuccacuucaagcaguacgaguucaacuccccccccaacaaccaggucaugcucugcgagcccaccaucaucgagcgcaacaucaccgagaucgucuaccucaccaacaccaccaucgagaaggagaucugccccaagcucgccgaguaccgcaacugguccaagccccagugcgacaucaccggcuucgcccccuucuccaaggacaacuccauccgccucuccgccggcggcgacaucugggucacccgcgagcccuacgucuccugcgaccccgacaagugcuaccaguucgcccucggccagggcaccacccucaacaacguccacuccaacgacaccguccacgaccgcacccccuaccgcacccuccucaugaacgagcucggcguccccuuccaccucggcaccaagcaggucugcaucgccugguccuccuccuccugccacgacggcaaggccuggcuccacgucugcgucaccggcgacgacaagaacgccaccgccuccuucaucuacaacggcaugcucgucgacuccaucgucuccugguccaaggagauccuccgcacccaggaguccgagugcgucugcaucaacggcaccugcaccgucgucaugaccgacggcuccgccuccggcaaggccgacaccaagauccucuucaucgaggagggcaagaucguccacaccuccacccucuccggcuccgcccagcacgucgaggagugcuccugcuacccccgcuaccccggcguccgcugcgucugccgcgacaacuggaagggcuccaaccgccccaucgucgacaucaacaucaaggacuacuccaucgucuccuccuacgucugcuccggccucgucggcgacaccccccgcaagaacgacuccuccuccuccucccacugccucgaccccaacaacgaggagggcggccacggcgucaagggcugggccuucgacgacggcaacgacgucuggaugggccgcaccaucuccgagaagcuccgcuccggcuacgagaccuucaaggucaucgagggcugguccaaccccaacuccaagcuccagaucaaccgccaggucaucgucgaccgcggcaaccgcuccggcuacuccggcaucuucuccgucgagggcaaguccugcaucaaccgcugcuucuacgucgagcucauccgcggccgcaaggaggagaccgagguccucuggaccuccaacuccaucgucgucuucugcggcaccuccggcaccuacggcaccggcuccuggcccgacggcgccgacaucaaccucaugcccaucuga

SEQ ID NO: 112714 - RNA, 1410 nt, Artificial Sequence
  derived and/or modified CDS sequence (opt2) from neuraminidase__InfluenzaA__ACO94511
augaaccccaaccagaagaucaucaccaucggcuccgucucccucaccaucuccaccaucugcuucuucaugcagaucgccauccucaucaccaccgucacccuccacuucaagcaguacgaguucaacuccccccccaacaaccaggucaugcucugcgagcccaccaucaucgagcgcaacaucaccgagaucgucuaccucaccaacaccaccaucgagaaggagaucugccccaagcucgccgaguaccgcaacugguccaagccccagugcgacaucaccggcuucgcccccuucuccaaggacaacuccauccgccucuccgccggcggcgacaucugggucacccgcgagcccuacgucuccugcgaccccgacaagugcuaccaguucgcccucggccagggcaccacccucaacaacguccacuccaacgacaccguccgcgaccgcacccccuaccgcacccuccucaugaacgagcucggcguccccuuccaccucggcaccaagcaggucugcaucgccugguccuccuccuccugccacgacggcaaggccuggcuccacgucugcaucaccggcgacgacaagaacgccaccgccuccuucaucuacaacggccgccucgucgacuccgucgucuccugguccaaggagauccuccgcacccaggaguccgagugcgucugcaucaacggcaccugcaccgucgucaugaccgacggcuccgccuccggcaaggccgacaccaagauccucuucaucgaggagggcaagaucguccacaccuccacccucuccggcuccgcccagcacgucgaggagugcuccugcuacccccgcuaccccggcguccgcugcgucugccgcgacaacuggaagggcuccaaccgccccaucgucgacaucaacaucaaggaccacuccaucgucuccuccuacgucugcuccggccucgucggcgacaccccccgcaagaacgacuccuccuccuccuccaacugccucgaccccaacaacgaggagggcggccacggcgucaagggcugggccuucgacgacggcaacgacgucuggaugggccgcaccaucuccgagaagucccgccucggcuacgagaccuucaaggucaucgagggcugguccaaccccaaguccaagcuccagaucaaccgccaggucaucgucgaccgcggcaaccgcuccggcuacuccggcaucuucuccgucgagggcaaguccugcaucaaccgcugcuucuacgucgagcucauccgcggccgcaaggaggagaccgagguccucuggaccuccaacuccaucgucgucuucugcggcaccuccggcaccuacggcaccggcuccuggcccgacggcgccgacaucaaccucaugcccaucuga

SEQ ID NO: 112715 - RNA, 1410 nt, Artificial Sequence; identical to SEQ ID NO: 112548
  derived and/or modified CDS sequence (opt2) from neuraminidase__InfluenzaA__ACO94512

SEQ ID NO: 112716 - RNA, 1410 nt, Artificial Sequence; identical to SEQ ID NO: 112635
  derived and/or modified CDS sequence (opt2) from neuraminidase__InfluenzaA__ACO94513

SEQ ID NO: 112717 - RNA, 1410 nt, Artificial Sequence
  derived and/or modified CDS sequence (opt2) from neuraminidase__InfluenzaA__ACO94675
augaaccccaaccagaagaucaucaccaucggcuccgucucccucaccaucuccaccaucugcuucuucaugcagaucgccauccucaucaccaccgucacccuccacuucaagcaguacgaguucaacuccccccccaacaaccaggucaugcucugcgagcccaccaucaucgagcgcaacaucaccgagaucgucuaccucaccaacaccaccaucgagaaggagaucugccccaagcucgccgaguaccgcaacugguccaagccccagugcgacaucaccggcuucgcccccuucuccaaggacaacuccauccgccucuccgccggcggcgacaucugggucacccgcgagcccuacgucuccugcgaccccgacaagugcuaccaguucgcccucggccagggcaccacccucaacaacguccacuccaacgacaccguccgcgaccgcacccccuaccgcacccuccucaugaacgagcucggcguccccuuccaccucggcaccaagcaggucugcaucgccugguccuccuccuccugccacgacggcaaggccuggcuccacgucugcaucaccggcgacgacaagaacgccaccgccuccuucaucuacaacggccgccucgucgacuccgucgucuccugguccaaggagauccuccgcacccaggaguccgagugcgucugcaucaacggcaccugcaccgucgucaugaccgacggcuccgccuccggcaaggccgacaccaagauccucuucaucgaggagggcaagaucguccacaccuccacccucuccggcuccgcccagcacgucgaggagugcuccugcuacccccgcuaccccggcguccgcugcgucugccgcgacaacuggaagggcuccaaccgccccaucgucgacaucaacaucaagaaccacuccaucgucuccuccuacgucugcuccggccucgucggcgacaccccccgcaagaacgacuccuccuccuccucccacugccucgaccccaacaacgaggagggcggccacggcgucaagggcugggccuucgacgacggcaacgacgucuggaugggccgcaccaucuccgagaagucccgccucggcuacgagaccuucaaggucaucgagggcugguccaaccccaaguccaagcuccagaucaaccgccaggucaucgucgaccgcggcaaccgcuccggcuacuccggcaucuucuccgucgagggcaaguccugcaucaaccgcugcuucuacgucgagcucauccgcggccgcaaggaggagaccgagguccucuggaccuccaacuccaucgucgucuucugcggcaccuccggcaccuacggcaccggcuccuggcccgacggcgccgacaucaaccucaugcccaucuga

SEQ ID NO: 112718 - RNA, 1410 nt, Artificial Sequence
  derived and/or modified CDS sequence (opt2) from neuraminidase__InfluenzaA__ACO94686
augaaccccaaccagaagaucaucaccaucggcuccgucucccucaccaucuccaccaucugcuucuucaugcagaucgccauccucaucaccaccgucacccuccacuucaagcaguacgaguucaacuccccccccaacaaccaggucaugcucugcgagcccaccaccaucgagcgcaacaucaccgagaucgucuaccucaccaacaccaccaucgagaaggagaucugccccaagcucgccgaguaccgcaacugguccaagccccagugcgacaucaccggcuucgcccccuucuccaaggacaacuccauccgccucuccgccggcggcgacaucugggucacccgcgagcccuacgucuccugcgaccccgacaagugcuaccaguucgcccucggccagggcaccacccucaacaacguccacuccaacgacaccguccgcgaccgcacccccuaccgcacccuccucaugaacgagcucggcguccccuuccaccucggcaccaagcaggucugcaucgccugguccuccuccuccugccacgacggcaaggccuggcuccacgucugcaucaccggcgacgacaagaacgccaccgccuccuucaucuacaacggccgccucgucgacuccaucgucuccugguccaaggacauccuccgcacccaggaguccgagugcgucugcaucaacggcaccugcaccgucgucaugaccgacggcuccgccuccggcaaggccgacaccaagauccucuucaucgaggagggcaagaucguccacaccuccacccucuccggcuccgcccagcacgucgaggagugcuccugcuacccccgcuaccccggcguccgcugcgucugccgcgacaacuggaagggcuccaaccgccccaucgucgacaucaacaucaaggaccacuccaucgucuccuccuacgucugcuccggccucgucggcgacaccccccgcaagaacgacuccuccuccuccggccacugccucgaccccaacaacgaggagggcggccacggcgucaagggcugggccuucgacgacggcaacgacgucuggaugggccgcaccaucuccgagaagucccgccucggcuacgagaccuucaaggucaucgagggcugguccaaccccaaguccaagcuccagaucaaccgccaggucaucgucgaccgcggcaaccgcuccggcuacuccggcaucuucuccgucgagggcaaguccugcaucaaccgcugcuucuacgucgagcucauccgcggccgcaaggaggagaccgagguccucuggaccuccaacuccaucgucgucuucugcggcaccuccggcaccuacggcaccggcuccuggcccgacggcgccgagaucaaccucaugcccaucuga

SEQ ID NO: 112719 - RNA, 1410 nt, Artificial Sequence; identical to SEQ ID NO: 112635
  derived and/or modified CDS sequence (opt2) from neuraminidase__InfluenzaA__ACO94697

SEQ ID NO: 112720 - RNA, 1413 nt, Artificial Sequence; identical to SEQ ID NO: 112668
  derived and/or modified CDS sequence (opt2) from neuraminidase__InfluenzaA__ACO94708

SEQ ID NO: 112721 - RNA, 1410 nt, Artificial Sequence
  derived and/or modified CDS sequence (opt2) from neuraminidase__InfluenzaA__ACO94719
augaaccccaaccagaagaucaucaccaucggcuccgucucccucaccaucuccaccaucugcuucuucaugcagaucgccauccucaucaccaccgucacccuccacuucaagcaguacgaguucaacuccccccccaacaaccaggucaugcucugcgagcccaccaucaucgagcgcaacaucaccgagaucgucuaccucaccaacaccaccaucgagaaggagaucugccccaagcucgccgaguaccgcaacugguccaagccccagugcgacaucaccggcuucgcccccuucuccaaggacaacuccauccgccucuccgccggcggcgacaucugggucacccgcgagcccuacgucuccugcgaccccgacaagugcuaccaguucgcccucggccagggcaccacccucaacaacguccacuccaacgacaccguccgcgaccgcacccccuaccgcacccuccucaugaacgagcucggcguccccuuccaccucggcaccaagcaggucugcaucgccugguccuccuccuccugccacgacggcaaggccuggcuccacgucugcaucaccggcgacgacaagaacgccaccgccuccuucaucuacaacggccgccucgucgacuccaucgucuccugguccaaggacauccuccgcacccaggaguccgagugcgucugcaucaacggcaccugcaccgucgucaugaccgacggcuccgccuccggcaaggccgacaccaagauccucuucaucgaggagggcaagaucguccacaccuccacccucuccggcuccgcccagcacgucgaggagugcuccugcuacccccgcuaccccggcguccgcugcgucugccgcgacaacuggaagggcuccaaccgccccaucgucgacaucaacaucaaggaccacuccaucgucuccuccuacgucugcuccggccucgucggcgacaccccccgcaagaacgacuccuccuccuccggccacugccucgaccccaacaacgaggagggcggccacggcgucaagggcugggccuucgacgacggcaacgacgucuggaugggccgcaccaucuccgagaagucccgccucggcuacgagaccuucaaggucaucgagggcugguccaaccccaaguccaagcuccagaucaaccgccaggucaucgucgaccgcggcaaccgcuccggcuacuccggcaucuucuccgucgagggcaaguccugcaucaaccgcugcuucuacgucgagcucauccgcggccgcaaggaggagaccgagguccucuggaccuccaacuccaucgucgucuucugcggcaccuccggcaccuacggcaccggcuccuggcccgacggcgccgagaucaaccucaugcccaucuga

SEQ ID NO: 112722 - RNA, 1410 nt, Artificial Sequence
  derived and/or modified CDS sequence (opt2) from neuraminidase__InfluenzaA__ACO94741
augaaccccaaccagaagaucaucaccaucggcuccgucucccucaccaucuccaccaucugcuucuucaugcagaucgccauccucaucaccaccgucacccuccacuucaagcaguacgaguucaacuccucccccaacaaccaggucaugcucugcgagcccaccaucaucgagcgcaacaucaccgagaucgucuaccucaccaacaccaccaucgagaaggagaucugccccaagcucgccgaguaccgcaacugguccaagccccagugcgacaucaccggcuucgcccccuucuccaaggacaacuccauccgccucuccgccggcggcgacaucugggucacccgcgagcccuacgucuccugcgaccccgacaagugcuaccaguucgcccucggccagggcaccacccucaacaacguccacuccaacaacaccguccgcgaccgcacccccuaccgcacccuccucaugaacgagcucggcguccccuuccaccucggcaccaagcaggucugcaucgccugguccuccuccuccugccacgacggcaaggccuggcuccacgucugcaucaccggcgacgacaagaacgccaccgccuccuucaucuacaacggccgccucgucgacuccaucgucuccugguccaaggagauccuccgcacccaggaguccgagugcgucugcaucaacggcaccugcaccgucgucaugaccgacggcuccgccuccggcaaggccgacaccaagauccucuucaucgaggagggcaagaucguccacaccuccacccucuccggcuccgcccagcacgucgaggagugcuccugcuacccccgcuaccccggcguccgcugcgucugccgcgacaacuggaagggcuccaaccgccccaucgucgacaucaacaucaaggaccacuccaucgucuccuccuacgucugcuccggccucgucggcgacaccccccgcaagaacgacuccuccuccuccucccacugccucgaccccaacaacgaggagggcggccacggcgucaagggcugggccuucgacgacggcaacgacgucuggaugggccgcaccaucuccgagaagucccgccucggcuacgagaccuucaaggucaucgagggcugguccaaccccaaguccaagcuccagaucaaccgccaggucaucgucgaccgcggcaaccgcuccggcuacuccggcaucuucuccgucgaguccaaguccugcaucaaccgcugcuucuacgucgagcucauccgcggccgcaaggaggagaccgagguccucuggaccuccaacuccaucgucgucuucugcggcaccuccggcaccuacggcaccggcuccuggcccgacggcgccgacaucaaccucaugcccaucuga

SEQ ID NO: 112723 - RNA, 1410 nt, Artificial Sequence; identical to SEQ ID NO: 112639
  derived and/or modified CDS sequence (opt2) from neuraminidase__InfluenzaA__ACO94763

SEQ ID NO: 112724 - RNA, 1410 nt, Artificial Sequence
  derived and/or modified CDS sequence (opt2) from neuraminidase__InfluenzaA__ACO94774
augaaccccaaccagaagaucaucaccaucggcuccgucucccucaccaucuccaccaucugcuucuucaugcagaucgccauccucaucaccaccgucacccuccacuucaagcaguacgaguucaacuccccccccaacaaccaggucaugcucugcgagcccaccaucaucgagcgcaacaucaccgagaucgucuaccucaccaacaccaccaucgagaaggagaucugccccaagcucgccgaguaccgcaacugguccaagccccagugcgacaucaccggcuucgcccccuucuccaaggacaacuccauccgccucuccgccggcggcgacaucugggucacccgcgagcccuacgucuccugcgaccccgacaagugcuaccaguucgcccucggccagggcaccacccucaacaacguccacuccaacaacaccguccgcgaccgcacccccuaccgcacccuccucaugaacgagcucggcguccccuuccaccucggcaccaagcaggucugcauggccugguccuccuccuccugccacgacggccgcgccuggcuccacgucugcaucaccggcgacgacaagaacgccaccgccuccuucaucuacaacggccgccucgucgacuccgucgucuccugguccaaggagauccuccgcacccaggaguccgagugcgucugcaucaacggcaccugcaccgucgucaugaccgacggcuccgccuccggcaaggccgacaccaagauccucuucaucgaggagggcaagaucguccacaccuccacccucuccggcuccgcccagcacgucgaggagugcuccugcuacccccgcuaccccggcguccgcugcgucugccgcgacaacuggaagggcuccaaccgccccaucgucgacaucaacaucaaggaccacuccaucgucuccuccuacgucugcuccggccucgucggcgacaccccccgcaagaacgacuccuccuccuccucccacugccucgaccccaacaacgaggagggcggccacggcgucaagggcugggccuucgacgacggcaacgacgucuggaugggccgcaccaucuccgagaagucccgccucggcuacgagaccuucaaggucaucgagggcugguccaaccccaaguccaagcuccagaucaaccgccaggucaucgucgaccgcggcaaccgcuccggcuacuccggcaucuucuccgucgagggcaaguccugcaucaaccgcugcuucuacgucgagcucauccgcggccgcaaggaggagaccgagguccucuggaccuccaacuccaucgucgucuucugcggcaccuccggcaccuacggcaccggcuccuggcccgacggcgccgacaucaaccucaugcccaucuga

SEQ ID NO: 112725 - RNA, 1410 nt, Artificial Sequence
  derived and/or modified CDS sequence (opt2) from neuraminidase__InfluenzaA__ACO94785
augaaccccaaccagaagaucaucaccaucggcuccgucucccucaccaucuccaccaucugcuucuucaugcagaucgccauccucaucaccaccgucacccuccacuucaagcaguacgaguucaacuccccccccaacaaccaggucaugcucugcaagcccaccaucaucgagcgcaacaucaccgagaucgucuaccucaccaacaccaccaucgagaaggagaucugccccaagcucgccgaguaccgcaacugguccaagccccagugcgacaucaccggcuucgcccccuucuccaaggacaacuccauccgccucuccgccggcggcgacaucugggucacccgcgagcccuacgucuccugcgaccccgacaagugcuaccaguucgcccucggccagggcaccacccucaacaacguccacuccaacaacaccguccgcgaccgcacccccuaccgcacccuccucaugaacgagcucggcguccccuuccaccucggcaccaagcaggucugcaucgccugguccuccuccuccugccacgacggcaaggccuggcuccacgucugcaucaccggcgacgacaagaacgccaccgccuccuucaucuacaacggccgccucgucgacuccgucgucuccugguccaaggagauccuccgcacccaggaguccgagugcgucugcaucaacggcaccugcaccgucgucaugaccgacggcuccgccuccggcaaggccgacaccaagauccucuucaucgaggagggcaagaucguccacaccuccacccucuccggcuccgcccagcacgucgaggagugcuccugcuacccccgcuaccccggcguccgcugcgucugccgcgacaacuggaagggcuccaaccgccccaucgucgacaucaacaucaaggaccacuccaucgucuccuccuacgucugcuccggccucgucggcgacaccccccgcaagaacgacuccuccuccuccucccacugccucgaccccaacaacgaggagggcggccacggcgucaagggcugggccuucgacgacggcaacgacgucuggaugggccgcaccaucuccgagaagucccgccucggcuacgagaccuucaaggucaucgagggcugguccaaccccaaguccaagcuccagaucaaccgccaggucaucgucgaccgcggcaaccgcuccggcuacuccggcaucuucuccgucgagggcaaguccugcaucaaccgcugcuucuacgucgagcucauccgcggccgcaaggaggagaccgagguccucuggaccuccaacuccaucgucgucuucugcggcaccuccggcaccuacggcaccggcuccuggcccgacggcgccgacaucaaccucaugcccaucuga

SEQ ID NO: 112726 - RNA, 1410 nt, Artificial Sequence; identical to SEQ ID NO: 112635
  derived and/or modified CDS sequence (opt2) from neuraminidase__InfluenzaA__ACO94796

SEQ ID NO: 112727 - RNA, 1413 nt, Artificial Sequence
  derived and/or modified CDS sequence (opt2) from neuraminidase__InfluenzaA__ACO94807
augaaccccaaccagaagaucaucaccaucggcuccaucuccaucgccaucggcaucaucucccucauccuccagaucggcaacaucaucuccaucugggccucccacuccauccagaccggcucccagaaccacaccggcaucugcaaccagcgcaucaucaccuacgagaacuccaccugggucaacaacaccuacgucaacaucaacaacaccaacgucgucgccgagaaggacaagaccuccgucacccucgccggcaacuccucccucugcuccaucuccggcugggccaucuacaccaaggacaacuccauccgcaucggcuccaagggcgacgucuucgucauccgcgagcccuucaucuccugcucccaccucgagugccgcaccuucuuccucacccagggcgcccuccucaacgacaagcacuccaacggcaccgucaaggaccgcucccccuaccgcgcccucauguccugcccccucggcgaggcccccucccccuacaacucccgcuucgaguccgucgccugguccgccuccgccugccacgacggcaugggcuggcucaccaucggcaucuccggccccgacaacggcgccgucgccguccucaaguacaacggcaucaucaccgagaccaucaaguccuggaagaagcgcauccuccgcacccaggaguccgagugcgucugcaugaacggcuccugcuucaccaucaugaccgacggccccuccaacggcaccgccuccuacaagaucuucaagaucgagaagggcaaggucaccaagaccaucgagcucaacgcccccaacuuccacuacgaggagugcuccugcuaccccgacaccggcaccgucaugugcgucugccgcgacaacuggcacggcuccaaccgccccugggucuccuucaaccagaaccucgacuaccagaucggcuacaucugcuccggcgucuucggcgacaacccccgccccaaggacggcgagggcuccugcaaccccgucaccgucgacggcgccgacggcgucaagggcuucuccuacaaguacggcaacggcgucuggaucggccgcaccaaguccaaccgccuccgcaagggcuucgagaugaucugggaccccaacggcuggaccaacaccgacuccgacuucuccgucaagcaggacgucgucgccaucaccgacugguccggcuacuccggcuccuucguccagcaccccgagcucaccggccucgacugcauccgccccugcuucugggucgagcucguccgcggccucccccgcgagaacaccaccaucuggaccuccggcuccuccaucuccuucugcggcgucaacuccggcaccgccaacugguccuggcccgacggcgccgagcuccccuucaccaucgacaaguga

SEQ ID NO: 112728 - RNA, 1410 nt, Artificial Sequence; identical to SEQ ID NO: 112450
  derived and/or modified CDS sequence (opt2) from neuraminidase__InfluenzaA__ACO94818

SEQ ID NO: 112729 - RNA, 1365 nt, Artificial Sequence; identical to SEQ ID NO: 111755
  derived and/or modified CDS sequence (opt2) from neuraminidase__InfluenzaA__ACO94829

SEQ ID NO: 112730 - RNA, 1365 nt, Artificial Sequence; identical to SEQ ID NO: 111755
  derived and/or modified CDS sequence (opt2) from neuraminidase__InfluenzaA__ACO94840

SEQ ID NO: 112731 - RNA, 1410 nt, Artificial Sequence
  derived and/or modified CDS sequence (opt2) from neuraminidase__InfluenzaA__ACO94851
augaaccccaaccagaagaucaucaccaucggcuccgucucccucaccaucuccaccaucugcuucuucaugcagaccgccauccucaucaccaccgucacccuccacuucaagcaguacgaguucaacuccccccccaacaaccaggucaugcucugcgagcccaccaucaucgagcgcaacaucaccgagaucgucuaccucaccaacaccaccaucgagaaggagaucugccccaagcucgccgaguaccgcaacugguccaagccccagugcgacaucaccggcuucgcccccuucuccaaggacaacuccauccgccucuccgccggcggcgacaucugggucacccgcgagcccuacgucuccugcgaccccgacaagugcuaccaguucgcccucggccagggcaccacccucaacaacguccacuccaacgacaucguccgcgaccgcacccccuaccgcacccuccucaugaacgagcucggcguccccuuccaccucggcaccaagcaggucugcaucgccugguccuccuccuccugccacgacggcaaggccuggcuccacgucugcaucaccggcgacgacaagaacgccaccgccuccuucaucuacaacggccgccucgucgacuccaucgucuccugguccaaggagauccuccgcacccaggaguccgagugcgucugcaucaacggcaccugcaccgucgucaugaccgacggcuccgccuccggcaaggccgacaccaagauccucuucaucgaggagggcaagaucguccacaccuccacccucuccggcuccgcccagcacgucgaggagugcuccugcuacccccgcuaccccggcguccgcugcgucugccgcgacaacuggaagggcuccaaccgccccaucgucgacaucaacaucaaggaccacuccaucgucuccuccuacgucugcuccggccucgucggcgacaccccccgcaagaacgacuccuccuccuccucccacugccucgaccccaacaacgaggagggcggccacggcgucaagggcugggccuucgacgacggcaacgacgucuggaugggccgcaccaucuccgagaagucccgccucggcuacgagaccuucaaggucaucgagggcugguccaaccccaaguccaagcuccagaucaaccgccaggucaucgucgaccgcggcaaccgcuccggcuacuccggcaucuucuccgucgagggcaaguccugcaucaaccgcugcuucuacgucgagcucauccgcggccgcaaggaggagaccgagguccucuggaccuccaacuccaucgucgucuucugcggcaccuccggcaccuacggcaccggcuccuggcccgacggcgccgacaucaaccucaugcccaucuga

SEQ ID NO: 112732 - RNA, 1413 nt, Artificial Sequence; identical to SEQ ID NO: 112668
  derived and/or modified CDS sequence (opt2) from neuraminidase__InfluenzaA__ACO94873

SEQ ID NO: 112733 - RNA, 1410 nt, Artificial Sequence
  derived and/or modified CDS sequence (opt2) from neuraminidase__InfluenzaA__ACO94884
augaaccccaaccagaagaucaucaccaucggcuccgucucccucaccaucgccaccaucugcuuccucaugcagaucgccauccucgucaccaccgucacccuccacuucaagcagcacgagugcaacuccccccccaacaaccaggucaugcucugcgagcccaccaucaucgagcgcaacaucaccgagaucgucuaccucaccaacaccaccaucgagaaggagaugugccccaagcucgccgaguaccgcaacugguccaagccccagugcaacaucaccggcuucgcccccuucuccaaggacaacuccauccgccucuccgccggcggcgacaucugggucacccgcgagcccuacgucuccugcgaccccgacaagugcuaccaguucgcccucggccagggcaccacccucaacaacggccacuccaacgacaccguccacgaccgcacccccuaccgcacccuccucaugaacgagcucggcguccccuuccaccucggcacccgccaggucugcaucgccugguccuccuccuccugccacgacggcaaggccuggcuccacgucugcgucaccggcgacgacaagaacgccaccgccuccuucaucuacaacggccgccucgucgacuccaucggcuccugguccaagaagauccuccgcacccaggaguccgagugcgucugcaucaacggcaccugcaccgucgucaugaccgacggcuccgccuccggcaaggccgacaccaagauccucuucaucgaggagggcaagaucguccacaucuccacccucuccggcuccgcccagcacgucgaggagugcuccugcuacccccgcuaccccggcguccgcugcgucugccgcgacaacuggaagggcuccaaccgccccaucgucgacaucaacgucaaggacuacuccaucgucuccuccuacgucugcuccggccucgucggcgacaccccccgcaagaacgacuccuucuccuccucccacugccucgaccccaacaacgaggagggcggccacggcgucaagggcugggccuucgacgacggcaacgacgucuggaugggccgcaccaucuccgagaagcuccgcuccggcuacgagaccuucaaggucaucgagggcugguccaagcccaacuccaagcuccagaucaaccgccaggucaucgucgagcgcggcaaccgcuccggcuacuccggcaucuucuccgucgagggcaaguccugcaucaaccgcugcuucuacgucgagcucauccgcggccgcaaggaggagaccgaggucugguggaccuccaacuccaucgucgucuucugcggcaccuccggcaccuacggcaccggcuccuggcccgacggcgccgacaucaaccucaugcccaucuga

SEQ ID NO: 112734 - RNA, 1410 nt, Artificial Sequence; identical to SEQ ID NO: 110750
  derived and/or modified CDS sequence (opt2) from neuraminidase__InfluenzaA__ACO94906

SEQ ID NO: 112735 - RNA, 1410 nt, Artificial Sequence; identical to SEQ ID NO: 110181
  derived and/or modified CDS sequence (opt2) from neuraminidase__InfluenzaA__ACO94917

SEQ ID NO: 112736 - RNA, 1410 nt, Artificial Sequence; identical to SEQ ID NO: 110750
  derived and/or modified CDS sequence (opt2) from neuraminidase__InfluenzaA__ACO94928

SEQ ID NO: 112737 - RNA, 1410 nt, Artificial Sequence; identical to SEQ ID NO: 110181
  derived and/or modified CDS sequence (opt2) from neuraminidase__InfluenzaA__ACO94939

SEQ ID NO: 112738 - RNA, 1410 nt, Artificial Sequence
  derived and/or modified CDS sequence (opt2) from neuraminidase__InfluenzaA__ACO94950
augaaccccaaccagaagaucaucaccaucggcuccgucucccucaccaucuccaccaucugcuuccucaugcagaucgccauccucaucaccaccgucacccuccacuucaagcaguacgaguucaacuccccccccaacaaccaggucaugcucugcgagcccaccaucaucgagcgcaacaucaccgagaucgucuaccucaccaacaccaccaucgagaaggagaucugccccaagcucgccgaguaccgcaacugguccaagccccagugcgacaucaccggcuucgcccccuucuccaaggacaacuccauccgccucuccgccggcggcgacaucugggucacccgcgagcccuacgucuccugcgaccccgacaagugcuaccaguucgcccucggccagggcaccacccucaacaacguccacuccaacgacaccguccacgaccgcacccccuaccgcacccuccucaugaacgagcucggcguccccuuccaccucggcaccaagcaggucugcaucgccugguccuccuccuccugccacgacggcaaggccuggcuccacgucugcgucaccggcgacgacaagaacgccaccgccuccuucaucuacaacggccgccucgucgacuccaucgucuccugguccaagaagauccuccgcacccaggaguccgagugcgucugcaucaacggcaccugcaccgucgucaugaccgacggcuccgccuccggcaaggccgacaccaagauccucuucaucgaggagggcaagaucguccacaccuccacccucuccggcuccgcccagcacgucgaggagugcuccugcuacccccgcuaccccggcguccgcugcgucugccgcgacaacuggaagggcuccaaccgccccaucgucgacaucaacaucaaggacuacuccaucgucuccuccuacgucugcuccggccucgucggcgacaccccccgcaagaacgacuccuccuccuccucccacugccucgaccccaacaacgaggagggcggccacggcgucaagggcugggccuucgacgacggcaacgacgucuggaugggccgcaccaucuccgagaagcuccgcuccggcuacgagaccuucaaggucaucgagggcugguccaaccccaacuccaagcuccagaucaaccgccaggucaucgucgaccgcggcaaccgcuccggcuacuccggcaucuucuccgucgagggcaaguccugcaucaaccgcugcuucuacgucgagcucauccgcggccgcaaggaggagaccgagguccucuggaccuccaacuccaucgucgucuucugcggcaccuccggcaccuacggcaccggcuccuggcccgacggcgccgacaucaaccucaugcccaucuga

SEQ ID NO: 112739 - RNA, 1410 nt, Artificial Sequence
  derived and/or modified CDS sequence (opt2) from neuraminidase__InfluenzaA__ACO94961
augaaccccaaccagaagaucaucaccaucggcuccgucucccucaccaucuccaccaucugcuucuucaugcagaucgccauccucaucaccaccgucacccuccacuucaagcaguacgaguucaacuccccccccaacaaccaggucaugcucugcgagcccaccaucaucgagcgcaacaucaccgagaucgucuaccucaccaacaccaccaucgagaaggagcucugccccaagcucgccgaguaccgcaacugguccaagccccagugcgacaucaccggcuucgcccccuucuccaaggacaacuccauccgccucuccgccggcggcgacaucugggucacccgcgagcccuacgucuccugcgaccccgacaagugcuaccaguucgcccucggccagggcaccacccucaacaacguccacuccaacgacaccguccacgaccgcacccccuaccgcacccuccucaugaacgagcucggcguccccuuccaccucggcaccaagcaggucugcaucgccugguccuccuccuccugccacgacggcaaggccuggcuccacgucugcgucaccggcgacgacaagaacgccaccgccuccuucaucuacaacggccgccucgucgacuccaucgucuccugguccaagaagauccuccgcacccaggaguccgagugcgucugcaucaacggcaccugcaccgucgucaugaccgacggcuccgccuccggcaaggccgacaccaagauccucuucaucgaggagggcaagaucguccacaccuccacccucuccggcuccgcccagcacgucgaggagugcuccugcuacccccgcuaccccggcguccgcugcgucugccgcgacaacuggaagggcuccaaccgccccaucgucgacaucaacaucaaggacuacuccaucgucuccuccuacgucugcuccggccucgucggcgacaccccccgcaagaacgacuccuccuccuccucccacugccucgaccccaacaacgaggagggcggccacggcgucaagggcugggccuucgacgacggcaacgacgucuggaugggccgcaccaucuccgagaagcuccgcuccggcuacgagaccuucaaggucaucgagggcugguccaaccccaacuccaagcuccagaucaaccgccaggucaucgucgaccgcggcaaccgcuccggcuacuccggcaucuucuccgucgagggcaaguccugcaucaaccgcugcuucuacgucgagcucauccgcggccgcaaggaggagaccgagguccucuggaccuccaacuccaucgucgucuucugcggcaccuccggcaccuacggcaccggcuccuggcccgacggcgccgacaucaaccucaugcccaucuga

SEQ ID NO: 112740 - RNA, 1410 nt, Artificial Sequence
  derived and/or modified CDS sequence (opt2) from neuraminidase__InfluenzaA__ACO94972
augaaccccaaccagaagaucaucaccaucggcuccgucucccucaccaucuccaccaucugcuucuucaugcagaucgccauccucaucaccaccgucacccuccacuucaagcaguacgaguucaacuccccccccaacaaccaggucaugcucugcgagcccaccaucaucgagcgcaacaucaccgagaucgucuaccucaccaacaccaccaucgagaaggagaucugccccaagcucgccgaguaccgcaacugguccaagccccagugcaacaucaccggcuucgcccccuucuccaaggacaacuccauccgccucuccgccggcggcgacaucugggucacccgcgagcccuacgucuccugcgaccccgacaagugcuaccaguucgcccucggccagggcaccacccucaacaacguccacuccaacgacaccguccacgaccgcacccccuaccgcacccuccucaugaacgagcucggcguccccuuccaccucggcaccaagcaggucugcaucgccugguccuccuccuccugccacgacggcaaggccuggcuccacgucugcgucaccggcgacgacgagaacgccaccgccuccuucaucuacaacggccgccucgucgacuccgucgucuccugguccaagaagauccuccgcacccaggaguccgagugcgucugcaucaacggcaccugcaccgucgucaugaccgacggcuccgccuccggcaaggccgacaccaagauccucuucaucgaggagggcaagaucguccacaccuccacccucuccggcuccgcccagcacgucgaggagugcuccugcuacccccgcuaccccggcguccgcugcgucugccgcgacaacuggaagggcuccaaccgccccaucgucgacaucaacaucaaggacuacuccaucgucuccuccuacgucugcuccggccucgucggcgacaccccccgcaagaacgacuccuccuccuccucccacugccucgaccccaacaacgaggagggcggccacggcgucaagggcugggccuucgacgacggcaacgacgucuggaugggccgcaccaucuccgagaagcuccgcuccggcuacgagaccuucaaggucaucgagggcugguccaaccccaacuccaagcuccagaucaaccgccaggucaucgucgaccgcggcaaccgcuccggcuacuccggcaucuucuccgucgagggcaaguccugcaucaaccgcugcuucuacgucgagcucauccgcggccgcaaccaggagaccgagguccucuggaccuccaacuccaucgucgucuucugcggcaccuccggcaccuacggcaccggcuccuggcccgacggcgccgacaucaaccucaugcccaucuga

SEQ ID NO: 112741 - RNA, 1410 nt, Artificial Sequence
  derived and/or modified CDS sequence (opt2) from neuraminidase__InfluenzaA__ACO95156
augaaccccaaccagaagaucaucaccaucggcuccgucucccucaccaucuccaccaucugcuucuucaugcagaucgccauccucaucaccaccgucacccuccacuucaagcaguacgaguucaacuccccccccaacaaccaggucaugcucugcgagcccaccaucaucgagcgcaacaucaccgagaucgucuaccucaccaacaccaccaucgagaaggagaccugccccaagcucgccgaguaccgcaacugguccaagccccagugcaacaucaccggcuucgcccccuucuccaaggacaacuccauccgccucuccgccggcggcgacaucugggucacccgcgagcccuacgucuccugcgaccccgacaagugcuaccaguucgcccucggccagggcaccacccucaacaacguccacuccaacgacaccguccacgaccgcacccccuaccgcacccuccucaugaacgagcucggcguccccuuccaccucggcaccaagcaggucugcaucgccugguccuccuccuccugccacgacggcaaggccuggcuccacgucugcaucaccggcgacgacaagaacgccaccgccuccuucaucuacaacggccgccucgucgacuccgucgucuccugguccaagaagauccuccgcacccaggaguccgagugcgucugcaucaacggcaccugcaccgucgucaugaccgacggcuccgccuccggcaaggccgacaccaagauccucuucaucgaggagggcaagaucguccacaccuccacccucuccggcuccgcccagcacgucgaggagugcuccugcuacccccgcuaccccggcguccgcugcgucugccgcgacaacuggaagggcuccaaccgccccaucgucgacaucaacaucaaggacuacuccaucgucuccuccuacgucugcuccggccucgucggcgacaccccccgcaagaacgacuccuccuccuccucccacugccucgaccccaacaacgaggagggcggccacggcgucaagggcugggccuucgacgacggcaacgacgucuggaugggccgcaccaucuccgagaagcuccgcuccggcuacgagaccuucaaggucaucgagggcugguccaaccccaacuccaagcuccagaucaaccgccaggucaucgucgaccgcggcaaccgcuccggcuacuccggcaucuucuccgucgagggcaaguccugcaucaaccgcugcuucuacgucgagcucauccgcggccgcaaccaggagaccgagguccucuggaccuccaacuccaucgucgucuucugcggcaccuccggcaccuacggcaccggcuccuggcccgacggcgccgacaucaaccucaugcccaucuga

SEQ ID NO: 112742 - RNA, 1410 nt, Artificial Sequence; identical to SEQ ID NO: 110363
  derived and/or modified CDS sequence (opt2) from neuraminidase__InfluenzaA__ACO95174

SEQ ID NO: 112743 - RNA, 1410 nt, Artificial Sequence; identical to SEQ ID NO: 110363
  derived and/or modified CDS sequence (opt2) from neuraminidase__InfluenzaA__ACO95185

SEQ ID NO: 112744 - RNA, 1410 nt, Artificial Sequence
  derived and/or modified CDS sequence (opt2) from neuraminidase__InfluenzaA__ACO95196
augaaccccaaccagaagaucaucaccaucggcuccgucucccucaccaucuccaccaucugcuucuucaugcagaucgccauccucaucaccaccgucacccuccacuucaagcaguacgaguucaacuccccccccaacaaccaggucaugcucugcgagcccaccaucaucgagcgcaacaucaccgagaucgucuaccucaccaacaccaccaucgagaaggagaucugccccaagcucgccgaguaccgcaacugguccaagccccagugcaacaucaccggcuucgcccccuucuccaaggacaacuccauccgccucuccgccggcggcgacaucugggucacccgcgagcccuacgucuccugcgaccccgacaagugcuaccaguucgcccucggccagggcaccacccucaacaacguccacuccaacgacaccauccacgaccgcacccccuaccgcacccuccucaugaacgagcucggcguccccuuccaccucggcaccaagcaggucugcaucgccugguccuccuccuccugccacgacggcaaggccuggcuccacgucugcgucaccggcgacgacaagaacgccaccgccuccuucaucuacaacggccgccucgucgacuccgucgucuccugguccaagaagauccuccgcacccaggaguccgagugcgucugcaucaacggcaccugcaccgucgucaugaccgacggcuccgccuccggcaaggccgacaccaagauccucuucaucgaggagggcaagaucguccacaccuccacccucuccggcuccgcccagcacgucgaggagugcuccugcuacccccgcuaccccggcguccgcugcgucugccgcgacaacuggaagggcuccaaccgccccaucgucgacaucaacaucaaggacuacuccaucgucuccuccuacgucugcuccggccucgucggcgacaccccccgcaagaacgacuccuccuccuccucccacugccucgaccccaacaacgaggagggcggccacggcgucaagggcugggccuucgacgacggcaacgacgucuggaugggccgcaccaucuccgagaagcuccgcuccggcuacgagaccuucaaggucaucgagggcugguccaaccccaacuccaagcuccagaucaaccgccaggucaucgucgaccgcggcaaccgcuccggcuacuccggcaucuucuccgucgagggcaaguccugcaucaaccgcugcuucuacgucgagcucauccgcggccgcaaccaggagaccgagguccucuggaccuccaacuccaucgucgucuucugcggcaccuccggcaccuacggcaccggcuccuggcccgacggcgccgacaucaaccucaugcccaucuga

SEQ ID NO: 112745 - RNA, 1410 nt, Artificial Sequence; identical to SEQ ID NO: 110363
  derived and/or modified CDS sequence (opt2) from neuraminidase__InfluenzaA__ACO95207

SEQ ID NO: 112746 - RNA, 1410 nt, Artificial Sequence; identical to SEQ ID NO: 110363
  derived and/or modified CDS sequence (opt2) from neuraminidase__InfluenzaA__ACO95218

SEQ ID NO: 112747 - RNA, 1410 nt, Artificial Sequence; identical to SEQ ID NO: 110366
  derived and/or modified CDS sequence (opt2) from neuraminidase__InfluenzaA__ACO95229

SEQ ID NO: 112748 - RNA, 1410 nt, Artificial Sequence; identical to SEQ ID NO: 110748
  derived and/or modified CDS sequence (opt2) from neuraminidase__InfluenzaA__ACO95240

SEQ ID NO: 112749 - RNA, 1410 nt, Artificial Sequence; identical to SEQ ID NO: 110609
  derived and/or modified CDS sequence (opt2) from neuraminidase__InfluenzaA__ACO95262

SEQ ID NO: 112750 - RNA, 1410 nt, Artificial Sequence; identical to SEQ ID NO: 112547
  derived and/or modified CDS sequence (opt2) from neuraminidase__InfluenzaA__ACO95273

SEQ ID NO: 112751 - RNA, 1410 nt, Artificial Sequence; identical to SEQ ID NO: 112639
  derived and/or modified CDS sequence (opt2) from neuraminidase__InfluenzaA__ACO95306

SEQ ID NO: 112752 - RNA, 1413 nt, Artificial Sequence
  derived and/or modified CDS sequence (opt2) from neuraminidase__InfluenzaA__ACO95385
augaaccccaaccagaagaucaucaccaucggcuccaucuccaucgccaucggcaucaucucccucaugcuccagaucggcaacaucaucuccaucugggccucccacuccauccagaccggcucccagaacaacaccggcaucugcaaccagcgcaucaucaccuacgagaacuccaccugggucaaccacaccuacgucaacaucaacaacaccaacgucgucgccggcgaggacaagaccuccgucacccucgccggcaacuccucccucugcuccaucuccggcugggccaucuacaccaaggacaacuccauccgcaucggcuccaagggcgacgucuucgucauccgcgagcccuucaucuccugcucccaccucgagugccgcaccuucuuccucacccagggcgcccuccucaacgacaagcacuccaacggcaccgucaaggaccgcucccccuaccgcgcccucauguccugcccccucggcgaggcccccucccccuacaacuccaaguucgaguccgucgccugguccgccuccgccugccacgacggcaugggcuggcucaccaucggcaucuccggccccgacaacggcgccgucgccguccucaaguacaacggcaucaucaccggcaccaucaaguccuggaagaagcagauccuccgcacccaggaguccgagugcgucugcaugaacggcuccugcuucaccaucaugaccgacggccccuccgacaaggccgccuccuacaagaucuucaagaucgagaagggcaaggucaccaaguccaucgagcucaacgcccccaacuuccacuacgaggagugcuccugcuaccccgacaccggcaucgucaugugcgucugccgcgacaacuggcacggcuccaaccgccccugggucuccuucaaccagaaccucgacuaccagaucggcuacaucugcuccggcgucuucggcgacaacccccgccccgaggacggcgagggcuccugcaaccccgucaccgucgacggcgccaacggcgucaagggcuucuccuacaaguacgacaacggcgucuggaucggccgcaccaaguccaaccgccuccgcaagggcuucgagaugaucugggaccccaacggcuggaccaacaccgacuccgacuucuccgucaagcaggacgucgucgccaucaccgacugguccggcuacuccggcuccuucguccagcaccccgagcucaccggccucgacugcauccgccccugcuucugggucgagcucguccgcggccucccccgcgagaacaccaccaucuggaccuccggcuccuccaucuccuucugcggcgucaacuccgacaccgccaacugguccuggcccgacggcgccgagcuccccuucaccaucgacaaguga

SEQ ID NO: 112753 - RNA, 1413 nt, Artificial Sequence; identical to SEQ ID NO: 112668
  derived and/or modified CDS sequence (opt2) from neuraminidase__InfluenzaA__ACO95407

SEQ ID NO: 112754 - RNA, 1413 nt, Artificial Sequence; identical to SEQ ID NO: 112668
  derived and/or modified CDS sequence (opt2) from neuraminidase__InfluenzaA__ACO95418

SEQ ID NO: 112755 - RNA, 1410 nt, Artificial Sequence; identical to SEQ ID NO: 110181
  derived and/or modified CDS sequence (opt2) from neuraminidase__InfluenzaA__ACO95429

SEQ ID NO: 112756 - RNA, 1410 nt, Artificial Sequence; identical to SEQ ID NO: 110750
  derived and/or modified CDS sequence (opt2) from neuraminidase__InfluenzaA__ACO95440

SEQ ID NO: 112757 - RNA, 1410 nt, Artificial Sequence
  derived and/or modified CDS sequence (opt2) from neuraminidase__InfluenzaA__ACO95462
augaaccccaaccagaagaucaucaccaucggcuccgucucccucaccaucuccaccaucugcuucuucaugcagaucgccauccucaucaccaccgucacccuccacuucaagcaguacgaguucaacuccccccccaacaaccaggucaugcucugcgagcccaccaucaucgagcgcaacaucaccgagaucgucuaccucaccaacaccaccaucgagaaggagaucugccccaagcucgccgaguaccgcaacugguccaagccccagugcaacaucaccggcuucgcccccuucuccaaggacaacuccauccgccucuccgccggcggcgacaucugggucacccgcgagcccuacgucuccugcgaccccgacaagugcuaccaguucgcccucggccagggcaccacccucaacaacguccacuccaacgacaccguccacgaccgcacccccuaccgcacccuccucaugaacgagcucggcguccccuuccaccucggcaccaagcaggucugcaucgccugguccuccuccuccugccacgacggcaaggccuggcuccacgucugcgucaccggcgacgacaagaacgccaccgccuccuucaucuacaacggccgccucgucgacuccaucgucuccugguccaaggagauccuccgcacccaggaguccgagugcgucugcaucaacggcaccugcaccgucgucaugaccgacggcuccgccuccggcaaggccgacaccaagauccucuucaucgaggagggcaagaucguccacaccuccacccucuccggcuccgcccagcacgucgaggagugcuccugcuacccccgcuaccccggcguccgcugcgucugccgcgacaacuggaagggcuccaaccgccccaucgucgacaucaacaucaaggacuacuccaucgucuccuccuacgucugcuccggccucgucggcgacaccccccgcaagaacgacuccuccuccuccucccacugccucgaccccaacaacgaggagggcggccacggcgucaagggcugggccuucgacgacggcaacgacgucuggaugggccgcaccaucuccgagaagcuccgcuccggcuacgagaccuucaaggucaucgagggcugguccaaccccaacuccaagcuccagaucaaccgccaggucaucgucgaccgcggcaaccgcuccggcuacuccggcaucuucuccgucgagggcaaguccugcaucaaccgcugcuucuacgucgagcucauccgcggccgcaaggaggagaccgagguccucuggaccuccaacuccaucgucgucuucugcggcaccuccggcaccuacggcaccggcuccuggcccgacggcgccgacaucaaccucaugcucaucuga

SEQ ID NO: 112758 - RNA, 1410 nt, Artificial Sequence; identical to SEQ ID NO: 110748
  derived and/or modified CDS sequence (opt2) from neuraminidase__InfluenzaA__ACO95484

SEQ ID NO: 112759 - RNA, 1410 nt, Artificial Sequence; identical to SEQ ID NO: 110748
  derived and/or modified CDS sequence (opt2) from neuraminidase__InfluenzaA__ACO95495

SEQ ID NO: 112760 - RNA, 1410 nt, Artificial Sequence; identical to SEQ ID NO: 110748
  derived and/or modified CDS sequence (opt2) from neuraminidase__InfluenzaA__ACO95506

SEQ ID NO: 112761 - RNA, 1410 nt, Artificial Sequence
  derived and/or modified CDS sequence (opt2) from neuraminidase__InfluenzaA__ACO95517
augaaccccaaccagaagaucaucaccaucggcuccgucucccucaccaucuccaccaucugcuucuucaugcagaucgccauccucaucaccaccgucacccuccacuucaagcaguacgaguucaacuccccccccaacaaccaggucaugcucugcgagcccaccaucaucgagcgcaacaucaccgagaucgucuaccucaccaacaccaccaucgagaaggagaucugccccaagcucgccgaguaccgcaacugguccaagccccagugcaacaucaccggcuucgcccccuucuccaaggacaacuccauccgccucuccgccggcggcgacaucugggucacccgcgagcccuacgucuccugcgaccccgacaagugcuaccaguucgcccucggccagggcaccacccucaacaacguccacuccaacgacaccguccacgaccgcacccccuaccgcacccuccucaugaacgagcucggcguccccuuccaccucggcaccaagcaggucugcaucgccugguccuccuccuccugccacgacggcaaggccuggcuccacgucugcgucaccggcgacgacaagaacgccaccgccuccuucaucuacaacggccgccucgucgacuccaucgucuccugguccaaggagauccuccgcacccaggaguccgagugcgucugcaucaacggcaccugcaccgucgucaugaccgacggcuccgccuccggcaaggccgacaccaagauccucuucaucgaggagggcaagaucguccacaccuccacccucuccggcuccgcccagcacgucgaggagugcuccugcuacccccgcuaccccggcguccgcugcgucugccgcgacaacuggaagggcuccaaccgccccaucgucgacaucaacaucaaggacuacuccaucgucuccuccuacgucugcuccggccucgucggcgacaccccccgcaagaacgacuccuccuccuccucccacugccucgaccccaacaacgaggagggcggccacggcgucaagggcugggccuucgacgacggcaacgacgucuggaugggccgcaccaucuccgagaagcuccgccucggcuacgagaccuucaaggucaucgagggcugguccaaccccaacuccaagcuccagaucaaccgccaggucaucgucgaccgcggcaaccgcuccggcuacuccggcaucuucuccgucgagggcaaguccugcaucaaccgcugcuucuacgucgagcucauccgcggccgcaaggaggagaccgagguccucuggaccuccaacuccaucgucgucuucugcggcaccuccggcaccuacggcaccggcuccuggcccgacggcgccgacaucaaccucaugcccaucuga

SEQ ID NO: 112762 - RNA, 1410 nt, Artificial Sequence
  derived and/or modified CDS sequence (opt2) from neuraminidase__InfluenzaA__ACO95539
augaaccccaaccagaagaucaucaccaucggcuccgucucccucaccaucuccaccaucugcuucuucaugcagaucgccauccucaucaccaccgucacccuccacuucaagcaguacgaguucaacuccccccccaacaaccaggucaugcucugcgagcccaccaucaucgagcgcaacaucaccgagaucgucuaccucaccaacaccaccaucgagaaggagaucugccccaagcucgccgaguaccgcaacugguccaagccccagugcaacaucaccggcuucgcccccuucuccaaggacaacuccauccgccucuccgccggcggcgacaucugggucacccgcgagcccuacgucuccugcgaccccgacaagugcuaccaguucgcccucggccagggcaccacccucaacaacguccacuccaacgacaccguccacgaccgcacccccuaccgcacccuccucaugaacgagcucggcguccccuuccaccucggcaccaagcaggucugcaucgccugguccuccuccuccugccacgacggcaaggccuggcuccacgucugcgucaccggcgacgacaagaacgccaccgccuccuucaucuacaacggccgccucgucgacuccaucgucuccugguccaaggagauccuccgcacccaggaguccgagugcgucugcaucaacggcaccugcaccgucgucaugaccgacggcuccgccuccggcaaggccaacaccaagauccucuucaucgaggagggcaagaucguccacaccuccacccucuccggcuccgcccagcacgucgaggagugcuccugcuacccccgcuaccccggcguccgcugcgucugccgcgacaacuggaagggcuccaaccgccccaucgucgacaucaacaucaaggacuacuccaucgucuccuccuacgucugcuccggccucgucggcgacaccccccgcaagaacgacuccuccuccuccucccacugccucgaccccaacaacgaggagggcggccacggcgucaagggcugggccuucgacgacggcaacgacgucuggaugggccgcaccaucuccgagaagcuccgcuccggcuacgagaccuucaaggucaucgagggcugguccaaccccaacuccaagcuccagaucaaccgccaggucaucgucgaccgcggcaaccgcuccggcuacuccggcaucuucuccgucgagggcaaguccugcaucaaccgcugcuucuacgucgagcucauccgcggccgcaaggaggagaccgagguccucuggaccuccaacuccaucgucgucuucugcggcaccuccggcaccuacggcaccggcuccuggcccgacggcgccgacaucaaccucaugcccaucuga

SEQ ID NO: 112763 - RNA, 1413 nt, Artificial Sequence
  derived and/or modified CDS sequence (opt2) from neuraminidase__InfluenzaA__ACP20223
augaaccccaaccagaagaucaucaccaucggcuccaucuccaucgccaucggcaucaucucccucaugcuccagaucggcaacaucaucuccaucugggccucccacuccauccagaccggcucccagaacaacaccggcaucugcaaccagcgcaucaucaccuacgagaacuccaccugggucaaccacaccuacgucaacaucaacaacaccaacgucgucgccggcgaggacaagaccuccgucacccucgccggcaacuccucccucugcuccaucuccggcugggccaucuacaccaaggacaacuccauccgcaucggcuccaagggcgacgucuucgucauccgcgagcccuucaucuccugcucccaccucgagugccgcaccuucuuccucacccagggcgcccuccucaacgacaagcacuccaacggcaccgucaaggaccgcucccccuaccgcgcccucauguccugcccccucggcgaggcccccucccccuacaacuccaaguucgaguccgucgccugguccgccuccgccugccacgacggcaugggcuggcucaccaucggcaucuccggccccgacaacggcgccgucgccguccucaaguacaacggcaucaucaccggcaccaucaaguccuggaagaagcagauccuccgcacccaggaguccgagugcgucugcaugaacggcuccugcuucaccaucaugaccgacggccccuccaacaaggccgccuccuacaagaucuucaagaucgagaagggcaaggucaccaaguccaucgagcucaacgcccccaacuuccacuacgaggagugcuccugcuaccccgacaccggcaucgucaugugcgucugccgcgacaacuggcacggcuccaaccgccccugggucuccuucaaccagaaccucgacuaccagaucggcuacaucugcuccggcgucuucggcgacaacccccgccccgaggacggcgagggcuccugcaaccccgucaccgucgacggcgccaacggcgucaagggcuucuccuacaaguacgacaacggcgucuggaucggccgcaccaaguccaaccgccuccgcaagggcuucgagaugaucugggaccccaacggcuggaccaacaccgacuccgacuucuccgucaagcaggacgucgucgccgucaccgacugguccggcuacuccggcuccuucguccagcaccccgagcucaccggccucgacugcauccgccccugcuucugggucgagcucguccgcggccucccccgcgagaacaccaccaucuggaccuccggcuccuccaucuccuucugcggcgucaacuccgacaccgccaacugguccuggcccgacggcgccgagcuccccuucaccaucgacaaguga

SEQ ID NO: 112764 - RNA, 1410 nt, Artificial Sequence
  derived and/or modified CDS sequence (opt2) from neuraminidase__InfluenzaA__ACP41952
augaaccccaaccagaagaucaucaccaucggcuccgucugcaugaccaucggcauggccaaccucauccuccagaucggcaacaucaucuccaucuggaucucccacuccauccagcucggcaaccagaaccagaucgagaccugcaaccaguccgucaucaccuacgagaacaacaccugggucaaccagaccuacgucaacaucuccaacaccaacuucgccgccggccaguccgucgucuccgucaagcucgccggcaacuccucccucugccccgucuccggcugggccaucuacuccaaggacaacuccguccgcaucggcuccaagggcgacgucuucgucauccgcgagcccuucaucuccugcuccccccucgagugccgcaccuucuuccucacccagggcgcccuccucaacgacaagcacuccaacggcaccaucaaggaccgcucccccuaccgcacccucauguccugccccaucggcgagguccccucccccuacaacucccgcuucgaguccgucgccugguccgccuccgccugccacgacggcaucaacuggcucaccaucggcaucuccggccccgacaacggcgccgucgccguccucaaguacaacggcaucaucaccgacaccaucaaguccuggcgcaacaacauccuccgcacccaggaguccgagugcgccugcgucaacggcuccugcuucaccgucaugaccgacggccccuccaacggccaggccuccuacaagaucuuccgcaucgagaagggcaagaucgucaaguccgucgagaugaacgcccccaacuaccacuacgaggagugcuccugcuaccccgacuccuccgagaucaccugcgucugccgcgacaacuggcacggcuccaaccgccccugggucuccuucaaccagaaccucgaguaccagaucggcuacaucugcuccggcaucuucggcgacaacccccgccccaacgacaagaccggcuccugcggccccgucuccuccaacggcgccaacggcgucaagggcuucuccuucaaguacggcaacggcgucuggaucggccgcaccaaguccaucuccucccgcaacggcuucgagaugaucugggaccccaacggcuggaccggcaccgacaacaacuucuccaucaagcaggacaucgucggcaucaacgagugguccggcuacuccggcuccuucguccagcaccccgagcucaccggccucgacugcauccgccccugcuucugggucgagcucauccgcggccgccccaaggagaacaccaucuggaccuccggcuccuccaucuccuucugcggcgucaacuccgacaccgucggcugguccuggcccgacggcgccgagcuccccuucaccaucgacaaguga

SEQ ID NO: 112765 - RNA, 1410 nt, Artificial Sequence; identical to SEQ ID NO: 112764
  derived and/or modified CDS sequence (opt2) from neuraminidase__InfluenzaA__ACP44158

SEQ ID NO: 112766 - RNA, 1413 nt, Artificial Sequence
  derived and/or modified CDS sequence (opt2) from neuraminidase__InfluenzaA__ACP44195
augaaccccaaccagaagaucaucaccaucggcuccaucuccaucgccaucggcaucaucucccucaugcuccagaucggcaacaucaucuccaucugggccucccacuccauccagaccggcucccagaacaacaccggcaucugcaaccagcgcaucaucaccuacgagaacuccaccugggucaaccacaccuacgucaacaucaacaacaccaacgucgucgccggcgaggacaagaccuccgucacccucgccggcaacuccucccucugcuccaucuccggcugggccaucuacaccaaggacaacuccauccgcaucggcuccaagggcgacgucuucgucauccgcgagcccuucaucuccugcucccaccucgagugccgcaccuucuuccucacccagggcgcccuccucaacgacaagcacuccaacggcaccgucaaggaccgcucccccuaccgcgcccucauguccugcccccucggcgaggcccccucccccuacaacuccaaguucgaguccgucgccugguccgccuccgccugccacgacggcaugggcuggcucaccaucggcaucuccggccccgacaacggcgccgucgccguccucaaguacaacggcaucaucaccggcaccaucaaguccuggaagaagcagauccuccgcacccaggaguccgagugcgucugcaugaacggcuccugcuucaccaucaugaccgacggccccuccgacaaggccgccuccuacaagaucuucaagaucgagaagggcaaggucaccaaguccaucgagcucaacgcccccaacuuccacuacgaggagugcuccugcuaccccgacaccggcaucgucaugugcgucugccgcgacaacuggcacggcuccaaccgccccugggucuccuucaaccagaaccucgacuaccagaucggcuacaucugcuccggcgucuucggcgacaacccccgccccgaggacggcgagggcuccugcaaccccgucaccgucgacggcgccaacggcgucaagggcuucuccuacaaguacgacaacggcgucuggaucggccgcaccaaguccaaccgccuccgcaagggcuucgagaugaucugggaccccaacggcuggaccaacaccgacuccgacuucuccgucaagcaggacgucgucgccaucaccgacugguccggcuacuccggcuccuucguccagcaccccgagcucaccggccucaacugcauccgccccugcuucugggucgagcucguccgcggccucccccgcgagaacaccaccaucuggaccuccggcuccuccaucuccuucugcggcgucaacuccgacaccgccaacugguccuggcccgacggcgccgagcuccccuucaccaucgacaaguga

SEQ ID NO: 112767 - RNA, 1413 nt, Artificial Sequence; identical to SEQ ID NO: 112668
  derived and/or modified CDS sequence (opt2) from neuraminidase__InfluenzaA__ACP44217

SEQ ID NO: 112768 - RNA, 1413 nt, Artificial Sequence; identical to SEQ ID NO: 112668
  derived and/or modified CDS sequence (opt2) from neuraminidase__InfluenzaA__ACP44228

SEQ ID NO: 112769 - RNA, 1410 nt, Artificial Sequence; identical to SEQ ID NO: 110750
  derived and/or modified CDS sequence (opt2) from neuraminidase__InfluenzaA__ACP44239

SEQ ID NO: 112770 - RNA, 1410 nt, Artificial Sequence
  derived and/or modified CDS sequence (opt2) from neuraminidase__InfluenzaA__ACP44250
augaaccccaaccagaagaucaucaccaucggcuccgucucccucaccaucuccaccaucugcuucuucaugcagaucgccauccucaugaccaccgucacccuccacuucaagcaguacgaguucaacuccccccccaacaaccaggucaugcucugcgagcccaccaucaucgagcgcaacaucaccgagaucgucuaccucaccaacaccaccaucgagaaggagaucugccccaagcucgccgaguaccgcaacugguccaagccccagugcgacaucaccggcuucgcccccuucuccaaggacaacuccauccgccucuccgccggcggcgacaucugggucacccgcgagcccuacgucuccugcgaccccgacaagugcuaccaguucgcccucggccagggcaccacccucaacaacguccacuccaacgacaccguccacgaccgcacccccuaccgcacccuccucaugaacgagcucggcguccccuuccaccucggcaccaagcaggucugcaucgccugguccuccuccuccugccacgacggcaaggccuggcuccacgucugcgucaccggcgacgacaagaacgccaccgccuccuucaucuacaacggccgccucgucgacuccaucgucuccugguccaaggagauccuccgcacccaggaguccgagugcgucugcaucaacggcaccugcaccgucgucaugaccgacggcuccgccuccggcaaggccgacaccaagauccucuucaucgaggagggcaagaucguccacaccuccacccucuccggcuccgcccagcacgucgaggagugcuccugcuacccccgcuaccccggcguccgcugcgucugccgcgacaacuggaagggcuccaaccgccccaucgucgacaucaacaucaaggacuacuccaucgucuccuccuacgucugcuccggccucgucggcgacaccccccgcaagaacgacuccuccuccuccucccacugccucgaccccaacaacgaggagggcggccacggcgucaagggcugggccuucgacgacggcaacgacgucuggaugggccgcaccaucuccgagaagcuccgcuccggcuacgagaccuucaaggucaucgagggcugguccaaccccaacuccaagcuccagaucaaccgccaggucaucgucgaccgcggcaaccgcuccggcuacuccggcaucuucuccgucgagggcaaguccugcaucaaccgcugcuucuacgucgagcucauccgcggccgcaaggaggagaccgagguccucuggaccuccaacuccaucgucgucuucugcggcaccuccggcaccuacggcaccggcuccuggcccgacggcgccgacaucaaccucaugcccaucuga

SEQ ID NO: 112771 - RNA, 1410 nt, Artificial Sequence
  derived and/or modified CDS sequence (opt2) from neuraminidase__InfluenzaA__ACP44261
augaaccccaaccagaagaucaucaccaucggcuccgucucccucaccaucuccaccaucugcuucuucaugcagaucgccauccucaucaccaccgucacccuccacuucaagcaguacgaguucaacuccccccccaacaaccaggucaugcucugcgagcccaccaucaucgagcgcaacaucaccgagaucgucuaccucaccaacaccaccaucgagaaggagaucugccccaagcucgccgaguaccgcaacugguccaagccccagugcaacaucaccggcuucgcccccuucuccaaggacaacuccauccgccucuccgccggcggcgacaucugggucacccgcgagcccuacgucuccugcgaccccgacaagugcuaccaguucgcccucggccagggcaccacccucaacaacaugcacuccaacgacaccguccacgaccgcacccccuaccgcacccuccucaugaacgagcucggcguccccuuccaccucggcaccaagcaggucugcaucgccugguccuccuccuccugccacgacggcaaggccuggcuccacgucugcgucaccggcgacgacaagaacgccaccgccuccuucaucuacaacggccgccucgucgacuccaucgucuccugguccaaggagauccuccgcacccaggaguccgagugcgucugcaucaacggcaccugcaccgucgucaugaccgacggcuccgccuccggcaaggccgacaccaagauccucuucaucgaggagggcaagaucguccacaccuccacccucuccggcuccgcccagcacgucgaggagugcuccugcuacccccgcuaccccggcguccgcugcgucugccgcgacaacuggaagggcuccaaccgccccaucgucgacaucaacaucaaggacuacuccaucgucuccuccuacgucugcuccggccucgucggcgacaccccccgcaagaacgacuccuccuccuccucccacugccucgaccccaacaacgaggagggcggccacggcgucaagggcugggccuucgacgacggcaacgacgucuggaugggccgcaccaucuccgagaagcuccgcuccggcuacgagaccuucaaggucaucgagggcugguccaaccccaacuccaagcuccagaucaaccgccaggucaucgucgaccgcggcaaccgcuccggcuacuccggcaucuucuccgucgagggcaaguccugcaucaaccgcugcuucuacgucgagcucauccgcggccgcaaggaggagaccgagguccucuggaccuccaacuccaucgucgucuucugcggcaccuccggcaccuacggcaccggcuccuggcccgacggcgccgacaucaaccucaugcccaucuga

SEQ ID NO: 112772 - RNA, 1410 nt, Artificial Sequence
  derived and/or modified CDS sequence (opt2) from neuraminidase__InfluenzaA__ACP44272
augaaccccaaccagaagaucaucaccaucggcuccgucucccucaccaucuccaccaucugcuucuucaugcagaucgccauccucaucaccaccgucacccuccacuucaagcaguacgaguucaacuccccccccaacaaccaggucaugcucugcgagcccaccaucaucgagcgcaacaucaccgagaucgucuaccucaccaacaccaccaucgagaaggagaucugccccaagcucgccgaguaccgcaacugguccaagccccagugcaacaucaccggcuucgcccccuucuccaaggacaacuccauccgccucuccgccggcggcgacaucugggucacccgcgagcccuacgucuccugcgaccccgacaagugcuaccaguucgcccucggccagggcaccacccucaacaacguccacuccaacgacaccguccacgaccgcacccccuaccgcacccuccucaugaacgagcucggcguccccuuccaccucggcaccaagcaggucugcaucgccugguccuccuccuccugccacgacggcaaggccuggcuccacgucugcgucaccggcgacgacaagaacgccaccgccuccuucaucuacaacggccgccucgucgacuccaucgucuccugguccaaggagauccuccgcacccaggaguccgagugcgucugcaucaacggcaccugcaccgucaucaugaccgacggcuccgccuccggcaaggccgacaccaagauccucuucaucgaggagggcaagaucguccacaccuccacccucuccggcuccgcccagcacgucgaggagugcuccugcuacccccgcuaccccggcguccgcugcgucugccgcgacaacuggaagggcuccaaccgccccaucgucgacaucaacaucaaggacuacuccaucgucuccuccuacgucugcuccggccucgucggcgacaccccccgcaagaacgacuccuccuccuccucccacugccucgaccccaacaacgaggagggcggccacggcgucaagggcugggccuucgacgacggcaacgacgucuggaugggccgcaccaucuccgagaagcuccgcuccggcuacgagaccuucaaggucaucgagggcugguccaaccccaacuccaagcuccagaucaaccgccaggucaucgucgaccgcggcaaccgcuccggcuacuccggcaucuucuccgucgagggcaaguccugcaucaaccgcugcuucuacgucgagcucauccgcggccgcaaggaggagaccgagguccucuggaccuccaacuccaucgucgucuucugcggcaccuccggcaccuacggcaccggcuccuggcccgacggcgccgacaucaaccucaugcccaucuga

SEQ ID NO: 112773 - RNA, 1410 nt, Artificial Sequence; identical to SEQ ID NO: 112764
  derived and/or modified CDS sequence (opt2) from neuraminidase__InfluenzaA__ACQ55360

SEQ ID NO: 112774 - RNA, 1410 nt, Artificial Sequence
  derived and/or modified CDS sequence (opt2) from neuraminidase__InfluenzaA__ACQ63236
augaaccccaaccagaagaucaucaccaucggcuccgucugcaugaccaucggcauggccaaccucauccuccagaucggcaacaucaucuccaucuggaucucccacuccauccagcucggcaaccagaaccagaucgagaccugcaaccaguccgucaucaccuacgagaacaacaccugggucaaccagaccuacgucaacaucuccaacaccaacuucgccgccggccaguccgucgucuccgucaagcucgccggcaacuccucccucugccccgucuccggcugggccaucuacuccaaggacaacuccauccgcaucggcuccaagggcgacgucuucgucauccgcgagcccuucaucuccugcuccccccucgagugccgcaccuucuuccucacccagggcgcccuccucaacgacaagcacuccaacggcaccaucaaggaccgcucccccuaccgcacccucauguccugccccaucggcgagguccccucccccuacaacucccgcuucgaguccgucgccugguccgccuccgccugccacgacggcaucaacuggcucaccaucggcaucuccggccccgacaacggcgccgucgccguccucaaguacaacggcaucaucaccgacaccaucaaguccuggcgcaacaacauccuccgcacccaggaguccgagugcgccugcgucaacggcuccugcuucaccgucaugaccgacggccccuccgacggccaggccuccuacaagaucuuccgcaucgagaagggcaagaucgucaaguccgucgagaugaacgcccccaacuaccacuacgaggagugcuccugcuaccccgacuccuccgagaucaccugcgucugccgcgacaacuggcacggcuccaaccgccccugggucuccuucaaccagaaccucgaguaccagaucggcuacaucugcuccggcaucuucggcgacaacccccgccccaacgacaagaccggcuccugcggccccgucuccuccaacggcgccaacggcgucaagggcuucuccuucaaguacggcaacggcgucuggaucggccgcaccaaguccaucuccucccgcaacggcuucgagaugaucugggaccccaacggcuggaccggcaccgacaacaacuucuccaucaagcaggacaucgucggcaucaacgagugguccggcuacuccggcuccuucguccagcaccccgagcucaccggccucgacugcauccgccccugcuucugggucgagcucauccgcggccgccccaaggagaacaccaucuggaccuccggcuccuccaucuccuucugcggcgucaacuccgacaccgucggcugguccuggcccgacggcgccgagcuccccuucaccaucgacaaguga

SEQ ID NO: 112775 - RNA, 1410 nt, Artificial Sequence; identical to SEQ ID NO: 112774
  derived and/or modified CDS sequence (opt2) from neuraminidase__InfluenzaA__ACQ63242

SEQ ID NO: 112776 - RNA, 1410 nt, Artificial Sequence; identical to SEQ ID NO: 112774
  derived and/or modified CDS sequence (opt2) from neuraminidase__InfluenzaA__ACQ63253

SEQ ID NO: 112777 - RNA, 1410 nt, Artificial Sequence; identical to SEQ ID NO: 112774
  derived and/or modified CDS sequence (opt2) from neuraminidase__InfluenzaA__ACQ63262

SEQ ID NO: 112778 - RNA, 1410 nt, Artificial Sequence
  derived and/or modified CDS sequence (opt2) from neuraminidase__InfluenzaA__ACQ65694
augaaccccaaccagaagaucaucaccaucggcuccgucucccucaccaucuccaccaucugcuucuucaugcagaucgccauccucaucaccaccgucacccuccacuucaagcaguacgaguucaacuccccccccaacaaccaggucaugcucugcgagcccaccaucaucgagcgcaacaucaccgagaucgucuaccucaccaacaccaccaucgagaaggagaucugccccaagcucgccgaguaccgcaagugguccaagccccagugcaacaucaccggcuucgcccccuucuccaaggacaacuccauccgccucuccgccggcggcgacaucugggucacccgcgagcccuacgucuccugcgaccccgacaagugcuaccaguucgcccucggccagggcaccacccucaacaacguccacuccaacgacaccguccgcgaccgcacccccuaccgcacccuccucaugaacgagcucggcguccccuuccaccucggcaccaagcaggucugcaucgccugguccuccuccuccugccacgacggcaaggccuggcuccacgucugcgucaccggcgacgacaagaacgccaccgccuccuucaucuacaacggccgccucgucgacuccaucgucuccugguccaaggacauccuccgcacccaggaguccgagugcgucugcaucaacggcaccugcaccgucgucaugaccgacggcuccgccuccggcaaggccgacaccaagauccucuucaucgaggagggcaagaucguccacaccuccacccucuccggcuccgcccagcacgucgaggagugcuccugcuacccccgcuaccccggcguccgcugcgucugccgcgacaacuggcgcggcuccaaccgccccaucgucgacaucaacaugaaggacuacuccaucgucuccuccuacgucugcuccggccucgucggcgacaccccccgcaagaacgacuccuccuccuccggccacugccucgaccccaacaacgaggagggcggccacggcgucaagggcugggccuucgacgacggcaacgacgucuggaugggccgcaccaucuccgagaagcuccgcuccggcuacgagaccuucaaggucaucgagggcugguccaaccccaacuccaagcuccagaucaaccgccaggucaucgucgaccgcggcaaccgcuccggcuacuccggcaucuucuccgucgagggcaaguccugcaucaaccgcugcuucuacgucgagcucauccgcggccgcaaggaggagaccgagguccucuggaccuccaacuccaucgucgucuucugcggcaccuccggcaccuacggcaccggcuccuggcccgacggcgccgacaucaaccucaugcccaucuga

SEQ ID NO: 112779 - RNA, 1410 nt, Artificial Sequence
  derived and/or modified CDS sequence (opt2) from neuraminidase__InfluenzaA__ACQ65705
augaaccccaaccagaagaucaucaccaucggcuccgucucccucaccaucuccaccaucugcuucuucaugcagaucgccauccucaucaccaccgucacccuccacuucaagcaguacgaguucaacuccccccccaacaaccaggucaugcucugcgagcccaccaucaucgagcgcaacaucaccgagaucgucuaccucaccaacaccaccaucgagaaggagaucugccccaagcucgccgaguaccgcaagugguccaagccccagugcaacaucaccggcuucgcccccuucuccaaggacaacuccauccgccucuccgccggcggcgacaucugggucacccgcgagcccuacgucuccugcgaccccgacaagugcuaccaguucgcccucggccagggcaccacccucaacaacguccacuccaacgacaccguccgcgaccgcacccccuaccgcacccuccucaugaacgagcucggcguccccuuccaccucggcaccaagcaggucugcaucgccugguccuccuccuccugccacgacggcaaggccuggcuccacgucugcgucaccggcgacgacaagaacgccaccgccuccuucaucuacaacggccgccucgucgacuccaucgucuccugguccaaggagauccuccgcacccaggaguccgagugcgucugcaucaacggcaccugcaccgucgucaugaccgacggcuccgccuccggcaaggccgacaccaagauccucuucaucgaggagggcaagaucguccacaccuccacccucuccggcuccgcccagcacgucgaggagugcuccugcuacccccgcuaccccggcguccgcugcgucugccgcgacaacuggcgcggcuccaaccgccccaucgucgacaucaacaugaaggacuacuccaucgucuccuccuacgucugcuccggccucgucggcgacaccccccgcaagaacgacuccuccuccuccggccacugccucgaccccaacaacgaggagggcggccacggcgucaagggcugggccuucgacgacggcaacgacgucuggaugggccgcaccaucuccgagaagcuccgcuccggcuacgagaccuucaaggucaucgagggcugguccaaccccaacuccaagcuccagaucaaccgccaggucaucgucgaccgcggcaaccgcuccggcuacuccggcaucuucuccgucgagggcaaguccugcaucaaccgcugcuucuacgucgagcucauccgcggccgcaaggaggagaccgagguccucuggaccuccaacuccaucgucgucuucugcggcaccuccggcaccuacggcaccggcuccuggcccgacggcgccgacaucaaccucaugcccaucuga

SEQ ID NO: 112780 - RNA, 1410 nt, Artificial Sequence; identical to SEQ ID NO: 112548
  derived and/or modified CDS sequence (opt2) from neuraminidase__InfluenzaA__ACQ65716

SEQ ID NO: 112781 - RNA, 1410 nt, Artificial Sequence; identical to SEQ ID NO: 112548
  derived and/or modified CDS sequence (opt2) from neuraminidase__InfluenzaA__ACQ65727

SEQ ID NO: 112782 - RNA, 1410 nt, Artificial Sequence; identical to SEQ ID NO: 112635
  derived and/or modified CDS sequence (opt2) from neuraminidase__InfluenzaA__ACQ65739

SEQ ID NO: 112783 - RNA, 1410 nt, Artificial Sequence
  derived and/or modified CDS sequence (opt2) from neuraminidase__InfluenzaA__ACQ65750
augaaccccaaccagaagaucaucaccaucggcuccgucucccucaccaucuccaccaucugcuucuucaugcagaccgccauccucaucaccaccgucacccuccacuucaagcaguacgaguucaacuccccccccaacaaccaggucaugcucugcgagcccaccaucaucgagcgcaacaucaccgagaucgucuaccucaccaacaccaccaucgagaaggagaucugccccaagcucgccgaguaccgcaacugguccaagccccagugcgacaucaccggcuucgcccccuucuccaaggacaacuccauccgccucuccgccggcggcgacaucugggucacccgcgagcccuacgucuccugcgaccccgacaagugcuaccaguucgcccucggccagggcaccacccucaacaacguccacuccaacgacaccguccgcaaccgcacccccuaccgcacccuccucaugaacgagcucggcguccccuuccaccucggcaccaagcaggucugcaucgccugguccuccuccuccugccacgacggcaaggccuggcuccacgucugcaucaccggcgacgacaagaacgccaccgccuccuucaucuacaacggccgccucgucgacuccaucgucuccugguccaaggagauccuccgcacccaggaguccgagugcgucugcaucaacggcaccugcaccgucgucaugaccgacggcuccgccuccggcaaggccgacaccaagauccucuucaucgaggagggcaagaucguccacaccuccacccucuccggcuccgcccagcacgucgaggagugcuccugcuacccccgcuaccccggcguccgcugcgucugccgcgacaacuggaagggcuccaaccgccccaucgucgacaucaacaucaaggaccacuccaucgucuccuccuacgucugcuccggccucgucggcgacaccccccgcaagaacgacuccuccuccuccucccacugccucgaccccaacaacgaggagggcggccacggcgucaagggcugggccuucgacgacggcaacgacgucuggaugggccgcaccaucuccgagaagucccgccucggcuacgagaccuucaaggucaucgagggcugguccaaccccaaguccaagcuccagaucaaccgccaggucaucgucgaccgcggcaaccgcuccggcuacuccggcaucuucuccgucgagggcaaguccugcaucaaccgcugcuucuacgucgagcucauccgcggccgcaaggaggagaccgagguccucuggaccuccaacuccaucgucgucuucugcggcaccuccggcaccuacggcaccggcuccuggcccgacggcgccgacaucaaccucaugcccaucuga

SEQ ID NO: 112784 - RNA, 1413 nt, Artificial Sequence; identical to SEQ ID NO: 112668
  derived and/or modified CDS sequence (opt2) from neuraminidase__InfluenzaA__ACQ65761

SEQ ID NO: 112785 - RNA, 1410 nt, Artificial Sequence; identical to SEQ ID NO: 112764
  derived and/or modified CDS sequence (opt2) from neuraminidase__InfluenzaA__ACQ73394

SEQ ID NO: 112786 - RNA, 1410 nt, Artificial Sequence; identical to SEQ ID NO: 112764
  derived and/or modified CDS sequence (opt2) from neuraminidase__InfluenzaA__ACQ73395

SEQ ID NO: 112787 - RNA, 1410 nt, Artificial Sequence; identical to SEQ ID NO: 112774
  derived and/or modified CDS sequence (opt2) from neuraminidase__InfluenzaA__ACQ73396

SEQ ID NO: 112788 - RNA, 1410 nt, Artificial Sequence; identical to SEQ ID NO: 112774
  derived and/or modified CDS sequence (opt2) from neuraminidase__InfluenzaA__ACQ76291

SEQ ID NO: 112789 - RNA, 1410 nt, Artificial Sequence
  derived and/or modified CDS sequence (opt2) from neuraminidase__InfluenzaA__ACQ76298
augaaccccaaccagaagaucaucaccaucggcuccgucugcaugaccaucggcauggccaaccucauccuccagaucggcaacaucaucuccaucuggaucucccacuccauccagcucggcaaccagaaccagaucgagaccugcaaccaguccgucaucaccuacgagaacaacaccugggucaaccagaccuacgucaacaucuccaacaccaacuucgccgccggccaguccgucgucuccgucaagcucgccggcaacuccucccucugccccgucuccggcugggccaucuacuccaaggacaacuccguccgcaucggcuccaagggcgacgucuucgucauccgcgagcccuucaucuccugcuccccccucgagugccgcaccuucuuccucacccagggcgcccuccucaacgacaagcacuccaacggcaccaucaaggaccgcucccccuaccgcacccucauguccugccccaucggcgagguccccucccccuacaacucccgcuucgaguccgucgccugguccgccuccgccugccacgacggcaucaacuggcucaccaucggcaucuccggccccgacaacggcgccgucgccguccucaaguacaacggcaucaucaccgacaccaucaaguccuggcgcaacaacauccuccgcacccaggaguccgagugcgccugcgucaacggcuccugcuucaccaucaugaccgacggccccuccaacggccaggccuccuacaagaucuuccgcaucgagaagggcaagaucgucaaguccgucgagaugaacgcccccaacuaccacuacgaggagugcuccugcuaccccgacuccuccgagaucaccugcgucugccgcgacaacuggcacggcuccaaccgccccugggucuccuucaaccagaaccucgaguaccagaucggcuacaucugcuccggcaucuucggcgacaacccccgccccaacgacaagaccggcuccugcggccccgucuccuccaacggcgccaacggcgucaagggcuucuccuucaaguacggcaacggcgucuggaucggccgcaccaaguccaucuccucccgcaacggcuucgagaugaucugggaccccaacggcuggaccggcaccgacaacaacuucuccaucaagcaggacaucgucggcaucaacgagugguccggcuacuccggcuccuucguccagcaccccgagcucaccggccucgacugcauccgccccugcuucugggucgagcucauccgcggccgccccaaggagaacaccaucuggaccuccggcuccuccaucuccuucugcggcgucaacuccgacaccgucggcugguccuggcccgacggcgccgagcuccccuucaccaucgacaaguga

SEQ ID NO: 112790 - RNA, 1410 nt, Artificial Sequence; identical to SEQ ID NO: 112774
  derived and/or modified CDS sequence (opt2) from neuraminidase__InfluenzaA__ACQ76308

SEQ ID NO: 112791 - RNA, 1410 nt, Artificial Sequence; identical to SEQ ID NO: 112774
  derived and/or modified CDS sequence (opt2) from neuraminidase__InfluenzaA__ACQ76316

SEQ ID NO: 112792 - RNA, 1410 nt, Artificial Sequence; identical to SEQ ID NO: 112764
  derived and/or modified CDS sequence (opt2) from neuraminidase__InfluenzaA__ACQ76322

SEQ ID NO: 112793 - RNA, 1410 nt, Artificial Sequence; identical to SEQ ID NO: 112764
  derived and/or modified CDS sequence (opt2) from neuraminidase__InfluenzaA__ACQ76328

SEQ ID NO: 112794 - RNA, 1410 nt, Artificial Sequence; identical to SEQ ID NO: 112764
  derived and/or modified CDS sequence (opt2) from neuraminidase__InfluenzaA__ACQ76335

SEQ ID NO: 112795 - RNA, 1410 nt, Artificial Sequence; identical to SEQ ID NO: 112764
  derived and/or modified CDS sequence (opt2) from neuraminidase__InfluenzaA__ACQ76342

SEQ ID NO: 112796 - RNA, 1410 nt, Artificial Sequence; identical to SEQ ID NO: 112764
  derived and/or modified CDS sequence (opt2) from neuraminidase__InfluenzaA__ACQ76351

SEQ ID NO: 112797 - RNA, 1410 nt, Artificial Sequence; identical to SEQ ID NO: 112764
  derived and/or modified CDS sequence (opt2) from neuraminidase__InfluenzaA__ACQ76359

SEQ ID NO: 112798 - RNA, 1410 nt, Artificial Sequence; identical to SEQ ID NO: 112774
  derived and/or modified CDS sequence (opt2) from neuraminidase__InfluenzaA__ACQ76364

SEQ ID NO: 112799 - RNA, 1410 nt, Artificial Sequence; identical to SEQ ID NO: 112774
  derived and/or modified CDS sequence (opt2) from neuraminidase__InfluenzaA__ACQ76367

SEQ ID NO: 112800 - RNA, 1410 nt, Artificial Sequence
  derived and/or modified CDS sequence (opt2) from neuraminidase__InfluenzaA__ACQ76379
augaaccccaaccagaagaucaucaccaucggcuccgucugcaugaccaucggcauggccaaccucauccuccagaucggcaacaucaucuccaucuggaucucccacuccauccagcucggcaaccagaaccagaucgagaccugcaaccaguccgucaucaccuacaagaacaacaccugggucaaccagaccuacgucaacaucuccaacaccaacuucgccgccggccaguccgucgucuccgucaagcucgccggcaacuccucccucugccccgucuccggcugggccaucuacuccaaggacaacuccguccgcaucggcuccaagggcgacgucuucgucauccgcgagcccuucaucuccugcuccccccucgagugccgcaccuucuuccucacccagggcgcccuccucaacgacaagcacuccaacggcaccaucaaggaccgcucccccuaccgcacccucauguccugccccaucggcgagguccccucccccuacaacucccgcuucgaguccgucgccugguccgccuccgccugccacgacggcaucaacuggcucaccaucggcaucuccggccccgacaacggcgccgucgccguccucaaguacaacggcaucaucaccgacaccaucaaguccuggcgcaacaacauccuccgcacccaggaguccgagugcgccugcgucaacggcuccugcuucaccgucaugaccgacggccccuccaacggccaggccuccuacaagaucuuccgcaucgagaagggcaagaucgucaaguccgucgagaugaacgcccccaacuaccacuacgaggagugcuccugcuaccccgacuccuccgagaucaccugcgucugccgcgacaacuggcacggcuccaaccgccccugggucuccuucaaccagaaccucgaguaccagaucggcuacaucugcuccggcaucuucggcgacaacccccgccccaacgacaagaccggcuccugcggccccgucuccuccaacggcgccaacggcgucaagggcuucuccuucaaguacggcaacggcgucuggaucggccgcaccaaguccaucuccucccgcaacggcuucgagaugaucugggaccccaacggcuggaccggcaccgacaacaacuucuccaucaagcaggacaucgucggcaucaacgagugguccggcuacuccggcuccuucguccagcaccccgagcucaccggccucgacugcauccgccccugcuucugggucgagcucauccgcggccgccccaaggagaacaccaucuggaccuccggcuccuccaucuccuucugcggcgucaacuccgacaccgucggcugguccuggcccgacggcgccgagcuccccuucaccaucgacaaguga

SEQ ID NO: 112801 - RNA, 1410 nt, Artificial Sequence; identical to SEQ ID NO: 112774
  derived and/or modified CDS sequence (opt2) from neuraminidase__InfluenzaA__ACQ76385

SEQ ID NO: 112802 - RNA, 1410 nt, Artificial Sequence; identical to SEQ ID NO: 112774
  derived and/or modified CDS sequence (opt2) from neuraminidase__InfluenzaA__ACQ76388

SEQ ID NO: 112803 - RNA, 1410 nt, Artificial Sequence; identical to SEQ ID NO: 112774
  derived and/or modified CDS sequence (opt2) from neuraminidase__InfluenzaA__ACQ76403

SEQ ID NO: 112804 - RNA, 1410 nt, Artificial Sequence
  derived and/or modified CDS sequence (opt2) from neuraminidase__InfluenzaA__ACQ76407
augaaccccaaccagaagaucaucaccaucggcuccgucugcaugaccaucggcauggccaaccucauccuccagaucggcaacaucaucuccaucuggaucucccacuccauccagcucggcaaccagaaccagaucgagaccugcaaccaguccgucaucaccuacgagaacaacaccugggucaaccagaccuacgucaacaucuccaacaccaacuucgccgccggccaguccgucgucuccgucaagcucgccggcaacuccucccucugccccgucggcggcugggccaucuacuccaaggacaacuccguccgcaucggcuccaagggcgacgucuucgucauccgcgagcccuucaucuccugcuccccccucgagugccgcaccuucuuccucacccagggcgcccuccucaacgacaagcacuccaacggcaccaucaaggaccgcucccccuaccgcacccucauguccugccccaucggcgagguccccucccccuacaacucccgcuucgaguccgucgccugguccgccuccgccugccacgacggcaucaacuggcucaccaucggcaucuccggccccgacaacggcgccgucgccguccucaaguacaacggcaucaucaccgacaccaucaaguccuggcgcaacaacauccuccgcacccaggaguccgagugcgccugcgucaacggcuccugcuucaccgucaugaccgacggccccuccaacggccaggccuccuacaagaucuuccgcaucgagaagggcaagaucgucaaguccgucgagaugaacgcccccaacuaccacuacgaggagugcuccugcuaccccgacuccuccgagaucaccugcgucugccgcgacaacuggcacggcuccaaccgccccugggucuccuucaaccagaaccucgaguaccagaucggcuacaucugcuccggcaucuucggcgacaacccccgccccaacgacaagaccggcuccugcggccccgucuccuccaacggcgccaacggcgucaagggcuucuccuucaaguacggcaacggcgucuggaucggccgcaccaaguccaucuccucccgcaacggcuucgagaugaucugggaccccaacggcuggaccggcaccgacaacaacuucuccaucaagcaggacaucgucggcaucaacgagugguccggcuacuccggcuccuucguccagcaccccgagcucaccggccucgacugcauccgccccugcuucugggucgagcucauccgcggccgccccaaggagaacaccaucuggaccuccggcuccuccaucuccuucugcggcgucaacuccgacaccgucggcugguccuggcccgacggcgccgagcuccccuucaccaucgacaaguga

SEQ ID NO: 112805 - RNA, 1410 nt, Artificial Sequence
  derived and/or modified CDS sequence (opt2) from neuraminidase__InfluenzaA__ACQ77603
augaaccccaaccagaagaucaucaccaucggcuccgucucccucaccaucgccaccaucugcuuccucaugcagaucgccauccucgucaccaccgucacccuccacuucaagcaguacgagugcaacuccccccccaacaaccaggucaugcucugcgagcccaccaucaucgagcgcaacaucaccgagaucgucuaccucaccaacaccaccaucgagaaggagaucugccccaagcucgccgaguaccgcaacugguccaagccccagugcaacaucaccggcuucgcccccuucuccaaggacaacuccauccgccucuccgccggcggcgacaucugggucacccgcgagcccuacgucuccugcgaccccgacaagugcuaccaguucgcccucggccagggcaccacccucaacaacggccacuccaacgacaccguccacgaccgcacccccuaccgcacccuccucaugaacgagcucggcguccccuuccaccucggcaccaagcaggucugcaucgccugguccuccuccuccugccacgacggcaaggccuggcuccacgucugcgucaccggcgacgacgagaacgccaccgccuccuucaucuacaacggccgccucgucgacuccaucggcuccugguccaagaagauccuccgcacccaggaguccgagugcgucugcaucaacggcaccugcaccgucgucaugaccgacggcuccgccuccggcaaggccgacaccaagauccucuucaucgaggagggcaagaucguccacaccuccccccucuccggcuccgcccagcacgucgaggagugcuccugcuacccccgcuaccccggcguccgcugcgucugccgcgacaacuggaagggcuccaaccgccccaucgucgacaucaacgucaaggacuacuccaucgucuccuccuacgucugcuccggccucgucggcgacaccccccgcaagaacgacuccuccuccuccucccacugccucgaccccaacaacgaggagggcggccacggcgucaagggcugggccuucgacgacggcaacgacgucuggaugggccgcaccaucuccgagaagucccgcuccggcuacgagaccuucaaggucaucgagggcugguccaagcccaacuccaagcuccagaucaaccgccaggucaucgucgaccgcggcaaccgcuccggcuacuccggcaucuucuccgucgagggcaaguccugcaucaaccgcugcuucuacgucgagcucauccgcggccgcaagcaggagaccgagguccucuggaccuccaacuccaucgucgucuucugcggcaccuccggcaccuacggcaccggcuccuggcccgacggcgccgacaucaaccucaugcccaucuga

SEQ ID NO: 112806 - RNA, 1410 nt, Artificial Sequence; identical to SEQ ID NO: 112764
  derived and/or modified CDS sequence (opt2) from neuraminidase__InfluenzaA__ACQ83309

SEQ ID NO: 112807 - RNA, 1410 nt, Artificial Sequence; identical to SEQ ID NO: 112764
  derived and/or modified CDS sequence (opt2) from neuraminidase__InfluenzaA__ACQ84460

SEQ ID NO: 112808 - RNA, 1410 nt, Artificial Sequence; identical to SEQ ID NO: 112764
  derived and/or modified CDS sequence (opt2) from neuraminidase__InfluenzaA__ACQ84470

SEQ ID NO: 112809 - RNA, 1410 nt, Artificial Sequence
  derived and/or modified CDS sequence (opt2) from neuraminidase__InfluenzaA__ACQ84480
augaacaccaaccagcgcaucaucaccaucggcaccgucugccucaucgucggcaucgucucccuccuccuccagaucggcaacaucgucucccucuggaucucccacuccaucaagaccggcgagaagaaccacuccgagaucugcaaccagaacaucaucaccuacgagaacaagaccugggucaaccagaccuacgucaacaucuccaacaccaacaucgccgacggccagggcgucaccuccaucauccucgccggcaacuccucccucugccccaucuccggcugggccaucuacuccaaggacaacuccauccgcaucggcuccaagggcgacaucuucgucauccgcgagcccuucaucuccugcucccaccucgagugccgcaccuucuuccucacccagggcgcccuccucaacgaccgccacuccaacggcaccgucaaggaccgcucccccuaccgcacccucauguccugccccaccggcgaggcccccucccccuacaacucccgcuucgaguccgucgccugguccgccuccgccugccacgacggcaugggcuggcucaccaucggcaucuccggccccgacaacggcgccgucgccguccucaaguacaacggcaucaucaccgacaccaucaaguccuggcgcaacaagauccuccgcacccaggaguccgagugcgucugcaucaacggcuccugcuucaccaucaugaccgacggccccuccaacggccaggccuccuacaagaucuucaagauggagaagggcaagaucaucaaguccgucgagcucgacgcccccaacuaccacuacgaggagugcuccugcuaccccgacaccggcaaggucgucugcgucugccgcgacaacuggcacgccuccaaccgccccugggucuccuucgaccagaaccucgacuaccagaucggcuacaucugcuccggcgucuucggcgacaacccccgcuccaacgacggcaagggcaacugcggccccguccucuccaacggcgccaacggcgucaagggcuucuccuuccgcuacggcaacggcgucuggaucggccgcaccaaguccaucuccucccgcuccggcuucgagaugaucugggaccccaacggcuggaccgagaccgacuccuccuucuccaucaagcaggacaucaucgcccucaccgacugguccggcuacuccggcuccuucguccagcaccccgagcucaccggcaugaacugcauccgccccugcuucugggucgagcucauccgcggccagcccaaggaguccaccaucuggaccuccggcuccuccaucuccuucugcggcgucgacuccgagaccgccuccugguccuggcccgacggcgccgaccuccccuucaccaucgacaaguga

SEQ ID NO: 112810 - RNA, 1410 nt, Artificial Sequence
  derived and/or modified CDS sequence (opt2) from neuraminidase__InfluenzaA__ACQ89891
augaaccccaaccagaagaucaucaccaucggcuccgucugcaugaccaucggcauggccaaccucauccuccagaucggcaacaucaucuccaucuggaucucccacuccauccagcucggcaaccagaaccagaucgagaccugcaaccaguccgucaucaccuacgagaacaacaccugggucaaccagaccuacgucaacaucuccaacaccaacuucgccgccggccaguccgucgucuccgucaagcucgccggcaacuccucccucugccccgucuccggcugggccaucuacuccaaggacaacuccauccgcaucggcuccaagggcgacgucuucgucauccgcgagcccuucaucuccugcuccccccucgagugccgcaccuucuuccucacccagggcgcccuccucaacgacaagcacuccaacggcaccaucaaggaccgcucccccuaccgcacccucauguccugccccaucggcgagguccccucccccuacaacucccgcuucgaguccgucgccugguccgccuccgccugccacgacggcaucaacuggcucaccaucggcaucuccggccccgacaacggcgccgucgccguccucaaguacaacggcaucaucaccgacaccaucaaguccuggcgcaacaacauccuccgcacccaggaguccgagugcgccugcgucaacggcuccugcuucaccgucaugaccgacggccccuccaacggccaggccuccuacaagaucuuccgcaucgagaagggcaagaucgucaaguccgucgagaugaacgcccccaacuaccacuacgaggagugcuccugcuaccccgacuccuccgagaucaccugcgucugccgcgacaacuggcacggcuccaaccgccccugggucuccuucaaccagaaccucgaguaccagaucggcuacaucugccgcggcaucuucggcgacaacccccgccccaacgacaagaccggcuccugcggccccgucuccuccaacggcgccaacggcgucaagggcuucuccuucaaguacggcaacggcgucuggaucggccgcaccaaguccaucuccucccgcaacggcuucgagaugaucugggaccccaacggcuggaccggcaccgacaacaacuucuccaucaagcaggacaucgucggcaucaacgagugguccggcuacuccggcuccuucguccagcaccccgagcucaccggccucgacugcauccgccccugcuucugggucgagcucauccgcggccgccccaaggagaacaccaucuggaccuccggcuccuccaucuccuucugcggcgucaacuccgacaccgucggcugguccuggcccgacggcgccgagcuccccuucaccaucgacaaguga

SEQ ID NO: 112811 - RNA, 1410 nt, Artificial Sequence; identical to SEQ ID NO: 112764
  derived and/or modified CDS sequence (opt2) from neuraminidase__InfluenzaA__ACQ89918

SEQ ID NO: 112812 - RNA, 1410 nt, Artificial Sequence
  derived and/or modified CDS sequence (opt2) from neuraminidase__InfluenzaA__ACQ89919
augaaccccaaccagaagaucaucaccaucggcuccgucugcaugaccaucggcauggccaaccucauccuccagaucggcaacaucaucuccaucuggaucucccgcuccauccagcucggcaaccagaaccagaucgagaccugcaaccaguccgucaucaccuacgagaacaacaccugggucaaccagaccuacgucaacaucuccaacaccaacuucgccgccggccaguccgucgucuccgucaagcucgccggcaacuccucccucugccccgucuccggcugggccaucuacuccaaggacaacuccguccgcaucggcuccaagggcgacgucuucgucauccgcgagcccuucaucuccugcuccccccucgagugccgcaccuucuuccucacccagggcgcccuccucaacgacaagcacuccaacggcaccaucaaggaccgcucccccuaccgcacccucauguccugccccaucggcgagguccccucccccuacaacucccgcuucgaguccgucgccugguccgccuccgccugccacgacggcaucaacuggcucaccaucggcaucuccggccccgacaacggcgccgucgccguccucaaguacaacggcaucaucaccgacaccaucaaguccuggcgcaacaacauccuccgcacccaggaguccgagugcgccugcgucaacggcuccugcuucaccgucaugaccgacggccccuccaacggccaggccuccuacaagaucuuccgcaucgagaagggcaagaucgucaaguccgucgagaugaacgcccccaacuaccacuacgaggagugcuccugcuaccccgacuccuccgagaucaccugcgucugccgcgacaacuggcacggcuccaaccgccccugggucuccuucaaccagaaccucgaguaccagaucggcuacaucugcuccggcaucuucggcgacaacccccgccccaacgacaagaccggcuccugcggccccgucuccuccaacggcgccaacggcgucaagggcuucuccuucaaguacggcaacggcgucuggaucggccgcaccaaguccaucuccucccgcaacggcuucgagaugaucugggaccccaacggcuggaccggcaccgacaacaacuucuccaucaagcaggacaucgucggcaucaacgagugguccggcuacuccggcuccuucguccagcaccccgagcucaccggccucgacugcauccgccccugcuucugggucgagcucauccgcggccgccccaaggagaacaccaucuggaccuccggcuccuccaucuccuucugcggcgucaacuccgacaccgucggcugguccuggcccgacggcgccgagcuccccuucaccaucgacaaguga

SEQ ID NO: 112813 - RNA, 1410 nt, Artificial Sequence; identical to SEQ ID NO: 112774
  derived and/or modified CDS sequence (opt2) from neuraminidase__InfluenzaA__ACQ89920

SEQ ID NO: 112814 - RNA, 1410 nt, Artificial Sequence; identical to SEQ ID NO: 112774
  derived and/or modified CDS sequence (opt2) from neuraminidase__InfluenzaA__ACQ89921

SEQ ID NO: 112815 - RNA, 1410 nt, Artificial Sequence; identical to SEQ ID NO: 112764
  derived and/or modified CDS sequence (opt2) from neuraminidase__InfluenzaA__ACQ89922

SEQ ID NO: 112816 - RNA, 1410 nt, Artificial Sequence; identical to SEQ ID NO: 112774
  derived and/or modified CDS sequence (opt2) from neuraminidase__InfluenzaA__ACQ89923

SEQ ID NO: 112817 - RNA, 1410 nt, Artificial Sequence; identical to SEQ ID NO: 112764
  derived and/or modified CDS sequence (opt2) from neuraminidase__InfluenzaA__ACQ99623

SEQ ID NO: 112818 - RNA, 1410 nt, Artificial Sequence; identical to SEQ ID NO: 112774
  derived and/or modified CDS sequence (opt2) from neuraminidase__InfluenzaA__ACQ99624

SEQ ID NO: 112819 - RNA, 1410 nt, Artificial Sequence; identical to SEQ ID NO: 112764
  derived and/or modified CDS sequence (opt2) from neuraminidase__InfluenzaA__ACQ99626

SEQ ID NO: 112820 - RNA, 1410 nt, Artificial Sequence; identical to SEQ ID NO: 112764
  derived and/or modified CDS sequence (opt2) from neuraminidase__InfluenzaA__ACQ99627

SEQ ID NO: 112821 - RNA, 1410 nt, Artificial Sequence; identical to SEQ ID NO: 112764
  derived and/or modified CDS sequence (opt2) from neuraminidase__InfluenzaA__ACQ99628

SEQ ID NO: 112822 - RNA, 1410 nt, Artificial Sequence; identical to SEQ ID NO: 112764
  derived and/or modified CDS sequence (opt2) from neuraminidase__InfluenzaA__ACQ99629

SEQ ID NO: 112823 - RNA, 1410 nt, Artificial Sequence; identical to SEQ ID NO: 112764
  derived and/or modified CDS sequence (opt2) from neuraminidase__InfluenzaA__ACQ99630

SEQ ID NO: 112824 - RNA, 1410 nt, Artificial Sequence; identical to SEQ ID NO: 112774
  derived and/or modified CDS sequence (opt2) from neuraminidase__InfluenzaA__ACQ99632

SEQ ID NO: 112825 - RNA, 1410 nt, Artificial Sequence; identical to SEQ ID NO: 112774
  derived and/or modified CDS sequence (opt2) from neuraminidase__InfluenzaA__ACQ99633

SEQ ID NO: 112826 - RNA, 1410 nt, Artificial Sequence; identical to SEQ ID NO: 112764
  derived and/or modified CDS sequence (opt2) from neuraminidase__InfluenzaA__ACQ99635

SEQ ID NO: 112827 - RNA, 1410 nt, Artificial Sequence; identical to SEQ ID NO: 112764
  derived and/or modified CDS sequence (opt2) from neuraminidase__InfluenzaA__ACQ99636

SEQ ID NO: 112828 - RNA, 1410 nt, Artificial Sequence
  derived and/or modified CDS sequence (opt2) from neuraminidase__InfluenzaA__ACQ99684
augaaccccaaccagaagaucaucaccaucggcuccgucugcaugaccaucggcauggccaaccucauccuccagaucggcaacaucaucuccaucuggaucucccacuccauccagcucggcaaccagaaccagaucgagaccugcaaccaguccgucaucaccuacgagaacaacaccugggucaaccagaccuacgucaacaucuccaacaccaacuucgccgccggccaguccgucgucuccgucaagcucgccggcaacuccucccucugccccgucuccggcugggccaucuacuccaaggacaacuccauccgcaucggcuccaagggcgacgucuucgucauccgcgagcccuucaucuccugcuccccccucgagugccgcaccuucuuccucacccagggcgcccuccucaacgacaagcacuccaacggcaccaucaaggaccgcucccccuaccgcacccucauguccugccccaucggcgagguccccucccccuacaacucccgcuucgaguccgucgccugguccgccuccgccugccacgacggcaucaacuggcucaccaucggcaucuccggccccgacaacggcgccgucgccguccucaaguacaacggcaucaucaccgacaccaucaaguccuggcgcaacaacauccuccgcacccaggaguccgagugcgccugcgucaacggcuccugcuucaccgucaugaccgacggccccuccgacgagcaggccuccuacaagaucuuccgcaucgagaagggcaagaucgucaaguccgucgagaugaacgcccccaacuaccacuacgaggagugcuccugcuaccccgacuccuccgagaucaccugcgucugccgcgacaacuggcacggcuccaaccgccccugggucuccuucaaccagaaccucgaguaccagaucggcuacaucugcuccggcaucuucggcgacaacccccgccccaacgacaagaccggcuccugcggccccgucuccuccaacggcgccaacggcgucaagggcuucuccuucaaguacggcaacggcgucuggaucggccgcaccaaguccaucuccucccgcaacggcuucgagaugaucugggaccccaacggcuggaccggcaccgacaacaacuucuccaucaagcaggacaucgucggcaucaacgagugguccggcuacuccggcuccuucguccagcaccccgagcucaccggccucgacugcauccgccccugcuucugggucgagcucauccgcggccgccccaaggagaacaccaucuggaccuccggcuccuccaucuccuucugcggcgucaacuccgacaccgucggcugguccuggcccgacggcgccgagcuccccuucaccaucgacaaguga

SEQ ID NO: 112829 - RNA, 1410 nt, Artificial Sequence
  derived and/or modified CDS sequence (opt2) from neuraminidase__InfluenzaA__ACQ99824
augaacaccaaccagcgcaucaucaccaucggcaccaucugccucaucgucggcaucaucucccuccuccuccagaucggcaacaucauccuccucuggaugucccacuccauccagaccggcgagaagucccaccccaaggucugcaaccaguccgucaucaccuacgagaacaacaccugggucaaccagaccuacgucaacaucuccaacaccaacaucgccgccggccagggcgucacccccaucauccucgccggcaacuccucccucugccccaucuccggcugggccaucuacuccaaggacaacuccauccgcaucggcuccaagggcgacaucuucgucaugcgcgagcccuucaucuccugcucccaccucgagugccgcaccuucuuccucacccagggcgcccuccucaacgaccgccacuccaacggcaccgucaaggaccgcucccccuaccgcacccucauguccugccccaucggcgaggcccccucccccuacaacucccgcuucgaguccgucgccugguccgccuccgccugccacgacggcaugggcuggcucaccaucggcaucuccggccccgacaacggcgccgucgccguccucaaguacaacggcaucaucaccgacaccaucaaguccuggcgcaacaagauccuccgcacccaggaguccgagugcgucugcaucaacggcuccugcuucaccaucaugaccgacggccccuccaacggccaggccuccuacaagcucuucaagauggagaagggcaagaucaucaaguccaucgagcucgacgcccccaacuaccacuacgaggagugcuccugcuaccccgacaccggcaaggucgucugcgucugccgcgacaacuggcacgccuccaaccgccccugggucuccuucgaccagaaccucgacuaccagaucggcuacaucugcuccggcgucuucggcgacaacccccgcuccaacgacggcaagggcaacugcggccccguccucuccaacggcgccaacggcgucaagggcuucuccuuccgcuacggcaacggcgucuggaucggccgcaccaaguccaucuccucccgcuccggcuucgagaugaucugggaccccaacggcuggaccgagaccgacuccuccuucuccaugaagcaggacaucaucgcccucaccgacugguccggcuacuccggcuccuucguccagcaccccgagcucaccggcaugaacugcauccgccccugcuucugggucgagcucauccgcggccagcccaaggaguccaccaucuggaccuccggcuccuccaucuccuucugcggcgucaacuccggcaccgccuccugguccuggcccgacggcgccgaccuccccuucaccaucgacaaguga

SEQ ID NO: 112830 - RNA, 1410 nt, Artificial Sequence; identical to SEQ ID NO: 112774
  derived and/or modified CDS sequence (opt2) from neuraminidase__InfluenzaA__ACR01015

SEQ ID NO: 112831 - RNA, 1410 nt, Artificial Sequence; identical to SEQ ID NO: 112774
  derived and/or modified CDS sequence (opt2) from neuraminidase__InfluenzaA__ACR08422

SEQ ID NO: 112832 - RNA, 1410 nt, Artificial Sequence; identical to SEQ ID NO: 112774
  derived and/or modified CDS sequence (opt2) from neuraminidase__InfluenzaA__ACR08432

SEQ ID NO: 112833 - RNA, 1410 nt, Artificial Sequence; identical to SEQ ID NO: 112774
  derived and/or modified CDS sequence (opt2) from neuraminidase__InfluenzaA__ACR08442

SEQ ID NO: 112834 - RNA, 1410 nt, Artificial Sequence; identical to SEQ ID NO: 112774
  derived and/or modified CDS sequence (opt2) from neuraminidase__InfluenzaA__ACR08452

SEQ ID NO: 112835 - RNA, 1410 nt, Artificial Sequence
  derived and/or modified CDS sequence (opt2) from neuraminidase__InfluenzaA__ACR08462
augucccccaaccagaagaucaucaccaucggcuccgucugcaugaccaucggcauggccaaccucauccuccagaucggcaacaucaucuccaucuggaucucccacuccauccagcucggcaaccagaaccagaucgagaccugcaaccaguccgucaucaccuacgagaacaacaccugggucaaccagaccuacgucaacaucuccaacaccaacuucgccgccggccaguccgucgucuccgucaagcucgccggcaacuccucccucugccccgucuccggcugggccaucuacuccaaggacaacuccguccgcaucggcuccaagggcgacgucuucgucauccgcgagcccuucaucuccugcuccccccucgagugccgcaccuucuuccucacccagggcgcccuccucaacgacaagcacuccaacggcaccaucaaggaccgcucccccuaccgcacccucauguccugccccaucggcgagguccccucccccuacaacucccgcuucgaguccgucgccugguccgccuccgccugccacgacggcaucaacuggcucaccaucggcaucuccggccccgacaacggcgccgucgccguccucaaguacaacggcaucaucaccgacaccaucaaguccuggcgcaacaacauccuccgcacccaggaguccgagugcgccugcgucaacggcuccugcuucaccgucaugaccgacggccccuccaacggccaggccuccuacaagaucuuccgcaucgagaagggcaagaucgucaaguccgucgagaugaacgcccccaacuaccacuacgaggagugcuccugcuaccccgacuccuccgagaucaccugcgucugccgcgacaacuggcacggcuccaaccgccccugggucuccuucaaccagaaccucgaguaccagaucggcuacaucugcuccggcaucuucggcgacaacccccgccccaacgacaagaccggcuccugcggccccgucuccuccaacggcgccaacggcgucaagggcuucuccuucaaguacggcaacggcgucuggaucggccgcaccaaguccaucuccucccgcaacggcuucgagaugaucugggaccccaacggcuggaccggcaccgacaacaacuucuccaucaagcaggacaucgucggcaucaacgagugguccggcuacuccggcuccuucguccagcaccccgagcucaccggccucgacugcauccgccccugcuucugggucgagcucauccgcggccgccccaaggagaacaccaucuggaccuccggcuccuccaucuccuucugcggcgucaacuccgacaccgucggcugguccuggcccgacggcgccgagcuccccuucaccaucgacaaguga

SEQ ID NO: 112836 - RNA, 1410 nt, Artificial Sequence
  derived and/or modified CDS sequence (opt2) from neuraminidase__InfluenzaA__ACR08565
augaaccccaaccagaagaucaucaccaucggcuccgucugcaugaccaucggcauggccaaccucauccuccagaucggcaacaucaucuccaucuggaucucccacuccauccagcucggcaaccagaaccagaucgagaccugcaaccaguccgucaucaccuacgagaacaacaccugggucaaccagaccuacgucaacaucuccaacaccaacuucgccgccggccaguccgucguccccgucaagcucgccggcaacuccucccucugccccgucuccggcugggccaucuacuccaaggacaacuccguccgcaucggcuccaagggcgacgucuucgucauccgcgagcccuucaucuccugcuccccccucgagugccgcaccuucuuccucacccagggcgcccuccucaacgacaagcacuccaacggcaccaucaaggaccgcucccccuaccgcacccucauguccugccccaucggcgagguccccucccccuacaacucccgcuucgaguccgucgccugguccgccuccgccugccacgacggcaucaacuggcucaccaucggcaucuccggccccgacaacggcgccgucgccguccucaaguacaacggcaucaucaccgacaccaucaaguccuggcgcaacaacauccuccgcacccaggaguccgagugcgccugcgucaacggcuccugcuucaccgucaugaccgacggccccuccaacggccaggccuccuacaagaucuuccgcaucgagaagggcaagaucgucaaguccgucgagaugaacgcccccaacuaccacuacgaggagugcuccugcuaccccgacuccuccgagaucaccugcgucugccgcgacaacuggcacggcuccaaccgccccugggucuccuucaaccagaaccucgaguaccagaucggcuacaucugcuccggcaucuucggcgacaacccccgccccaacgacaagaccggcuccugcggccccgucuccuccaacggcgccaacggcgucaagggcuucuccuucaaguacggcaacggcgucuggaucggccgcaccaaguccaucuccucccgcaacggcuucgagaugaucugggaccccaacggcuggaccggcaccgacaacaacuucuccaucaagcaggacaucgucggcaucaacgagugguccggcuacuccggcuccuucguccagcaccccgagcucaccggccucgacugcauccgccccugcuucugggucgagcucauccgcggccgccccaaggagaacaccaucuggaccuccggcuccuccaucuccuucugcggcgucaacuccgacaccgucggcugguccuggcccgacggcgccgagcuccccuucaccaucgacaaguga

SEQ ID NO: 112837 - RNA, 1410 nt, Artificial Sequence; identical to SEQ ID NO: 112764
  derived and/or modified CDS sequence (opt2) from neuraminidase__InfluenzaA__ACR08566

SEQ ID NO: 112838 - RNA, 1410 nt, Artificial Sequence; identical to SEQ ID NO: 112774
  derived and/or modified CDS sequence (opt2) from neuraminidase__InfluenzaA__ACR08567

SEQ ID NO: 112839 - RNA, 1410 nt, Artificial Sequence; identical to SEQ ID NO: 112764
  derived and/or modified CDS sequence (opt2) from neuraminidase__InfluenzaA__ACR08568

SEQ ID NO: 112840 - RNA, 1410 nt, Artificial Sequence; identical to SEQ ID NO: 112764
  derived and/or modified CDS sequence (opt2) from neuraminidase__InfluenzaA__ACR08569

SEQ ID NO: 112841 - RNA, 1410 nt, Artificial Sequence; identical to SEQ ID NO: 112774
  derived and/or modified CDS sequence (opt2) from neuraminidase__InfluenzaA__ACR08570

SEQ ID NO: 112842 - RNA, 1410 nt, Artificial Sequence; identical to SEQ ID NO: 112764
  derived and/or modified CDS sequence (opt2) from neuraminidase__InfluenzaA__ACR08571

SEQ ID NO: 112843 - RNA, 1410 nt, Artificial Sequence; identical to SEQ ID NO: 112764
  derived and/or modified CDS sequence (opt2) from neuraminidase__InfluenzaA__ACR08572

SEQ ID NO: 112844 - RNA, 1410 nt, Artificial Sequence; identical to SEQ ID NO: 112764
  derived and/or modified CDS sequence (opt2) from neuraminidase__InfluenzaA__ACR08573

SEQ ID NO: 112845 - RNA, 1410 nt, Artificial Sequence; identical to SEQ ID NO: 112764
  derived and/or modified CDS sequence (opt2) from neuraminidase__InfluenzaA__ACR08574

SEQ ID NO: 112846 - RNA, 1410 nt, Artificial Sequence; identical to SEQ ID NO: 112774
  derived and/or modified CDS sequence (opt2) from neuraminidase__InfluenzaA__ACR08576

SEQ ID NO: 112847 - RNA, 1410 nt, Artificial Sequence; identical to SEQ ID NO: 112764
  derived and/or modified CDS sequence (opt2) from neuraminidase__InfluenzaA__ACR08577

SEQ ID NO: 112848 - RNA, 1410 nt, Artificial Sequence; identical to SEQ ID NO: 112764
  derived and/or modified CDS sequence (opt2) from neuraminidase__InfluenzaA__ACR09378

SEQ ID NO: 112849 - RNA, 1410 nt, Artificial Sequence; identical to SEQ ID NO: 112764
  derived and/or modified CDS sequence (opt2) from neuraminidase__InfluenzaA__ACR09379

SEQ ID NO: 112850 - RNA, 1410 nt, Artificial Sequence; identical to SEQ ID NO: 112774
  derived and/or modified CDS sequence (opt2) from neuraminidase__InfluenzaA__ACR09380

SEQ ID NO: 112851 - RNA, 1410 nt, Artificial Sequence; identical to SEQ ID NO: 112764
  derived and/or modified CDS sequence (opt2) from neuraminidase__InfluenzaA__ACR09381

SEQ ID NO: 112852 - RNA, 1410 nt, Artificial Sequence; identical to SEQ ID NO: 112764
  derived and/or modified CDS sequence (opt2) from neuraminidase__InfluenzaA__ACR09382

SEQ ID NO: 112853 - RNA, 1410 nt, Artificial Sequence; identical to SEQ ID NO: 112774
  derived and/or modified CDS sequence (opt2) from neuraminidase__InfluenzaA__ACR09383

SEQ ID NO: 112854 - RNA, 1410 nt, Artificial Sequence; identical to SEQ ID NO: 112764
  derived and/or modified CDS sequence (opt2) from neuraminidase__InfluenzaA__ACR09384

SEQ ID NO: 112855 - RNA, 1410 nt, Artificial Sequence; identical to SEQ ID NO: 112774
  derived and/or modified CDS sequence (opt2) from neuraminidase__InfluenzaA__ACR09385

SEQ ID NO: 112856 - RNA, 1410 nt, Artificial Sequence; identical to SEQ ID NO: 112764
  derived and/or modified CDS sequence (opt2) from neuraminidase__InfluenzaA__ACR09386

SEQ ID NO: 112857 - RNA, 1410 nt, Artificial Sequence; identical to SEQ ID NO: 112774
  derived and/or modified CDS sequence (opt2) from neuraminidase__InfluenzaA__ACR10189

SEQ ID NO: 112858 - RNA, 1410 nt, Artificial Sequence; identical to SEQ ID NO: 112774
  derived and/or modified CDS sequence (opt2) from neuraminidase__InfluenzaA__ACR10226

SEQ ID NO: 112859 - RNA, 1410 nt, Artificial Sequence; identical to SEQ ID NO: 112764
  derived and/or modified CDS sequence (opt2) from neuraminidase__InfluenzaA__ACR10236

SEQ ID NO: 112860 - RNA, 1410 nt, Artificial Sequence; identical to SEQ ID NO: 112764
  derived and/or modified CDS sequence (opt2) from neuraminidase__InfluenzaA__ACR10237

SEQ ID NO: 112861 - RNA, 1410 nt, Artificial Sequence
  derived and/or modified CDS sequence (opt2) from neuraminidase__InfluenzaA__ACR15186
augaaccccaaccagaagaucaucaccaucggcuccgucucccucaccaucuccaccaucugcuucuucaugcagaucgccauccucaucaccaccgucacccuccacuucaagcaguacgaguucaacuccccccccaacaaccaggucaugcucugcgagcccaccaucaucgagcgcaacaucaccgagaucgucuaccucaccaacaccaccaucgagaaggagaucugccccaagcucgccgaguaccgcaagugguccaagccccagugcaacaucaccggcuucgcccccuucuccaaggacaacuccauccgccucuccgccggcggcgacaucugggucacccgcgagcccuacgucuccugcgaccccgacaagugcuaccaguucgcccucggccagggcaccacccucaacaacguccacuccaacgacaccguccgcgaccgcacccccuaccgcacccuccucaugaacgagcucggcguccccuuccaccucggcaccaagcaggucugcaucgccugguccuccuccuccugccacgacggcaaggccuggcuccacgucugcgucaccggcgacgacaagaacgccaccgccuccuucaucuacaacggccgccucgucgacuccaucgucuccugguccaaggagauccuccgcacccaggaguccgagugcgucugcaucaacggcaccugcaccgucgucaugaccgacggcuccgccuccggcaaggccgacaccaagauccucuucaucgaggagggcaagaucguccacaccuccacccucuccggcuccgcccagcacgucgaggagugcuccugcuacccccgccaccccggcguccgcugcgucugccgcgacaacuggcgcggcuccaaccgccccaucgucgacaucaacaugaaggacuacuccaucgucuccuccuacgucugcuccggccucgucggcgacaccccccgcaagaacgacuccuccuccuccggccacugccucgaccccaacaacgaggagggcggccacggcgucaagggcugggccuucgacgacggcaacgacgucuggaugggccgcaccaucuccgagaagcuccgcuccggcuacgagaccuucaaggucaucgagggcugguccaaccccaacuccaagcuccagaucaaccgccaggucaucgucgaccgcggcaaccgcuccggcuacuccggcaucuucuccgucgagggcaaguccugcaucaaccgcugcuucuacgucgagcucauccgcggccgcaaggaggagaccgagguccucuggaccuccaacuccaucgucgucuucugcggcaccuccggcaccuacggcaccggcuccuggcccgacggcgccgacaucaaccucaugcccaucuga

SEQ ID NO: 112862 - RNA, 1413 nt, Artificial Sequence; identical to SEQ ID NO: 112668
  derived and/or modified CDS sequence (opt2) from neuraminidase__InfluenzaA__ACR15197

SEQ ID NO: 112863 - RNA, 1410 nt, Artificial Sequence
  derived and/or modified CDS sequence (opt2) from neuraminidase__InfluenzaA__ACR15208
augaaccccaaccagaagaucaucaccaucggcuccgucucccucaccaucuccaccaucugcuucuucaugcagaucgccauccucaucaccaccgucacccuccacuucaagcaguacgaguucaacuccccccccaacaaccaggucaugcucugcgagcccaccaucaucgagcgcaacaucaccgagaucgucuaccucaccaacaccaccaucgagaaggagaucugccccaagcucgccgaguaccgcaacugguccaagccccagugcgacaucaccggcuucgcccccuucuccaaggacaacuccauccgccucuccgccggcggcgacaucugggucacccgcgagcccuacgucuccugcgaccccgacaagugcuaccaguucgcccucggccagggcaccacccucaacaacguccacuccaacgacaccguccgcgaccgcacccccuaccgcacccuccucaugaacgagcucggcguccccuuccaccucggcaccaagcaggucugcaucgccugguccuccuccuccugccacgacggcaaggccuggcuccacgucugcaucaccggcgacgacaagaacgccaccgccuccuucaucuacaacggccgccucgucgacuccaucgucuccugguccaaggagauccuccgcacccaggaguccgagugcgucugcaucaacggcaccugcaccgucgucaugaccgacggcuccgccuccggcaaggccgacaccaagauccucuucaucgaggagggcaagaucguccacaccuccacccucuccggcuccgcccagcacgucgaggagugcuccugcuacccccgcuaccccggcguccgcugcgucugccgcgacaacuggaagggcuccaaccgccccaucgucgacaucaacaucaaggaccacuccaucgucuccuccuacgucugcuccggccucgucggcgacaccccccgcaagaacgacuccuccuccuccucccacugccucgaccccaacaacgaggagggcggccacggcgucaagggcugggccuucgacgacggcaacgacgucuggaugggccgcaccaucuccgagaagucccgccucggcuacgagaccuucaaggucaucgagggcugguccaaccccaaguccaagcuccagaucaaccgccaggucaucgucgacaagggcaaccgcuccggcuacuccggcaucuucuccgucgagggcaaguccugcaucaaccgcugcuucuacgucgagcucauccgcggccgcaaggaggagaccgagguccucuggaccuccaacuccaucgucgucuucugcggcaccuccggcaccuacggcaccggcuccuggcccgacggcgccgacaucaaccucaugcccaucuga

SEQ ID NO: 112864 - RNA, 1410 nt, Artificial Sequence
  derived and/or modified CDS sequence (opt2) from neuraminidase__InfluenzaA__ACR15230
auggaccccaaccagaagaucaucaccaucggcuccgucucccucaccaucuccgccaucugcuucuucaugcagaucgccauccucaucaccaccgucacccuccacuucaagcaguacgaguucaacuccccccccaacaaccaggucaugcucugcgagcccaccaucaucgagcgcaacaucaccgagaucgucuaccucaccaacaccaccaucgagaaggagaucugccccaagcucgccgaguaccgcaacugguccaagccccagugcaacaucaccggcuucgcccccuucuccaaggacaacuccauccgccucuccgccggcggcgacaucugggucacccgcgagcccuacgucuccugcgaccccgacaagugcuaccaguucgcccucggccagggcaccacccucaacaacguccacuccaacgacaccguccacgaccgcacccccuaccgcacccuccucaugaacgagcucggcguccccuuccaccucggcaccaagcaggucugcaucgccugguccuccuccuccugccacgacggcaaggccuggcuccacgucugcgucaccggcgacgacgagaacgccaccgccuccuucaucuacaacggccgccucgucgacuccgucgucuccugguccaagaagauccuccgcacccaggaguccgagugcgucugcaucaacggcaccugcaccgucgucaugaccgacggcuccgccuccggcaaggccgacaccaagauccucuucaucgaggagggcaagaucguccacaccuccacccucuccggcuccgcccagcacgucgaggagugcuccugcuacccccgcuaccccggcguccgcugcgucugccgcgacaacuggaagggcuccaaccgccccaucgucgacaucaacaucaaggacuacuccaucgucuccuccuacgucugcuccggccucgucggcgacaccccccgcaagaacgacuccuccuccaacucccacugccucgaccccaacaacgaggagggcggccacggcgucaagggcugggccuucgacgacggcaacgacgucuggaugggccgcaccaucuccgagaagcuccgcuccggcuacgagaccuucaaggucaucgagggcugguccaaccccaacuccaagcuccagaucaaccgccaggucaucgucgaccgcggcaaccgcuccggcuacuccggcaucuucuccgucgagggcaaguccugcaucaaccgcugcuucuacgucgagcucauccgcggccgcaaccaggagaccgagguccucuggaccuccaacuccaucgucgucuucugcggcaccuccggcaccuacggcaccggcuccuggcccgacggcgccgacaucaaccucaugcccaucuga

SEQ ID NO: 112865 - RNA, 1413 nt, Artificial Sequence; identical to SEQ ID NO: 112668
  derived and/or modified CDS sequence (opt2) from neuraminidase__InfluenzaA__ACR15241

SEQ ID NO: 112866 - RNA, 1410 nt, Artificial Sequence; identical to SEQ ID NO: 111920
  derived and/or modified CDS sequence (opt2) from neuraminidase__InfluenzaA__ACR15252

SEQ ID NO: 112867 - RNA, 1413 nt, Artificial Sequence
  derived and/or modified CDS sequence (opt2) from neuraminidase__InfluenzaA__ACR15263
augaaccccaaccagaagaucaucaccaucggcuccaucuccaucgccaucggcaucaucucccucaugcuccagaucggcaacaucaucuccaucugggccucccacuccauccagaccggcucccagaacaacaccggcaucugcaaccagcgcaucaucaccuacgagaacuccaccugggucaaccacaccuacgucaacaucaacaacaccaacgucgucgccggcgaggacaagaccuccgucacccucgccggcaacuccucccucugcuccaucuccggcugggccaucuacaccaaggacaacuccauccgcaucggcuccaagggcgacgucuucgucauccgcgagcccuucaucuccugcucccaccucgagugccgcaccuucuuccucacccagggcgcccuccucaacgacaagcacuccaacggcaccgucaaggaccgcucccccuaccgcgcccucauguccugcccccucggcgaggcccccucccccuacaacuccaaguucgaguccgucgccugguccgccuccgccugccacgacggcaugggcuggcucaccaucggcaucuccggccccgacaacggcgccgucgccguccucaaguacaacggcaucaucaccggcaccaucaaguccuggaagaagcagauccuccgcacccaggaguccgagugcgucugcaugaacggcuccugcuucaccaucaugaccgacggccccuccaacaaggccgccuccuacaagaucuucaagaucgagaagggcaaggucaccaaguccaucgagcucaacgcccccaacuuccacuacgaggagugcuccugcuaccccgacaccggcaucgucaugugcgucugccgcgacaacuggcacggcuccaaccgccccugggucuccuucaaccagaaccucgacuaccagaucggcuacaucugcuccggcgucuucggcgacaacccccgccccgaggacggcgagggcuccugcaaccccgucaccgucgacggcgccaacggcgucaagggcuucuccuacaaguacgacaacggcgucuggaucggccgcaccaaguccaaccgccuccgcaagggcuucgagaugaucugggaccccaacggcuggaccaacaccgacuccgacuucuccgucaagcaggacgucgucgccaucaccgacugguccggcuacuccggcuccuucguccagcaccccgagcucaccggccucgacugcauccgccccugcuucugggucgagcucguccgcggccucccccgcgagaacaccaccaucugguccuccggcuccuccaucuccuucugcggcgucaacuccgacaccgccaacugguccuggcccgacggcgccgagcuccccuucaccaucgacaaguga

SEQ ID NO: 112868 - RNA, 1413 nt, Artificial Sequence; identical to SEQ ID NO: 112668
  derived and/or modified CDS sequence (opt2) from neuraminidase__InfluenzaA__ACR15274

SEQ ID NO: 112869 - RNA, 1413 nt, Artificial Sequence
  derived and/or modified CDS sequence (opt2) from neuraminidase__InfluenzaA__ACR15307
augaaccccaaccagaagaucaucaccaucggcuccaucuccaucaccaucggcaucaucucccucaugcuccagaucggcaacaucaucuccaucugggccucccacuccauccagaccggcucccagaaccacaccggcaucugcaaccagcgcaucaucaccuacgagaacaacaccugggucaaccacaccuacgucaacaucaacaacaccaacgucgucgccggcaaggacaagaccuccgucacccucgccggcaacuccucccucugcuccaucuccggcugggccaucuacaccaaggacaacuccauccgcaucggcuccaagggcgacgucuucgucauccgcgagcccuucaucuccugcucccaccucgagugccgcaccuucuuccucacccagggcgcccuccucaacgacaagcacuccaacggcaccgucaaggaccgcucccccuaccgcgcccucauguccugcccccucggcgaggcccccucccccuacaacuccaaguucgaguccgucgccugguccgccuccgccugccacgacggcaugggcuggcucaccaucggcaucuccggccccgacaacggcgccgucgccguccucaaguacaacggcaucaucaccgagaccaucaaguccuggaagaagcgcauccuccgcacccaggaguccgagugcgucugcgucaacggcuccugcuucaccaucaugaccgacggccccuccaacggcgccgccuccuacaagaucuucaagaucgagaagggcaaggucaccaaguccaucgagcucaacgcccccaacuuccacuacgaggagugcuccugcuaccccgacaccggcaccgucaugugcgucugccgcgacaacuggcacggcuccaaccgccccugggucuccuucaaccagaaccucgacuaccagaucggcuacaucugcuccggcgucuucggcgacaacccccgccccaaggacggcgagggcuccugcaaccccgucaccgucgacggcgccgacggcgucaagggcuucuccuacaaguacggcaacggcgucuggaucggccgcaccaaguccaaccgccuccgcaagggcuucgagaugaucugggaccccaacggcuggaccgacaccgacuccgacuucuccgucaagcaggacgucgucgccaucaccgacugguccggcuacuccggcuccuucguccagcaccccgagcucaccggccucgacugcauccgccccugcuucugggucgagcucguccgcggccucccccgcgagaacaccaccaucuggaccuccggcuccuccaucuccuucugcggcgucaacuccgacaccgccaacugguccuggcccgacggcgccgagcuccccuucaccaucgacaaguga

SEQ ID NO: 112870 - RNA, 1413 nt, Artificial Sequence
  derived and/or modified CDS sequence (opt2) from neuraminidase__InfluenzaA__ACR15318
augaaccccaaccagaagaucaucaccaucggcuccaucuccaucgccaucggcaucaucucccucaugcuccagaucggcaacaucaucuccaucugggccucccacuccauccagaccggcucccagaaccacaccggcgucugcaaccagcgcaucaucaccuacgagaacuccaccugggucaaccacaccuacgucaacaucaacaacaccaacgucaucgccggcaaggacaagaccuccgucacccucgccggcaacuccucccucugcuccaucuccggcugggccaucuacaccaaggacaacuccauccgcaucggcuccaagggcgacgucuucgucauccgcgagcccuucaucuccugcucccaccucgagugccgcaccuucuuccucacccagggcgcccuccucaacgacaagcacuccaacggcaccgucaaggaccgcucccccuaccgcgcccucauguccugcccccucggcgaggcccccucccccuacaacuccaaguucgaguccgucgccugguccgccuccgccugccacgacggcaugggcuggcucaccaucggcaucuccggccccgacaacggcgccgucgccguccucaaguacaacggcaucaucaccgagaccaucaaguccuggaagcgccagauccuccgcacccaggaguccgagugcgucugcgucaacggcuccugcuucaccaucaugaccgacggccccuccaacggcgccgccuccuacaagaucuucaagaucgagaagggcaaggucaccaaguccaucgagcucaacgcccccaacuuccacuacgaggagugcuccugcuaccccgacaccggcaccgucaugugcgucugccgcgacaacuggcacggcuccaaccgccccugggucuccuucaaccagaaccucgacuaccagaucggcuacaucugcuccggcgucuucggcgacaacccccgccccaaggacggcgagggcuccugcaaccccgucaccgucgacggcgccaacggcgucaagggcuucuccuacaaguacggcaacggcgucuggaucggccgcaccaaguccaaccgccuccgcaagggcuucgagaugaucugggaccccaacggcuggaccgacaccgacuccgacuucuccgucaagcaggacgucgucgccaucaccgacugguccggcuacuccggcuccuucguccagcaccccgagcucaccggccucgacugcauccgccccugcuucugggucgagcucguccgcggccuccccaaggagaacaccaccaucuggaccuccggcuccuccaucuccuucugcggcgucaacuccgacaccgccaacugguccuggcccgacggcgccgagcuccccuucaccaucgacaaguga

SEQ ID NO: 112871 - RNA, 1413 nt, Artificial Sequence
  derived and/or modified CDS sequence (opt2) from neuraminidase__InfluenzaA__ACR15329
augaaccccaaccagaagaucaucaccaucggcuccaucuccaucgccaucggcaucaucucccucaugcuccagaucggcaacaucaucuccaucugggccucccacuccauccagacccgcucccagaaccacaccggcgucugcaaccagcgcaucaucaccuacgagaacuccaccugggucaaccacaccuacgucaacaucaacaacaccaacgucaucgccggcaaggacaagaccuccgucacccucgccggcaacuccucccucugcuccaucuccggcugggccaucuacaccaaggacaacuccauccgcaucggcuccaagggcgacgucuucgucauccgcgagcccuucaucuccugcucccaccucgagugccgcaccuucuuccucacccagggcgcccuccucaacgacaagcacuccaacggcaccgucaaggaccgcucccccuaccgcgcccucauguccugcccccucggcgaggcccccucccccuacaacuccaaguucgaguccgucgccugguccgccuccgccugccacgacggcaugggcuggcucaccaucggcaucuccggccccgacaacggcgccgucgccguccucaaguacaacggcaucaucaccgagaccaucaaguccuggaagaagcagauccuccgcacccaggaguccgagugcgucugcgucaacggcuccugcuucaccaucaugaccgacggccccuccaacggcgccgccuccuacaagaucuucaagaucgagaagggcaaggucaccaaguccaucgagcucaacgcccccaacuuccacuacgaggagugcuccugcuaccccgacaccggcaccgucaugugcgucugccgcgacaacuggcacggcuccaaccgccccugggucuccuucaaccagaaccucgacuaccagaucggcuacaucugcuccggcgucuucggcgacaacccccgccccaaggacggcgagggcuccugcaaccccgucaccgucgacggcgccaacggcgucaagggcuucuccuacaaguacggcaacggcgucuggaucggccgcaccaaguccaaccgccuccgcaagggcuucgagaugaucugggaccccaacggcuggaccgacaccgacuccgacuucuccgucaagcaggacgucgucgccaucaccgacugguccggcuacuccggcuccuucguccagcaccccgagcucaccggccucgacugcauccgccccugcuucugggucgagcucguccgcggccuccccaaggagaacaccaccaucuggaccuccggcuccuccaucuccuucugcggcgucaacuccgacaccgccaacugguccuggcccgacggcgccgagcuccccuucaccaucgacaaguga

SEQ ID NO: 112872 - RNA, 1413 nt, Artificial Sequence; identical to SEQ ID NO: 112668
  derived and/or modified CDS sequence (opt2) from neuraminidase__InfluenzaA__ACR15340

SEQ ID NO: 112873 - RNA, 1413 nt, Artificial Sequence; identical to SEQ ID NO: 112668
  derived and/or modified CDS sequence (opt2) from neuraminidase__InfluenzaA__ACR15362

SEQ ID NO: 112874 - RNA, 1413 nt, Artificial Sequence; identical to SEQ ID NO: 112668
  derived and/or modified CDS sequence (opt2) from neuraminidase__InfluenzaA__ACR15373

SEQ ID NO: 112875 - RNA, 1413 nt, Artificial Sequence
  derived and/or modified CDS sequence (opt2) from neuraminidase__InfluenzaA__ACR15428
augaaccccaaccagaagaucaucaccaucggcuccaucuccaucgccaucggcaucaucucccucaugcuccagaucggcaacaucaucuccaucugggccucccacuccauccagaccggcucccagaacaacaccggcaucugcaaccagcgcaucaucaccuacgagaacuccaccugggucaaccacaccuacgucaacaucaacaacaccaacgucgucgccggcgaggacaagaccuccgucacccucgccggcaacuccucccucugcuccgucuccggcugggccaucuacaccaaggacaacuccauccgcaucggcuccaagggcgacgucuucgucauccgcgagcccuucaucuccugcucccaccucgagugccgcaccuucuuccucaccaagggcgcccuccucaacgacaagcacuccaacggcaccgucaaggaccgcucccccuaccgcgcccucauguccugcccccucggcgaggcccccucccccuacaacuccaaguucgaguccgucgccugguccgccuccgccugccacgacggcaugggcuggcucaccaucggcaucuccggccccgacaacggcgccgucgccguccucaaguacaacggcaucaucaccggcaccaucaaguccuggaagaagcagauccuccgcacccaggaguccgagugcgucugcaugaacggcuccugcuucaccaucaugaccgacggccccuccaacaaggccgccuccuacaagaucuucaagaucgagaagggcaaggucaccaaguccaucgagcucaacgcccccaacuuccacuacgaggagugcuccugcuaccccgacaccggcaucgucaugugcgucugccgcgacaacuggcacggcuccaaccgccccugggucuccuucaaccagaaccucgacuaccagaucggcuacaucugcuccggcgucuucggcgacaacccccgccccgaggacggcgagggcuccugcaaccccgucaccgucgacggcgccaacggcgucaagggcuucuccuacaaguacgacaacggcgucuggaucggccgcaccaaguccaaccgccuccgcaagggcuucgagaugaucugggaccccaacggcuggaccaacaccgacuccgacuucuccgucaagcaggacgucgucgccaucaccgacugguccggcuacuccggcuccuucguccagcaccccgagcucaccggccucgacugcauccgccccugcuucugggucgagcucguccgcggccucccccgcgagaacaccaccaucuggaccuccggcuccuccaucuccuucugcggcgucaacuccgacaccgccaacugguccuggcccgacggcgccgagcuccccuucaccaucgacaaguga

SEQ ID NO: 112876 - RNA, 1413 nt, Artificial Sequence
  derived and/or modified CDS sequence (opt2) from neuraminidase__InfluenzaA__ACR15472
augaaccccaaccagaagaucaucaccaucggcuccaucuccaucgccaucggcaucaucucccucaugcuccagaucggcaacaucaucuccaucugggccucccacuccauccagaccggcucccagaacaacaccggcaucugcaaccagcgcaucaucaccuacgagaacuccaccugggucaaccacaccuacgucaacaucaacaacaccaacgucgucgccggcgaggacaagacccccgucacccucgccggcaacuccucccucugcuccaucuccggcugggccaucuacaccaaggacaacuccauccgcaucggcuccaagggcgacgucuucgucauccgcgagcccuucaucgccugcucccaccucgagugccgcaccuucuuccucacccagggcgcccuccucaacgacaagcacuccaacggcaccgucaaggaccgcucccccuaccgcgcccucauguccugcccccucggcgaggcccccucccccuacaacuccaaguucgaguccgucgccugguccgccuccgccugccacgacggcaugggcuggcucaccaucggcaucuccggccccgacaacggcgccgucgccguccucaaguacaacggcaucaucaccggcaccaucaaguccuggaagaagcagauccuccgcacccaggaguccgagugcgucugcaugaacggcuccugcuucaccaucaugaccgacggccccuccaacaaggccgccuccuacaagaucuucaagaucgagaagggcaaggucaccaaguccaucgagcucaacgcccccaacuuccacuacgaggagugcuccugcuaccccgacaccggcaucgucaugugcgucugccgcgacaacuggcacggcuccaaccgccccugggucuccuucaaccagaaccucgacuaccagaucggcuacaucugcuccggcgucuucggcgacaacccccgccccgaggacggcgagggcuccugcaaccccgucaccgucgacggcgccaacggcgucaagggcuucuccuacaaguacgacaacggcgucuggaucggccgcaccaaguccaaccgccuccgcaagggcuucgaggucaucugggaccccaacggcuggaccaacaccgacuccgacuucuccgucaagcaggacgucgucgccaucaccgacugguccggcuacuccggcuccuucguccagcaccccgagcucaccggccucgacugcauccgccccugcuucugggucgagcucguccgcggccucccccgcgagaacaccaccaucuggaccuccggcuccuccaucuccuucugcggcgucaacuccgacaccgccaacugguccuggcccgacggcgccgagcuccccuucaccaucgacaaguga

SEQ ID NO: 112877 - RNA, 1413 nt, Artificial Sequence; identical to SEQ ID NO: 112668
  derived and/or modified CDS sequence (opt2) from neuraminidase__InfluenzaA__ACR15483

SEQ ID NO: 112878 - RNA, 1413 nt, Artificial Sequence; identical to SEQ ID NO: 112668
  derived and/or modified CDS sequence (opt2) from neuraminidase__InfluenzaA__ACR15505

SEQ ID NO: 112879 - RNA, 1413 nt, Artificial Sequence; identical to SEQ ID NO: 112752
  derived and/or modified CDS sequence (opt2) from neuraminidase__InfluenzaA__ACR15516

SEQ ID NO: 112880 - RNA, 1410 nt, Artificial Sequence; identical to SEQ ID NO: 110750
  derived and/or modified CDS sequence (opt2) from neuraminidase__InfluenzaA__ACR15527

SEQ ID NO: 112881 - RNA, 1410 nt, Artificial Sequence
  derived and/or modified CDS sequence (opt2) from neuraminidase__InfluenzaA__ACR15538
augauccccauccagaagaucaucaccaucggcuccgucucccucaccaucuccaccaucugcuucuucaugcagaucgccauccucaucaccaccgucacccuccacuucaagcaguacgaguucaacuccccccccaacaaccaggucaugcucugcgagcccaccaucaucgagcgcaacaucaccgagaucgucuaccucaccaacaccaccaucgagaaggagaucugccccaagcucgccgaguaccgcaacugguccaagccccagugcgacaucaccggcuucgcccccuucuccaaggacaacuccauccgccucuccgccggcggcgacaucugggucacccgcgagcccuacgucuccugcgaccccgacaagugcuaccaguucgcccucggccagggcaccacccucaacaacguccacuccaacgacaccguccacgaccgcacccccuaccgcacccuccucaugaacgagcucggcguccccuuccaccucggcaccaagcaggucugcaucgccugguccuccuccuccugccacgacggcaaggccuggcuccacgucugcgucaccggcgacgacaagaacgccaccgccuccuucaucuacaacggccgccucgucgacuccaucgucuccugguccaaggagauccuccgcacccaggaguccgagugcgucugcaucaacggcaccugcaccgucgucaugaccgacggcuccgccuccggcaaggccgacaccaagauccucuucaucgaggagggcaagaucguccacaccuccacccucuccggcuccgcccagcacgucgaggagugcuccugcuacccccgcuaccccggcguccgcugcgucugccgcgacaacuggaagggcuccaaccgccccaucgucgacaucaacaucaaggacuacuccaucgucuccuccuacgucugcuccggccucgucggcgacaccccccgcaagaacgacuccuccuccuccucccacugccucgaccccaacaacgaggagggcggccacggcgucaagggcugggccuucgacgacggcaacgacgucuggaugggccgcaccaucuccgagaagcuccgcuccggcuacgagaccuucaaggucaucgagggcugguccaaccccaacuccaagcuccagaucaaccgccaggucaucgucgaccgcggcaaccgcuccggcuacuccggcaucuucuccgucgagggcaaguccugcaucaaccgcugcuucuacgucgagcucauccgcggccgcaaggaggagaccgagguccucuggaccuccaacuccaucgucgucuucugcggcaccuccggcaccuacggcaccggcuccuggcccgacggcgccgacaucaaccucaugcccaucuga

SEQ ID NO: 112882 - RNA, 1410 nt, Artificial Sequence; identical to SEQ ID NO: 110363
  derived and/or modified CDS sequence (opt2) from neuraminidase__InfluenzaA__ACR15549

SEQ ID NO: 112883 - RNA, 1410 nt, Artificial Sequence; identical to SEQ ID NO: 110748
  derived and/or modified CDS sequence (opt2) from neuraminidase__InfluenzaA__ACR15560

SEQ ID NO: 112884 - RNA, 1410 nt, Artificial Sequence; identical to SEQ ID NO: 110748
  derived and/or modified CDS sequence (opt2) from neuraminidase__InfluenzaA__ACR15582

SEQ ID NO: 112885 - RNA, 1410 nt, Artificial Sequence
  derived and/or modified CDS sequence (opt2) from neuraminidase__InfluenzaA__ACR15593
augaaccccaaccagaagaucaucaccaucggcuccgucucccucaccaucuccaccaucugcuucuucaugcagaucgccauccucaucaccaccgucacccuccacuucaagcaguacgaguucaacuccccccccaacaaccaggucaugcucugcgagcccaccaucaucgagcgcaacaucaccgagaucgucuaccucaccaacaccaccaucgagaaggagaucugccccaagcaggccgaguaccgcaacugguccaagccccagugcaacaucaccggcuucgcccccuucuccaaggacaacuccauccgccucuccgccggcggcgacaucugggucacccgcgagcccuacgucuccugcgaccccgacaagugcuaccaguucgcccucggccagggcaccacccucaacaacguccacuccaacgacaccguccacgaccgcacccccuaccgcacccuccucaugaacgagcucggcguccccuuccaccucggcaccaagcaggucugcaucgccugguccuccuccuccugccacgacggcaaggccuggcuccacgucugcgucaccggcgacgacaagaacgccaccgccuccuucaucuacaacggccgccucgucgacuccaucgucuccugguccaaggagauccuccgcacccaggaguccgagugcgucugcaucaacggcaccugcaccgucgucaugaccgacggcuccgccuccggcaaggccgacaccaagauccucuucaucgaggagggcaagaucguccacaccuccacccucuccggcuccgcccagcacgucgaggagugcuccugcuacccccgcuaccccggcguccgcugcgucugccgcgacaacuggaagggcuccaaccgccccaucgucgacaucaacaucaaggacuacuccaucgucuccuccuacgucugcuccggccucgucggcgacaccccccgcaagaacgacuccuccuccuccucccacugccucgaccccaacaacgaggagggcggccacggcgucaagggcugggccuucgacgacggcaacgacgucuggaugggccgcaccaucuccgagaagcuccgcuccggcuacgagaccuucaaggucaucgagggcugguccaaccccaacuccaagcuccagaucaaccgccaggucaucgucgaccgcggcaaccgcuccggcuacuccggcaucuucuccgucgagggcaaguccugcaucaaccgcugcuucuacgucgagcucauccgcggccgcaaggaggagaccgagguccucuggaccuccaacuccaucgucgucuucugcggcaccuccggcaccuacggcaccggcuccuggcccgacggcgccgacaucaaccucaugcccaucuga

SEQ ID NO: 112886 - RNA, 1410 nt, Artificial Sequence
  derived and/or modified CDS sequence (opt2) from neuraminidase__InfluenzaA__ACR15604
augaaccccaaccagaagaucaucaccaucggcuccgucucccucaccaucuccaccaucugcuucuucaugcagaucgccauccucaucaccaccgucacccuccacuucaagcaguacgaguucaacuccccccccaacaaccaggucaugcucugcgagcccaccaucaucgagcgcaacaucaccgagaucgucuaccucaccaacaccaccaucgagaaggagaucugccccaagcucgccgaguaccgcaacugguccaagccccagugcaacaucaccggcuucgcccccuucuccaaggacaacuccauccgccucuccgccggcggcgacaucugggucacccgcgagcccuacgucuccugcgaccccgacaagugcuaccaguucgcccucggccagggcaccacccucaacaacguccacuccaacgacaccguccacgaccgcacccccuaccgcacccuccucaugaacgagcucggcguccccuuccaccucggcaccaagcaggucugcaucgccugguccuccuccuccugccacgacggcaaggccuggcuccacgucugcgucaccggcgacgacaagaacgccaccgccuccuucaucuacaacggccgccucgucgacuccaucgucuccugguccaaggagauccuccgcacccaggaguccgagugcgucugcaucaacggcaccugcaccgucgucaugaccgacggcuccgccuccggcaaggccgacaccaagauccucuucaucgaggagggcaagaucguccacaccuccacccucuccggcuccgcccagcacgucgaggagugcuccugcuacccccgcuaccccggcguccgcugcgucugccgcgacaacuggaagggcuccaaccgccccaucgucgacaucaacaucaaggacuacuccaucgucuccuccuacgucugcuccggccucgucggcgacaccccccgcaagaacgacuccuccuccuccucccacugccucgaccccaacaacgaggagggcggccacggcgucaagggcugggccuucgacgacggcaacgacgucuggaugggccgcaccaucuccgagaagcuccgcuccggcuacgagaccuucaaggucaucgagggcugguccaaccccaacuccaagcuccagaucaaccgccaggucaucgucgaccgcggcgaccgcuccggcuacuccggcaucuucuccgucgagggcaaguccugcaucaaccgcugcuucuacgucgagcucauccgcggccgcaaggaggagaccgagguccucuggaccuccaacuccaucgucgucuucugcggcaccuccggcaccuacggcaccggcuccuggcccgacggcgccgacaucaaccucaugcccaucuga

SEQ ID NO: 112887 - RNA, 1410 nt, Artificial Sequence; identical to SEQ ID NO: 112764
  derived and/or modified CDS sequence (opt2) from neuraminidase__InfluenzaA__ACR15618

SEQ ID NO: 112888 - RNA, 1410 nt, Artificial Sequence; identical to SEQ ID NO: 112764
  derived and/or modified CDS sequence (opt2) from neuraminidase__InfluenzaA__ACR18924

SEQ ID NO: 112889 - RNA, 1410 nt, Artificial Sequence; identical to SEQ ID NO: 112764
  derived and/or modified CDS sequence (opt2) from neuraminidase__InfluenzaA__ACR18925

SEQ ID NO: 112890 - RNA, 1410 nt, Artificial Sequence; identical to SEQ ID NO: 112774
  derived and/or modified CDS sequence (opt2) from neuraminidase__InfluenzaA__ACR18926

SEQ ID NO: 112891 - RNA, 1410 nt, Artificial Sequence; identical to SEQ ID NO: 112774
  derived and/or modified CDS sequence (opt2) from neuraminidase__InfluenzaA__ACR18927

SEQ ID NO: 112892 - RNA, 1410 nt, Artificial Sequence; identical to SEQ ID NO: 112774
  derived and/or modified CDS sequence (opt2) from neuraminidase__InfluenzaA__ACR18928

SEQ ID NO: 112893 - RNA, 1410 nt, Artificial Sequence; identical to SEQ ID NO: 112774
  derived and/or modified CDS sequence (opt2) from neuraminidase__InfluenzaA__ACR18929

SEQ ID NO: 112894 - RNA, 1410 nt, Artificial Sequence; identical to SEQ ID NO: 112774
  derived and/or modified CDS sequence (opt2) from neuraminidase__InfluenzaA__ACR18930

SEQ ID NO: 112895 - RNA, 1410 nt, Artificial Sequence; identical to SEQ ID NO: 112774
  derived and/or modified CDS sequence (opt2) from neuraminidase__InfluenzaA__ACR18931

SEQ ID NO: 112896 - RNA, 1410 nt, Artificial Sequence; identical to SEQ ID NO: 112774
  derived and/or modified CDS sequence (opt2) from neuraminidase__InfluenzaA__ACR18933

SEQ ID NO: 112897 - RNA, 1410 nt, Artificial Sequence; identical to SEQ ID NO: 112764
  derived and/or modified CDS sequence (opt2) from neuraminidase__InfluenzaA__ACR18934

SEQ ID NO: 112898 - RNA, 1410 nt, Artificial Sequence; identical to SEQ ID NO: 112774
  derived and/or modified CDS sequence (opt2) from neuraminidase__InfluenzaA__ACR18935

SEQ ID NO: 112899 - RNA, 1410 nt, Artificial Sequence; identical to SEQ ID NO: 112774
  derived and/or modified CDS sequence (opt2) from neuraminidase__InfluenzaA__ACR23301

SEQ ID NO: 112900 - RNA, 1410 nt, Artificial Sequence; identical to SEQ ID NO: 112774
  derived and/or modified CDS sequence (opt2) from neuraminidase__InfluenzaA__ACR32997

SEQ ID NO: 112901 - RNA, 1410 nt, Artificial Sequence
  derived and/or modified CDS sequence (opt2) from neuraminidase__InfluenzaA__ACR33740
augaaccccaaccagaagaucaucaccaucggcuccgucugcaugaccaucggcauggccaaccucauccuccagaucggcaacaucaucuccaucuggaucucccacuccauccagcucggcaaccagaaccagaucgagaccugcaaccaguccgucaucaccuacgagaacaacaccugggucaaccagaccuacgucaacaucuccaacaccaacuucgccgccggccaguccgucgucuccgucaagcucgccggcaacuccucccucugccccgucuccggcugggccaucuacuccaaggacaacuccauccgcaucggcuccaagggcgacgucuucgucauccgcgagcccuucaucuccugcuccccccucgagugccgcaccuucuuccucacccagggcgcccuccucaacgacaagcacuccaacggcaccaucaaggaccgcucccccuaccgcacccucauguccugccccaucggcgagguccccucccccuacaacucccgcuucgaguccgucgccugguccgccuccgccugccacgacggcaucaacuggcucaccaucggcaucuccggccccgacaacggcgccgucgccguccucaaguacaacggcaucaucaccgacaccaucaaguccuggcgcaacaacauccuccgcacccaggaguccgagugcgccugcgucaacggcuccugcuucaccgucaugaccgacggccccuccgacggccaggccuccuacaagaucuuccgcaucgagaagggcaagaucgucaaguccgucgagaugaacgcccccaacuaccacuacgaggagugcuccugcuaccccgacuccuccgagaucaccugcgucugccgcgacaacuggcacggcuccaaccgccccugggucuccuucaaccagaaccucgaguaccagaucggcuacaucugcuccggcaucuucggcgacaacccccgccccaacgacaagaccggcuccugcggccccgucuccuccaacggcgccaacggcgucaagggcuucuccuucaaguacggcaacggcgucuggaucggccgcaccaaguccaucuccucccgcaacggcuucgagaugaucugggaccccaacggcuggaccggcaccgacaacaacuucuccaucaagcaggacaucgucggcaucaacgagugguccggcuacuccggcuccuucguccagcaccccgagcucaccggccucgacugcauccgccccugcuucugggucgagcucauccgcggccgccccaaggagaacaccaucuggaccuccggcuccuccaucuccuucugcggcgucaacuccggcaccgucggcugguccuggcccgacggcgccgagcuccccuucaccaucgacaaguga

SEQ ID NO: 112902 - RNA, 1410 nt, Artificial Sequence; identical to SEQ ID NO: 112764
  derived and/or modified CDS sequence (opt2) from neuraminidase__InfluenzaA__ACR38792

SEQ ID NO: 112903 - RNA, 1410 nt, Artificial Sequence; identical to SEQ ID NO: 112774
  derived and/or modified CDS sequence (opt2) from neuraminidase__InfluenzaA__ACR38793

SEQ ID NO: 112904 - RNA, 1410 nt, Artificial Sequence; identical to SEQ ID NO: 112774
  derived and/or modified CDS sequence (opt2) from neuraminidase__InfluenzaA__ACR38794

SEQ ID NO: 112905 - RNA, 1410 nt, Artificial Sequence; identical to SEQ ID NO: 112774
  derived and/or modified CDS sequence (opt2) from neuraminidase__InfluenzaA__ACR38878

SEQ ID NO: 112906 - RNA, 1410 nt, Artificial Sequence; identical to SEQ ID NO: 112774
  derived and/or modified CDS sequence (opt2) from neuraminidase__InfluenzaA__ACR39357

SEQ ID NO: 112907 - RNA, 1410 nt, Artificial Sequence; identical to SEQ ID NO: 112774
  derived and/or modified CDS sequence (opt2) from neuraminidase__InfluenzaA__ACR39396

SEQ ID NO: 112908 - RNA, 1410 nt, Artificial Sequence; identical to SEQ ID NO: 112774
  derived and/or modified CDS sequence (opt2) from neuraminidase__InfluenzaA__ACR39406

SEQ ID NO: 112909 - RNA, 1410 nt, Artificial Sequence; identical to SEQ ID NO: 112774
  derived and/or modified CDS sequence (opt2) from neuraminidase__InfluenzaA__ACR39416

SEQ ID NO: 112910 - RNA, 1410 nt, Artificial Sequence; identical to SEQ ID NO: 112774
  derived and/or modified CDS sequence (opt2) from neuraminidase__InfluenzaA__ACR39426

SEQ ID NO: 112911 - RNA, 1410 nt, Artificial Sequence; identical to SEQ ID NO: 112774
  derived and/or modified CDS sequence (opt2) from neuraminidase__InfluenzaA__ACR39436

SEQ ID NO: 112912 - RNA, 1410 nt, Artificial Sequence; identical to SEQ ID NO: 112774
  derived and/or modified CDS sequence (opt2) from neuraminidase__InfluenzaA__ACR39446

SEQ ID NO: 112913 - RNA, 1410 nt, Artificial Sequence; identical to SEQ ID NO: 112774
  derived and/or modified CDS sequence (opt2) from neuraminidase__InfluenzaA__ACR39456

SEQ ID NO: 112914 - RNA, 1410 nt, Artificial Sequence; identical to SEQ ID NO: 112774
  derived and/or modified CDS sequence (opt2) from neuraminidase__InfluenzaA__ACR39466

SEQ ID NO: 112915 - RNA, 1410 nt, Artificial Sequence; identical to SEQ ID NO: 112774
  derived and/or modified CDS sequence (opt2) from neuraminidase__InfluenzaA__ACR39476

SEQ ID NO: 112916 - RNA, 1410 nt, Artificial Sequence; identical to SEQ ID NO: 112774
  derived and/or modified CDS sequence (opt2) from neuraminidase__InfluenzaA__ACR39486

SEQ ID NO: 112917 - RNA, 1410 nt, Artificial Sequence; identical to SEQ ID NO: 112774
  derived and/or modified CDS sequence (opt2) from neuraminidase__InfluenzaA__ACR39496

SEQ ID NO: 112918 - RNA, 1410 nt, Artificial Sequence; identical to SEQ ID NO: 112774
  derived and/or modified CDS sequence (opt2) from neuraminidase__InfluenzaA__ACR40291

SEQ ID NO: 112919 - RNA, 1410 nt, Artificial Sequence; identical to SEQ ID NO: 112774
  derived and/or modified CDS sequence (opt2) from neuraminidase__InfluenzaA__ACR40301

SEQ ID NO: 112920 - RNA, 1410 nt, Artificial Sequence
  derived and/or modified CDS sequence (opt2) from neuraminidase__InfluenzaA__ACR40311
augaaccccaaccagaagaucaucaccaucggcuccgucugcaugaccaucggcauggccaaccucauccuccagaucggcaacaucaucuccaucuggaucucccacuccauccagcucggcaaccagaaccagaccgagaccugcaaccaguccgucaucaccuacgagaacaacaccugggucaaccagaccuacgucaacaucuccaacaccaacuucgccgccggccaguccgucgucuccgucaagcucgccggcaacuccucccucugccccgucuccggcugggccaucuacuccaaggacaacuccguccgcaucggcuccaagggcgacgucuucgucauccgcgagcccuucaucuccugcuccccccucgagugccgcaccuucuuccucacccagggcgcccuccucaacgacaagcacuccaacggcaccaucaaggaccgcucccccuaccgcacccucauguccugccccaucggcgagguccccucccccuacaacucccgcuucgaguccgucgccugguccgccuccgccugccacgacggcaucaacuggcucaccaucggcaucuccggccccgacaacggcgccgucgccguccucaaguacaacggcaucaucaccgacaccaucaaguccuggcgcaacaacauccuccgcacccaggaguccgagugcgccugcgucaacggcuccugcuucaccgucaugaccgacggccccuccaacggccaggccuccuacaagaucuuccgcaucgagaagggcaagaucgucaaguccgucgagaugaacgcccccaacuaccacuacgaggagugcuccugcuaccccgacuccuccgagaucaccugcgucugccgcgacaacuggcacggcuccaaccgccccugggucuccuucaaccagaaccucgaguaccagaucggcuacaucugcuccggcaucuucggcgacaacccccgccccaacgacaagaccggcuccugcggccccgucuccuccaacggcgccaacggcgucaagggcuucuccuucaaguacggcaacggcgucuggaucggccgcaccaaguccaucuccucccgcaacggcuucgagaugaucugggaccccaacggcuggaccggcaccgacaacaacuucuccaucaagcaggacaucgucggcaucaacgagugguccggcuacuccggcuccuucguccagcaccccgagcucaccggccucgacugcauccgccccugcuucugggucgagcucauccgcggccgccccaaggagaacaccaucuggaccuccggcuccuccaucuccuucugcggcgucaacuccgacaccgucggcugguccuggcccgacggcgccgagcuccccuucaccaucgacaaguga

SEQ ID NO: 112921 - RNA, 1410 nt, Artificial Sequence
  derived and/or modified CDS sequence (opt2) from neuraminidase__InfluenzaA__ACR40321
augaaccccaaccagaagaucaucaccaucggcuccgucugcaugaccaucggcauggccaaccucauccuccagaucggcaacaucaucuccaucuggaucucccacuccauccagcucggcaaccagaaccagaucgagaccugcaaccaguccgucaucaccuacgagaacaacaccugggucaaccagaccuacgucaacaucuccaacaccaacuucgccgccggccaguccgucgucuccgucaagcucgccggcaacuccucccucugccccgucuccggcugggccaucuacuccaaggacaacuccauccgcaucggcuccaagggcgacgucuucgucauccgcgagcccuucaucuccugcuccccccucgagugccgcaccuucuuccucacccagggcgcccuccucaacgacaagcacuccaacggcaccaucaaggaccgcucccccuaccgcacccucauguccugccccaucggcgagguccccucccccuacaacucccgcuucgaguccgucgccugguccgccuccgccugccacgacggcaucaacuggcucaccaucggcaucuccggccccgacaacggcgccgucgccguccucaaguacaacggcaucaucaccgacaccaucaaguccuggcgcaacaacauccuccgcacccaggaguccgagugcgccugcgucaacggcuccugcuucaccgucaugaccgacggccccuccgacggccaggccuccuacaagaucuuccgcaucgagaagggcaagaucgucaaguccgucgagaugaacgcccccaacuaccacuacgaggagugcuccugcuaccccgacuccuccgagaucaccugcgucugccgcgacaacuggcacggcuccaaccgccccugggucuccuucaaccagaaccucgaguaccagaucggcuacaucugcuccggcaucuucggcgacaacccccgccccaacgacaagaccggcuccugcggccccgucuccuccaacggcgccaacggcgucaagggcuucuccuucaaguacggcaacggcgucuggaucggccgcaccaaguccaucuccucccgcaacggcuucgagaugaucugggaccccaacggcuggaacggcaccgacaacaacuucuccaucaagcaggacaucgucggcaucaacgagugguccggcuacuccggcuccuucguccagcaccccgagcucaccggccucgacugcauccgccccugcuucugggucgagcucauccgcggccgccccaaggagaacaccaucuggaccuccggcuccuccaucuccuucugcggcgucaacuccgacaccgucggcugguccuggcccgacggcgccgagcuccccuucaccaucgacaaguga

SEQ ID NO: 112922 - RNA, 1410 nt, Artificial Sequence; identical to SEQ ID NO: 112774
  derived and/or modified CDS sequence (opt2) from neuraminidase__InfluenzaA__ACR40341

SEQ ID NO: 112923 - RNA, 1410 nt, Artificial Sequence; identical to SEQ ID NO: 112774
  derived and/or modified CDS sequence (opt2) from neuraminidase__InfluenzaA__ACR40351

SEQ ID NO: 112924 - RNA, 1410 nt, Artificial Sequence; identical to SEQ ID NO: 112774
  derived and/or modified CDS sequence (opt2) from neuraminidase__InfluenzaA__ACR40361

SEQ ID NO: 112925 - RNA, 1410 nt, Artificial Sequence; identical to SEQ ID NO: 112774
  derived and/or modified CDS sequence (opt2) from neuraminidase__InfluenzaA__ACR40371

SEQ ID NO: 112926 - RNA, 1410 nt, Artificial Sequence; identical to SEQ ID NO: 112774
  derived and/or modified CDS sequence (opt2) from neuraminidase__InfluenzaA__ACR40391

SEQ ID NO: 112927 - RNA, 1410 nt, Artificial Sequence; identical to SEQ ID NO: 112764
  derived and/or modified CDS sequence (opt2) from neuraminidase__InfluenzaA__ACR46663

SEQ ID NO: 112928 - RNA, 1410 nt, Artificial Sequence; identical to SEQ ID NO: 112764
  derived and/or modified CDS sequence (opt2) from neuraminidase__InfluenzaA__ACR46673

SEQ ID NO: 112929 - RNA, 1410 nt, Artificial Sequence
  derived and/or modified CDS sequence (opt2) from neuraminidase__InfluenzaA__ACR46996
augaaccccaaccagaagaucaucaccaucggcuccgucugcaugaccaucggcauggccaaccucauccuccagaucggcaacaucaucuccaucuggaucucccacuccauccagcucggcaaccagaaccagaucgagaccugcaaccaguccgucaucaccuacgagaacaacaccugggucaaccagaccuacgucaacaucuccaacaccaacuucgccgccggccaguccgucgucuccgucaagcucgccggcaacuccucccucugccccgucuccggcugggccaucuacuccaaggacaacuccauccgcaucggcuccaagggcgacgucuucgucauccgcgagcccuucaucuccugcuccccccucgagugccgcaccuucuuccucacccagggcgcccuccucaacgacaagcacuccaacggcaccaucaaggaccgcucccccuaccgcacccucauguccugccccaucggcgagguccccucccccuacaacucccgcuucgaguccgucgccugguccgccuccgccugccacgacggcaucaacuggcucaccaucggcaucuccggccccgacaacggcgccgucgccguccucaaguacaacggcaucaucaccgacaccaucaaguccuggcgcaacaacauccuccgcacccaggaguccgagugcgccugcgucaacggcuccugcuucaccgucaugaccgacggccccuccaacggccaggccuccuacaagaucuuccgcaucgagaagggcaagaucgucaaguccgucgagaugaacgcccccaacuaccacuacgaggagugcuccugcuaccccgacuccuccgagaucaccugcgucugccgcgacaacuggcacggcuccaaccgccccugggucuccuucaaccagaaccucgaguaccagaucggcuacaucugcuccggcaucuucggcgacaacccccgccccaacgacaagaccggcuccugcggccccgucuccuccaacggcgccaacggcgucaagggcuucuccuucaaguacggcaacggcgucuggaucggccgcaccaaguccaucuccucccgcaacggcuucgagaugaucugggaccccaacggcuggaccggcaccgacaacaacuucuccaucaagcaggacaucgucggcaucaacgagugguccggcuacuccggcuccuucguccagcaccccgagcucaccggccucgacugcauccgccccugcuucugggucgagcucauccgcggccgccccaaggagaacaccaucuggaccuccggcuccuccaucuccuucugcggcgucaacuccgacaccgucggcugguccuggcccgacggcgccgagcuccccuucaccaucgacaaguga

SEQ ID NO: 112930 - RNA, 1410 nt, Artificial Sequence; identical to SEQ ID NO: 112929
  derived and/or modified CDS sequence (opt2) from neuraminidase__InfluenzaA__ACR46997

SEQ ID NO: 112931 - RNA, 1410 nt, Artificial Sequence; identical to SEQ ID NO: 112929
  derived and/or modified CDS sequence (opt2) from neuraminidase__InfluenzaA__ACR46998

SEQ ID NO: 112932 - RNA, 1410 nt, Artificial Sequence; identical to SEQ ID NO: 112929
  derived and/or modified CDS sequence (opt2) from neuraminidase__InfluenzaA__ACR46999

SEQ ID NO: 112933 - RNA, 1410 nt, Artificial Sequence; identical to SEQ ID NO: 112929
  derived and/or modified CDS sequence (opt2) from neuraminidase__InfluenzaA__ACR47000

SEQ ID NO: 112934 - RNA, 1410 nt, Artificial Sequence; identical to SEQ ID NO: 112929
  derived and/or modified CDS sequence (opt2) from neuraminidase__InfluenzaA__ACR47001

SEQ ID NO: 112935 - RNA, 1410 nt, Artificial Sequence; identical to SEQ ID NO: 112929
  derived and/or modified CDS sequence (opt2) from neuraminidase__InfluenzaA__ACR47002

SEQ ID NO: 112936 - RNA, 1410 nt, Artificial Sequence; identical to SEQ ID NO: 112929
  derived and/or modified CDS sequence (opt2) from neuraminidase__InfluenzaA__ACR47003

SEQ ID NO: 112937 - RNA, 1410 nt, Artificial Sequence
  derived and/or modified CDS sequence (opt2) from neuraminidase__InfluenzaA__ACR47008
augaaccccaaccagaagaucaucaccaucggcuccgucugcaugaccaucggcauggccaaccucauccuccagaucggcaacaucaucuccaucuggcccguccacuccauccagcucggcaaccagaaccagaucgagaccugcaaccaguccgucaucaccuacgagaacaacaccugggucaaccagaccuacgucaacaucuccaacaccaacuucgccgccggccaguccgucgucuccaugaagcucgccggcaacuccucccucugccccgucggcggcugggccaucuacuccaaggacaacuccguccgcaucggcuccaagggcgacgucuucgucauccgcgagcccuucaucuccugcuccccccucgagugccgcaccuucuuccucacccagggcgcccuccucaacgacaagcacuccaacggcaccaucaaggaccgcucccccuaccgcacccucauguccugccccaucggcgagguccccucccccuacaacucccgcuucgaguccgucgccugguccgccuccgccugccacgacggcaucaacuggcucaccaucggcaucuccggccccgacaacggcgccgucgccguccucaaguacaacggcaucaucaccgacaccaucaaguccuggcgcaacaacauccuccgcacccaggaguccgagugcgccugcgucaacggcuccugcuucaccgucaugaccgacggccccuccaacggccaggccuccuacaagaucuuccgcaucgagaagggcaagaucgucaaguccgucgagaugaacgcccccaacuaccacuacgaggagugcuccugcuaccccgacuccuccgagaucaccugcgucugccgcgacaacuggcacggcuccaaccgccccugggucuccuucaaccagaaccucgaguaccagaucggcuacaucugcuccggcaucuucggcgacaacccccgccccaacgacaagaccggcuccugcggccccgucuccuccaacggcgccaacggcgucaagggcuucuccuucaaguacggcaacggcgucuggaucggccgcaccaaguccaucuccucccgcaacggcuucgagaugaucugggaccccaacggcuggaccggcaccgacaacaacuucuccaucaagcaggacaucgucggcaucaacgagugguccggcuacuccggcuccuucguccagcaccccgagcucaccggccucgacugcauccgccccugcuucugggucgagcucauccgcggccgccccaaggagaacaccaucuggaccuccggcuccuccaucuccuucugcggcgucaacuccgacaccgucggcugguccuggcccgacggcgccgagcuccccuucaccaucgacaaguga

SEQ ID NO: 112938 - RNA, 1410 nt, Artificial Sequence; identical to SEQ ID NO: 112774
  derived and/or modified CDS sequence (opt2) from neuraminidase__InfluenzaA__ACR49267

SEQ ID NO: 112939 - RNA, 1410 nt, Artificial Sequence; identical to SEQ ID NO: 112764
  derived and/or modified CDS sequence (opt2) from neuraminidase__InfluenzaA__ACR49268

SEQ ID NO: 112940 - RNA, 1410 nt, Artificial Sequence; identical to SEQ ID NO: 112764
  derived and/or modified CDS sequence (opt2) from neuraminidase__InfluenzaA__ACR49269

SEQ ID NO: 112941 - RNA, 1410 nt, Artificial Sequence; identical to SEQ ID NO: 112764
  derived and/or modified CDS sequence (opt2) from neuraminidase__InfluenzaA__ACR49270

SEQ ID NO: 112942 - RNA, 1410 nt, Artificial Sequence; identical to SEQ ID NO: 112804
  derived and/or modified CDS sequence (opt2) from neuraminidase__InfluenzaA__ACR49271

SEQ ID NO: 112943 - RNA, 1410 nt, Artificial Sequence; identical to SEQ ID NO: 112774
  derived and/or modified CDS sequence (opt2) from neuraminidase__InfluenzaA__ACR49272

SEQ ID NO: 112944 - RNA, 1410 nt, Artificial Sequence; identical to SEQ ID NO: 112764
  derived and/or modified CDS sequence (opt2) from neuraminidase__InfluenzaA__ACR49273

SEQ ID NO: 112945 - RNA, 1410 nt, Artificial Sequence; identical to SEQ ID NO: 112764
  derived and/or modified CDS sequence (opt2) from neuraminidase__InfluenzaA__ACR49274

SEQ ID NO: 112946 - RNA, 1410 nt, Artificial Sequence; identical to SEQ ID NO: 112804
  derived and/or modified CDS sequence (opt2) from neuraminidase__InfluenzaA__ACR49275

SEQ ID NO: 112947 - RNA, 1410 nt, Artificial Sequence; identical to SEQ ID NO: 112804
  derived and/or modified CDS sequence (opt2) from neuraminidase__InfluenzaA__ACR49277

SEQ ID NO: 112948 - RNA, 1410 nt, Artificial Sequence; identical to SEQ ID NO: 112804
  derived and/or modified CDS sequence (opt2) from neuraminidase__InfluenzaA__ACR49278

SEQ ID NO: 112949 - RNA, 1410 nt, Artificial Sequence; identical to SEQ ID NO: 112764
  derived and/or modified CDS sequence (opt2) from neuraminidase__InfluenzaA__ACR49279

SEQ ID NO: 112950 - RNA, 1410 nt, Artificial Sequence; identical to SEQ ID NO: 112764
  derived and/or modified CDS sequence (opt2) from neuraminidase__InfluenzaA__ACR50994

SEQ ID NO: 112951 - RNA, 1410 nt, Artificial Sequence; identical to SEQ ID NO: 112774
  derived and/or modified CDS sequence (opt2) from neuraminidase__InfluenzaA__ACR50998

SEQ ID NO: 112952 - RNA, 1410 nt, Artificial Sequence; identical to SEQ ID NO: 112774
  derived and/or modified CDS sequence (opt2) from neuraminidase__InfluenzaA__ACR51008

SEQ ID NO: 112953 - RNA, 1410 nt, Artificial Sequence; identical to SEQ ID NO: 112774
  derived and/or modified CDS sequence (opt2) from neuraminidase__InfluenzaA__ACR51018

SEQ ID NO: 112954 - RNA, 1410 nt, Artificial Sequence; identical to SEQ ID NO: 112774
  derived and/or modified CDS sequence (opt2) from neuraminidase__InfluenzaA__ACR51028

SEQ ID NO: 112955 - RNA, 1410 nt, Artificial Sequence
  derived and/or modified CDS sequence (opt2) from neuraminidase__InfluenzaA__ACR51038
augaaccccaaccagaagaucaucaccaucggcuccgucugcauguccaucggcauggccaaccucauccuccagaucggcaacaucaucuccaucuggaucucccacuccauccagcucggcaaccagaaccagaucgagaccugcaaccaguccgucaucaccuacgagaacaacaccugggucaaccagaccuacgucaacaucuccaacaccaacuucgccgccggccaguccgucgucuccgucaagcucgccggcaacuccucccucugccccgucuccggcugggccaucuacuccaaggacaacuccauccgcaucggcuccaagggcgacgucuucgucauccgcgagcccuucaucuccugcuccccccucgagugccgcaccuucuuccucacccagggcgcccuccucaacgacaagcacuccaacggcaccaucaaggaccgcucccccuaccgcacccucauguccugccccaucggcgagguccccucccccuacaacucccgcuucgaguccgucgccugguccgccuccgccugccacgacggcaucaacuggcucaccaucggcaucuccggccccgacaacggcgccgucgccguccucaaguacaacggcaucaucaccgacaccaucaaguccuggcgcaacaacauccuccgcacccaggaguccgagugcgccugcgucaacggcuccugcuucaccgucaugaccgacggccccuccgacggccaggccuccuacaagaucuuccgcaucgagaagggcaagaucgucaaguccgucgagaugaacgcccccaacuaccacuacgaggagugcuccugcuaccccgacuccuccgagaucaccugcgucugccgcgacaacuggcacggcuccaaccgccccugggucuccuucaaccagaaccucgaguaccagaucggcuacaucugcuccggcaucuucggcgacaacccccgccccaacgacaagaccggcuccugcggccccgucuccuccaacggcgccaacggcgucaagggcuucuccuucaaguacggcaacggcgucuggaucggccgcaccaaguccaucuccucccgcaacggcuucgagaugaucugggaccccaacggcuggaccggcaccgacaacaacuucuccaucaagcaggacaucgucggcaucaacgagugguccggcuacuccggcuccuucguccagcaccccgagcucaccggccucgacugcauccgccccugcuucugggucgagcucauccgcggccgccccaaggagaacaccaucuggaccuccggcuccuccaucuccuucugcggcgucaacuccgacaccgucggcugguccuggcccgacggcgccgagcuccccuucaccaucgacaaguga

SEQ ID NO: 112956 - RNA, 1410 nt, Artificial Sequence; identical to SEQ ID NO: 112774
  derived and/or modified CDS sequence (opt2) from neuraminidase__InfluenzaA__ACR51048

SEQ ID NO: 112957 - RNA, 1410 nt, Artificial Sequence; identical to SEQ ID NO: 112774
  derived and/or modified CDS sequence (opt2) from neuraminidase__InfluenzaA__ACR51058

SEQ ID NO: 112958 - RNA, 1410 nt, Artificial Sequence; identical to SEQ ID NO: 112764
  derived and/or modified CDS sequence (opt2) from neuraminidase__InfluenzaA__ACR51068

SEQ ID NO: 112959 - RNA, 1410 nt, Artificial Sequence; identical to SEQ ID NO: 112774
  derived and/or modified CDS sequence (opt2) from neuraminidase__InfluenzaA__ACR52371

SEQ ID NO: 112960 - RNA, 1410 nt, Artificial Sequence; identical to SEQ ID NO: 112774
  derived and/or modified CDS sequence (opt2) from neuraminidase__InfluenzaA__ACR52381

SEQ ID NO: 112961 - RNA, 1410 nt, Artificial Sequence; identical to SEQ ID NO: 112774
  derived and/or modified CDS sequence (opt2) from neuraminidase__InfluenzaA__ACR52391

SEQ ID NO: 112962 - RNA, 1410 nt, Artificial Sequence; identical to SEQ ID NO: 112774
  derived and/or modified CDS sequence (opt2) from neuraminidase__InfluenzaA__ACR52401

SEQ ID NO: 112963 - RNA, 1410 nt, Artificial Sequence; identical to SEQ ID NO: 112774
  derived and/or modified CDS sequence (opt2) from neuraminidase__InfluenzaA__ACR52411

SEQ ID NO: 112964 - RNA, 1410 nt, Artificial Sequence; identical to SEQ ID NO: 112774
  derived and/or modified CDS sequence (opt2) from neuraminidase__InfluenzaA__ACR52421

SEQ ID NO: 112965 - RNA, 1410 nt, Artificial Sequence; identical to SEQ ID NO: 112774
  derived and/or modified CDS sequence (opt2) from neuraminidase__InfluenzaA__ACR52431

SEQ ID NO: 112966 - RNA, 1410 nt, Artificial Sequence; identical to SEQ ID NO: 112774
  derived and/or modified CDS sequence (opt2) from neuraminidase__InfluenzaA__ACR52441

SEQ ID NO: 112967 - RNA, 1410 nt, Artificial Sequence; identical to SEQ ID NO: 112774
  derived and/or modified CDS sequence (opt2) from neuraminidase__InfluenzaA__ACR52451

SEQ ID NO: 112968 - RNA, 1410 nt, Artificial Sequence; identical to SEQ ID NO: 112774
  derived and/or modified CDS sequence (opt2) from neuraminidase__InfluenzaA__ACR52471

SEQ ID NO: 112969 - RNA, 1410 nt, Artificial Sequence; identical to SEQ ID NO: 112774
  derived and/or modified CDS sequence (opt2) from neuraminidase__InfluenzaA__ACR52481

SEQ ID NO: 112970 - RNA, 1410 nt, Artificial Sequence; identical to SEQ ID NO: 112774
  derived and/or modified CDS sequence (opt2) from neuraminidase__InfluenzaA__ACR52491

SEQ ID NO: 112971 - RNA, 1410 nt, Artificial Sequence; identical to SEQ ID NO: 112774
  derived and/or modified CDS sequence (opt2) from neuraminidase__InfluenzaA__ACR54046

SEQ ID NO: 112972 - RNA, 1410 nt, Artificial Sequence; identical to SEQ ID NO: 112764
  derived and/or modified CDS sequence (opt2) from neuraminidase__InfluenzaA__ACR54052

SEQ ID NO: 112973 - RNA, 1410 nt, Artificial Sequence; identical to SEQ ID NO: 112774
  derived and/or modified CDS sequence (opt2) from neuraminidase__InfluenzaA__ACR54966

SEQ ID NO: 112974 - RNA, 1410 nt, Artificial Sequence; identical to SEQ ID NO: 112774
  derived and/or modified CDS sequence (opt2) from neuraminidase__InfluenzaA__ACR54976

SEQ ID NO: 112975 - RNA, 1410 nt, Artificial Sequence; identical to SEQ ID NO: 112774
  derived and/or modified CDS sequence (opt2) from neuraminidase__InfluenzaA__ACR54986

SEQ ID NO: 112976 - RNA, 1410 nt, Artificial Sequence; identical to SEQ ID NO: 112764
  derived and/or modified CDS sequence (opt2) from neuraminidase__InfluenzaA__ACR54996

SEQ ID NO: 112977 - RNA, 1410 nt, Artificial Sequence; identical to SEQ ID NO: 112774
  derived and/or modified CDS sequence (opt2) from neuraminidase__InfluenzaA__ACR55006

SEQ ID NO: 112978 - RNA, 1410 nt, Artificial Sequence; identical to SEQ ID NO: 112764
  derived and/or modified CDS sequence (opt2) from neuraminidase__InfluenzaA__ACR56383

SEQ ID NO: 112979 - RNA, 1410 nt, Artificial Sequence; identical to SEQ ID NO: 112764
  derived and/or modified CDS sequence (opt2) from neuraminidase__InfluenzaA__ACR56393

SEQ ID NO: 112980 - RNA, 1410 nt, Artificial Sequence; identical to SEQ ID NO: 112774
  derived and/or modified CDS sequence (opt2) from neuraminidase__InfluenzaA__ACR56403

SEQ ID NO: 112981 - RNA, 1410 nt, Artificial Sequence; identical to SEQ ID NO: 112774
  derived and/or modified CDS sequence (opt2) from neuraminidase__InfluenzaA__ACR56413

SEQ ID NO: 112982 - RNA, 1410 nt, Artificial Sequence; identical to SEQ ID NO: 112774
  derived and/or modified CDS sequence (opt2) from neuraminidase__InfluenzaA__ACR56423

SEQ ID NO: 112983 - RNA, 1410 nt, Artificial Sequence; identical to SEQ ID NO: 112774
  derived and/or modified CDS sequence (opt2) from neuraminidase__InfluenzaA__ACR56433

SEQ ID NO: 112984 - RNA, 1410 nt, Artificial Sequence; identical to SEQ ID NO: 112774
  derived and/or modified CDS sequence (opt2) from neuraminidase__InfluenzaA__ACR56443

SEQ ID NO: 112985 - RNA, 1410 nt, Artificial Sequence; identical to SEQ ID NO: 112774
  derived and/or modified CDS sequence (opt2) from neuraminidase__InfluenzaA__ACR56453

SEQ ID NO: 112986 - RNA, 1413 nt, Artificial Sequence; identical to SEQ ID NO: 112752
  derived and/or modified CDS sequence (opt2) from neuraminidase__InfluenzaA__ACR58555

SEQ ID NO: 112987 - RNA, 1413 nt, Artificial Sequence
  derived and/or modified CDS sequence (opt2) from neuraminidase__InfluenzaA__ACR61658
augaaccccaaccagaagaucaucaccaucggcuccaucuccaucgccaucggcaucaucucccucaugcuccagaucggcaacaucaucuccaucugggccucccacuccauccagaccggcucccagaaccacaccggcaucugcaaccagcgcaucaucaccuacgagaacuccaccugggucaaccacaccuacgucuccaucaacaacaccaacgucgucaccggcaaggacaagaccuccgucacccucgccggcaacuccucccucugcuccaucuccggcugggccaucuacaccaaggacaacuccauccgcaucggcuccaagggcgacgucuucgucauccgcgagcccuucaucuccugcucccaccucgagugccgcaccuucuuccucacccagggcgcccuccucaacgacaagcacuccaacggcaccgucaaggaccgcucccccuaccgcgcccucauguccugcccccucggcgaggcccccucccccuacaacuccaaguucgaguccgucgccugguccgccuccgccugccacgacggcaugggcuggcucaccaucggcaucuccggccccgacaacggcgccgucgccguccucaaguacaacggcaucaucaccgagaccaucaaguccuggaagaagcgcauccuccgcacccaggaguccgagugcgucugcgucaacggcuccugcuucaccaucaugaccgacggccccuccaacggcgccgccuccuacaagaucuucaagaucgagaagggcaaggucaccaaguccaucgagcucaacgcccccaacuuccacuacgaggagugcuccugcuaccccgacaccggcaccgucaugugcgucugccgcgacaacuggcacggcuccaaccgccccugggucuccuucaaccagaaccucgacuaccagaucggcuacaucugcuccggcgucuucggcgacaacccccgccccaaggacggcaagggcuccugcaaccccgucaccgucgacggcgccgacggcgucaagggcuucuccuacaaguacggcaacggcgucuggaucggccgcaccaaguccaaccgccuccgcaagggcuucgagaugaucugggaccccaacggcuggaccgacaccgacuccgacuucuccgucaagcaggacgucgucgccaucaccgacugguccggcuacuccggcuccuucguccagcaccccgagcucaccggccucgacugcauccgccccugcuucugggucgagcucguccgcggccucccccgcgagaacaccaccaucuggaccuccggcuccuccaucuccuucugcggcgucgacuccgacaccgccaacugguccuggcccgacggcgccgagcuccccuucaccaucgacaaguga

SEQ ID NO: 112988 - RNA, 1410 nt, Artificial Sequence
  derived and/or modified CDS sequence (opt2) from neuraminidase__InfluenzaA__ACR61680
augaaccccaaccagaagaucaucaccaucggcuccgucucccucaccaucuccaccaucugcuucuucaugcagaucgccauccucaucaccaccgucacccuccacuucaagcaguacgaguucaacuccccccccaacaaccaggucaugcucugcgagcccaccaucaucgagcgcaacaucaccgagaucgucuaccucaccaacaccaccaucgagaaggagaucugccccaagcucgccgaguaccgcaacugguccaagccccagugcgacaucaccggcuucgcccccuucuccaaggacaacuccauccgccucuccgccggcggcgacaucugggucacccgcgagcccuacgucuccugcgaccccgacaagugcuaccaguucgcccucggccagggcaccacccucaacaacguccacuccaacgacaccguccgcgaccgcacccccuaccgcacccuccucaugaacgagcucggcguccccuuccaccucggcaccaagcaggucugcaucgccugguccuccuccuccugccacgacggcaaggccuggcuccacgucugcaucaccggcgacgacaagaacgccaccgccuccuucaucuacaacggccgccucgucgacuccgucgucuccugguccaaggagauccuccgcacccaggaguccgagugcgucugcaucaacggcaccugcaucgucgucaugaccgacggcuccgccuccggcaaggccgacaccaagauccucuucaucgaggagggcaagaucguccacaccuccacccucuccggcuccgcccagcacgucgaggagugcuccugcuacccccgcuaccccggcguccgcugcgucugccgcgacaacuggaagggcuccaaccgccccaucgucgacaucaacaucaaggaccacuccaucgucuccuccuacgucugcuccggccucgucggcgacaccccccgcaagaacgacuccuccuccuccucccacugccucgaccccaacaacgaggagggcggccacggcgucaagggcugggccuucgacgacggcaacgacgucuggaugggccgcaccaucuccgagaagucccgccucggcuacgagaccuucaaggucaucgagggcugguccaaccccaaguccaagcuccagaucaaccgccaggucaucgucgaccgcggcaaccgcuccggcuacuccggcaucuucuccgucgagggcaaguccugcaucaaccgcugcuucuacgucgagcucauccgcggccgcaaggaggagaccgagguccucuggaccuccaacuccaucgucgucuucugcggcaccuccggcaccuacggcaccggcuccuggcccgacggcgccgacaucaaccucaugcccaucuga

SEQ ID NO: 112989 - RNA, 1410 nt, Artificial Sequence
  derived and/or modified CDS sequence (opt2) from neuraminidase__InfluenzaA__ACR61691
augaaccccaaccagaagaucaucaccaucggcuccgucucccucaccaucuccaccaucugcuucuucaugcagaucgccauccucaucaccaccgucacccuccacuucaagcaguacgaguucaacuccccccccaacaaccaggucaugcucugcgagcccaccaucaucgagcgcaacaucaccgagaucgucuaccucaccaacaccaccaucgagaaggagaucugccacaagcucgccgaguaccgcaacugguccaagccccagugcgacaucaccggcuucgcccccuucuccaaggacaacuccauccgccucuccgccggcggcgacaucugggucacccgcgagcccuacgucuccugcgaccccgacaagugcuaccaguucgcccucggccagggcaccacccucaacaacguccacuccaacaacaccguccgcgaccgcacccccuaccgcacccuccucaugaacgagcucggcguccccuuccaccucggcaccaagcaggucugcaucgccugguccuccuccuccugccacgacggcaaggccuggcuccacgucugcaucaccggcgacgacaagaacgccaccgccuccuucaucuacaacggccgccucgucgacuccgucgucuccugguccaaggagauccuccgcacccaggaguccgagugcgucugcaucaacggcaccugcaccgucgucaugaccgacggcuccgccuccggcaaggccgacaccaagauccucuucaucgaggagggcaagaucguccacaccuccacccucuccggcuccgcccagcacgucgaggagugcuccugcuacccccgcuaccccggcguccgcugcgucugccgcgacaacuggaagggcuccaaccgccccaucgucgacaucaacaucaaggaccacuccaucgucuccuccuacgucugcuccggccucgucggcgacaccccccgcaagaacgacuccuccuccuccucccacugccucgaccccaacaacgaggagggcggccacggcgucaagggcugggccuucgacgacggcaacgacgucuggaugggccgcaccaucuccgagaagucccgccucggcuacgagaccuucaaggucaucgagggcugguccaaccccaaguccaagcuccagaucaaccgccaggucaucgucgaccgcggcaaccgcuccggcuacuccggcaucuucuccgucgagggcaaguccugcaucaaccgcugcuucuacgucgagcucauccgcggccgcaaggaggagaccgagguccucuggaccuccaacuccaucgucgucuucugcggcaccuccggcaccuacggcaccggcuccuggcccgacggcgccgacaucaaccucaugcccaucuga

SEQ ID NO: 112990 - RNA, 1410 nt, Artificial Sequence
  derived and/or modified CDS sequence (opt2) from neuraminidase__InfluenzaA__ACR61702
augaaccccaaccagaagaucaucaccaucggcuccgucucccucaccaucuccaccaucugcuucuucaugcagaucgccauccucaucaccaccgucacccuccacuucaagcaguacgaguucaacuccccccccaacaaccaggucaugcucugcgagcccaccaucaucgagcgcaacaucaccgagaucgucuaccucaccaacaccaccaucgagaaggagaucugccccaagcucgccgaguaccgcaacugguccaagccccagugcgacaucaccggcuucgcccccuucuccaaggacaacuccauccgccucuccgccggcggcgacaucugggucacccgcgagcccuacgucuccugcgaccccgacaagugcuaccaguucgcccucggccagggcaccacccucaacaacguccacuccaacaacaccguccgcgaccgcacccccuaccgcacccuccucaugaacgagcucggcguccccuuccaccucggcaccaagcaggucugcaucgccugguccuccuccuccugccacgacggcaaggccuggcuccacgucugcaucaccggcgacgacaagaacgccaccgccuccuucaucuacaacggccgccucgucgacuccgucgucuccugguccaaggagauccuccgcacccaggaguccgagugcgucugcaucaacggcaccugcaccgucgucaugaccgacggcuccgccuccggcaaggccgacaccaagauccucuucaucgaggagggcaagaucguccacaccuccacccucuccggcuccgcccagcacgucgaggagugcuccugcuacccccgcuaccccggcguccgcugcgucugccgcgacaacuggaagggcuccaaccgccccaucgucgacaucaacaucaaggaccacuccaucgucuccuccuacgucugcuccggccucgucggcgacaccccccgcaagaacgacuccuccuccuccuccaacugccucgaccccaacaacgaggagggcggccacggcgucaagggcugggccuucgacgacggcaacgacgucuggaugggccgcaccaucuccgagaagucccgccucggcuacgagaccuucaaggucaucgagggcugguccaaccccaaguccaagcuccagaucaaccgccaggucaucgucgaccgcggcaaccgcuccggcuacuccggcaucuucuccgucgagggcaaguccugcaucaaccgcugcuucuacgucgagcucauccgcggccgcaaggaggagaccgagguccucuggaccuccaacuccaucgucgucuucugcggcaccuccggcaccuacggcaccggcuccuggcccgacggcgccgacaucaaccucaugcccaucuga

SEQ ID NO: 112991 - RNA, 1410 nt, Artificial Sequence; identical to SEQ ID NO: 112764
  derived and/or modified CDS sequence (opt2) from neuraminidase__InfluenzaA__ACR67201

SEQ ID NO: 112992 - RNA, 1410 nt, Artificial Sequence; identical to SEQ ID NO: 112774
  derived and/or modified CDS sequence (opt2) from neuraminidase__InfluenzaA__ACR67202

SEQ ID NO: 112993 - RNA, 1410 nt, Artificial Sequence; identical to SEQ ID NO: 112764
  derived and/or modified CDS sequence (opt2) from neuraminidase__InfluenzaA__ACR67203

SEQ ID NO: 112994 - RNA, 1410 nt, Artificial Sequence; identical to SEQ ID NO: 112774
  derived and/or modified CDS sequence (opt2) from neuraminidase__InfluenzaA__ACR67204

SEQ ID NO: 112995 - RNA, 1410 nt, Artificial Sequence; identical to SEQ ID NO: 112774
  derived and/or modified CDS sequence (opt2) from neuraminidase__InfluenzaA__ACR67246

SEQ ID NO: 112996 - RNA, 1410 nt, Artificial Sequence; identical to SEQ ID NO: 112764
  derived and/or modified CDS sequence (opt2) from neuraminidase__InfluenzaA__ACR67256

SEQ ID NO: 112997 - RNA, 1410 nt, Artificial Sequence; identical to SEQ ID NO: 112774
  derived and/or modified CDS sequence (opt2) from neuraminidase__InfluenzaA__ACR77451

SEQ ID NO: 112998 - RNA, 1410 nt, Artificial Sequence; identical to SEQ ID NO: 112774
  derived and/or modified CDS sequence (opt2) from neuraminidase__InfluenzaA__ACR77461

SEQ ID NO: 112999 - RNA, 1410 nt, Artificial Sequence; identical to SEQ ID NO: 112774
  derived and/or modified CDS sequence (opt2) from neuraminidase__InfluenzaA__ACR77471

SEQ ID NO: 113000 - RNA, 1410 nt, Artificial Sequence; identical to SEQ ID NO: 112774
  derived and/or modified CDS sequence (opt2) from neuraminidase__InfluenzaA__ACR77481

SEQ ID NO: 113001 - RNA, 1410 nt, Artificial Sequence; identical to SEQ ID NO: 112774
  derived and/or modified CDS sequence (opt2) from neuraminidase__InfluenzaA__ACR77491

SEQ ID NO: 113002 - RNA, 1410 nt, Artificial Sequence; identical to SEQ ID NO: 112774
  derived and/or modified CDS sequence (opt2) from neuraminidase__InfluenzaA__ACR77501

SEQ ID NO: 113003 - RNA, 1410 nt, Artificial Sequence; identical to SEQ ID NO: 112774
  derived and/or modified CDS sequence (opt2) from neuraminidase__InfluenzaA__ACR83527

SEQ ID NO: 113004 - RNA, 1410 nt, Artificial Sequence; identical to SEQ ID NO: 112774
  derived and/or modified CDS sequence (opt2) from neuraminidase__InfluenzaA__ACR83539

SEQ ID NO: 113005 - RNA, 1410 nt, Artificial Sequence; identical to SEQ ID NO: 112774
  derived and/or modified CDS sequence (opt2) from neuraminidase__InfluenzaA__ACS14669

SEQ ID NO: 113006 - RNA, 1410 nt, Artificial Sequence; identical to SEQ ID NO: 112774
  derived and/or modified CDS sequence (opt2) from neuraminidase__InfluenzaA__ACS14679

SEQ ID NO: 113007 - RNA, 1410 nt, Artificial Sequence; identical to SEQ ID NO: 112774
  derived and/or modified CDS sequence (opt2) from neuraminidase__InfluenzaA__ACS14689

SEQ ID NO: 113008 - RNA, 1410 nt, Artificial Sequence; identical to SEQ ID NO: 112774
  derived and/or modified CDS sequence (opt2) from neuraminidase__InfluenzaA__ACS14699

SEQ ID NO: 113009 - RNA, 1410 nt, Artificial Sequence; identical to SEQ ID NO: 112774
  derived and/or modified CDS sequence (opt2) from neuraminidase__InfluenzaA__ACS14709

SEQ ID NO: 113010 - RNA, 1410 nt, Artificial Sequence; identical to SEQ ID NO: 112774
  derived and/or modified CDS sequence (opt2) from neuraminidase__InfluenzaA__ACS14719

SEQ ID NO: 113011 - RNA, 1410 nt, Artificial Sequence; identical to SEQ ID NO: 112774
  derived and/or modified CDS sequence (opt2) from neuraminidase__InfluenzaA__ACS14729

SEQ ID NO: 113012 - RNA, 1410 nt, Artificial Sequence; identical to SEQ ID NO: 112774
  derived and/or modified CDS sequence (opt2) from neuraminidase__InfluenzaA__ACS14739

SEQ ID NO: 113013 - RNA, 1410 nt, Artificial Sequence; identical to SEQ ID NO: 112764
  derived and/or modified CDS sequence (opt2) from neuraminidase__InfluenzaA__ACS27192

SEQ ID NO: 113014 - RNA, 1410 nt, Artificial Sequence; identical to SEQ ID NO: 112774
  derived and/or modified CDS sequence (opt2) from neuraminidase__InfluenzaA__ACS27202

SEQ ID NO: 113015 - RNA, 1410 nt, Artificial Sequence; identical to SEQ ID NO: 112774
  derived and/or modified CDS sequence (opt2) from neuraminidase__InfluenzaA__ACS27212

SEQ ID NO: 113016 - RNA, 1410 nt, Artificial Sequence; identical to SEQ ID NO: 112764
  derived and/or modified CDS sequence (opt2) from neuraminidase__InfluenzaA__ACS27222

SEQ ID NO: 113017 - RNA, 1410 nt, Artificial Sequence; identical to SEQ ID NO: 112774
  derived and/or modified CDS sequence (opt2) from neuraminidase__InfluenzaA__ACS27232

SEQ ID NO: 113018 - RNA, 1410 nt, Artificial Sequence; identical to SEQ ID NO: 112764
  derived and/or modified CDS sequence (opt2) from neuraminidase__InfluenzaA__ACS27242

SEQ ID NO: 113019 - RNA, 1410 nt, Artificial Sequence; identical to SEQ ID NO: 112774
  derived and/or modified CDS sequence (opt2) from neuraminidase__InfluenzaA__ACS27252

SEQ ID NO: 113020 - RNA, 1410 nt, Artificial Sequence; identical to SEQ ID NO: 112764
  derived and/or modified CDS sequence (opt2) from neuraminidase__InfluenzaA__ACS27771

SEQ ID NO: 113021 - RNA, 1410 nt, Artificial Sequence; identical to SEQ ID NO: 112929
  derived and/or modified CDS sequence (opt2) from neuraminidase__InfluenzaA__ACS34969

SEQ ID NO: 113022 - RNA, 1410 nt, Artificial Sequence; identical to SEQ ID NO: 112929
  derived and/or modified CDS sequence (opt2) from neuraminidase__InfluenzaA__ACS34970

SEQ ID NO: 113023 - RNA, 1410 nt, Artificial Sequence; identical to SEQ ID NO: 112929
  derived and/or modified CDS sequence (opt2) from neuraminidase__InfluenzaA__ACS34971

SEQ ID NO: 113024 - RNA, 1410 nt, Artificial Sequence; identical to SEQ ID NO: 112774
  derived and/or modified CDS sequence (opt2) from neuraminidase__InfluenzaA__ACS34972

SEQ ID NO: 113025 - RNA, 1410 nt, Artificial Sequence; identical to SEQ ID NO: 112774
  derived and/or modified CDS sequence (opt2) from neuraminidase__InfluenzaA__ACS50081

SEQ ID NO: 113026 - RNA, 1410 nt, Artificial Sequence; identical to SEQ ID NO: 112774
  derived and/or modified CDS sequence (opt2) from neuraminidase__InfluenzaA__ACS50087

SEQ ID NO: 113027 - RNA, 1410 nt, Artificial Sequence; identical to SEQ ID NO: 112774
  derived and/or modified CDS sequence (opt2) from neuraminidase__InfluenzaA__ACS50094

SEQ ID NO: 113028 - RNA, 1410 nt, Artificial Sequence; identical to SEQ ID NO: 112764
  derived and/or modified CDS sequence (opt2) from neuraminidase__InfluenzaA__ACS54264

SEQ ID NO: 113029 - RNA, 1410 nt, Artificial Sequence; identical to SEQ ID NO: 112929
  derived and/or modified CDS sequence (opt2) from neuraminidase__InfluenzaA__ACS54265

SEQ ID NO: 113030 - RNA, 1410 nt, Artificial Sequence; identical to SEQ ID NO: 112774
  derived and/or modified CDS sequence (opt2) from neuraminidase__InfluenzaA__ACS54266

SEQ ID NO: 113031 - RNA, 1410 nt, Artificial Sequence; identical to SEQ ID NO: 112774
  derived and/or modified CDS sequence (opt2) from neuraminidase__InfluenzaA__ACS54267

SEQ ID NO: 113032 - RNA, 1410 nt, Artificial Sequence; identical to SEQ ID NO: 112774
  derived and/or modified CDS sequence (opt2) from neuraminidase__InfluenzaA__ACS54268

SEQ ID NO: 113033 - RNA, 1410 nt, Artificial Sequence; identical to SEQ ID NO: 112774
  derived and/or modified CDS sequence (opt2) from neuraminidase__InfluenzaA__ACS54303

SEQ ID NO: 113034 - RNA, 1410 nt, Artificial Sequence; identical to SEQ ID NO: 112774
  derived and/or modified CDS sequence (opt2) from neuraminidase__InfluenzaA__ACS68823

SEQ ID NO: 113035 - RNA, 1410 nt, Artificial Sequence; identical to SEQ ID NO: 112774
  derived and/or modified CDS sequence (opt2) from neuraminidase__InfluenzaA__ACS75824

SEQ ID NO: 113036 - RNA, 1410 nt, Artificial Sequence; identical to SEQ ID NO: 112774
  derived and/or modified CDS sequence (opt2) from neuraminidase__InfluenzaA__ACS77929

SEQ ID NO: 113037 - RNA, 1410 nt, Artificial Sequence; identical to SEQ ID NO: 112774
  derived and/or modified CDS sequence (opt2) from neuraminidase__InfluenzaA__ACS77939

SEQ ID NO: 113038 - RNA, 1410 nt, Artificial Sequence; identical to SEQ ID NO: 112764
  derived and/or modified CDS sequence (opt2) from neuraminidase__InfluenzaA__ACS77949

SEQ ID NO: 113039 - RNA, 1410 nt, Artificial Sequence; identical to SEQ ID NO: 112774
  derived and/or modified CDS sequence (opt2) from neuraminidase__InfluenzaA__ACS77959

SEQ ID NO: 113040 - RNA, 1410 nt, Artificial Sequence; identical to SEQ ID NO: 112774
  derived and/or modified CDS sequence (opt2) from neuraminidase__InfluenzaA__ACS77969

SEQ ID NO: 113041 - RNA, 1410 nt, Artificial Sequence; identical to SEQ ID NO: 112774
  derived and/or modified CDS sequence (opt2) from neuraminidase__InfluenzaA__ACS77979

SEQ ID NO: 113042 - RNA, 1410 nt, Artificial Sequence; identical to SEQ ID NO: 112774
  derived and/or modified CDS sequence (opt2) from neuraminidase__InfluenzaA__ACS77989

SEQ ID NO: 113043 - RNA, 1410 nt, Artificial Sequence; identical to SEQ ID NO: 112774
  derived and/or modified CDS sequence (opt2) from neuraminidase__InfluenzaA__ACS77999

SEQ ID NO: 113044 - RNA, 1410 nt, Artificial Sequence; identical to SEQ ID NO: 112774
  derived and/or modified CDS sequence (opt2) from neuraminidase__InfluenzaA__ACS78009

SEQ ID NO: 113045 - RNA, 1410 nt, Artificial Sequence; identical to SEQ ID NO: 112774
  derived and/or modified CDS sequence (opt2) from neuraminidase__InfluenzaA__ACS78019

SEQ ID NO: 113046 - RNA, 1410 nt, Artificial Sequence; identical to SEQ ID NO: 112774
  derived and/or modified CDS sequence (opt2) from neuraminidase__InfluenzaA__ACS78039

SEQ ID NO: 113047 - RNA, 1410 nt, Artificial Sequence; identical to SEQ ID NO: 112774
  derived and/or modified CDS sequence (opt2) from neuraminidase__InfluenzaA__ACS78049

SEQ ID NO: 113048 - RNA, 1410 nt, Artificial Sequence; identical to SEQ ID NO: 112774
  derived and/or modified CDS sequence (opt2) from neuraminidase__InfluenzaA__ACS88274

SEQ ID NO: 113049 - RNA, 1410 nt, Artificial Sequence; identical to SEQ ID NO: 112774
  derived and/or modified CDS sequence (opt2) from neuraminidase__InfluenzaA__ACS88275

SEQ ID NO: 113050 - RNA, 1410 nt, Artificial Sequence; identical to SEQ ID NO: 112764
  derived and/or modified CDS sequence (opt2) from neuraminidase__InfluenzaA__ACS92572

SEQ ID NO: 113051 - RNA, 1410 nt, Artificial Sequence; identical to SEQ ID NO: 112764
  derived and/or modified CDS sequence (opt2) from neuraminidase__InfluenzaA__ACS92582

SEQ ID NO: 113052 - RNA, 1410 nt, Artificial Sequence; identical to SEQ ID NO: 112774
  derived and/or modified CDS sequence (opt2) from neuraminidase__InfluenzaA__ACS92592

SEQ ID NO: 113053 - RNA, 1410 nt, Artificial Sequence; identical to SEQ ID NO: 112774
  derived and/or modified CDS sequence (opt2) from neuraminidase__InfluenzaA__ACS92603

SEQ ID NO: 113054 - RNA, 1410 nt, Artificial Sequence; identical to SEQ ID NO: 112764
  derived and/or modified CDS sequence (opt2) from neuraminidase__InfluenzaA__ACS92614

SEQ ID NO: 113055 - RNA, 1410 nt, Artificial Sequence; identical to SEQ ID NO: 112774
  derived and/or modified CDS sequence (opt2) from neuraminidase__InfluenzaA__ACT09115

SEQ ID NO: 113056 - RNA, 1410 nt, Artificial Sequence; identical to SEQ ID NO: 112774
  derived and/or modified CDS sequence (opt2) from neuraminidase__InfluenzaA__ACT10309

SEQ ID NO: 113057 - RNA, 1410 nt, Artificial Sequence; identical to SEQ ID NO: 112774
  derived and/or modified CDS sequence (opt2) from neuraminidase__InfluenzaA__ACT10315

SEQ ID NO: 113058 - RNA, 1410 nt, Artificial Sequence; identical to SEQ ID NO: 112764
  derived and/or modified CDS sequence (opt2) from neuraminidase__InfluenzaA__ACT11059

SEQ ID NO: 113059 - RNA, 1350 nt, Artificial Sequence
  derived and/or modified CDS sequence (opt2) from neuraminidase__InfluenzaA__ACT15313
augaaccccaaccagaagaucaucaccaucggcuccaucugcauggucaucggcaucgucucccucaugcuccagaucggcaacaugaucuccaucugggucucccacuccauccagaccggcaaccagugccaggacgagcccaucuccaacaccaaguuccucaccgagaaggccgucgccuccgucacccucgccggcaacuccucccucugccccaucuccggcugggccgucuacuccaaggacaacuccauccgcaucggcucccgcggcgacgucuucgucauccgcgagcccuucaucuccugcucccaccucgagugccgcaccuucuuccucacccagggcgcccuccucaacgacaagcacuccaacggcaccgucaaggaccgcuccccccaccgcacccucauguccugccccgucggcgaggcccccucccccuacaacucccgcuucgaguccgucgccugguccgccuccgccugccacgacggcaccuccuggcucaccaucggcaucuccggccccgacaacggcgccgucgccguccucaaguacaacggcaucaucaccgacaccaucaaguccuggcgcaacaacaucaugcgcacccaggaguccgagugcgccugcgucaacggcuccugcuucaccgucaugaccgacggccccuccuccggccaggccuccuacaagaucuucaagauggagaagggcaaggucgucaaguccgucgagcucgacgcccccaacuaccacuacgaggagugcuccugcuaccccgacgccggcgagaucaccugcgucugccgcgacaacuggcacggcuccaaccgccccugggucuccuucaaccagaaccucgaguaccagaucggcuacaucugcuccggcgucuucggcgacaacccccgccccaacgacggcaccggcuccugcggccccgucuuccccaacggcgccuacggcgucaagggcuucuccuucaaguacggcaacggcgucuggaucggccgcaccaaguccaccaacucccgcuccggcuucgagaugaucugggaccccaacggcuggaccggcaccgacuccuccuucuccgucaagcaggacaucgucgccaucaccgacugguccggcuacuccggcuccuucguccagcaccccgagcucaccggccucgacugcauccgccccugcuucugggucgagcucauccgcggccgccccaaggaguccaccaucuggaccuccggcuccuccaucuccuucugcggcgucaacggcgacaccgucuccugguccuggcccgacggcgccgagcuccccuucaccaucgacaaguga

SEQ ID NO: 113060 - RNA, 1350 nt, Artificial Sequence
  derived and/or modified CDS sequence (opt2) from neuraminidase__InfluenzaA__ACT15315
augaaccccaaccagaagaucaucaccaucggcuccaucugcauggucaucggcaucgucucccucaugcuccagaucggcaacaugaucuccaucugggucucccacuccauccagaccggcaaccagugccaggacgagcccaucuccaacaccaaguuccucaccgagaaggccgucgccuccgucacccucgccggcaacuccucccucugccccaucuccggcugggccgucuacuccaaggacaacuccauccgcaucggcucccgcggcgacgucuucgucaugcgcgagcccuucaucuccugcucccaccucgagugccgcaccuucuuccucacccagggcgcccuccucaacgacaagcacuccaacggcaccgucaaggaccgcuccccccaccgcacccucauguccugccccgucggcgaggcccccucccccuacaacucccgcuucgaguccgucgccugguccgccuccgccugccacgacggcaccuccuggcucaccaucggcaucuccggccccgacaacggcgccgucgccguccucaaguacaacggcaucaucaccgacaccaucaaguccuggcgcaacaacaucaugcgcacccaggaguccgagugcgccugcgucaacggcuccugcuucaccgucaugaccgacggccccuccuccggccaggccuccuacaagaucuucaagauggagaagggcaaggucgucaaguccgucgagcucgacgcccccaacuaccacuacgaggagugcuccugcuaccccgacgccggcgagaucaccugcgucugccgcgacaacuggcacggcuccaaccgccccugggucuccuucaaccagaaccucgaguaccagaucggcuacaucugcuccggcgucuucggcgacaacccccgccccaacgacggcaccggcuccugcggccccgucuuccccaacggcgccuacggcgucaagggcuucuccuucaaguacggcaacggcgucuggaucggccgcaccaaguccaccaacucccgcuccggcuucgagaugaucugggaccccaacggcuggaccggcaccgacuccuccuucuccgucaagcaggacaucgucgccaucaccgacugguccggcuacuccggcuccuucguccagcaccccgagcucaccggccucgacugcauccgccccugcuucugggucgagcucauccgcggccgccccaaggaguccaccaucuggaccuccggcuccuccaucuccuucugcggcgucaacggcgacaccgucuccugguccuggcccgacggcgccgagcuccccuucaccaucgacaaguga

SEQ ID NO: 113061 - RNA, 1350 nt, Artificial Sequence; identical to SEQ ID NO: 113059
  derived and/or modified CDS sequence (opt2) from neuraminidase__InfluenzaA__ACT15319

SEQ ID NO: 113062 - RNA, 1350 nt, Artificial Sequence
  derived and/or modified CDS sequence (opt2) from neuraminidase__InfluenzaA__ACT15321
augaaccccaaccagaagaucaucaccaucggcuccaucugcauggucaucggcaucgucucccucaugcuccagaucggcaacaugaucuccaucugggucucccacuccauccagaccggcaaccagugccaggacgagcccaucuccaacaccaaguuccucaccgagcgcgccgucgccuccgucacccucgccggcaacuccucccucugccccaucuccggcugggccgucuacuccaaggacaacuccauccgcaucggcucccgcggcgacgucuucgucauccgcgagcccuucaucuccugcucccaccucgagugccgcaccuucuuccucacccagggcgcccuccucaacgacaagcacuccaacggcaccgucaaggaccgcuccccccaccgcacccucauguccugccccgucggcgaggcccccucccccuacaacucccgcuucgaguccgucgccugguccgccuccgccugccacgacggcaccuccuggcucaccaucggcaucuccggccccgacaacggcgccgucgccguccucaaguacaacggcaucaucaccgacaccaucaaguccuggcgcaacaacaucaugcgcacccaggaguccgagugcgccugcgucaacggcuccugcuucaccgucaugaccgacggccccuccuccggccaggccuccuacaagaucuucaagauggagaagggcaaggucgucaaguccgucgagcucgacgcccccaacuaccacuacgaggagugcuccugcuaccccgacgccggcgagaucaccugcgucugccgcgacaacuggcacggcuccaaccgccccugggucuccuucaaccagaaccucgaguaccagaucggcuacaucugcuccggcgucuucggcgacaacccccgccccaacgacggcaccggcuccugcggccccgucuuccccaacggcgccuacggcgucaagggcuucuccuucaaguacggcaacggcgucuggaucggccgcaccaaguccaccaacucccgcuccggcuucgagaugaucugggaccccaacggcuggaccggcaccgacuccuccuucuccgucaagcaggacaucgucgccaucaccgacugguccggcuacuccggcuccuucguccagcaccccgagcucaccggccucgacugcauccgccccugcuucugggucgagcucauccgcggccgccccaaggaguccaccaucuggaccuccggcuccuccaucuccuucugcggcgucaacggcgacaccgucuccugguccuggcccgacggcgccgagcuccccuucaccaucgacaaguga

SEQ ID NO: 113063 - RNA, 1350 nt, Artificial Sequence; identical to SEQ ID NO: 113059
  derived and/or modified CDS sequence (opt2) from neuraminidase__InfluenzaA__ACT15323

SEQ ID NO: 113064 - RNA, 1350 nt, Artificial Sequence; identical to SEQ ID NO: 113059
  derived and/or modified CDS sequence (opt2) from neuraminidase__InfluenzaA__ACT15325

SEQ ID NO: 113065 - RNA, 1350 nt, Artificial Sequence
  derived and/or modified CDS sequence (opt2) from neuraminidase__InfluenzaA__ACT15327
augaaccccaaccagaagaucaucaccaucggcuccaucugcauggucaucggcaucgucucccucaugcuccagaucggcaacaugaucuccaucugggucucccacuccauccagaccggcaaccgcugccaggacgagcccaucuccaacaccaaguuccucaccgagaaggccgucgccuccgucacccucgccggcaacuccucccucugccccaucuccggcugggccgucuacuccaaggacaacuccauccgcaucggcucccgcggcgacgucuucgucauccgcgagcccuucaucuccugcucccaccucgagugccgcaccuucuuccucacccagggcgcccuccucaacgacaagcacuccaacggcaccgucaaggaccgcuccccccaccgcacccucauguccugccccgucggcgaggcccccucccccuacaacucccgcuucgaguccgucgccugguccgccuccgccugccacgacggcaccuccuggcucaccaucggcaucuccggccccgacaacggcgccgucgccguccucaaguacaacggcaucaucaccgacaccaucaaguccuggcgcaacaacaucaugcgcacccaggaguccgagugcgccugcgucaacggcuccugcuucaccgucaugaccgacggccccuccuccggccaggccuccuacaagaucuucaagauggagaagggcaaggucgucaaguccgucgagcucgacgcccccaacuaccacuacgaggagugcuccugcuaccccgacgccggcgagaucaccugcgucugccgcgacaacuggcacggcuccaaccgccccugggucuccuucaaccagaaccucgaguacaagaucggcuacaucugcuccggcaucuucggcgacaacccccgccccaacgacggcaccggcuccugcggccccgucuuccccaacggcgccuacggcgucaagggcuucuccuucaaguacggcaacggcgucuggaucggccgcaccaaguccaccaacucccgcuccggcuucgagaugaucugggaccccaacggcuggaccggcaccgacuccuccuucuccgucaagcaggacaucgucgccaucaccgacugguccggcuacuccggcuccuucguccagcaccccgagcucaccggccucgacugcauccgccccugcuucugggucgagcucauccgcggccgccccaaggaguccaccaucuggaccuccggcuccuccaucuccuucugcggcgucaacggcgacaccgucuccugguccuggcccgacggcgccgagcuccccuucaccaucgacaaguga

SEQ ID NO: 113066 - RNA, 1350 nt, Artificial Sequence
  derived and/or modified CDS sequence (opt2) from neuraminidase__InfluenzaA__ACT15331
augaaccccaaccagaagaucaucaccaucggcuccaucugcauggucaucggcaucgucucccucaugcuccagaucggcaacaugaucuccaucugggucucccacuccauccagaccggcaaccagugccaggacgagcccaucuccaacaccaaguuccucaccgagaaggccgucgccuccgucacccucgccggcaacuccucccucugccccaucuccggcugggccgucuacuccaaggacaacuccauccgcaucggcucccgcggcgacgucuucgucauccgcgagcccuucaucuccugcucccaccucgagugccgcaccuucuuccucacccagggcgcccuccucaacgacaagcacuccaacggcaccgucaaggaccgcuccccccaccgcacccucauguccugccccgucggcgaggcccccucccccuacaacucccgcuucgaguccgucgccugguccgccuccgccugccacgacggcaccuccuggcucaccaucggcaucuccggccccgacaacggcgccgucgccguccucaaguacaacggcaucaucaccgacaccaucaaguccuggcgcaacaacaucaugcgcacccaggaguccgagugcgccugcgucaacggcuccugcuucaccgucaugaccgacggccccuccuccggccaggccuccuacaagaucuucaagauggagaagggcaaggucgucaaguccgucgagcucgacgcccccaacuaccacuacgaggagugcuccugcuaccccgacgccggcgagaucaccugcgucugccgcgacaacuggcacggcuccaaccgccccugggucuccuucaaccagaaccucgaguaccagaucggcuacaucugcuccggcgucuucggcgacaacccccgccccaacgacggcaccggcuccugcggccccgucuuccccaacggcgccuacggcgucaagggcuucuccuucaaguacggcaacggcgucuggaucggccgcaccaaguccaccaacucccgcuccggcuucgagaugaucugggaccccaacggcuggaccggcaccgacuccuccuucuccgucaagcaggacaucgucgccaucaccgacugguccggcuacuccggcuccuucguccagcaccccgagcucaccggccucgacugcauccgccccugcuucugggucgagcucauccgcggccgccccaaggaguccaccaucuggaccuccggcuccuccaucuccuucugcggcgucaacuccgacaccgucuccugguccuggcccgacggcgccgagcuccccuucaccaucgacaaguga

SEQ ID NO: 113067 - RNA, 1350 nt, Artificial Sequence
  derived and/or modified CDS sequence (opt2) from neuraminidase__InfluenzaA__ACT15333
augaaccccaaccagaagaucaucaccaucggcuccaucugcauggucaucggcaucgucucccucaugcuccagaucggcaacaugaucuccaucugggucucccacuccauccagaccggcaaccagugccagggcgagcccaucuccaacaccaaguuccucaccgagaaggccgucgccuccgucacccucgccggcaacuccucccucugccccaucuccggcugggccgucuacuccaaggacaacuccauccgcaucggcucccgcggcgacgucuucgucauccgcgagcccuucaucuccugcucccaccucgagugccgcaccuucuuccucacccagggcgcccuccucaacgacaagcacuccaacggcaccgucaaggaccgcuccccccaccgcacccucauguccugccccgucggcgaggcccccucccccuacaacucccgcuucgaguccgucgccugguccgccuccgccugccacgacggcaccuccuggcucaccaucggcaucuccggccccgacaacggcgccgucgccguccucaaguacaacggcaucaucaccgacaccaucaaguccuggcgcaacaacauccuccgcacccaggaguccgagugcgccugcgucaacggcuccugcuucaccgucaugaccgacggccccuccuccggccaggccuccuacaagaucuucaagauggagaagggcaaggucgucaaguccgucgagcucgacgcccccaacuaccacuacgaggagugcuccugcuaccccgacgccggcgagaucaccugcgucugccgcgacaacuggcacggcuccaaccgccccugggucuccuucaaccagaaccucgaguaccagaucggcuacaucugcuccggcgucuucggcgacaacccccgccccaacgacggcaccggcuccugcggccccgucgucuccaacggcgccuacggcgucaagggcuucuccuucaaguacggcaacggcgucuggaucggccgcaccaaguccaccaacucccgcuccggcuucgagaugaucugggaccccaacggcuggaccggcaccgacuccuccuucuccggcaagcaggacaucgucgccaucaccgacugguccggcuacuccggcuccuucguccagcaccccgagcucaccggccucgacugcauccgccccugcuucugggucgagcucauccgcggccgccccaaggaguccaccaucuggaccuccggcuccuccaucuccuucugcggcgucaacuccgacaccgucuccugguccuggcccgacggcgccgagcuccccuucaccaucgacaaguga

SEQ ID NO: 113068 - RNA, 1350 nt, Artificial Sequence
  derived and/or modified CDS sequence (opt2) from neuraminidase__InfluenzaA__ACT15335
augaaccccaaccagaagaucaucaccaucggcuccaucugcauggucaucggcaucgucucccucaugcuccagaucggcaacaugaucuccaucugggucucccacuccauccagaccggcaaccgcugccaggacgagcccaucuccaacaccaaguuccucaccgagaaggccgucgccuccgucacccucgccggcaacuccucccucugccccaucuccggcugggccgucuacuccaaggacaacuccauccgcaucggcucccgcggcgacgucuucgucauccgcgagcccuucaucuccugcucccaccucgagugccgcaccuucuuccucacccagggcgcccuccucaacgacaagcacuccaacggcaccgucaaggaccgcuccccccaccgcacccucauguccugccccgucggcgaggcccccucccccuacaacucccgcuucgaguccgucgccugguccgccuccgccugccacgacggcaccuccuggcucaccaucggcaucuccggccccgacaacggcgccgucgccguccucaaguacaacggcaucaucaccgacaccaucaaguccuggcgcaacaacaucaugcgcacccaggaguccgagugcgccugcgucaacggcuccugcuucaccgucaugaccgacggccccuccuccggccaggccuccuacaagaucuucaagauggagaagggcaaggucgucaaguccgucgagcucgacgcccccaacuaccacuacgaggagugcuccugcuaccccgacgccggcgagaucaccugcgucugccgcgacaacuggcacggcuccaaccgccccugggucuccuucaaccagaaccucgaguacaagaucggcuacaucugcuccggcaucuucggcgacaacccccgccccaacgacggcaccggcuccugcggccccguccuccccaacggcgccuacggcgucaagggcuucuccuucaaguacggcaacggcgucuggaucggccgcaccaaguccaccaacucccgcuccggcuucgagaugaucugggaccccaacggcuggaccggcaccgacuccuccuucuccgucaagcaggacaucgucgccaucaccgacugguccggcuacuccggcuccuucguccagcaccccgagcucaccggccucgacugcauccgccccugcuucugggucgagcucauccgcggccgccccaaggaguccaccaucuggaccuccggcuccuccaucuccuucugcggcgucaacggcgacaccgucuccugguccuggcccgacggcgccgagcuccccuucaccaucgacaaguga

SEQ ID NO: 113069 - RNA, 1350 nt, Artificial Sequence
  derived and/or modified CDS sequence (opt2) from neuraminidase__InfluenzaA__ACT15337
augaaccccaaccagaagaucaucaccaucggcuccaucugcauggucaucggcaucgucucccucaugcuccagaucggcaacaugaucuccaucugggucucccacuccauccagaccggcaaccagugccaggacgagcccaucuccaacaccaaguuccucaccgagaaggccgucgccuccgucacccucgccggcaacuccucccucugccccaucuccggcugggccgucuacuccaaggacaacuccauccgcaucggcucccgcggcgacgucuucgucauccgcgagcccuucaucuccugcucccaccucgagugccgcaccuucuuccucacccagggcgcccuccucaacgacaagcacuccaacggcaccgucaaggaccgcuccccccaccgcacccucauguccugccccgucggcgaggcccccucccccuacaacucccgcuucgaguccgucgccugguccgccuccgccugccacgacggcaccuccuggcucaccaucggcaucuccggccccgacaacggcgccgucgccguccucaaguacaacggcaucaucaccgacaccaucaaguccuggcgcaacaacaucaugcgcacccaggaguccgagugcgccugcgucaacggcuccugcuucaccgucaugaccgacggccccuccuccggccaggccuccuacaagaucuucaagauggagaagggcaaggucgucaaguccgucgagcucgacgcccccaacuaccacuacgaggagugcuccugcuaccccgacgccggcgagaucaccugcgucugccgcgacaacuggcacggcuccaaccgccccugggucuccuucaaccagaaccucgaguaccagaucggcuacaucugcuccggcgucuucggcgacaacccccgccccaacgacggcaccggcuccugcggccccgucuuccccaacggcgccuacggcgucaagggcuucuccuucaaguacggcaacggcgucuggaucggccgcaccaaguccaccaacucccgcuccggcuucgagaugaucugggaccccaacggcuggaccggcaccgacuccuccuucuccgucaagcaggacaucgucgccgucaccgacugguccggcuacuccggcuccuucguccagcaccccgagcucaccggccucgacugcauccgccccugcuucugggucgagcucauccgcggccgccccaaggaguccaccaucuggaccuccggcuccuccaucuccuucugcggcgucaacggcgacaccgucuccugguccuggcccgacggcgccgagcuccccuucaccaucgacaaguga

SEQ ID NO: 113070 - RNA, 1350 nt, Artificial Sequence; identical to SEQ ID NO: 113059
  derived and/or modified CDS sequence (opt2) from neuraminidase__InfluenzaA__ACT15341

SEQ ID NO: 113071 - RNA, 1350 nt, Artificial Sequence
  derived and/or modified CDS sequence (opt2) from neuraminidase__InfluenzaA__ACT15344
augaaccccaaccagaagaucaucaccaucggcuccaucugcauggucaucggcaucgucucccucaugcuccagaucggcaacaugaucuccaucugggucucccacuccauccagaccggcaaccagugccaggacgagcccaucuccaacaccaaguuccucaccgagaaggccgucgccuccgucacccucgccggcaacuccucccucugccccaucuccggcugggccgucuacuccaaggacaacuccauccgcaucggcucccgcggcgacgucuucgucauccgcgagcccuucaucuccugcucccaccucgagugccgcaccuucuuccucacccagggcgcccuccucaacgacaagcacuccaacggcaccgucaaggaccgcuccccccaccgcacccucauguccugccccgucggcgaggcccccucccccuacaacucccgcuucgaguccgucgccugguccgccuccgccugccacgacggcaccuccuggcucaccaucggcaucuccggccccgacaacggcgccgucgccguccucaaguacaacggcaucaucaccgacaccaucaaguccuggcgcuccaacaucaugcgcacccaggaguccgagugcgccugcgucaacggcuccugcuucaccgucaugaccgacggccccuccuccggccaggccuccuacaagaucuucaagauggagaagggcaaggucgucaaguccgucgagcucgacgcccccaacuaccacuacgaggagugcuccugcuaccccgacgccggcgagaucaccugcgucugccgcgacaacuggcacggcuccaaccgccccugggucuccuucaaccagaaccucgaguaccagaucggcuacaucugcuccggcgucuucggcgacaacccccgccccaacgacggcaccggcuccugcggccccgucuuccccaacggcgccuacggcgucaagggcuucuccuucaaguacggcaacggcgucuggaucggccgcaccaaguccaccaacucccgcuccggcuucgagaugaucugggaccccaacggcuggaccggcaccgacuccuccuucuccgucaagcaggacaucgucgccaucaccgacugguccggcuacuccggcuccuucguccagcaccccgagcucaccggccucgacugcauccgccccugcuucugggucgagcucauccgcggccgccccaaggaguccaccaucuggaccuccggcuccuccaucuccuucugcggcgucaacggcgacaccgucuccugguccuggcccgacggcgccgagcuccccuucaccaucgacaaguga

SEQ ID NO: 113072 - RNA, 1350 nt, Artificial Sequence
  derived and/or modified CDS sequence (opt2) from neuraminidase__InfluenzaA__ACT15346
augaaccccaaccagaagaucaucaccaucggcuccaucugcauggucaucggcaucgucucccucaugcuccagaucggcaacaugaucuccaucugggucucccacuccauccagaccggcaaccagugccaggacgagcccaucuccaacaccaaguuccucaccgagaaggccgucgccuccgucacccucgccggcaacuccucccucugccccaucuccggcugggccgucuacuccaaggacaacaacauccgcaucggcucccgcggcgacgucuucgucauccgcgagcccuucaucuccugcucccaccucgagugccgcaccuucuuccucacccagggcgcccuccucaacgacaagcacuccaacggcaccgucaaggaccgcuccccccaccgcacccucauguccugccccgucggcgaggcccccucccccuacaacucccgcuucgaguccgucgccugguccgccuccgccugccacgacggcaccuccuggcucaccaucggcaucuccggccccgacaacggcgccgucgccguccucaaguacaacggcaucaucaccgacaccaucaaguccuggcgcaacaacaucaugcgcacccaggaguccgagugcgccugcgucaacggcuccugcuucaccgucaugaccgacggccccuccuccggccaggccuccuacaagaucuucaagauggagaagggcaaggucgucaaguccgucgagcucgacgcccccaacuaccacuacgaggagugcuccugcuaccccgacgccggcgagaucaccugcgucugccgcgacaacuggcacggcuccaaccgccccugggucuccuucaaccagaaccucgaguaccagaucggcuacaucugcuccggcgucuucggcgacaacccccgccccaacgacggcaccggcuccugcggccccgucuuccccaacggcgccuacggcgucaagggcuucuccuucaaguacggcaacggcgucuggaucggccgcaccaaguccaccaacucccgcuccggcuucgagaugaucugggaccccaacggcuggaccggcaccgacuccuccuucuccgucaagcaggacaucgucgccaucaccgacugguccggcuacuccggcuccuucguccagcaccccgagcucaccggccucgacugcauccgccccugcuucugggucgagcucauccgcggccgccccaaggaguccaccaucuggaccuccggcuccuccaucuccuucugcggcgucaacggcgacaccgucuccugguccuggcccgacggcgccgagcuccccuucaccaucgacaaguga

SEQ ID NO: 113073 - RNA, 1350 nt, Artificial Sequence
  derived and/or modified CDS sequence (opt2) from neuraminidase__InfluenzaA__ACT15348
augaaccccaaccagaagaucaucaccaucggcuccaucugcauggucaucggcaccgucucccucaugcuccagaucggcaacaugaucuccaucugggucucccacuccauccagaccggcaaccagugccagggcgagcccaucuccaacaccaaguuccucaccgagaaggccgucgccuccgucacccucgccggcaacuccucccucugccccaucuccggcugggccgucuacuccaaggacaacuccauccgcaucggcucccgcggcgacgucuucgucauccgcgagcccuucaucuccugcucccaccucgagugccgcaccuucuuccucacccagggcgcccuccucaacgacaagcacuccaacggcaccgucaaggaccgcuccccccaccgcacccucauguccugccccgucggcgaggcccccucccccuacaacucccgcuucgaguccgucgccugguccgccuccgccugccacgacggcaccuccuggcucaccaucggcaucuccggccccgacaacggcgccgucgccguccucaaguacaacggcaucaucaccgacaccaucaaguccuggcgcaacaacauccuccgcacccaggaguccgagugcgccugcgucaacggcuccugcuucaccgucaugaccgacggccccuccuccggccaggccuccuacaagaucuucaagauggagaagggcaaggucgucaaguccgucgagcucgacgcccccaacuaccacuacgaggagugcuccugcuaccccgacgccggcgagaucaccugcgucugccgcgacaacuggcacggcuccaaccgccccugggucuccuucaaccagaaccucgaguaccagaucggcuacaucugcuccggcgucuucggcgacaacccccgccccaacgacggcaccggcuccugcggccccgucgucuccaacggcgccuacggcgucaagggcuucuccuucaaguacggcaacggcgucuggaucggccgcaccaaguccaccaacucccgcuccggcuucgagaugaucugggaccccaacggcuggaccggcaccgacuccuccuucuccggcaagcaggacaucgucgccaucaccgacugguccggcuacuccggcuccuucguccagcaccccgagcucaccggccucgacugcauccgccccugcuucugggucgagcucauccgcggccgccccaaggaguccaccaucuggaccuccggcuccuccaucuccuucugcggcgucaacuccgacaccgucuccugguccuggcccgacggcgccgagcuccccuucaccaucgacaaguga

SEQ ID NO: 113074 - RNA, 1350 nt, Artificial Sequence
  derived and/or modified CDS sequence (opt2) from neuraminidase__InfluenzaA__ACT15350
augaaccccaaccagaagaucaucaccaucggcuccaucugcauggucaucggcaucgucucccucaugcuccagaucggcaacaugaucuccaucugggucucccacuccauccagaccggcaaccgcugccaggacgagcccaucuccaacaccaaguuccucaccgagaaggccgucgccuccgucacccucgccggcaacuccucccucugccccaucuccggcugggccgucuacuccaaggacaacuccauccgcaucggcucccgcggcgacgucuucgucauccgcgagcccuucaucuccugcucccaccucgagugccgcaccuucuuccucacccagggcgcccuccucaacgacaagcacuccaacggcaccgucaaggaccgcuccccccaccgcacccucauguccugccccgucggcgaggcccccucccccuacaacucccgcuucgaguccgucgccugguccgccuccgccugccacgacggcaccuccuggcucaccaucggcaucuccggccccgacaacggcgccgucgccguccucaaguacaacggcaucaucaccgacaccaucaaguccuggcgcaacaacaucaugcgcacccaggaguccgagugcgccugcgucaacggcuccugcuucaccgucaugaccgacggccccuccuccggccaggccuccuacaagaucuucaagauggagaagggcaaggucgucaaguccgucgagcucgacgcccccaacuaccacuacgaggagugcuccugcuaccccgacgccggcgagaucaccugcgucugccgcgacaacuggcacggcuccaaccgccccugggucuccuucaaccagaaccucgaguacaagaucggcuacaucugcuccggcaucuucggcgacaacccccgccccaacgacggcaccggcuccugcggccccgucuuccccaacggcgccuacggcgucaagggcuucuccuucaaguacggcaacggcgucuggaucggccgcaccaaguccaccaacucccgcuccggcuucgagaugaucugggaccccaacggcuggaccggcaccgacuccuccuucuccgucaagcaggacaucgucgccaucaccgacugguccggcuacuccggcuccuucguccagcaccccgagcucaccggccucgacugcauccgccccugcuucugggucgagcucauccgcggccgccccaaggagcgcaccaucuggaccuccggcuccuccaucuccuucugcggcgucaacggcgacaccgucuccugguccuggcccgacggcgccgagcuccccuucaccaucgacaaguga

SEQ ID NO: 113075 - RNA, 1350 nt, Artificial Sequence
  derived and/or modified CDS sequence (opt2) from neuraminidase__InfluenzaA__ACT15352
augaaccccaaccagaagaucaucaccaucggcuccaucugcauggucaucggcaucgucucccucaugcuccagaucggcaacaugaucuccaucugggucucccacuccauccagaccggcaaccagugccaggacgagcccaucuccaacaccaaguuccucaccgagaaggccgucgccuccgucacccucgccggcaacuccucccucugccccaucuccggcugggccgucuacuccaaggacaacuccauccgcaucggcucccgcggcgacgucuucgucauccgcgagcccuucaucuccugcucccaccucgagugccgcaccuucuuccucacccagggcgcccuccucaacgacaagcacuccaacggcaccgucaaggaccgcuccccccaccgcacccucauguccugccccgucggcgaggcccccucccccuacaacucccgcuucgaguccgucgccugguccgccuccgccugccacgacggcaccuccuggcucaccaucggcaucuccggccccgacaacggcgccgucgccguccucaaguacaacggcaucaucaccgacaccaucaaguccuggcgcaacaacauccuccgcacccaggaguccgagugcgccugcgucaacggcuccugcuucaccgucaugaccgacggccccuccuccggccaggccuccuacaagaucuucaagauggagaagggcaaggucgucaaguccgucgagcucgacgcccccaacuaccacuacgaggagugcuccugcuaccccgacgccggcgagaucaccugcgucugccgcgacaacuggcacggcuccaaccgccccugggucuccuucaaccagaaccucgaguaccagaucggcuacaucugcuccggcgucuucggcgacaacccccgccccaacgacggcaccggcuccugcggccccgucgucuccaacggcgccuacggcgucaagggcuucuccuucaaguacggcaacggcgucuggaucggccgcaccaaguccaccaacucccgcuccggcuucgagaugaucugggaccccaacggcuggaccggcaccgacuccuccuucuccggcaagcaggacaucgucgccaucaccgacugguccggcuacuccggcuccuucguccagcaccccgagcucaccggccucgacugcauccgccccugcuucugggucgagcucauccgcggccgccccaaggaguccaccaucuggaccuccggcuccuccaucuccuucugcggcgucaacuccgacaccgucuccugguccuggcccgacggcgccgagcuccccuucaccaucgacaaguga

SEQ ID NO: 113076 - RNA, 1350 nt, Artificial Sequence
  derived and/or modified CDS sequence (opt2) from neuraminidase__InfluenzaA__ACT15354
augaaccccucccagaagaucaucaccaucggcuccaucugcauggucaucggcaucgucucccucaugcuccagaucggcaacaugaucuccaucuggaucucccacuccauccagaccggcaaccagugccaggacgagcccaucuccaacaccaaguuccucaccgagaaggccgucgccuccgucacccucgccggcaacuccucccucugccccaucuccggcugggccgucuacuccaaggacaacuccauccgcaucggcucccgcggcgacgucuucgucauccgcgagcccuucaucuccugcucccaccucgagugccgcaccuucuuccucacccagggcgcccuccucaacgacaagcacuccaacggcaccgucaaggaccgcuccccccaccgcacccucauguccugccccgucggcgaggcccccucccccuacaacucccgcuucgaguccgucgccugguccgccuccgccugccacgacggcaccuccuggcucaccaucggcaucuccggccccgacaacggcgccgucgccguccucaaguacaacggcaucaucaccgacaccaucaaguccuggcgcaacaacaucaugcgcacccaggaguccgagugcgccugcgucaacggcuccugcuucaccgucaugaccgacggccccuccuccggccaggccuccuacaagaucuucaagauggagaagggcaaggucgucaaguccgucgagcucgacgcccccaacuaccacuacgaggagugcuccugcuaccccgacgccggcgagaucaccugcgucugccgcgacaacuggcacggcuccaaccgccccugggucuccuucaaccagaaccucgaguaccagaucggcuacaucugcuccggcgucuucggcgacaacccccgccccaacgacggcaccggcuccugcggccccgucuuccccaacggcgccuacggcgucaagggcuucuccuucaaguacggcaacggcgucuggaucggccgcaccaaguccaccaacucccgcuccggcuucgagaugaucugggaccccaacggcuggaccggcaccgacuccuccuucuccgucaagcaggacaucgucgccaucaccgacugguccggcuacuccggcuccuucguccagcaccccgagcucaccggccucgacugcauccgccccugcuucugggucgagcucauccgcggccgccccaaggaguccaccaucuggaccuccggcuccuccaucuccuucugcggcgucaacggcgacaccgucuccugguccuggcccgacggcgccgagcuccccuucaccaucgacaaguga

SEQ ID NO: 113077 - RNA, 1350 nt, Artificial Sequence
  derived and/or modified CDS sequence (opt2) from neuraminidase__InfluenzaA__ACT15356
augaaccccaaccagaagaucaucaccaucggcuccaucugcauggucaucggcaucgucucccucaugcuccagaucggcaacaugaucuccaucugggucucccacuccauccagaccggcaaccagugccaggacgagcccaucuccaacaccaaguuccucaccgagaaggccgucgccuccgucacccucgccggcaacuccucccucugccccaucuccggcugggccgucuacuccaaggacaacuccauccgcaucggcucccgcggcgacgucuucgucauccgcgagcccuucaucuccugcucccaccucgagugccgcaccuucuuccucacccagggcgcccuccucaacgacaagcacuccaacggcaccgucaaggaccgcuccccccaccgcacccucauguccugccccgucggcgaggcccccucccccuacaacucccgcuucgaguccgucgccugguccgccuccgccugccacgacggcaccuccuggcucaccaucggcaucuccggccccgacaacggcgccgucgccguccucaaguacaacggcaucaucaccgacaccaucaaguccuggcgcaacaacauccuccgcacccaggaguccgagugcgccugcgucaacggcuccugcuucaccgucaugaccgacggccccuccuccggccaggccuccuacaagaucuucaagauggagaagggcaaggucgucaaguccgucgagcucgacgcccccaacuaccacuacgaggagugcuccugcuaccccgacgccggcgagaucaccugcgucugccgcgacaacuggcacggcuccaaccgccccugggucuccuucaaccagaaccucgaguaccagaucggcuacaucugcuccggcgucuucggcgacaacccccgccccaacgacggcaccggcuccugcggccccgucuucuccaacggcgccuacggcgucaagggcuucuccuucaaguacggcaacggcgucuggaucggccgcaccaaguccaccaacucccgcuccggcuucgagaugaucugggaccccaacggcuggaccggcaccgacuccuccuucuccggcaagcaggacaucgucgccaucaccgacugguccggcuacuccggcuccuucguccagcaccccgagcucaccggccucgacugcauccgccccugcuucugggucgagcucauccgcggccgccccaaggaguccaccaucuggaccuccggcuccuccaucuccuucugcggcgucaacuccgacaccgucuccugguccuggcccgacggcgccgagcuccccuucaccaucgacaaguga

SEQ ID NO: 113078 - RNA, 1350 nt, Artificial Sequence
  derived and/or modified CDS sequence (opt2) from neuraminidase__InfluenzaA__ACT15358
augaaccccaaccagaagaucaucaccaucggcuccaucugcauggucaucggcaucgucucccucaugcuccagaucggcaacaugaucuccaucugggucucccacuccauccagaccggcaaccgcugccaggacgagcccaucuccaacaccaaguuccucaccgagaaggccgucgccuccgucacccucgccggcaacuccucccucugccccaucuccggcugggccgucuacuccaaggacaacuccauccgcaucggcucccgcggcgacgucuucgucauccgcgagcccuucaucuccugcucccaccucgagugccgcaccuucuuccucacccacggcgcccuccucaacgacaagcacuccaacggcaccgucaaggaccgcuccccccaccgcacccucauguccugccccgucggcgaggcccccucccccuacaacucccgcuucgaguccgucgccugguccgccuccgccugccacgacggcaccuccuggcucaccaucggcaucuccggccccgacaacggcgccgucgccguccucaaguacaacggcaucaucaccgacaccaucaaguccuggcgcaacaacaucaugcgcacccaggaguccgagugcgccugcgucaacggcuccugcuucaccgucaugaccgacggccccuccuccggccaggccuccuacaagaucuucaagauggagaagggcaaggucgucaaguccgucgagcucgacgcccccaacuaccacuacgaggagugcuccugcuaccccgacgccggcgagaucaccugcgucugccgcgacaacuggcacggcuccaaccgccccuggaucuccuucaaccagaaccucgaguacaagaucggcuacaucugcuccggcaucuucggcgacaacccccgccccaacgacggcaccggcuccugcggccccguccuccccaacggcgccuacggcgucaagggcuucuccuucaaguacggcaacggcgucuggaucggccgcaccaaguccaccaacucccgcuccggcuucgagaugaucugggaccccaacggcuggaccggcaccgacuccuccuucuccgucaagcaggacaucgucgccaucaccgacugguccggcuacuccggcuccuucguccagcaccccgagcucaccggccucgacugcauccgccccugcuucugggucgagcucauccgcggccgccccaaggaguccaccaucuggaccuccggcuccuccaucuccuucugcggcgucaacggcgacaccgucuccugguccuggcccgacggcgccgagcuccccuucaccaucgacaaguga

SEQ ID NO: 113079 - RNA, 1410 nt, Artificial Sequence; identical to SEQ ID NO: 110363
  derived and/or modified CDS sequence (opt2) from neuraminidase__InfluenzaA__ACT21515

SEQ ID NO: 113080 - RNA, 1410 nt, Artificial Sequence
  derived and/or modified CDS sequence (opt2) from neuraminidase__InfluenzaA__ACT21516
augaaccccaaccagaagaucaucaccaucggcuccgucucccucaccaucuccaccaucugcuucuucaugcagaucgccauccucaucaccaccgucacccuccacuucaagcaguacgaguucaacuccccccccaacaaccaggucaugcucugcgagcccaccaucaucgagcgcaacaucaccgagaucgccuaccucaccaacaccaccaucgagaaggagaucugccccaagcucgccgaguaccgcaacugguccaagccccagugcgacaucaccggcuucgcccccuucuccaaggacaacuccauccgccucuccgccggcggcgacaucugggucacccgcgagcccuacgucuccugcgaccccgacaagugcuaccaguucgcccucggccagggcaccacccucaacaacguccacuccaacgacaccguccacgaccgcacccccuaccgcacccuccucaugaacgagcucggcguccccuuccaccucggcaccaagcaggucugcgucgccugguccuccuccuccugccacgacggcaaggccuggcuccacgucugcgucaccggcgacgagaagaacgccaccgccuccuucaucuacaacggccgccucgucgacuccaucgucuccugguccaaggagauccuccgcacccaggaguccgagugcgucugcaucaacggcaccugcaccgucgucaugaccgacggcuccgccuccggcaaggccgacaccaagauccucuucaucgaggagggcaagaucguccacaccuccacccucuccggcuccgcccagcacgucgaggagugcuccugcuacccccgcuaccccggcguccgcugcgucugccgcgacaacuggaagggcuccaaccgccccaucgucgacaucaacaucaaggacuacuccaucgucuccuccuacgucugcuccggccucgucggcgacaccccccgcaagaacgacuccuccuccuccucccacugccucgaccccaacaacgaggagggcggccacggcgucaagggcugggccuucgacgacggcaacgacgucuggaugggccgcaccaucuccgagaagcuccgcuccggcuacgagaccuucaaggucaucgagggcugguccaaccccaacuccaagcuccagaucaaccgccaggucaucgucgaccgcggcaaccgcuccggcuacuccggcaucuucuccgucgagggcaaguccugcaucaaccgcugcuucuacgucgagcucauccgcggccgcaaggaggagaacgagguccucuggaccuccaacuccaucgucgucuucugcggcaccuccggcaccuacggcaccggcuccuggcccgacggcgccgacaucaaccucaugcccaucuga

SEQ ID NO: 113081 - RNA, 1410 nt, Artificial Sequence
  derived and/or modified CDS sequence (opt2) from neuraminidase__InfluenzaA__ACT21517
augaaccccaaccagaagaucaucaccaucggcuccgucucccucaccaucuccaccaucugcuucuucaugcagaucgccauccucaucaccaccgucacccuccacuucaagcaguacgaguucaacuccccccccaacaaccaggucaugcucugcgagcccaccaucaucgagcgcaacaucaccgagaucgucuaccucaccaacaccaccaucgagaaggagaucugccccaagcucgccgaguaccgcaacugguccgagccccagugcgacaucaccggcuucgcccccuucuccaaggacaacuccauccgccucuccgccggcggcgacaucugggucacccgcgagcccuacgucuccugcgaccccgacaagugcuaccaguucgcccucggccagggcaccacccucaacaacguccacuccaacgacaccguccacgaccgcacccccuaccgcacccucgucaugaacgagcucggcguccccuuccaccucggcaccaagcaggucugcaucgccugguccuccuccuccugccacgacggcaaggccuggcuccacgucugcgucaccggcgacgacaagaacgccaccgccuccuucaucuacaacggccgccucgucgacuccaucgucuccugguccaaggagauccuccgcacccaggaguccgagugcgucugcaucaacggcaccugcaccgucgucaugaccgacggcuccgccuccggcaaggccgacaccaagauccucuucaucgaggagggcaagaucguccacaccuccacccucuccggcuccgcccagcacgucgaggagugcuccugcuacccccgcuaccccggcguccgcugcgucugccgcgacaacuggaagggcuccaaccgccccaucgucgacaucaacaucaaggacuacuccaucgucuccuccuacgucugcuccggccucgccggcgacaccccccgcaagaacgacuccuccuccuccucccacugccucgaccccaacaacgaggagggcggccacggcgucaagggcugggccuucgacgacggcaacgacgucuggaugggccgcaccaucuccgagaagcuccgcuccggcuacgagaccuucaaggucaucgagggcugguccaaccccaacuccaagcuccagaucaaccgccaggucaucgucgaccgcggcaaccgcuccggcuacuccggcaucuucuccgucgagggcaaguccugcaucaaccgcugcuucuacgucgagcucauccgcggccgcaaggaggagaccgagguccucuggaccuccaacuccaucgucgucuucugcggcaccuccggcaccuacggcaccggcuccuggcccgacggcgccgacaucaaccucaugcccaucuga

SEQ ID NO: 113082 - RNA, 1410 nt, Artificial Sequence; identical to SEQ ID NO: 112774
  derived and/or modified CDS sequence (opt2) from neuraminidase__InfluenzaA__ACT21574

SEQ ID NO: 113083 - RNA, 1410 nt, Artificial Sequence; identical to SEQ ID NO: 112774
  derived and/or modified CDS sequence (opt2) from neuraminidase__InfluenzaA__ACT21585

SEQ ID NO: 113084 - RNA, 1410 nt, Artificial Sequence; identical to SEQ ID NO: 112774
  derived and/or modified CDS sequence (opt2) from neuraminidase__InfluenzaA__ACT22011

SEQ ID NO: 113085 - RNA, 1410 nt, Artificial Sequence; identical to SEQ ID NO: 112774
  derived and/or modified CDS sequence (opt2) from neuraminidase__InfluenzaA__ACT22012

SEQ ID NO: 113086 - RNA, 1410 nt, Artificial Sequence; identical to SEQ ID NO: 112774
  derived and/or modified CDS sequence (opt2) from neuraminidase__InfluenzaA__ACT22013

SEQ ID NO: 113087 - RNA, 1410 nt, Artificial Sequence; identical to SEQ ID NO: 112774
  derived and/or modified CDS sequence (opt2) from neuraminidase__InfluenzaA__ACT22014

SEQ ID NO: 113088 - RNA, 1410 nt, Artificial Sequence; identical to SEQ ID NO: 112764
  derived and/or modified CDS sequence (opt2) from neuraminidase__InfluenzaA__ACT22015

SEQ ID NO: 113089 - RNA, 1410 nt, Artificial Sequence
  derived and/or modified CDS sequence (opt2) from neuraminidase__InfluenzaA__ACT22016
augaaccccaaccagaagaucaucaccaucggcuccgucugcaugaccaucggcauggccaaccucauccuccagaucggcaacaucaucuccaucuggaucucccacuccauccagcucggcaaccagaaccagaucgagaccugcaaccaguccgucaucaccuacgagaacaacaccugggucaaccagaccuacgucaacaucuccaacaccaacuucgccgccggccaguccgucgucuccgucaagcucgccggcaacuccucccucugccccgucuccggcugggccaucuacuccaaggacaacuccauccgcaucggcuccaagggcgacgucuucgucauccgcgagcccuucaucuccugcuccccccucgagugccgcaccuucuuccucacccagggcgcccuccucaacgacaagcacuccaacggcaccaucaaggaccgcucccccuaccgcacccucauguccugccccaucggcgagguccccucccccuacaacucccgcuucgaguccgucgccugguccgccuccgccugccacgacggcaucaacuggcucaccaucggcaucuccggccccgacaacggcgccgucgccguccucaaguacaacggcaucaucaccgacaccaucaaguccuggcgcaacaacauccuccgcacccaggaguccgagugcgccugcgucaacggcuccugcuucaccgucaugaccgacggccccuccaacggccaggccuccuacaagaucuuccgcaucgagaagggcaagaucgucaaguccgucgagaugaacgcccccaacuacuacuacgaggagugcuccugcuaccccgacuccuccgagaucaccugcgucugccgcgacaacuggcacggcuccaaccgccccugggucuccuucaaccagaaccucgaguaccagaucggcuacaucugcuccggcaucuucggcgacaacccccgccccaacgacaagaccggcuccugcggccccgucuccuccaacggcgccaacggcgucaagggcuucuccuucaaguacggcaacggcgucuggaucggccgcaccaaguccaucuccucccgcaacggcuucgagaugaucugggaccccaacggcuggaccggcaccgacaacaacuucuccaucaagcaggacaucgucggcaucaacgagugguccggcuacuccggcuccuucguccagcaccccgagcucaccggccucgacugcauccgccccugcuucugggucgagcucauccgcggccgccccaaggagaacaccaucuggaccuccggcuccuccaucuccuucugcggcgucaacuccgacaccgucggcugguccuggcccgacggcgccgagcuccccuucaccaucgacaaguga

SEQ ID NO: 113090 - RNA, 1410 nt, Artificial Sequence; identical to SEQ ID NO: 112774
  derived and/or modified CDS sequence (opt2) from neuraminidase__InfluenzaA__ACT22017

SEQ ID NO: 113091 - RNA, 1410 nt, Artificial Sequence; identical to SEQ ID NO: 112774
  derived and/or modified CDS sequence (opt2) from neuraminidase__InfluenzaA__ACT22018

SEQ ID NO: 113092 - RNA, 1410 nt, Artificial Sequence; identical to SEQ ID NO: 112764
  derived and/or modified CDS sequence (opt2) from neuraminidase__InfluenzaA__ACT22506

SEQ ID NO: 113093 - RNA, 1410 nt, Artificial Sequence; identical to SEQ ID NO: 112774
  derived and/or modified CDS sequence (opt2) from neuraminidase__InfluenzaA__ACT22511

SEQ ID NO: 113094 - RNA, 1410 nt, Artificial Sequence; identical to SEQ ID NO: 112774
  derived and/or modified CDS sequence (opt2) from neuraminidase__InfluenzaA__ACT33121

SEQ ID NO: 113095 - RNA, 1410 nt, Artificial Sequence; identical to SEQ ID NO: 112774
  derived and/or modified CDS sequence (opt2) from neuraminidase__InfluenzaA__ACT33124

SEQ ID NO: 113096 - RNA, 1410 nt, Artificial Sequence; identical to SEQ ID NO: 112774
  derived and/or modified CDS sequence (opt2) from neuraminidase__InfluenzaA__ACT33126

SEQ ID NO: 113097 - RNA, 1410 nt, Artificial Sequence; identical to SEQ ID NO: 112764
  derived and/or modified CDS sequence (opt2) from neuraminidase__InfluenzaA__ACT35526

SEQ ID NO: 113098 - RNA, 1410 nt, Artificial Sequence; identical to SEQ ID NO: 112774
  derived and/or modified CDS sequence (opt2) from neuraminidase__InfluenzaA__ACT36507

SEQ ID NO: 113099 - RNA, 1410 nt, Artificial Sequence; identical to SEQ ID NO: 112774
  derived and/or modified CDS sequence (opt2) from neuraminidase__InfluenzaA__ACT36672

SEQ ID NO: 113100 - RNA, 1410 nt, Artificial Sequence; identical to SEQ ID NO: 112774
  derived and/or modified CDS sequence (opt2) from neuraminidase__InfluenzaA__ACT36673

SEQ ID NO: 113101 - RNA, 1410 nt, Artificial Sequence; identical to SEQ ID NO: 112774
  derived and/or modified CDS sequence (opt2) from neuraminidase__InfluenzaA__ACT36674

SEQ ID NO: 113102 - RNA, 1410 nt, Artificial Sequence; identical to SEQ ID NO: 112774
  derived and/or modified CDS sequence (opt2) from neuraminidase__InfluenzaA__ACT36675

SEQ ID NO: 113103 - RNA, 1410 nt, Artificial Sequence; identical to SEQ ID NO: 112774
  derived and/or modified CDS sequence (opt2) from neuraminidase__InfluenzaA__ACT36677

SEQ ID NO: 113104 - RNA, 1410 nt, Artificial Sequence
  derived and/or modified CDS sequence (opt2) from neuraminidase__InfluenzaA__ACT36678
augaaccccaaccagaagaucaucaccaucggcuccgucugcaugaccaucggcauggccaaccucauccuccagaucggcaacaucaucuccaucuggaucucccacuccauccagcucggcaaccagaaccagaucgagaccugcaaccaguccgucaucaccuacgagaacaacaccugggucaaccagaccuacgucaacaucuccaacaccaacuucgccgcccgccaguccgucgucuccgucaagcucgccggcaacuccucccucugccccgucuccggcugggccaucuacuccaaggacaacuccguccgcaucggcuccaagggcgacgucuucgucauccgcgagcccuucaucuccugcuccccccucgagugccgcaccuucuuccucacccagggcgcccuccucaacgacaagcacuccaacggcaccaucaaggaccgcucccccuaccgcacccucauguccugccccaucggcgagguccccucccccuacaacucccgcuucgaguccgucgccugguccgccuccgccugccacgacggcaucaacuggcucaccaucggcaucuccggccccgacaacggcgccgucgccguccucaaguacaacggcaucaucaccgacaccaucaaguccuggcgcaacaacauccuccgcacccaggaguccgagugcgccugcgucaacggcuccugcuucaccgucaugaccgacggccccuccaacggccaggccuccuacaagaucuuccgcaucgagaagggcaagaucgucaaguccgucgagaugaacgcccccaacuaccacuacgaggagugcuccugcuaccccgacuccuccgagaucaccugcgucugccgcgacaacuggcacggcuccaaccgccccugggucuccuucaaccagaaccucgaguaccagaucggcuacaucugcuccggcaucuucggcgacaacccccgccccaacgacaagaccggcuccugcggccccgucuccuccaacggcgccaacggcgucaagggcuucuccuucaaguacggcaacggcgucuggaucggccgcaccaaguccaucuccucccgcaacggcuucgagaugaucugggaccccaacggcuggaccggcaccgacaacaacuucuccaucaagcaggacaucgucggcaucaacgagugguccggcuacuccggcuccuucguccagcaccccgagcucaccggccucgacugcauccgccccugcuucugggucgagcucauccgcggccgccccaaggagaacaccaucuggaccuccggcuccuccaucuccuucugcggcgucaacuccgacaccgucggcugguccuggcccgacggcgccgagcuccccuucaccaucgacaaguga

SEQ ID NO: 113105 - RNA, 1410 nt, Artificial Sequence; identical to SEQ ID NO: 112764
  derived and/or modified CDS sequence (opt2) from neuraminidase__InfluenzaA__ACT36679

SEQ ID NO: 113106 - RNA, 1410 nt, Artificial Sequence; identical to SEQ ID NO: 112774
  derived and/or modified CDS sequence (opt2) from neuraminidase__InfluenzaA__ACT36680

SEQ ID NO: 113107 - RNA, 1410 nt, Artificial Sequence; identical to SEQ ID NO: 112764
  derived and/or modified CDS sequence (opt2) from neuraminidase__InfluenzaA__ACT36682

SEQ ID NO: 113108 - RNA, 1410 nt, Artificial Sequence; identical to SEQ ID NO: 112764
  derived and/or modified CDS sequence (opt2) from neuraminidase__InfluenzaA__ACT36683

SEQ ID NO: 113109 - RNA, 1410 nt, Artificial Sequence; identical to SEQ ID NO: 112774
  derived and/or modified CDS sequence (opt2) from neuraminidase__InfluenzaA__ACT36684

SEQ ID NO: 113110 - RNA, 1410 nt, Artificial Sequence; identical to SEQ ID NO: 112764
  derived and/or modified CDS sequence (opt2) from neuraminidase__InfluenzaA__ACT36685

SEQ ID NO: 113111 - RNA, 1410 nt, Artificial Sequence; identical to SEQ ID NO: 112764
  derived and/or modified CDS sequence (opt2) from neuraminidase__InfluenzaA__ACT36686

SEQ ID NO: 113112 - RNA, 1410 nt, Artificial Sequence; identical to SEQ ID NO: 112764
  derived and/or modified CDS sequence (opt2) from neuraminidase__InfluenzaA__ACT36687

SEQ ID NO: 113113 - RNA, 1410 nt, Artificial Sequence
  derived and/or modified CDS sequence (opt2) from neuraminidase__InfluenzaA__ACT36688
augaaccccaaccagaagaucaucaccaucggcuccgucugcaugaccaucggcauggccaaccucauccuccagaucggcaacaucaucuccaucuggaucucccacuccauccagcucggcaaccagaaccagaucgagaccugcaaccaguccgucaucaccuacgagaacaacaccugggucaaccagaccuacgucaacaucuccaacaccaacuucgccgccggccaguccgucgucuccgucaagcucgccggcaacuccucccucugccccgucuccggcugggccaucuacuccaaggacaacuccguccgcaucggcuccaagggcgacgucuucgucauccgcgagcccuucaucuccugcuccccccucgagugccgcaccuucuuccucacccagggcgcccuccucaacgacaagcacuccaacggcaccaucaaggaccgcucccccuaccgcacccucauguccugccccaucggcgagguccccucccccuacaacucccgcuucgaguccgucgccugguccgccuccgccugccacgacggcaucaacuggcucaccaucggcaucuccggccccgacaacggcgccgucgccguccucaaguacaacggcaucaucaccgacaccaucaaguccuggcgcaacaacauccuccgcacccaggaguccgagugcgccugcgucaacggcuccugcuucaccgucaugaccgacggccccuccaacggccaggccuccuacaagaucuuccgcaucgagaagggcaagaucgucaaguccgucgagaugaacgcccccaacuaccacuacgaggagugcuccugcuaccccgacuccuccgagaucaccugcgucugccgcgacaacuggcacggcuccaaccgccccugggucuccuucaaccagaaccucgaguaccagaucggcuacaucugcuccggcaucuucggcgacaacccccgccccaacgacaagaccggcuccugcggccccgucuccuccaacggcgccaacggcgucaagggcuucuccuacaaguacggcaacggcgucuggaucggccgcaccaaguccaucuccucccgcaacggcuucgagaugaucugggaccccaacggcuggaccggcaccgacaacaacuucuccaucaagcaggacaucgucggcaucaacgagugguccggcuacuccggcuccuucguccagcaccccgagcucaccggccucgacugcauccgccccugcuucugggucgagcucauccgcggccgccccaaggagaacaccaucuggaccuccggcuccuccaucuccuucugcggcgucaacuccgacaccgucggcugguccuggcccgacggcgccgagcuccccuucaccaucgacaaguga

SEQ ID NO: 113114 - RNA, 1410 nt, Artificial Sequence; identical to SEQ ID NO: 112764
  derived and/or modified CDS sequence (opt2) from neuraminidase__InfluenzaA__ACT36689

SEQ ID NO: 113115 - RNA, 1410 nt, Artificial Sequence; identical to SEQ ID NO: 112804
  derived and/or modified CDS sequence (opt2) from neuraminidase__InfluenzaA__ACT36690

SEQ ID NO: 113116 - RNA, 1410 nt, Artificial Sequence; identical to SEQ ID NO: 112764
  derived and/or modified CDS sequence (opt2) from neuraminidase__InfluenzaA__ACT36691

SEQ ID NO: 113117 - RNA, 1410 nt, Artificial Sequence; identical to SEQ ID NO: 112804
  derived and/or modified CDS sequence (opt2) from neuraminidase__InfluenzaA__ACT36693

SEQ ID NO: 113118 - RNA, 1410 nt, Artificial Sequence; identical to SEQ ID NO: 112774
  derived and/or modified CDS sequence (opt2) from neuraminidase__InfluenzaA__ACT36694

SEQ ID NO: 113119 - RNA, 1410 nt, Artificial Sequence; identical to SEQ ID NO: 112774
  derived and/or modified CDS sequence (opt2) from neuraminidase__InfluenzaA__ACT36695

SEQ ID NO: 113120 - RNA, 1410 nt, Artificial Sequence; identical to SEQ ID NO: 112774
  derived and/or modified CDS sequence (opt2) from neuraminidase__InfluenzaA__ACT52684

SEQ ID NO: 113121 - RNA, 1410 nt, Artificial Sequence; identical to SEQ ID NO: 112764
  derived and/or modified CDS sequence (opt2) from neuraminidase__InfluenzaA__ACT54608

SEQ ID NO: 113122 - RNA, 1410 nt, Artificial Sequence
  derived and/or modified CDS sequence (opt2) from neuraminidase__InfluenzaA__ACT66157
augaaccccaaccagaagaucaucaccaucggcuccgucugcaugaccaucggcauggccaaccucauccuccagaucggcaacaucaucuccaucuggaucucccacuccauccagcucggcaaccagaaccagaucgagaccugcaaccaguccgucaucaccuacgagaacaacaccugggucaaccagaccuacgucaacaucuccaacaccaacuucgccgccggccaguccgucgucuccgucaagcucgccggcaacuccucccucugccccgucuccggcugggccaucuacuccaaggacaacuccauccgcaucggcuccaagggcgacgucuucgucauccgcgagcccuucaucuccugcuccccccucgagugccgcaccuucuuccucacccagggcgcccuccucaacgacaagcacuccaacggcaccaucaaggaccgcucccccuaccgcacccucauguccugccccaucggcgagguccccucccccuacaacucccgcuucgaguccgucgccugguccgccuccgccugccacgacggcaucaacuggcucaccaucggcaucuccggccccgacaacggcgccgucgccguccucaaguacaacggcaucaucaccgacaccaucaaguccuggcgcaacaacauccuccgcacccaggaguccgagugcgccugcgucaacggcuccugcuucaccgucaugaccgacggccccuccaacggccaggccuccuacaagauccuccgcaucgagaagggcaagaucgucaaguccgucgagaugaacgcccccaacuaccacuacgaggagugcuccugcuaccccgacuccuccgagaucaccugcgucugccgcgacaacuggcacggcuccaaccgccccugggucuccuucaaccagaaccucgaguaccagaucggcuacaucugcuccggcaucuucggcgacaacccccgccccaacgacaagaccggcuccugcggccccgucuccuccaacggcgccaacggcgucaagggcuucuccuucaaguacggcaacggcgucuggaucggccgcaccaaguccaucuccucccgcaacggcuucgagaugaucugggaccccaacggcuggaccggcaccgacaacaacuucuccaucaagcaggacaucgucggcaucaacgagugguccggcuacuccggcuccuucguccagcaccccgagcucaccggccucgacugcauccgccccugcuucugggucgagcucauccgcggccgccccaaggagaacaccaucuggaccuccggcuccuccaucuccuucugcggcgucaacuccgacaccgucggcugguccuggcccgacggcgccgagcuccccuucaccaucgacaaguga

SEQ ID NO: 113123 - RNA, 1410 nt, Artificial Sequence; identical to SEQ ID NO: 112774
  derived and/or modified CDS sequence (opt2) from neuraminidase__InfluenzaA__ACT67117

SEQ ID NO: 113124 - RNA, 1410 nt, Artificial Sequence; identical to SEQ ID NO: 112764
  derived and/or modified CDS sequence (opt2) from neuraminidase__InfluenzaA__ACT67121

SEQ ID NO: 113125 - RNA, 1410 nt, Artificial Sequence; identical to SEQ ID NO: 112774
  derived and/or modified CDS sequence (opt2) from neuraminidase__InfluenzaA__ACT67240

SEQ ID NO: 113126 - RNA, 1410 nt, Artificial Sequence; identical to SEQ ID NO: 112774
  derived and/or modified CDS sequence (opt2) from neuraminidase__InfluenzaA__ACT67241

SEQ ID NO: 113127 - RNA, 1410 nt, Artificial Sequence; identical to SEQ ID NO: 112774
  derived and/or modified CDS sequence (opt2) from neuraminidase__InfluenzaA__ACT67243

SEQ ID NO: 113128 - RNA, 1410 nt, Artificial Sequence
  derived and/or modified CDS sequence (opt2) from neuraminidase__InfluenzaA__ACT67256
augaaccccaaccagaagaucaucaccaucggcuccgucugcaugaccaucggcauggccaaccucauccuccagaucggcaacaucaucuccaucuggaucucccacuccauccagcucggcaaccagaaccagaucgagaccugcaaccaguccgucaucaccuacgagaacaacaccugggucaaccagaccuacgucaacaucuccaacaccaacuucgccgccggccaguccgucgucuccgucaagcucgccggcaacuccucccucugccccgucuccggcugggccaucuacuccaaggacaacuccauccgcaucggcuccaagggcgacgucuucgucauccgcgagcccuucaucuccugcuccccccucgagugccgcaccuucuuccucacccagggcgcccuccucaacgacaagcacuccaacggcaccaucaaggaccgcucccccuaccgcacccucauguccugccccaucggcgagguccccucccccuacaacucccgcuucgaguccgucgccugguccgccuccgccugccacgacggcaucaacuggcucaccaucggcaucuccggccccgacaacggcgccgucgccguccucaaguacaacggcaucaucaccgacaccaucaaguccuggcgcaacaacauccuccgcacccaggaguccgagugcgccugcgucaacggcuccugcuucaccgucaugaccgacggccccuccgacggccaggccuccuacaagaucuuccgcaucgagaagggcaagaucgucaaguccgucgagaugaacgcccccaacuacuacuacgaggagugcuccugcuaccccgacuccuccgagaucaccugcgucugccgcgacaacuggcacggcuccaaccgccccugggucuccuucaaccagaaccucgaguaccagaucggcuacaucugcuccggcaucuucggcgacaacccccgccccaacgacaagaccggcuccugcggccccgucuccuccaacggcgccaacggcgucaagggcuucuccuucaaguacggcaacggcgucuggaucggccgcaccaaguccaucuccucccgcaacggcuucgagaugaucugggaccccaacggcuggaccggcaccgacaacaacuucuccaucaagcaggacaucgucggcaucaacgagugguccggcuacuccggcuccuucguccagcaccccgagcucaccggccucgacugcauccgccccugcuucugggucgagcucauccgcggccgccccaaggagaacaccaucuggaccuccggcuccuccaucuccuucugcggcgucaacuccgacaccgucggcugguccuggcccgacggcgccgagcuccccuucaccaucgacaaguga

SEQ ID NO: 113129 - RNA, 1410 nt, Artificial Sequence
  derived and/or modified CDS sequence (opt2) from neuraminidase__InfluenzaA__ACT68161
augaaccccaaccagaagaucaucaccaucggcuccgucugcaugaccaucggcauggccaaccucauccuccagaucggcaacaucaucuccaucuggaucucccacuccauccagcucggcaaccagaaccagaucgagaccugcaaccaguccgucaucaccuacgagaacaacaccugggucaaccagaccuacgucaacaucuccaacaccaacuucgccgccggccaguccgucgucuccgucaagcucgccggcaacuccucccucugccccgucuccggcugggccaucuacuccaaggacaacuccauccgcaucggcuccaagggcgacgucuucgucauccgcgagcccuucaucuccugcuccccccucgagugccgcaccuucuuccucacccagggcgcccuccucaacgacaagcacuccaacggcaccaucaaggaccgcucccccuaccgcacccucauguccugccccaucggcgagguccccucccccuacaacucccgcuucgaguccgucgccugguccgccuccgccugccacgacggcaucaacuggcucaccaucggcaucuccggccccgacaacggcgccgucgccguccucaaguacaacggcaucaucaccgacaccaucaaguccuggcgcaacaacauccuccgcacccaggaguccgagugcgccugcgucaacggcuccugcuucaccgucaugaccgacggccccuccgacggccaggccuccuacaagaucuuccgcaucgagaagggcaagaucgucaaguccgucgagaugaacgcccccaacuaccacuacgaggagugcuccugcuaccccgacuccuccgagaucaccugcgucugccgcgacaacuggcacggcuccaaccgccccugggucuccuucaaccagaaccucgaguaccagaucggcuacaucugcuccggcaucuucggcgacaacccccgccccaacgacaaggccggcuccugcggccccgucuccuccaacggcgccaacggcgucaagggcuucuccuucaaguacggcaacggcgucuggaucggccgcaccaaguccaucuccucccgcaacggcuucgagaugaucugggaccccaacggcuggaccggcaccgacaacaacuucuccaucaagcaggacaucgucggcaucaacgagugguccggcuacuccggcuccuucguccagcaccccgagcucaccggccucgacugcauccgccccugcuucugggucgagcucauccgcggccgccccaaggagaacaccaucuggaccuccggcuccuccaucuccuucugcggcgucaacuccgacaccgucggcugguccuggcccgacggcgccgagcuccccuucaccaucgacaaguga

SEQ ID NO: 113130 - RNA, 1410 nt, Artificial Sequence; identical to SEQ ID NO: 112764
  derived and/or modified CDS sequence (opt2) from neuraminidase__InfluenzaA__ACT68162

SEQ ID NO: 113131 - RNA, 1410 nt, Artificial Sequence; identical to SEQ ID NO: 112764
  derived and/or modified CDS sequence (opt2) from neuraminidase__InfluenzaA__ACT68163

SEQ ID NO: 113132 - RNA, 1410 nt, Artificial Sequence; identical to SEQ ID NO: 112764
  derived and/or modified CDS sequence (opt2) from neuraminidase__InfluenzaA__ACT68164

SEQ ID NO: 113133 - RNA, 1410 nt, Artificial Sequence; identical to SEQ ID NO: 112774
  derived and/or modified CDS sequence (opt2) from neuraminidase__InfluenzaA__ACT68166

SEQ ID NO: 113134 - RNA, 1410 nt, Artificial Sequence; identical to SEQ ID NO: 112774
  derived and/or modified CDS sequence (opt2) from neuraminidase__InfluenzaA__ACT68167

SEQ ID NO: 113135 - RNA, 1410 nt, Artificial Sequence; identical to SEQ ID NO: 112804
  derived and/or modified CDS sequence (opt2) from neuraminidase__InfluenzaA__ACT68168

SEQ ID NO: 113136 - RNA, 1410 nt, Artificial Sequence
  derived and/or modified CDS sequence (opt2) from neuraminidase__InfluenzaA__ACT68169
augaaccccaaccagaagaucaucaccaucggcuccgucugcaugaccaucggcauggccaaccucauccuccagaucggcaacaucaucuccaucuggaucucccacuccauccagcucggcgaccagaaccagaucgagaccugcaaccaguccgucaucaccuacgagaacaacaccugggucaaccagaccuacgucaacaucuccaacaccaacuucgccgccggccaguccgucgucuccgucaagcucgccggcaacuccucccucugccccgucuccggcugggccaucuacuccaaggacaacuccauccgcaucggcuccaagggcgacgucuucgucauccgcgagcccuucaucuccugcuccccccucgagugccgcaccuucuuccucacccagggcgcccuccucaacgacaagcacuccaacgagaccaucaaggaccgcucccccuaccgcacccucauguccugccccaucggcgagguccccucccccuacaacucccgcuucgaguccgucgccugguccgccuccgccugccacgacggcaucaacuggcucaccaucggcaucuccggccccgacaacggcgccgucgccguccucaaguacaacggcaucaucaccgacaccaucaaguccuggcgcaacaacauccuccgcacccaggaguccgagugcgccugcgucaacggcuccugcuucaccgucaugaccgacggccccuccgacggccaggccuccuacaagaucuuccgcaucgagaagggcaagaucgucaaguccgucgagaugaacgcccccaacuaccacuacgaggagugcuccugcuaccccgacuccuccgagaucaccugcgucugccgcgacaacuggcacggcuccaaccgccccugggucuccuucaaccagaaccucgaguaccagaucggcuacaucugcuccggcaucuucggcgacaacccccgccccaacgacaagaccggcuccugcggccccgucuccuccaacggcgccaacggcgucaagggcuucuccuucaaguacggcaacggcgucuggaucggccgcaccaaguccaucuccucccgcaacggcuucgagaugaucugggaccccaacggcuggaccggcaccgacaacaacuucuccaucaagcaggacaucgucggcaucuccgagugguccggcuacuccggcuccuucguccagcaccccgagcucaccggccucgacugcauccgccccugcuucugggucgagcucauccgcggccgccccaaggagaacaccaucuggaccuccggcuccuccaucuccuucugcggcgucaacuccgacaccgucggcugguccuggcccgacggcgccgagcuccccuucaccaucgacaaguga

SEQ ID NO: 113137 - RNA, 1410 nt, Artificial Sequence; identical to SEQ ID NO: 112764
  derived and/or modified CDS sequence (opt2) from neuraminidase__InfluenzaA__ACT68171

SEQ ID NO: 113138 - RNA, 1410 nt, Artificial Sequence; identical to SEQ ID NO: 112764
  derived and/or modified CDS sequence (opt2) from neuraminidase__InfluenzaA__ACT68172

SEQ ID NO: 113139 - RNA, 1410 nt, Artificial Sequence; identical to SEQ ID NO: 112774
  derived and/or modified CDS sequence (opt2) from neuraminidase__InfluenzaA__ACT68173

SEQ ID NO: 113140 - RNA, 1410 nt, Artificial Sequence; identical to SEQ ID NO: 112774
  derived and/or modified CDS sequence (opt2) from neuraminidase__InfluenzaA__ACT68174

SEQ ID NO: 113141 - RNA, 1410 nt, Artificial Sequence
  derived and/or modified CDS sequence (opt2) from neuraminidase__InfluenzaA__ACT68175
augaaccccaaccagaagaucaucaccaucggcuccgucugcaugaccaucggcauggccaaccucauccuccagaucggcaacaucaucuccaucuggaucucccacuccauccagcucggcaaccagaaccagaucgagaccugcaaccaguccgucaucaccuacgagaacaacaccugggucaaccagaccuacgucaacaucuccaacaccaacuucgccgccggccaguccgucgucuccgucaagcucgccggcaacuccucccucugccccgucuccggcugggccaucuacuccaaggacaacuccguccgcaucggcuccaagggcgacgucuucgucauccgcgagcccuucaucuccugcuccccccucgagugccgcaccuucuuccucacccagggcgcccuccucaacgacaagcacuccaacggcaccaucaaggaccgcucccccuaccgcacccucauguccugccccaucggcgagguccccucccccuacaacucccgcuucgaguccgucgccugguccgccuccgccugccacgacggcaucaacuggcucaccaucggcaucuccggccccgacaacggcgccgucgccguccucaaguacaacggcaucaucaccgacaccaucaaguccuggcgcaacaacauccuccgcacccaggaguccgagugcgccugcgucaacggcuccugcuucaccgucaugaccgacggccccuccaacggccaggccuccuacaagaucuuccgcaucgagaagggcaagaucgucaaguccgucgagaugaacgcccccaacuaccacuacgaggagugcuccugcuaccccgacuccggcgagaucaccugcgucugccgcgacaacuggcacggcuccaaccgccccugggucuccuucaaccagaaccucgaguaccagaucggcuacaucugcuccggcaucuucggcgacaacccccgccccaacgacaagaccggcuccugcggccccgucuccuccaacggcgccaacggcgucaagggcuucuccuucaaguacggcaacggcgucuggaucggccgcaccaaguccaucuccucccgcaacggcuucgagaugaucugggaccccaacggcuggaccggcaccgacaacaacuucuccaucaagcaggacaucgucggcaucaacgagugguccggcuacuccggcuccuucguccagcaccccgagcucaccggccucgacugcauccgccccugcuucugggucgagcucauccgcggccgccccaaggagaacaccaucuggaccuccggcuccuccaucuccuucugcggcgucaacuccgacaccgucggcugguccuggcccgacggcgccgagcuccccuucaccaucgacaaguga

SEQ ID NO: 113142 - RNA, 1410 nt, Artificial Sequence; identical to SEQ ID NO: 112774
  derived and/or modified CDS sequence (opt2) from neuraminidase__InfluenzaA__ACT68176

SEQ ID NO: 113143 - RNA, 1410 nt, Artificial Sequence; identical to SEQ ID NO: 112774
  derived and/or modified CDS sequence (opt2) from neuraminidase__InfluenzaA__ACT68177

SEQ ID NO: 113144 - RNA, 1410 nt, Artificial Sequence; identical to SEQ ID NO: 112774
  derived and/or modified CDS sequence (opt2) from neuraminidase__InfluenzaA__ACT68178

SEQ ID NO: 113145 - RNA, 1410 nt, Artificial Sequence; identical to SEQ ID NO: 113141
  derived and/or modified CDS sequence (opt2) from neuraminidase__InfluenzaA__ACT68179

SEQ ID NO: 113146 - RNA, 1410 nt, Artificial Sequence; identical to SEQ ID NO: 112774
  derived and/or modified CDS sequence (opt2) from neuraminidase__InfluenzaA__ACT68180

SEQ ID NO: 113147 - RNA, 1410 nt, Artificial Sequence; identical to SEQ ID NO: 112804
  derived and/or modified CDS sequence (opt2) from neuraminidase__InfluenzaA__ACT79145

SEQ ID NO: 113148 - RNA, 1410 nt, Artificial Sequence
  derived and/or modified CDS sequence (opt2) from neuraminidase__InfluenzaA__ACT79155
augaaccccaaccagaagaucaucaccaucggcuccgucugcaugaccaucggcauggccaaccucauccuccagaucggcaacaucaucuccaucuggaucucccacuccauccagcucggcaaccagaaccagaucgagaccugcaaccaguccgucaucaccuacgagaacaacaccugggucaaccagaccuacgucaacaucuccaacaccaacuucgccgccggccaguccgucgucuccgucaagcucgccggcaacuccucccucugccccgucggcggcugggccaucuacuccaaggacaacuccguccgcaucggcuccaagggcgacgucuucgucauccgcgagcccuucaucuccugcucccuccucgagugccgcaccuucuuccucacccagggcgcccuccucaacgacaagcacuccaacggcaccaucaaggaccgcucccccuaccgcacccucauguccugccccaucggcgagguccccucccccuacaacucccgcuucgaguccgucgccugguccgccuccgccugccacgacggcaucaacuggcucaccaucggcaucuccggccccgacaacggcgccgucgccguccucaaguacaacggcaucaucaccgacaccaucaaguccuggcgcaacaacauccuccgcacccaggaguccgagugcgccugcgucaacggcuccugcuucaccgucaugaccgacggccccuccaacggccaggccuccuacaagaucuuccgcaucgagaagggcaagaucgucaaguccgucgagaugaacgcccccaacuaccacuacgaggagugcuccugcuaccccgacuccuccgagaucaccugcgucugccgcgacaacuggcacggcuccaaccgccccugggucuccuucaaccagaaccucgaguaccagaucggcuacaucugcuccggcaucuucggcgacaacccccgccccaacgacaagaccggcuccugcggccccgucuccuccaacggcgccaacggcgucaagggcuucuccuucaaguacggcaacggcgucuggaucggccgcaccaaguccaucuccucccgcaacggcuucgagaugaucugggaccccaacggcuggaccggcaccgacaacaacuucuccaucaagcaggacaucgucggcaucaacgagugguccggcuacuccggcuccuucguccagcaccccgagcucaccggccucgacugcauccgccccugcuucugggucgagcucauccgcggccgccccaaggagaacaccaucuggaccuccggcuccuccaucuccuucugcggcgucaacuccgacaccgucggcugguccuggcccgacggcgccgagcuccccuucaccaucgacaaguga

SEQ ID NO: 113149 - RNA, 1410 nt, Artificial Sequence; identical to SEQ ID NO: 112764
  derived and/or modified CDS sequence (opt2) from neuraminidase__InfluenzaA__ACT79165

SEQ ID NO: 113150 - RNA, 1410 nt, Artificial Sequence; identical to SEQ ID NO: 112764
  derived and/or modified CDS sequence (opt2) from neuraminidase__InfluenzaA__ACT79175

SEQ ID NO: 113151 - RNA, 1410 nt, Artificial Sequence; identical to SEQ ID NO: 112774
  derived and/or modified CDS sequence (opt2) from neuraminidase__InfluenzaA__ACT79185

SEQ ID NO: 113152 - RNA, 1410 nt, Artificial Sequence; identical to SEQ ID NO: 112774
  derived and/or modified CDS sequence (opt2) from neuraminidase__InfluenzaA__ACT79622

SEQ ID NO: 113153 - RNA, 1410 nt, Artificial Sequence; identical to SEQ ID NO: 113141
  derived and/or modified CDS sequence (opt2) from neuraminidase__InfluenzaA__ACT79630

SEQ ID NO: 113154 - RNA, 1410 nt, Artificial Sequence; identical to SEQ ID NO: 112774
  derived and/or modified CDS sequence (opt2) from neuraminidase__InfluenzaA__ACT83798

SEQ ID NO: 113155 - RNA, 1410 nt, Artificial Sequence; identical to SEQ ID NO: 112774
  derived and/or modified CDS sequence (opt2) from neuraminidase__InfluenzaA__ACT83808

SEQ ID NO: 113156 - RNA, 1410 nt, Artificial Sequence; identical to SEQ ID NO: 112774
  derived and/or modified CDS sequence (opt2) from neuraminidase__InfluenzaA__ACT83818

SEQ ID NO: 113157 - RNA, 1410 nt, Artificial Sequence; identical to SEQ ID NO: 112774
  derived and/or modified CDS sequence (opt2) from neuraminidase__InfluenzaA__ACT83828

SEQ ID NO: 113158 - RNA, 1410 nt, Artificial Sequence; identical to SEQ ID NO: 112774
  derived and/or modified CDS sequence (opt2) from neuraminidase__InfluenzaA__ACT83838

SEQ ID NO: 113159 - RNA, 1410 nt, Artificial Sequence; identical to SEQ ID NO: 112764
  derived and/or modified CDS sequence (opt2) from neuraminidase__InfluenzaA__ACT83848

SEQ ID NO: 113160 - RNA, 1410 nt, Artificial Sequence; identical to SEQ ID NO: 112764
  derived and/or modified CDS sequence (opt2) from neuraminidase__InfluenzaA__ACT83858

SEQ ID NO: 113161 - RNA, 1410 nt, Artificial Sequence; identical to SEQ ID NO: 112774
  derived and/or modified CDS sequence (opt2) from neuraminidase__InfluenzaA__ACT83868

SEQ ID NO: 113162 - RNA, 1410 nt, Artificial Sequence; identical to SEQ ID NO: 112774
  derived and/or modified CDS sequence (opt2) from neuraminidase__InfluenzaA__ACT83878

SEQ ID NO: 113163 - RNA, 1410 nt, Artificial Sequence; identical to SEQ ID NO: 112774
  derived and/or modified CDS sequence (opt2) from neuraminidase__InfluenzaA__ACT86002

SEQ ID NO: 113164 - RNA, 1410 nt, Artificial Sequence; identical to SEQ ID NO: 112774
  derived and/or modified CDS sequence (opt2) from neuraminidase__InfluenzaA__ACT86012

SEQ ID NO: 113165 - RNA, 1410 nt, Artificial Sequence; identical to SEQ ID NO: 112774
  derived and/or modified CDS sequence (opt2) from neuraminidase__InfluenzaA__ACT86022

SEQ ID NO: 113166 - RNA, 1410 nt, Artificial Sequence; identical to SEQ ID NO: 112764
  derived and/or modified CDS sequence (opt2) from neuraminidase__InfluenzaA__ACT86032

SEQ ID NO: 113167 - RNA, 1410 nt, Artificial Sequence; identical to SEQ ID NO: 112774
  derived and/or modified CDS sequence (opt2) from neuraminidase__InfluenzaA__ACT86042

SEQ ID NO: 113168 - RNA, 1410 nt, Artificial Sequence; identical to SEQ ID NO: 112774
  derived and/or modified CDS sequence (opt2) from neuraminidase__InfluenzaA__ACT86052

SEQ ID NO: 113169 - RNA, 1410 nt, Artificial Sequence; identical to SEQ ID NO: 112774
  derived and/or modified CDS sequence (opt2) from neuraminidase__InfluenzaA__ACT86062

SEQ ID NO: 113170 - RNA, 1410 nt, Artificial Sequence; identical to SEQ ID NO: 112774
  derived and/or modified CDS sequence (opt2) from neuraminidase__InfluenzaA__ACT86072

SEQ ID NO: 113171 - RNA, 1410 nt, Artificial Sequence; identical to SEQ ID NO: 112774
  derived and/or modified CDS sequence (opt2) from neuraminidase__InfluenzaA__ACT86082

SEQ ID NO: 113172 - RNA, 1410 nt, Artificial Sequence; identical to SEQ ID NO: 112774
  derived and/or modified CDS sequence (opt2) from neuraminidase__InfluenzaA__ACT86092

SEQ ID NO: 113173 - RNA, 1410 nt, Artificial Sequence; identical to SEQ ID NO: 112774
  derived and/or modified CDS sequence (opt2) from neuraminidase__InfluenzaA__ACT86102

SEQ ID NO: 113174 - RNA, 1410 nt, Artificial Sequence; identical to SEQ ID NO: 112774
  derived and/or modified CDS sequence (opt2) from neuraminidase__InfluenzaA__ACT86112

SEQ ID NO: 113175 - RNA, 1410 nt, Artificial Sequence; identical to SEQ ID NO: 112774
  derived and/or modified CDS sequence (opt2) from neuraminidase__InfluenzaA__ACT86122

SEQ ID NO: 113176 - RNA, 1410 nt, Artificial Sequence; identical to SEQ ID NO: 112774
  derived and/or modified CDS sequence (opt2) from neuraminidase__InfluenzaA__ACT86132

SEQ ID NO: 113177 - RNA, 1410 nt, Artificial Sequence; identical to SEQ ID NO: 112774
  derived and/or modified CDS sequence (opt2) from neuraminidase__InfluenzaA__ACT86142

SEQ ID NO: 113178 - RNA, 1410 nt, Artificial Sequence; identical to SEQ ID NO: 112764
  derived and/or modified CDS sequence (opt2) from neuraminidase__InfluenzaA__ACT97323

SEQ ID NO: 113179 - RNA, 1410 nt, Artificial Sequence; identical to SEQ ID NO: 112774
  derived and/or modified CDS sequence (opt2) from neuraminidase__InfluenzaA__ACU00934

SEQ ID NO: 113180 - RNA, 1410 nt, Artificial Sequence; identical to SEQ ID NO: 112774
  derived and/or modified CDS sequence (opt2) from neuraminidase__InfluenzaA__ACU00944

SEQ ID NO: 113181 - RNA, 1410 nt, Artificial Sequence; identical to SEQ ID NO: 113128
  derived and/or modified CDS sequence (opt2) from neuraminidase__InfluenzaA__ACU00954

SEQ ID NO: 113182 - RNA, 1410 nt, Artificial Sequence
  derived and/or modified CDS sequence (opt2) from neuraminidase__InfluenzaA__ACU12497
augaaccccaaccagaagaucaucaccaucggcuccgucucccucaccaucgccaccaucugcuuccucaugcagaucgccauccucgucaccaccgucacccuccacuucaagcaguacgagugcaacuccccccccaacaaccaggucaugcccugcgagcccaccaucaucgagcgcaacaucaccgagaucgucuaccucaccaacaccaccaucgagcgcgagaucugccccaagcucgucgaguaccgcaacugguccaagccccagugccgcgucaccggcuucgcccccuucuccaaggacaacuccauccgccucuccgccggcggcgacaucugggucacccgcgagcccuacgucuccugcgaccccggcaagugcuaccaguucgcccucggccagggcaccacccucaacaaccgccacuccaacgacaccguccacgaccgcacccccuaccgcacccuccucaugaacgagcucggcguccccuuccaccucggcaccaagcaggucugcaucgccugguccuccuccuccugccacgacggcaaggccuggcuccacgucugcgucaccggccacgacgagaacgccaccgccuccuucaucuacgacggccgccucgucgacuccaucgucuccugguccaagaacauccuccgcacccaggaguccgagugcgucugcaucaacggcaccugcaccgucgucaugaccgacggcuccgccuccgagcgcgccgacaccaagauccucuucaucgaggagggcaagaucguccacaucuccccccucuccggcuccgcccagcacgucgaggagugcuccugcuacccccgcuaccccggcguccgcugcgucugccgcgacaacuggaagggcuccaaccgccccaucgucgacaucaacgucaaggacuacuccaucgucuccuccuacgucugcuccggccucgucggcgacaccccccgcaagaacgacuccuccuccuccuccuacugccgcaaccccaacaacgagaagggcucccacggcgucaagggcugggccuucgacgacggcaacgacgucuggaugggccgcaccaucggcgaggagcuccgcuccggcuacgagaccuucaaggucaucggcggcugguccacccccaacuccaagcuccagaccaaccgccaggucaucgucgaccgcggcaaccgcuccggcuacuccggcaucuucuccgucgagggcaaguccugcaucaaccgcugcuucuacgucgagcucauccgcggccgcaagcaggagaccaaggucugguggaccuccaacuccaucgucgucuucugcggcaccuccggcaccuacggcaccggcuccuggcccgacggcgccgacaucaaccucaugcccaucuga

SEQ ID NO: 113183 - RNA, 1413 nt, Artificial Sequence; identical to SEQ ID NO: 112668
  derived and/or modified CDS sequence (opt2) from neuraminidase__InfluenzaA__ACU12508

SEQ ID NO: 113184 - RNA, 1410 nt, Artificial Sequence
  derived and/or modified CDS sequence (opt2) from neuraminidase__InfluenzaA__ACU12519
augaaccccaaccagaagaucaucaccaucggcuccgucucccucaccaucuccaccaucugcuucuucaugcagaucgccauccucaucaccaccgucacccuccacuucaagcaguacgaguucaacuccccccccaacaaccaggucaugcucugcgagcccaccaucaucgagcgcaacaucaccgagaucgucuaccucaccaacaccaccaucgagaaggagaucugccccaagcucgccgaguaccgcaacugguccaagccccagugcaacaucaccggcuucgcccccuucuccaaggacaacuccauccgccucuccgccggcggcgacaucugggucacccgcgagcccuacgucuccugcgaccccgacaagugcuaccaguucgcccucggccagggcaccacccucaacaacguccacuccaacgacaccguccacgaccgcacccccuaccgcacccuccucaugaacgagcucggcguccccuuccaccucggcaccaagcaggucugcaucgccugguccuccuccuccugccacgacggcaaggccuggcuccacgucugcaucaccggcgacgacgagaacgccaccgccuccuucaucuacaacggccgccucgucgacuccgucgucuccugguccaagaagauccuccgcacccaggaguccgagugcgucugcaucaacggcaccugcaccgucgucaugaccgacggcuccgccuccggcaaggccgacaccaagauccucuucaucgaggagggcaagaucguccacaccuccacccucuccggcuccgcccagcacgucgaggagugcuccugcuacccccgcuaccccggcguccgcugcgucugccgcgacaacuggaagggcuccaaccgccccaucgucgacaucaacaucaaggacuacuccaucgucuccuccuacgucugcuccggccucgucggcgacaccccccgcaagaacgacuccuccuccuccggccacugccucgaccccaacaacgaggagggcggccacggcgucaagggcugggccuucgacgacggcaacgacgucuggaugggccgcaccaucuccgagaagcuccgcuccggcuacgagaccuucaaggucaucgagggcugguccaaccccaacuccaagcuccagaucaaccgccaggucaucgucgaccgcggcaaccgcuccggcuacuccggcaucuucuccgucgagggcaaguccugcaucaaccgcugcuucuacgucgagcucauccgcggccgcaaccaggagaccgagguccucuggaccuccaacuccaucgucgucuucugcggcaccuccggcaccuacggcaccggcuccuggcccgacggcgccgacaucaaccucaugcccaucuga

SEQ ID NO: 113185 - RNA, 1410 nt, Artificial Sequence
  derived and/or modified CDS sequence (opt2) from neuraminidase__InfluenzaA__ACU12530
augaaccccaaccagaagaucaucaccaucggcuccgucucccucaccaucuccaccaucugcuucuucaugcagaucgccauccucaucaccaccgucacccuccacuucaagcaguacgaguucaacuccccccccaacaaccaggucaugcucugcgagcccaccaucaucgagcgcaacaucaccgagaucgucuaccucaccaacaccaccaucgagaaggagaucugccccaagcucgccgaguaccgcaacugguccaagccccagugcaacaucaccggcuucgcccccuucuccaaggacaacuccauccgccucuccgccggcggcgacaucugggucacccgcgagcccuacgucuccugcgaccccgacaagugcuaccaguucgcccucggccagggcaccacccucaacaacguccacuccaacgacaccguccacgaccgcacccccuaccgcacccuccucaugaacgagcucggcguccccuuccaccucggcaccaagcaggucugcaucgccugguccuccuccuccugccacgacggcaaggccuggcuccacgucugcgucaccggcaacgacaagaacgccaccgccuccuucaucuacaacggccgccucgucgacuccaucgucuccugguccaaggagauccuccgcacccaggaguccgagugcgucugcaucaacggcaccugcaccgucgucaugaccgacggcuccgccuccggcaaggccgacaccaagauccucuucaucgaggagggcaagaucguccacaccuccacccucuccggcuccgcccagcacgucgaggagugcuccugcuacccccgcuaccccggcguccgcugcgucugccgcgacaacuggaagggcuccaaccgccccaucgucgacaucaacaucaaggacuacuccaucgucuccuccuacgucugcuccggccucgucggcgacaccccccgcaagaacgacuccuccuccuccucccacugccucgaccccaacaacgaggagggcggccacggcgucaagggcugggccuucgacgacggcaacgacgucuggaugggccgcaccaucuccgagaagcuccgcuccggcuacgagaccuucaaggucaucgagggcugguccaaccccaacuccaagcuccagaucaaccgccaggucaucgucgaccgcggcaaccgcuccggcuacuccggcaucuucuccgucgagggcaaguccugcaucaaccgcugcuucuacgucgagcucauccgcggccgcaaggaggagaccgagguccucuggaccuccaacuccaucgucgucuucugcggcaccuccggcaccuacggcaccggcuccuggcccgacggcgccgacaucaaccucaugcccaucuga

SEQ ID NO: 113186 - RNA, 1410 nt, Artificial Sequence
  derived and/or modified CDS sequence (opt2) from neuraminidase__InfluenzaA__ACU12541
augaaccccaaccagaagaucaucaccaucggcuccgucucccucaccaucuccaccaucugcuucuucaugcagaucgccauccucaucaccaccgucacccuccacuucaagcaguacgaguucaacuccccccccaacaaccaggucaugcucugcgagcccaccaucaucgagcgcaacaucaccgagaucgucuaccucaccaacaccaccaucgagaaggagaucugccccaagcucgccgaguaccgcaacugguccaagccccagugcaacaucaccggcuucgcccccuucuccaaggacaacuccauccgccucuccgccggcggcgacaucugggucacccgcgagcccuacgucuccugcgaccccgacaagugcuaccaguucgcccucggccagggcaccacccucaacaacguccacuccaacgacaccguccacgaccgcacccccuaccgcacccuccucaugaacgagcucggcguccccuuccaccucggcaccaagcaggucugcaucgccugguccuccuccuccugccacgacggcaaggccuggcuccacgucugcgucaccggcgacgacaagaacgccaccgccuccuucaucuacaacggccgccucgucgacuccaucgucuccugguccaaggagauccuccgcacccaggaguccgagugcgucugcaucaacggcaccugcaccgucgucaugaccgacggcuccgccuccggcaaggccgacaccaagauccucuucaucgaggagggcaagaucguccacaccuccacccucuccggcuccgcccagcacgucgaggagugcuccugcuacccccgcuaccccggcguccgcugcgucugccgcgacaacuggaagggcuccaaccgccccaucgucgacaucaacaucaaggacuacuccaucgucuccuccuacgucugcuccggccucgucggcgacaccccccgcaagaacgacuccuccuccuccucccacugccucgaccccaacaacgaggagggcggccacggcgucaagggcugggccuucgacgacggcaacgacgucuggaugggccgcaccaucuccgagaagcuccgcuccggcuacgagaccuucaaggucaucgagggcugguccaaccccaacuccaaguggcagaucaaccgccaggucaucgucgaccgcggcaaccgcuccggcuacuccggcaucuucuccgucgagggcaaguccugcaucaaccgcugcuucuacgucgagcucauccgcggccgcaaggaggagaccgagguccucuggaccuccaacuccaucgucgucuucugcggcaccuccggcaccuacggcaccggcuccuggcccgacggcgccgacaucaaccucaugcccaucuga

SEQ ID NO: 113187 - RNA, 1410 nt, Artificial Sequence
  derived and/or modified CDS sequence (opt2) from neuraminidase__InfluenzaA__ACU12552
augaaccccaaccagaagaucaucaccaucggcuccgucucccucaccaucuccaccaucugcuucuucaugcagaucgccauccucaucaccaccgucacccuccacuucaagcaguacgaguucaacuccccccccaacaaccaggucaugcucugcgagcccaccaucaucgagcgcaacaucaccgagaucgucuaccucaccaacaccaccaucgagaaggagaucugccccaagcucgccgaguaccgcaacugguccaagccccagugcaacaucaccggcuucgcccccuucuccaaggacaacuccauccgccucuccgccggcggcgacaucugggucacccgcgagcccuacgucuccugcgaccccgacaagugcuaccaguucgcccucggccagggcaccacccucaacaacguccacuccaacgacaccguccacgaccgcacccccuaccgcacccuccucaugaacgagcucggcguccccuuccaccucggcaccaagcaggucugcaucgccugguccuccuccuccugccacgacggcaaggccuggcuccacgucugcgucaccggcgacgacaagaacgccaccgccuccuucaucuacaacggccgccucgucgacuccaucgucuccugguccaaggagauccuccgcacccaggaguccgagugcgucugcaucaacggcaccugcaccgucgucaugaccgacggcuccgccuccggcaaggccgacaccaagauccucuucaucgaggagggcaagaucguccacaccuccacccucuccggcuccgcccagcacgucgaggagugcuccugcuacccccgcuaccccggcguccgcugcgucugccgcgacaacuggaagggcuccaaccgccccaucgucgacaucaacaucaaggacuacuccaucgucuccggcuacgucugcuccggccucgucggcgacaccccccgcaagaacgacuccuccuccuccucccacugcuccgaccccaacaacgaggagggcggccacggcgucaagggcugggccuucgacgacggcaacgacgucuggaugggccgcaccaucuccgagaagcuccgcuccggcuacgagaccuucaaggucaucgagggcugguccaaccccaacuccaagcuccagaucaaccgccaggucaucgucgaccgcggcaaccgcuccggcuacuccggcaucuucuccgucgagggcaaguccugcaucaaccgcugcuucuacgucgagcucauccgcggccgcaaggaggagaccgagguccucuggaccuccaacuccaucgucgucuucugcggcaccuccggcaccuacggcaccggcuccuggcccgacggcgccgacaucaaccucaugcccaucuga

SEQ ID NO: 113188 - RNA, 1413 nt, Artificial Sequence
  derived and/or modified CDS sequence (opt2) from neuraminidase__InfluenzaA__ACU12574
augaaccccaaccagaagaucaucaccaucggcuccaucuccaucgccaucggcaucaucaaccucaugcuccagaucggcaacaucaucuccaucugggccucccacuccauccagaccggcucccagaacaacaccggcaucugcaaccagcgcaucaucaccuacgagaacuccaccugggucaaccacaccuacgucaacaucaacaacaccaacgucgucgccggcgaggacaagaccuccgucacccucgccggcaacuccucccucugcuccaucuccggcugggccaucuacaccaaggacaacuccauccgcaucggcuccaagggcgacgucuucgucauccgcgagcccuucaucuccugcucccaccucgagugccgcaccuucuuccucacccagggcgcccuccucaacgacaagcacuccaacggcaccgucaaggaccgcucccccuaccgcgcccucauguccugcccccucggcgaggcccccucccccuacaacuccaaguucgaguccgucgccugguccgccuccgccugccacgacggcaugggcuggcucaccaucggcaucuccggccccgacaacggcgccgucgccguccucaaguacaacggcaucaucaccggcaccaucaaguccuggaagaagcagauccuccgcacccaggaguccgagugcgucugcaugaacggcuccugcuucaccaucaugaccgacggccccuccaacaaggccgccuccuacaagaucuucaagaucgagaagggcaaggucaccaaguccaucgagcucaacgcccccaacuucuacuacgaggagugcuccugcuaccccgacaccggcaucgucaugugcgucugccgcgacaacuggcacggcuccaaccgccccugggucuccuucaaccagaaccucgacuaccagaucggcuacaucugcuccggcgucuucggcgacaacccccgccccgaggacggcgagggcuccugcaaccccgucaccgucgacggcgccaacggcgucaagggcuucuccuacaaguacgacaacggcgucuggaucggccgcaccaaguccaaccgccuccgcaagggcuucgagaugaucugggaccccaacggcuggaccaacaccgacuccgacuucuccgucaagcaggacgucgucgccaucaccgacugguccggcuacuccggcuccuucguccagcaccccgagcucaccggccucgacugcauccgccccugcuucugggucgagcucguccgcggccucccccgcgagaacaccaccaucuggaccuccggcuccuccaucuccuucugcggcgucaacuccgacaccgccaacugguccuggcccgacggcgccgagcuccccuucaccaucgacaaguga

SEQ ID NO: 113189 - RNA, 1413 nt, Artificial Sequence; identical to SEQ ID NO: 112668
  derived and/or modified CDS sequence (opt2) from neuraminidase__InfluenzaA__ACU12585

SEQ ID NO: 113190 - RNA, 1413 nt, Artificial Sequence
  derived and/or modified CDS sequence (opt2) from neuraminidase__InfluenzaA__ACU12596
augaaccccaaccagaagaucaucaccaucggcuccaucuccaucgccaucggcaucaucucccucaugcuccagaucggcuccaucaucuccaucugggccucccacuccauccgcaccggcucccagaacaacaccggcaucugcaaccagcgcaucaucaccuacgagaacuccaccugggucaaccacaccuacgucaacaucaacaacaccaacgucgucgccggcgaggacaagaaguccgucacccucgccggcaacuccucccucugcuccaucuccggcugggccaucuacaccaaggacaacuccauccgcaucggcuccaagggcgacgucuucgucauccgcgagcccuucaucuccugcucccaccucgagugccgcaccuucuuccucacccagggcgcccuccucaacgacaagcacuccaacggcaccgucaaggaccgcucccccuaccgcgcccucauguccugcccccucggcgaggcccccucccccuacaacuccaaguucgaguccgucgccugguccgccuccgccugccacgacggcaugggcuggcucaccaucggcaucuccggccccgacaacggcgccgucgccguccucaaguacaacggcaucaucaccggcaccaucaaguccuggaagaagcagauccuccgcacccaggaguccgagugcgucugcaugaacggcuccugcuucaccaucaugaccgacggccccuccaacaaggccgccuccuacaagaucuucaagaucgagaagggcaaggucaccaaguccaucgagcucaacgcccccaacuucuacuacgaggagugcuccugcuaccccgacaccggcaucgucaugugcgucugccgcgacaacuggcacggcuccaaccgccccugggucuccuucaaccagaaccucgacuaccagaucggcuacaucugcuccggcgucuucggcgacaacccccgccccgaggacggcgagggcuccugcaaccccgucaccgucgacggcgccaacggcgucaagggcuucuccuacaaguacggcaacggcgucuggaucggccgcaccaaguccaaccgccuccgcaagggcuucgagaugaucugggaccccaacggcuggaccaacaccgacuccgacuucuccgucaagcaggacgucgucgccaucaccgacugguccggcuacuccggcuccuucguccagcaccccgagcucaccggccucgacugcauccgccccugcuucugggucgagcucguccgcggccucccccgcgagaacaccaccaucuggaccuccggcuccuccaucuccuucugcggcgucaacuccgacaccgccaacugguccuggcccgacggcgccgagcuccccuucaccaucgacaaguga

SEQ ID NO: 113191 - RNA, 1410 nt, Artificial Sequence; identical to SEQ ID NO: 112774
  derived and/or modified CDS sequence (opt2) from neuraminidase__InfluenzaA__ACU13077

SEQ ID NO: 113192 - RNA, 1410 nt, Artificial Sequence; identical to SEQ ID NO: 112774
  derived and/or modified CDS sequence (opt2) from neuraminidase__InfluenzaA__ACU13078

SEQ ID NO: 113193 - RNA, 1410 nt, Artificial Sequence; identical to SEQ ID NO: 112774
  derived and/or modified CDS sequence (opt2) from neuraminidase__InfluenzaA__ACU13079

SEQ ID NO: 113194 - RNA, 1410 nt, Artificial Sequence; identical to SEQ ID NO: 112774
  derived and/or modified CDS sequence (opt2) from neuraminidase__InfluenzaA__ACU13080

SEQ ID NO: 113195 - RNA, 1410 nt, Artificial Sequence; identical to SEQ ID NO: 112764
  derived and/or modified CDS sequence (opt2) from neuraminidase__InfluenzaA__ACU13081

SEQ ID NO: 113196 - RNA, 1410 nt, Artificial Sequence; identical to SEQ ID NO: 112774
  derived and/or modified CDS sequence (opt2) from neuraminidase__InfluenzaA__ACU13082

SEQ ID NO: 113197 - RNA, 1410 nt, Artificial Sequence; identical to SEQ ID NO: 112774
  derived and/or modified CDS sequence (opt2) from neuraminidase__InfluenzaA__ACU13083

SEQ ID NO: 113198 - RNA, 1410 nt, Artificial Sequence
  derived and/or modified CDS sequence (opt2) from neuraminidase__InfluenzaA__ACU13084
augaaccccaaccagaagaucaucaccaucggcuccgucugcaugaccaucggcauggccaaccucauccuccagaucggcaacaucaucuccaucuggaucucccacuccauccagcucggcaaccagaaccagaucgagaccugcaaccaguccgucaucaccuacgagaacaacaccugggucaaccagaccuacgucaacaucuccaacaccaacuucgccgccggccaguccgucgucuccaugaagcucgccggcaacuccucccucugccccgucggcggcugggccaucuacuccaaggacaacuccguccgcaucggcuccaagggcgacgucuucgucauccgcgagcccuucaucuccugcuccccccucgagugccgcaccuucuuccucacccagggcgcccuccucaacgacaagcacuccaacggcaccaucaaggaccgcucccccuaccgcacccucauguccugccccaucggcgagguccccucccccuacaacucccgcuucgaguccgucgccugguccgccuccgccugccacgacggcaucaacuggcucaccaucggcaucuccggccccgacaacggcgccgucgccguccucaaguacaacggcaucaucaccgacaccaucaaguccuggcgcaacaacauccuccgcacccaggaguccgagugcgccugcgucaacggcuccugcuucaccgucaugaccgacggccccuccaacggccaggccuccuacaagaucuuccgcaucgagaagggcaagaucgucaaguccgucgagaugaacgcccccaacuaccacuacgaggagugcuccugcuaccccgacuccuccgagaucaccugcgucugccgcgacaacuggcacggcuccaaccgccccugggucuccuucaaccagaaccucgaguaccagaucggcuacaucugcuccggcaucuucggcgacaacccccgccccaacgacaagaccggcuccugcggccccgucuccuccaacggcgccaacggcgucaagggcuucuccuucaaguacggcaacggcgucuggaucggccgcaccaaguccaucuccucccgcaacggcuucgagaugaucugggaccccaacggcuggaccggcaccgacaacaacuucuccaucaagcaggacaucgucggcaucaacgagugguccggcuacuccggcuccuucguccagcaccccgagcucaccggccucgacugcauccgccccugcuucugggucgagcucauccgcggccgccccaaggagaacaccaucuggaccuccggcuccuccaucuccuucugcggcgucaacuccgacaccgucggcugguccuggcccgacggcgccgagcuccccuucaccaucgacaaguga

SEQ ID NO: 113199 - RNA, 1410 nt, Artificial Sequence; identical to SEQ ID NO: 112774
  derived and/or modified CDS sequence (opt2) from neuraminidase__InfluenzaA__ACU16799

SEQ ID NO: 113200 - RNA, 1410 nt, Artificial Sequence; identical to SEQ ID NO: 112774
  derived and/or modified CDS sequence (opt2) from neuraminidase__InfluenzaA__ACU16861

SEQ ID NO: 113201 - RNA, 1410 nt, Artificial Sequence; identical to SEQ ID NO: 112774
  derived and/or modified CDS sequence (opt2) from neuraminidase__InfluenzaA__ACU16934

SEQ ID NO: 113202 - RNA, 1410 nt, Artificial Sequence; identical to SEQ ID NO: 112774
  derived and/or modified CDS sequence (opt2) from neuraminidase__InfluenzaA__ACU16997

SEQ ID NO: 113203 - RNA, 1410 nt, Artificial Sequence; identical to SEQ ID NO: 112774
  derived and/or modified CDS sequence (opt2) from neuraminidase__InfluenzaA__ACU17130

SEQ ID NO: 113204 - RNA, 1410 nt, Artificial Sequence; identical to SEQ ID NO: 112774
  derived and/or modified CDS sequence (opt2) from neuraminidase__InfluenzaA__ACU17191

SEQ ID NO: 113205 - RNA, 1410 nt, Artificial Sequence
  derived and/or modified CDS sequence (opt2) from neuraminidase__InfluenzaA__ACU17262
augaaccccaaccagaagaucaucaccaucggcuccgucugcaugaccaucggcauggccaaccucauccuccagaucggcaacaucaucuccaucuggaucucccacuccauccagcucggcaaccagucccagaucgagaccugcaaccaguccgucaucaccuacgagaacaacaccugggucaaccagaccuacgucaacaucuccaacaccaacuucgccgccggccaguccgucgucuccgucaagcucgccggcaacuccucccucugccccgucuccggcugggccaucuacuccaaggacaacuccauccgcaucggcuccaagggcgacgucuucgucauccgcgagcccuucaucuccugcuccccccucgagugccgcaccuucuuccucacccagggcgcccuccucaacgacaagcacuccaacggcaccaucaaggaccgcucccccuaccgcacccucauguccugccccaucggcgagguccccucccccuacaacucccgcuucgaguccgucgccugguccgccuccgccugccacgacggcaucaacuggcucaccaucggcaucuccggccccgacaacggcgccgucgccguccucaaguacaacggcaucaucaccgacaccaucaaguccuggcgcaacaacauccuccgcacccaggaguccgagugcgccugcgucaacggcuccugcuucaccgucaugaccgacggccccuccgacggccaggccuccuacaagaucuuccgcaucgagaagggcaagaucgucaaguccgucgagaugaacgcccccaacuaccacuacgaggagugcuccugcuaccccgacuccuccgagaucaccugcgucugccgcgacaacuggcacggcuccaaccgccccugggucuccuucaaccagaaccucgaguaccagaucggcuacaucugcuccggcaucuucggcgacaacccccgccccaacgacaagaccggcuccugcggccccgucuccuccaacggcgccaacggcgucaagggcuucuccuucaaguacggcaacggcgucuggaucggccgcaccaaguccaucuccucccgcaacggcuucgagaugaucugggaccccaacggcuggaccggcaccgacaacaacuucuccaucaagcaggacaucgucggcaucaacgagugguccggcuacuccggcuccuucguccagcaccccgagcucaccggccucgacugcauccgccccugcuucugggucgagcucauccgcggccgccccaaggagaacaccaucuggaccuccggcuccuccaucuccuucugcggcgucaacuccgacaccgucggcugguccuggcccgacggcgccgagcuccccuucaccaucgacaaguga

SEQ ID NO: 113206 - RNA, 1410 nt, Artificial Sequence; identical to SEQ ID NO: 112774
  derived and/or modified CDS sequence (opt2) from neuraminidase__InfluenzaA__ACU17325

SEQ ID NO: 113207 - RNA, 1410 nt, Artificial Sequence; identical to SEQ ID NO: 112774
  derived and/or modified CDS sequence (opt2) from neuraminidase__InfluenzaA__ACU17393

SEQ ID NO: 113208 - RNA, 1410 nt, Artificial Sequence; identical to SEQ ID NO: 112774
  derived and/or modified CDS sequence (opt2) from neuraminidase__InfluenzaA__ACU17454

SEQ ID NO: 113209 - RNA, 1410 nt, Artificial Sequence; identical to SEQ ID NO: 112774
  derived and/or modified CDS sequence (opt2) from neuraminidase__InfluenzaA__ACU17524

SEQ ID NO: 113210 - RNA, 1410 nt, Artificial Sequence; identical to SEQ ID NO: 113128
  derived and/or modified CDS sequence (opt2) from neuraminidase__InfluenzaA__ACU27043

SEQ ID NO: 113211 - RNA, 1413 nt, Artificial Sequence
  derived and/or modified CDS sequence (opt2) from neuraminidase__InfluenzaA__ACU27415
augaaccccaaccagaagaucaucaccaucggcuccaucuccaucgccaucggcaucaucucccucaugcuccagaucggcaacaucaucuccaucugggccucccacuccauccagaccggcucccagaacaacaccggcaucugcaaccagcgcaucaucaccuacgagaacuccaccugggucaaccacaccuacgucaacaucaacaacaccaacgucgucgccggcgaggacaagaccuccgucaccuucgccggcaacuccucccucugcuccaucuccggcugggccaucuacaccaaggacaacuccauccgcaucggcuccaagggcgacgucuucgucauccgcgagcccuucaucuccugcucccaccucgagugccgcaccuucuuccucacccagggcgcccuccucaacgacaagcacuccaacggcaccgucaaggaccgcucccccuaccgcgcccucauguccugcccccucggcgaggcccccucccccuacaacuccaaguucgaguccgucgccugguccgccuccgccugccacgacggcaugggcuggcucaccaucggcaucuccggccccgacaacggcgccgucgccguccucaaguacaacggcaucaucaccggcaccaucaaguccuggaagaagcagauccuccgcacccaggaguccgagugcgucugcaugaacggcuccugcuucaccaucaugaccgacggccccuccaacaaggccgccuccuacaagaucuucaagaucgagaagggcaaggucaccaaguccaucgagcucaacgcccccaacuucuacuacgaggagugcuccugcuaccccgacaccggcaucgucaugugcgucugccgcgacaacuggcacggcuccaaccgccccugggucuccuucaaccagaaccucgacuaccagaucggcuacaucugcuccggcgucuucggcgacaacccccgccccgaggacggcgagggcuccugcaaccccgucaccgucgacggcgccaacggcgucaagggcuucuccuacaaguacggcaacggcgucuggaucggccgcaccaaguccaaccgccuccgcaagggcuucgagaugaucugggaccccaacggcuggaccaacaccgacuccgacuucuccgucaagcaggacgucgucgccaucaccgacugguccggcuacuccggcuccuucguccagcaccccgagcucaccggccucgacugcauccgccccugcuucugggucgagcucguccgcggccucccccgcgagaacaccaccaucuggaccuccggcuccuccaucuccuucugcggcgucaacuccgacaccgccaacugguccuggcccgacggcgccgagcuccccuucaccaucgacaaguga

SEQ ID NO: 113212 - RNA, 1413 nt, Artificial Sequence; identical to SEQ ID NO: 113211
  derived and/or modified CDS sequence (opt2) from neuraminidase__InfluenzaA__ACU27416

SEQ ID NO: 113213 - RNA, 1410 nt, Artificial Sequence; identical to SEQ ID NO: 112764
  derived and/or modified CDS sequence (opt2) from neuraminidase__InfluenzaA__ACU29961

SEQ ID NO: 113214 - RNA, 1410 nt, Artificial Sequence
  derived and/or modified CDS sequence (opt2) from neuraminidase__InfluenzaA__ACU29971
augaaccccaaccagaagaucaucaccaucggcuccgucugcaugaccaucggcauggccaaccucauccuccagaucggcaacaucaucuccaucuggaucucccacuccauccagcucggcaaccagaaccagaucgagaccugcaaccaguccgucaucaccuacgagaacaacaccugggucaaccagaccuacgucaacaucuccaacaccaacuucgccgccggccaguccgucgucuccgucaagcucgccggcaacuccucccucugccccgucuccggcugggccaucuacuccaaggacaacuccguccgcaucggcuccaagggcgacgucuucgucauccgcgagcccuucaucuccugcuccccccucgagugccgcaccuucuuccucacccagggcgcccuccucaacgacaagcacuccaacggcaccaucaaggaccgcucccccuaccgcacccucauguccugccccaucggcgagguccccucccccuacaacucccgcuucgaguccgucgccugguccgccuccgccugccacgacggcaucaacuggcucaccaucggcaucuccggccccgacaacggcgccgucgccguccucaaguacaacggcaucaucaccgacaccaucaaguccuggcgcaacaacauccuccgcacccaggaguccgagugcgccugcgucaacggcuccugcuucaccgucaugaccgacggccccuccaacggccaggccuccuacaagaucuuccgcaucgagaagggcaagaucgucaaguccgucgagaugaacgcccccaacuaccacuacgaggagugcuccugcuaccccgacuccuccgagaucaccugcgucugccgcgacaacuggcacggcuccaaccgccccugggucuccuucaaccagaaccucgaguaccagaucggcuacaucugcuccggcaucuucggcgacaacccccgccccaacgacaagaccggcuccugcggccccgucuccuccaacggcgccaacggcgucaagggcuucuccuucaaguacggcaacggcgucuggaucggccgcaccaaguccaucuccucccgcaacggcuucgagaugaucugggaccccaacggcuggaccggcaccgacaacaacuucuccaucaagcaggacaucgucggcaucaacgagugguccggcuacuccggcuccuucguccagcaccccgagcucaccggccucgacugcauccgccccugcuucugggucgagcucauccgcggccgccccaaggagaacaccaucuggaccuccggcuccuccaucuccuucugcggcgucaacuccgacaccgucggcugguccugguccgacggcgccgagcuccccuucaccaucgacaaguga

SEQ ID NO: 113215 - RNA, 1410 nt, Artificial Sequence; identical to SEQ ID NO: 112774
  derived and/or modified CDS sequence (opt2) from neuraminidase__InfluenzaA__ACU29981

SEQ ID NO: 113216 - RNA, 1410 nt, Artificial Sequence; identical to SEQ ID NO: 112774
  derived and/or modified CDS sequence (opt2) from neuraminidase__InfluenzaA__ACU29991

SEQ ID NO: 113217 - RNA, 1410 nt, Artificial Sequence; identical to SEQ ID NO: 112774
  derived and/or modified CDS sequence (opt2) from neuraminidase__InfluenzaA__ACU30001

SEQ ID NO: 113218 - RNA, 1410 nt, Artificial Sequence; identical to SEQ ID NO: 112774
  derived and/or modified CDS sequence (opt2) from neuraminidase__InfluenzaA__ACU30021

SEQ ID NO: 113219 - RNA, 1410 nt, Artificial Sequence
  derived and/or modified CDS sequence (opt2) from neuraminidase__InfluenzaA__ACU30085
augaaccccaaccagaagaucaucaccaucggcuccgucugcaugaccaucggcauggccaaccucauccuccagaucggcaacaucaucuccaucuggaucucccacuccauccagcucggcaaccagaaccagaucgagaccugcaaccaguccgucaucaccuacgagaacaacaccugggucaaccagaccuacgucaacaucuccaacaccaacuucgccgccggccaguccgucgucuccgucaagcucaugggcaacuccucccucugccccgucuccggcugggccaucuacuccaaggacaacuccguccgcaucggcuccaagggcgacgucuucgucauccgcgagcccuucaucuccugcuccccccucgagugccgcaccuucuuccucacccagggcgcccuccucaacgacaagcacuccaacggcaccaucaaggaccgcucccccuaccgcacccucauguccugccccaucggcgagguccccucccccuacaacucccgcuucgaguccgucgccugguccgccuccgccugccacgacggcaucaacuggcucaccaucggcaucuccggccccgacaacggcgccgucgccguccucaaguacaacggcaucaucaccgacaccaucaaguccuggcgcaacaacauccuccgcacccaggaguccgagugcgccugcgucaacggcuccugcuucaccgucaugaccgacggccccuccaacggccaggccuccuacaagaucuuccgcaucgagaagggcaagaucgucaaguccgucgagaugaacgcccccaacuaccacuacgaggagugcuccugcuaccccgacuccuccgagaucaccugcgucugccgcgacaacuggcacggcuccaaccgccccugggucuccuucaaccagaaccucgaguaccagaucggcuacaucugcuccggcaucuucggcgacaacccccgccccaacgacaagaccggcuccugcggccccgucuccuccaacggcgccaacggcgucaagggcuucuccuucaaguacggcaacggcgucuggaucggccgcaccaaguccaucuccucccgcaacggcuucgagaugaucugggaccccaacggcuggaccggcaccgacaacaacuucuccaucaagcaggacaucgucggcaucaacgagugguccggcuacuccggcuccuucguccagcaccccgagcucaccggccucgacugcauccgccccugcuucugggucgagcucauccgcggccgccccaaggagaacaccaucuggaccuccggcuccuccaucuccuucugcggcgucaacuccgacaccgucggcugguccuggcccgacggcgccgagcuccccuucaccaucgacaaguga

SEQ ID NO: 113220 - RNA, 1410 nt, Artificial Sequence; identical to SEQ ID NO: 113198
  derived and/or modified CDS sequence (opt2) from neuraminidase__InfluenzaA__ACU30095

SEQ ID NO: 113221 - RNA, 1410 nt, Artificial Sequence; identical to SEQ ID NO: 112774
  derived and/or modified CDS sequence (opt2) from neuraminidase__InfluenzaA__ACU30105

SEQ ID NO: 113222 - RNA, 1410 nt, Artificial Sequence; identical to SEQ ID NO: 112774
  derived and/or modified CDS sequence (opt2) from neuraminidase__InfluenzaA__ACU30114

SEQ ID NO: 113223 - RNA, 1410 nt, Artificial Sequence; identical to SEQ ID NO: 112774
  derived and/or modified CDS sequence (opt2) from neuraminidase__InfluenzaA__ACU30123

SEQ ID NO: 113224 - RNA, 1410 nt, Artificial Sequence
  derived and/or modified CDS sequence (opt2) from neuraminidase__InfluenzaA__ACU31177
augaaccccaaccagaagaucaucaccaucggcuccgucugcaugaccaucggcauggccaaccucauccuccagaucggcaacaucaucuccaucuggaucucccaccucauccagcucggcaaccagaaccagaucgagaccugcaaccaguccgucaucaccuacgagaacaacaccugggucaaccagaccuacgucaacaucuccaacaccaacuucgccgccggccaguccgucgucuccgucaagcucgccggcaacuccucccucugccccgucuccggcugggccaucuacuccaaggacaacuccauccgcaucggcuccaagggcgacgucuucgucauccgcgagcccuucaucuccugcuccccccucgagugccgcaccuucuuccucacccagggcgcccuccucaacgacaagcacuccaacggcaccaucaaggaccgcucccccuaccgcacccucauguccugccccaucggcgagguccccucccccuacaacucccgcuucgaguccgucgccugguccgccuccgccugccacgacggcaucuccuggcucaccaucggcaucuccggccccgacaacggcgccgucgccguccucaaguacaacggcaucaucaccgacaccaucaaguccuggcgcaacaacauccuccgcacccaggaguccgagugcgccugcgucaacggcuccugcuucaccgucaugaccgacggccccuccgacggccaggccuccuacaagaucuuccgcaucgagaagggcaagaucgucaaguccgucgagaugaacgcccccaacuaccacuacgaggagugcuccugcuaccccgacuccuccgagaucaccugcgucugccgcgacaacuggcacggcuccaaccgccccugggucuccuucaaccagaaccucgaguaccagaucggcuacaucugcuccggcaucuucggcgacaacccccgccccaacgacaagaccggcuccugcggccccgucuccuccaacggcgccaacggcgucaagggcuucuccuucaaguacggcaacggcgucuggaucggccgcaccaaguccaucuccucccgcaacggcuucgagaugaucugggaccccaacggcuggaccggcaccgacaacaacuucuccaucaagcaggacaucgucggcaucaacgagugguccggcuacuccggcuccuucguccagcaccccgagcucaccggccucgacugcauccgccccugcuucugggucgagcucauccgcggccgccccaaggagaacaccaucuggaccuccggcuccuccaucuccuucugcggcgucaacuccgacaccgucggcugguccuggcccgacggcgccgagcuccccuucaccaucgacaaguga

SEQ ID NO: 113225 - RNA, 1410 nt, Artificial Sequence; identical to SEQ ID NO: 112774
  derived and/or modified CDS sequence (opt2) from neuraminidase__InfluenzaA__ACU31178

SEQ ID NO: 113226 - RNA, 1410 nt, Artificial Sequence; identical to SEQ ID NO: 112764
  derived and/or modified CDS sequence (opt2) from neuraminidase__InfluenzaA__ACU31179

SEQ ID NO: 113227 - RNA, 1410 nt, Artificial Sequence; identical to SEQ ID NO: 112764
  derived and/or modified CDS sequence (opt2) from neuraminidase__InfluenzaA__ACU31180

SEQ ID NO: 113228 - RNA, 1410 nt, Artificial Sequence; identical to SEQ ID NO: 112764
  derived and/or modified CDS sequence (opt2) from neuraminidase__InfluenzaA__ACU31181

SEQ ID NO: 113229 - RNA, 1410 nt, Artificial Sequence; identical to SEQ ID NO: 112774
  derived and/or modified CDS sequence (opt2) from neuraminidase__InfluenzaA__ACU31182

SEQ ID NO: 113230 - RNA, 1410 nt, Artificial Sequence; identical to SEQ ID NO: 112804
  derived and/or modified CDS sequence (opt2) from neuraminidase__InfluenzaA__ACU31183

SEQ ID NO: 113231 - RNA, 1410 nt, Artificial Sequence; identical to SEQ ID NO: 112774
  derived and/or modified CDS sequence (opt2) from neuraminidase__InfluenzaA__ACU31184

SEQ ID NO: 113232 - RNA, 1410 nt, Artificial Sequence; identical to SEQ ID NO: 112764
  derived and/or modified CDS sequence (opt2) from neuraminidase__InfluenzaA__ACU31185

SEQ ID NO: 113233 - RNA, 1410 nt, Artificial Sequence; identical to SEQ ID NO: 112764
  derived and/or modified CDS sequence (opt2) from neuraminidase__InfluenzaA__ACU31186

SEQ ID NO: 113234 - RNA, 1410 nt, Artificial Sequence; identical to SEQ ID NO: 112764
  derived and/or modified CDS sequence (opt2) from neuraminidase__InfluenzaA__ACU31187

SEQ ID NO: 113235 - RNA, 1410 nt, Artificial Sequence; identical to SEQ ID NO: 112764
  derived and/or modified CDS sequence (opt2) from neuraminidase__InfluenzaA__ACU31188

SEQ ID NO: 113236 - RNA, 1350 nt, Artificial Sequence
  derived and/or modified CDS sequence (opt2) from neuraminidase__InfluenzaA__ACU46645
augaaccccaacaagaagaucaucaccaucggcuccaucugcauggucaccggcauggucucccucaugcuccagaucggcaaccucaucuccaucugggucucccacuccauccacaccggcaaccagcacaaggccgagcccaucuccaacaccaaccuccucaccgagaagaccgucgccuccgucaagcucgccggcaacuccucccucugccccaucaacggcugggccgucuacuccaaggacaacuccauccgcaucggcuccaagggcgacgucuucgucauccgcgagcccuucaucuccugcucccaccucgagugccgcaccuucuuccucacccagggcgcccuccucaacgacaagcacuccaacggcaccgucaaggaccgcuccccccaccgcacccucauguccggccccgucggcgaggcccccucccccuacaacucccgcuucgaguacgucgccugguccgccuccgccugccacgaccgcaccucccgccucaccaucggcaucuccggccccgacaacggcgccgucgccguccucaaguacaacggcaucaucaccgacaccaucaaguccuggcgcaacaacauccuccgcacccaggaguccgagugcgccugcgucaacggcuccugcuucaccgucaugaccgacggccccuccaacggccaggccucccacaagaucuucaagauggagaagggcaaggucgucaaguccgucgagcucgacgcccccaacuaccacuacgaggagugcuccugcuaccccgacgccggcgagaucaccugcgucugccgcgacaacuggcacggcuccaaccgccccugggucuccuucaaccagaaccucgaguaccagaucggcuacaucugcuccggcgucuucggcgacaacccccgccccaacgacggcgccggcuccugcggccccgucuccuccaacggcgccuacggcgucaagggcuucuccuucaaguacggcaacggcgucuggaucggccgcaccaaguccaccaacucccgcuccggcuucgagaugaucugggaccccaacggcuggaccgagaccgacuccuccuucuccgucaagcaggacaucgucgccaucaccgacugguccggcuacuccggcuccuucguccagcaccccgagcucaccggccucgacugcauccgccccugcuucugggucgagcucauccgcggccgccccaaggaguccaccaucuggaccuccggcuccuccaucuccuucugcggcgucaacuccgacaccgucggcugguccuggcccgacggcgccgagcuccccuucaccaucgacaaguga

SEQ ID NO: 113237 - RNA, 1410 nt, Artificial Sequence
  derived and/or modified CDS sequence (opt2) from neuraminidase__InfluenzaA__ACU56927
augaaccccaaccagaagaucaucaccaucggcuccgucugcaugaccaucggcauggccaaccucauccuccagaucggcaacaucaucuccaucuggaucucccacuccauccagcucggcaaccagaaccagaucgagaccugcaaccaguccgucaucaccuacgagaacaacaccugggucaaccagaccuacgucaacaucuccaacaccaacuucgccgccggccaguccgucgucuccgucaagcucgccggcaacuccucccucugccccgucuccggcugggccaucuacuccaaggacaacuccauccgcaucggcuccaagggcgacgucuucgucauccgcgagcccuucaucuccugcuccccccucgagugccgcaccuucuuccucacccagggcgcccuccucaacgacaagcacuccaacggcaccaucaaggaccgcucccccuaccgcacccucauguccugccccaucggcgagguccccucccccuacaacucccgcuucgaguccgucgccugguccgccuccgccugccacgacggcaucaacuggcucaccaucggcaucuccggccccgacaacggcgccgucgccguccucaaguacaacggcaucaucaccgacaccaucaaguccuggcgcaacaacauccuccgcacccaggaguccgagugcgccugcgucaacggcuccugcuucaccgucaugaccgacggccccuccaacggccaggccuccuacaagaucuuccgcaucgacaagggcaagaucgucaaguccgucgagaugaacgcccccaacuaccacuacgaggagugcuccugcuaccccgacuccuccgagaucaccugcgucugccgcgacaacuggcacggcuccaaccgccccugggucuccuucaaccagaaccucgaguaccagaucggcuacaucugcuccggcaucuucggcgacaacccccgccccaacgacaagaccggcuccugcggccccgucuccuccaacggcgccaacggcgucaagggcuucuccuucaaguacggcaacggcgucuggaucggccgcaccaaguccaucuccucccgcaacggcuucgagaugaucugggaccccaacggcuggaccggcaccgacaacaacuucuccaucaagcaggacaucgucggcaucaacgagugguccggcuacuccggcuccuucguccagcaccccgagcucaccggccucgacugcauccgccccugcuucugggucgagcucauccgcggccgccccaaggagaacaccaucuggaccuccggcuccuccaucuccuucugcggcgucaacuccgacaccgucggcugguccuggcccgacggcgccgagcuccccuucaccaucgacaaguga

SEQ ID NO: 113238 - RNA, 1410 nt, Artificial Sequence; identical to SEQ ID NO: 112929
  derived and/or modified CDS sequence (opt2) from neuraminidase__InfluenzaA__ACU56934

SEQ ID NO: 113239 - RNA, 1410 nt, Artificial Sequence; identical to SEQ ID NO: 112774
  derived and/or modified CDS sequence (opt2) from neuraminidase__InfluenzaA__ACU64791

SEQ ID NO: 113240 - RNA, 1410 nt, Artificial Sequence
  derived and/or modified CDS sequence (opt2) from neuraminidase__InfluenzaA__ACU64811
augaaccccaaccagaagaucaucaccaucggcuccgucugcaugaccaucggcauggccaaccucauccuccagaucggcaacaucaucuccaucuggaucucccacuccauccagcucggcaaccagaaccagaucgagaccugcaaccaguccgucaucaccuacgagaacaacaccugggucaaccagaccuacgucaacaucuccaacaccaacuucgccgccggccaguccauggucuccgucaagcucgccggcaacuccucccucugccccgucuccggcugggccaucuacuccaaggacaacuccguccgcaucggcuccaagggcgacgucuucaucauccgcgagcccuucaucuccugcuccccccucgagugccgcaccuucuuccucacccagggcgcccuccucaacgacaagcacuccaacggcaccaucaaggaccgcucccccuaccgcacccucauguccugccccaucggcgagguccccucccccuacaacucccgcuucgaguccgucgccugguccgccuccgccugccacgacggcaucaacuggcucaccaucggcaucuccggccccgacaacggcgccgucgccguccucaaguacaacggcaucaucaccgacaccaucaaguccuggcgcaacaacauccuccgcacccaggaguccgagugcgccugcgucaacggcuccugcuucaccgucaugaccgacggccccuccaacggccaggccuccuacaagaucuuccgcaucgagaagggcaagaucgucaaguccgucgagaugaacgcccccaacuaccacuacgaggagugcuccugcuaccccgacuccuccgagaucaccugcgucugccgcgacaacuggcacggcuccaaccgccccugggucuccuucaaccagaaccucgaguaccagaucggcuacaucugcuccggcaucuucggcgacaacccccgccccaacgacaagaccggcuccugcggccccgucuccuccaacggcgccaacggcgucaagggcuucuccuucaaguacggcaacggcgucuggaucggccgcaccaaguccaucuccucccgcaacggcuucgagaugaucugggaccccaacggcuggaccggcaccgacaacaacuucuccaucaagcaggacaucgucggcaucaacgagugguccggcuacuccggcuccuucguccagcaccccgagcucaccggccucgacugcauccgccccugcuucugggucgagcucauccgcggccgccccaaggagaacaccaucuggaccuccggcuccuccaucuccuucugcggcgucaacuccgacaccgucggcugguccuggcccgacggcgccgagcuccccuucaccaucgacaaguga

SEQ ID NO: 113241 - RNA, 1410 nt, Artificial Sequence; identical to SEQ ID NO: 112539
  derived and/or modified CDS sequence (opt2) from neuraminidase__InfluenzaA__ACU79885

SEQ ID NO: 113242 - RNA, 1410 nt, Artificial Sequence; identical to SEQ ID NO: 110131
  derived and/or modified CDS sequence (opt2) from neuraminidase__InfluenzaA__ACU79896

SEQ ID NO: 113243 - RNA, 1410 nt, Artificial Sequence; identical to SEQ ID NO: 110131
  derived and/or modified CDS sequence (opt2) from neuraminidase__InfluenzaA__ACU79918

SEQ ID NO: 113244 - RNA, 1410 nt, Artificial Sequence; identical to SEQ ID NO: 110131
  derived and/or modified CDS sequence (opt2) from neuraminidase__InfluenzaA__ACU79929

SEQ ID NO: 113245 - RNA, 1413 nt, Artificial Sequence
  derived and/or modified CDS sequence (opt2) from neuraminidase__InfluenzaA__ACU79940
augaaccccaaccagaagaucaucaccaucggcuccaucuccaucgucaucggcaucaucucccucaugcuccagaucggcaacaucaucuccaucugggccucccacuccauccagaccggcucccagaaccacaccggcaucugcaaccagcgcaucaucaccuacgagaacuccaccugggucaaccacaccuacgucaacaucaacaacaccaacgucgucgccggcaaggacaagaccuccgucacccucgccggcaacuccucccucugcuccaucuccggcugggccaucuacaccaaggacaacuccauccgcaucggcuccaagggcgacgucuucgucauccgcgagcccuucaucuccugcucccaccucgagugccgcaccuucuuccucacccagggcgcccuccucaacgacaagcacuccaacggcaccgucaaggaccgcucccccuaccgcgcccucauguccugcccccucggcgaggcccccucccccuacaacuccaaguucgaguccgucgccugguccgccuccgccugccacgacggcaugggcuggcucaccaucggcaucuccggccccgacaacggcgccgucgccguccucaaguacaacggcaucaucaccgagaccaucaaguccuggaagaagcgcauccuccgcacccaggaguccgagugcgucugcgucaacggcuccugcuucaccaucaugaccgacggccccuccaacggcgccgccuccuacaagaucuucaagaucgagaagggcaaggucaccaaguccaucgagcucaacgcccccaacucccacuacgaggagugcuccugcuaccccgacaccggcaccgucaugugcgucugccgcgacaacuggcacggcuccaaccgccccugggucuccuucaaccagaaccucgacuaccagaucggcuacaucugcuccggcgucuucggcgacaacccccgccccaaggacggcgagggcuccugcaaccccgucaccgucgacggcgccgacggcgucaagggcuucuccuaccgcuacggcaacggcgucuggaucggccgcaccaaguccaaccgccuccgcaagggcuucgagaugaucugggaccccaacggcuggaccgacaccgacuccgacuucuccgucaagcaggacgucgucgccaugaccgacugguccggcuacuccggcuccuucguccagcaccccgagcucaccggccucgacugcauccgccccugcuucugggucgagcucguccgcggccgcccccgcgagaacaccaccaucuggaccuccggcuccuccaucuccuucugcggcgucaacuccgacaccgccaacugguccuggcccgacggcgccgagcuccccuucaccaucgacaaguga

SEQ ID NO: 113246 - RNA, 1410 nt, Artificial Sequence
  derived and/or modified CDS sequence (opt2) from neuraminidase__InfluenzaA__ACU79951
augaaccccaaccagaagaucaucaccaucggcuccgucucccucaccaucgagaccgucugcuuccucaugcagaucgccauccucgccaccaccgucacccuccacuucaagcagcacgagugcgacucccccgccuccaaccaggucaugcccugcgagcccaucaucaucgagcgcaacaucaccgagaucgucuaccucaacaacaccaccaucgagaaggagaucugccccgaggucgucgaguaccgcaacugguccaagccccagugccagaucaccggcuucgcccccuucuccaaggacaacuccauccgccucuccgccggcggcgacaucugggucacccgcgagcccuacgucuccugcgaccccggcaagugcuaccaguucgcccucggccagggcaccacccucgacaacaagcacuccaacggcaccauccacgaccgcaucccccaccgcacccuccucaugaacgagcucggcguccccuuccaccucggcaccaagcaggucugcgucgccugguccuccuccuccugccacgacggcaaggccuggcuccacgucugcgucaccggcgacgaccgcaacgccaccgccuccuucaucuacgacggccgccucgucgacuccaucggcuccuggucccagaacauccuccgcacccaggaguccgagugcgucugcaucaacggcaccugcaccgucgucaugaccgacggcuccgccuccggccgcgccgacacccgcauccucuucaucaaggagggcaagaucguccacaucuccccccucuccggcuccgcccagcacaucgaggagugcuccugcuacccccgcuaccccgacguccgcugcaucugccgcgacaacuggaagggcuccaaccgccccgucaucgacaucaacauggaggacuacuccaucgacuccuccuacgucugcuccggccucgucggcgacaccccccgcaacgacgacuccuccuccaacuccaacugccgcgaccccaacaacgagcgcggcaaccccggcgucaagggcugggccuucgacaacggcgacgacgucuggaugggccgcaccaucuccaaggacucccgcuccggcuacgagaccuucaaggucaucggcggcugguccacccccaacuccaagucccaggucaaccgccaggucaucgucggcaacaacaacugguccggcuacuccggcaucuucuccgucgagggcaaguccugcaucaaccgcugcuucuacgucgagcucauccgcggccgcccccaggagacccgcgucugguggaccuccaacuccaucgucgucuucugcggcaccuccggcaccuacggcaccggcuccuggcccgacggcgccaacaucaacuucaugcccaucuga

SEQ ID NO: 113247 - RNA, 1410 nt, Artificial Sequence; identical to SEQ ID NO: 112639
  derived and/or modified CDS sequence (opt2) from neuraminidase__InfluenzaA__ACU79973

SEQ ID NO: 113248 - RNA, 1413 nt, Artificial Sequence; identical to SEQ ID NO: 112668
  derived and/or modified CDS sequence (opt2) from neuraminidase__InfluenzaA__ACU79984

SEQ ID NO: 113249 - RNA, 1410 nt, Artificial Sequence; identical to SEQ ID NO: 112635
  derived and/or modified CDS sequence (opt2) from neuraminidase__InfluenzaA__ACU80006

SEQ ID NO: 113250 - RNA, 1410 nt, Artificial Sequence
  derived and/or modified CDS sequence (opt2) from neuraminidase__InfluenzaA__ACU80017
augaacaccaaccagcgcaucaucaccaucggcaccaucugccucaucgucggcaucaucucccuccuccuccagaucggcaacaucauccuccucuggaugucccacuccauccagaccggcgagaagucccaccccaaggucugcaaccaguccgucaucaccuacgagaacaacaccugggucaaccagaccuacgucaacaucuccaacaccaacaucgccgccggccagggcgucacccccaucauccucgccggcaacuccucccucugccccaucuccggcugggccaucuacuccaaggacaacuccauccgcaucggcuccaagggcgacaucuucgucaugcgcgagcccuucaucuccugcucccaccucgagugccgcaccuucuuccucacccagggcgcccuccucaacgaccgccacuccaacggcaccgucaaggaccgcucccccuaccgcacccucauguccugccccaucggcgaggcccccucccccuacaacucccgcuucgaguccgucgccugguccgccuccgccugccacgacggcaugggcuggcucaccaucggcaucuccggccccgacaacggcgccgucgccguccucaaguacaacggcaucaucaccgacaccaucaaguccuggcgcaacaagauccuccgcacccaggaguccgagugcgucugcaucaacggcuccugcuucaccaucaugaccgacggccccuccaacggccaggccuccuacaagcucuucaagauggagaagggcaagaucauccgcuccaucgagcucgacgcccccaacuaccacuacgaggagugcuccugcuaccccgacaccggcaaggucgucugcgucugccgcgacaacuggcacgccuccaaccgccccugggucuccuucgaccagaaccucgacuaccagaucggcuacaucugcuccggcgucuucggcgacaacccccgcuccaacgacggcaagggcaacugcggccccguccucuccaacggcgccaacggcgucaagggcuucuccuuccgcuacggcaacggcgucuggaucggccgcaccaaguccaucuccucccgcuccggcuucgagaugaucugggaccccaacggcuggaccgagaccgacuccuccuucuccaugaagcaggacaucaucgcccucaccgacugguccggcuacuccggcuccuucguccagcaccccgagcucaccggcaugaacugcauccgccccugcuucugggucgagcucauccgcggccagcccaaggaguccaccaucuggaccuccggcuccuccaucuccuucugcggcgucaacuccggcaccgccuccugguccuggcccgacggcgccgaccuccccuucaccaucgacaaguga

SEQ ID NO: 113251 - RNA, 1413 nt, Artificial Sequence; identical to SEQ ID NO: 112668
  derived and/or modified CDS sequence (opt2) from neuraminidase__InfluenzaA__ACU80028

SEQ ID NO: 113252 - RNA, 1410 nt, Artificial Sequence; identical to SEQ ID NO: 112635
  derived and/or modified CDS sequence (opt2) from neuraminidase__InfluenzaA__ACU80039

SEQ ID NO: 113253 - RNA, 1413 nt, Artificial Sequence; identical to SEQ ID NO: 112752
  derived and/or modified CDS sequence (opt2) from neuraminidase__InfluenzaA__ACU80050

SEQ ID NO: 113254 - RNA, 1410 nt, Artificial Sequence; identical to SEQ ID NO: 113185
  derived and/or modified CDS sequence (opt2) from neuraminidase__InfluenzaA__ACU80061

SEQ ID NO: 113255 - RNA, 1413 nt, Artificial Sequence; identical to SEQ ID NO: 112668
  derived and/or modified CDS sequence (opt2) from neuraminidase__InfluenzaA__ACU80072

SEQ ID NO: 113256 - RNA, 1413 nt, Artificial Sequence; identical to SEQ ID NO: 112668
  derived and/or modified CDS sequence (opt2) from neuraminidase__InfluenzaA__ACU80094

SEQ ID NO: 113257 - RNA, 1410 nt, Artificial Sequence; identical to SEQ ID NO: 112639
  derived and/or modified CDS sequence (opt2) from neuraminidase__InfluenzaA__ACU80105

SEQ ID NO: 113258 - RNA, 1410 nt, Artificial Sequence; identical to SEQ ID NO: 112639
  derived and/or modified CDS sequence (opt2) from neuraminidase__InfluenzaA__ACU80127

SEQ ID NO: 113259 - RNA, 1410 nt, Artificial Sequence; identical to SEQ ID NO: 112639
  derived and/or modified CDS sequence (opt2) from neuraminidase__InfluenzaA__ACU80138

SEQ ID NO: 113260 - RNA, 1410 nt, Artificial Sequence; identical to SEQ ID NO: 112635
  derived and/or modified CDS sequence (opt2) from neuraminidase__InfluenzaA__ACU80160

SEQ ID NO: 113261 - RNA, 1413 nt, Artificial Sequence; identical to SEQ ID NO: 112668
  derived and/or modified CDS sequence (opt2) from neuraminidase__InfluenzaA__ACU80171

SEQ ID NO: 113262 - RNA, 1410 nt, Artificial Sequence; identical to SEQ ID NO: 112548
  derived and/or modified CDS sequence (opt2) from neuraminidase__InfluenzaA__ACU80182

SEQ ID NO: 113263 - RNA, 1410 nt, Artificial Sequence
  derived and/or modified CDS sequence (opt2) from neuraminidase__InfluenzaA__ACU80193
augaaccccaaccagaagaucaucaccaucggcuccgucucccucaccaucuccaccaucugcuucuucaugcagaccgccauccucaucaccaccgucacccuccacuucaagcaguacgaguucaacuccccccccaacaaccaggucaugcucugcgagcccaccaucaucgagcgcaacaucaccgagaucgucuaccucaccaacaccaccaucgagaaggagaucugccccaagcucgccgaguaccgcaacugguccaagccccagugcgacaucaccggcuucgcccccuucuccaaggacaacuccauccgccucuccgccggcggcgacaucugggucacccgcgagcccuacgucuccugcgaccccgacaagugcuaccaguucgcccucggccagggcaccacccucaacaacguccacuccaacgacaccguccgcgaccgcacccccuaccgcacccuccucaugaacgagcucggcguccccuuccaccucggcaccaagcaggucugcaucgccugguccuccuccuccugccacgacggcaaggccuggcuccacgucugcaucaccggcgacgacaagaacgccaccgccuccuucaucuacaacggccgccucgucgacuccaucgucuccugguccaaggagauccuccgcacccaggaguccgagugcgucugcaucaacggcaccugcaccgucgucaugaccgacggcuccgccuccggcaaggccgacaccaagauccucuucaucgaggagggcaagaucguccacaccuccacccucuccggcuccgcccagcacgucgaggagugcuccugcuacccccgcuaccccggcguccgcugcgucugccgcgacaacuggaagggcuccaaccgccccaucgucgacaucaacaucaaggaccacuccaucgucuccuccuacgucugcuccggccucgucggcgacaccccccgcaagaacgacuccuccuccuccucccacugccucgaccccaacaacgaggagggcggccacggcgucaagggcugggccuucgacgacggcaacgacgucuggaugggccgcaccaucuccgagaagucccgccucggcuacgagaccuucaaggucaucgagggcugguccaaccccaaguccaagcuccagaucaaccgccaggucaucgucgaccgcggcgaccgcuccggcuacuccggcaucuucuccgucgagggcaaguccugcaucaaccgcugcuucuacgucgagcucauccgcggccgcaaggaggagaccgagguccucuggaccuccaacuccaucgucgucuucugcggcaccuccggcaccuacggcaccggcuccuggcccgacggcgccgacaucaaccucaugcccaucuga

SEQ ID NO: 113264 - RNA, 1410 nt, Artificial Sequence; identical to SEQ ID NO: 112548
  derived and/or modified CDS sequence (opt2) from neuraminidase__InfluenzaA__ACU80204

SEQ ID NO: 113265 - RNA, 1413 nt, Artificial Sequence
  derived and/or modified CDS sequence (opt2) from neuraminidase__InfluenzaA__ACU80237
augaaccccaaccagaagaucaucaccaucggcuccaucuccaucgccaucggcaucaucucccucaugcuccagaucggcaacaucaucuccaucugggccucccacuccauccagaccggcaaccagaacaacaccggcaucugcaaccagcgcaucaucaccuacgagaacuccaccugggucaaccacaccuacgucaacaucaacaacaccaacgucgucgccggcgaggacaagaccuccgucacccucgccggcaacuccucccucugcuccaucuccggcugggccaucuacaccaaggacaacuccauccgcaucggcuccaagggcgacgucuucgucauccgcgagcccuucaucuccugcucccaccucgagugccgcaccuucuuccucacccagggcgcccuccucaacgacaagcacuccaacggcaccgucaaggaccgcucccccuaccgcgcccucauguccugcccccucggcgaggcccccucccccuacaacuccaaguucgaguccgucgccugguccgccuccgccugccacgacggcaugggcuggcucaccaucggcaucuccggccccgacaacggcgccgucgccguccucaaguacaacggcaucaucaccggcaccaucaaguccuggaagaagcagauccuccgcacccaggaguccgagugcgucugcaugaacggcuccugcuucaccaucaugaccgacggccccuccaacaaggccgccuccuacaagaucuucaagaucgagaagggcaaggucaccaaguccaucgagcucaacgcccccaacuuccacuacgaggagugcuccugcuaccccgacaccggcaucgucaugugcgucugccgcgacaacuggcacggcuccaaccgccccugggucuccuucaaccagaaccucgacuaccagaucggcuacaucugcuccggcgucuucggcgacaacccccgccccgaggacggcgagggcuccugcaaccccgucaccgucgacggcgccaacggcgucaagggcuucuccuacaaguacgacaacggcgucuggaucggccgcaccaaguccaaccgccuccgcaagggcuucgagaugaucugggaccccaacggcuggaccaacaccgacuccgacuucuccgucaagcaggacgucgucgccaucaccgacugguccggcuacuccggcuccuucguccagcaccccgagcucaccggccucgacugcauccgccccugcuucugggucgagcucguccgcggccucccccgcgagaacaccaccaucuggaccuccggcuccuccaucuccuucugcggcgucaacuccgacaccgccaacugguccuggcccgacggcgccgagcuccccuucaccaucgacaaguga

SEQ ID NO: 113266 - RNA, 1410 nt, Artificial Sequence; identical to SEQ ID NO: 112639
  derived and/or modified CDS sequence (opt2) from neuraminidase__InfluenzaA__ACU80248

SEQ ID NO: 113267 - RNA, 1410 nt, Artificial Sequence; identical to SEQ ID NO: 112639
  derived and/or modified CDS sequence (opt2) from neuraminidase__InfluenzaA__ACU80259

SEQ ID NO: 113268 - RNA, 1413 nt, Artificial Sequence
  derived and/or modified CDS sequence (opt2) from neuraminidase__InfluenzaA__ACU80270
augaaccccaaccagaagaucaucaccaucggcuccaucuccaucgccaucggcaucaucucccucaugcuccagaucggcaacaucaucuccaucugggccucccacuccauccagaccggcucccagaacaacaccggcaucugcaaccagcgcaucaucaccuacgagaacuccaccugggucaaccacaccuacgucaacaucaacaacaccaacgucgucgccggcgaggacaagaccuccgucacccucgccggcaacuccucccucugcuccaucuccggcugggccaucuacaccaaggacaacuccauccgcaucggcuccaagggcgacgucuucgucauccgcgagcccuucaucuccugcucccaccucgagugccgcaccuucuuccucacccagggcgcccuccucaacgacaagcacuccaacggcaccgucaaggaccgcucccccuaccgcgcccucauguccugcccccucggcgaggcccccucccccuacaacuccaaguucgaguccgucgccugguccgccuccgccugccacgacggcaugggcuggcucaccaucggcaucuccggccccgacaacggcgccgucgccguccucaaguacaacggcaucaucaccggcaccaucaaguccuggaagaagcagauccuccgcacccaggaguccgagugcgucugcaugaacggcuccugcuucaccaucaugaccgacggccccuccaacaaggccgccuccuacaagaucuucaagaucgagaagggcaaggucaccaaguccaucgagcucaacgcccccaacuuccacuacgaggagugcuccugcuaccccgacaccuccaucgucaugugcgucugccgcgacaacuggcacggcuccaaccgccccugggucuccuucaaccagaaccucgacuaccagaucggcuacaucugcuccggcgucuucggcgacaacccccgccccgaggacggcgagggcuccugcaaccccgucaccgucgacggcgccaacggcgucaagggcuucuccuacaaguacgacaacggcgucuggaucggccgcaccaaguccaaccgccuccgcaagggcuucgagaugaucugggaccccaacggcuggaccaacaccgacuccgacuucuccgucaagcaggacgucgucgccaucaccgacugguccggcuacuccggcuccuucguccagcaccccgagcucaccggccucgacugcauccgccccugcuucugggucgagcucguccgcggccucccccgcgagaacaccaccaucuggaccuccggcuccuccaucuccuucugcggcgucaacuccgacaccgccaacugguccuggcccgacggcgccgagcuccccuucaccaucgacaaguga

SEQ ID NO: 113269 - RNA, 1413 nt, Artificial Sequence
  derived and/or modified CDS sequence (opt2) from neuraminidase__InfluenzaA__ACU80281
augaaccagaaccagaagaucaucaccaucggcuccaucuccaucgccaucggcaucaucucccucaugcuccagaucggcaacaucaucuccaucugggccucccacuccauccagaccggcucccagaacaacaccggcaucugcaaccagcgcaucaucaccuacgagaacuccaccugggucaaccacaccuacgucaacaucaacaacaccaacgucgucgccggcgaggacaagaccuccgucacccucgccggcaacuccucccucugcuccaucuccggcugggccaucuacaccaaggacaacuccauccgcaucggcuccaagggcgacgucuucgucauccgcgagcccuucaucuccugcucccaccucgagugccgcaccuucuuccucacccagggcgcccuccucaacgacaagcacuccaacggcaccgucaaggaccgcucccccuaccgcgcccucauguccugcccccucggcgaggcccccucccccuacaacuccaaguucgaguccgucgccugguccgccuccgccugccacgacggcaugggcuggcucaccaucggcaucuccggccccgacaacggcgccgucgccguccucaaguacaacggcaucaucaccggcaccaucaaguccuggaagaagcagauccuccgcacccaggaguccgagugcgucugcaugaacggcuccugcuucaccaucaugaccgacggccccuccaacaaggccgccuccuacaagaucuucaagaucgagaagggcaaggucaccaaguccaucgagcucaacgcccccaacuuccacuacgaggagugcuccugcuaccccgacaccggcaucgucaugugcgucugccgcgacaacuggcacggcuccaaccgccccugggucuccuucaaccagaaccucgacuaccagaucggcuacaucugcuccggcgucuucggcgacaacccccgccccgaggacggcgagggcuccugcaaccccgucaccgucgacggcgccaacggcgucaagggcuucuccuacaaguacgacaacggcgucuggaucggccgcaccaaguccaaccgccuccgcaagggcuucgagaugaucugggaccccaacggcuggaccaacaccgacuccgacuucuccgucaagcaggacgucgucgccaucaccgacugguccggcuacuccggcuccuucguccagcaccccgagcucaccggccucgacugcauccgccccugcuucugggucgagcucguccgcggccucccccgcgagaacaccaccaucuggaccuccggcuccuccaucuccuucugcggcgucaacuccgacaccgccaacugguccuggcccgacggcgccgagcuccccuucaccaucgacaaguga

SEQ ID NO: 113270 - RNA, 1410 nt, Artificial Sequence
  derived and/or modified CDS sequence (opt2) from neuraminidase__InfluenzaA__ACU80303
augaaccccaaccagaagaucaucaccaucggcuccgucucccucaccaucuccaccaucugcuucuucaugcagaucgccauccucaucaccaccgucacccuccacuucaagcaguacgaguucaacuccucccccaacaaccaggucaugcucugcgagcccaccaucaucgagcgcaacaucaccgagaucgucuaccucaccaacaccaccaucgagaaggagaucugccccaagcucgccgaguaccgcaacugguccaagccccagugcgacaucaccggcuucgcccccuucuccaaggacaacuccauccgccucuccgccggcggcgacaucugggucacccgcgagcccuacgucuccugcgaccccgacaagugcuaccaguucgcccucggccagggcaccacccucaacaacguccacuccaacaacaccguccgcgaccgcacccccuaccgcacccuccucaugaacgagcucggcguccccuuccaccucggcaccaagcaggucugcaucgccugguccuccuccuccugccacgacggcaaggccuggcuccacgucugcaucaccggcgacgacaagaacgccaccgccuccuucaucuacaacggccgccucgucgacuccaucgucuccugguccaaggagauccuccgcacccaggaguccgagugcgucugcaucaacggcaccugcaccgucgucaugaccgacggcuccgccuccggcaaggccgacaccaagauccucuucaucgaggagggcaagaucguccacaccuccacccucuccggcuccgcccagcacgucgaggagugcuccugcuacccccgcuaccccggcguccgcugcgucugccgcgacaacuggaagggcuccaaccgccccaucgucgacaucaacaucaaggaccacuccaucgucuccuccuacgucugcuccggccucgucggcgacaccccccgcaagaacgacuccuccuccuccucccacugccucgaccccaacaacgaggagggcggcaacggcgucaagggcugggccuucgacgacggcaacgacgucuggaugggccgcaccaucuccgagaagucccgccucggcuacgagaccuucaaggucaucgagggcugguccaaccccaaguccaagcuccagaucaaccgccaggucaucgucgaccgcggcaaccgcuccggcuacuccggcaucuucuccgucgagggcaaguccugcaucaaccgcugcuucuacgucgagcucauccgcggccgcaaggaggagaccgagguccucuggaccuccaacuccaucgucgucuucugcggcaccuccggcaccuacggcaccggcuccuggcccgacggcgccgacaucaaccucaugcccaucuga

SEQ ID NO: 113271 - RNA, 1410 nt, Artificial Sequence; identical to SEQ ID NO: 112639
  derived and/or modified CDS sequence (opt2) from neuraminidase__InfluenzaA__ACU80314

SEQ ID NO: 113272 - RNA, 1410 nt, Artificial Sequence; identical to SEQ ID NO: 112639
  derived and/or modified CDS sequence (opt2) from neuraminidase__InfluenzaA__ACU80325

SEQ ID NO: 113273 - RNA, 1410 nt, Artificial Sequence; identical to SEQ ID NO: 112635
  derived and/or modified CDS sequence (opt2) from neuraminidase__InfluenzaA__ACU80336

SEQ ID NO: 113274 - RNA, 1410 nt, Artificial Sequence; identical to SEQ ID NO: 112639
  derived and/or modified CDS sequence (opt2) from neuraminidase__InfluenzaA__ACU80347

SEQ ID NO: 113275 - RNA, 1410 nt, Artificial Sequence; identical to SEQ ID NO: 112639
  derived and/or modified CDS sequence (opt2) from neuraminidase__InfluenzaA__ACU80358

SEQ ID NO: 113276 - RNA, 1410 nt, Artificial Sequence; identical to SEQ ID NO: 112639
  derived and/or modified CDS sequence (opt2) from neuraminidase__InfluenzaA__ACU80369

SEQ ID NO: 113277 - RNA, 1410 nt, Artificial Sequence; identical to SEQ ID NO: 112639
  derived and/or modified CDS sequence (opt2) from neuraminidase__InfluenzaA__ACU80380

SEQ ID NO: 113278 - RNA, 1410 nt, Artificial Sequence
  derived and/or modified CDS sequence (opt2) from neuraminidase__InfluenzaA__ACU80391
augaaccccaaccagaagaucaucaccaucggcuccgucucccucaccaucuccaccaucugcuucuucaugcagaucgccauccucaucaccaccgucacccuccacuucaagcaguacgaguucaacuccucccccaacaaccaggucaugcucugcgagcccaccaucaucgagcgcaacaucaccgagaucgucuaccucaccaacaccaucaucgagaaggagaucugccccaagcucgccgaguaccgcaacugguccaagccccagugcgacaucaccggcuucgcccccuucuccaaggacaacuccauccgccucuccgccggcggcgacaucugggucacccgcgagcccuacgucuccugcgaccccgacaagugcuaccaguucgcccucggccagggcaccacccucaacaacguccacuccaacaacaccguccgcgaccgcacccccuaccgcacccuccucaugaacgagcucggcguccccuuccaccucggcaccaagcaggucugcaucgccugguccuccuccuccugccacgacggcaaggccuggcuccacgucugcaucaccggcgacgacaagaacgccaccgccuccuucaucuacaacggccgccucgucgacuccaucgucuccugguccaaggagauccuccgcacccaggaguccgagugcgucugcaucaacggcaccugcaccgucgucaugaccgacggcuccgccuccggcaaggccgacaccaagauccucuucaucgaggagggcaagaucguccacaccuccacccucuccggcuccgcccagcacgucgaggagugcuccugcuacccccgcuaccccggcguccgcugcgucugccgcgacaacuggaagggcuccaaccgccccaucgucgacaucaacaucaaggaccacuccaucgucuccuccuacgucugcuccggccucgucggcgacaccccccgcaagaacgacuccuccuccuccucccacugccucgaccccaacaacgaggagggcggccacggcgucaagggcugggccuucgacgacggcaacgacgucuggaugggccgcaccaucuccgagaagucccgccucggcuacgagaccuucaaggucaucgagggcugguccaaccccaaguccaagcuccagaucaaccgccaggucaucgucgaccgcggcaaccgcuccggcuacuccggcaucuucuccgucgagggcaaguccugcaucaaccgcugcuucuacgucgagcucauccgcggccgcaaggaggagaccgagguccucuggaccuccaacuccaucgucgucuucugcggcaccuccggcaccuacggcaccggcuccuggcccgacggcgccgacaucaaccucaugcccaucuga

SEQ ID NO: 113279 - RNA, 1410 nt, Artificial Sequence; identical to SEQ ID NO: 112635
  derived and/or modified CDS sequence (opt2) from neuraminidase__InfluenzaA__ACU80402

SEQ ID NO: 113280 - RNA, 1413 nt, Artificial Sequence; identical to SEQ ID NO: 112668
  derived and/or modified CDS sequence (opt2) from neuraminidase__InfluenzaA__ACU80413

SEQ ID NO: 113281 - RNA, 1410 nt, Artificial Sequence; identical to SEQ ID NO: 112639
  derived and/or modified CDS sequence (opt2) from neuraminidase__InfluenzaA__ACU80427

SEQ ID NO: 113282 - RNA, 1410 nt, Artificial Sequence; identical to SEQ ID NO: 112639
  derived and/or modified CDS sequence (opt2) from neuraminidase__InfluenzaA__ACU80438

SEQ ID NO: 113283 - RNA, 1410 nt, Artificial Sequence; identical to SEQ ID NO: 112635
  derived and/or modified CDS sequence (opt2) from neuraminidase__InfluenzaA__ACU80461

SEQ ID NO: 113284 - RNA, 1410 nt, Artificial Sequence; identical to SEQ ID NO: 112639
  derived and/or modified CDS sequence (opt2) from neuraminidase__InfluenzaA__ACU80603

SEQ ID NO: 113285 - RNA, 1410 nt, Artificial Sequence; identical to SEQ ID NO: 112639
  derived and/or modified CDS sequence (opt2) from neuraminidase__InfluenzaA__ACU80614

SEQ ID NO: 113286 - RNA, 1410 nt, Artificial Sequence; identical to SEQ ID NO: 112639
  derived and/or modified CDS sequence (opt2) from neuraminidase__InfluenzaA__ACU80625

SEQ ID NO: 113287 - RNA, 1410 nt, Artificial Sequence; identical to SEQ ID NO: 112635
  derived and/or modified CDS sequence (opt2) from neuraminidase__InfluenzaA__ACU80636

SEQ ID NO: 113288 - RNA, 1410 nt, Artificial Sequence
  derived and/or modified CDS sequence (opt2) from neuraminidase__InfluenzaA__ACU80647
augaaccccaaccagaagaucaucaccaucggcuccgucucccucaccaucuccaccaucugcuucuucaugcagaccgccauccucaucaccaccgucacccuccacuucaagcaguacgaguucaacuccccccccaacaaccaggucaugcucugcgagcccaccaucaucgagcgcaacaucaccgagaucgucuaccucaccaacaccaccaucgagaaggagaucugccccaagcucgccgaguaccgcaacugguccaagccccagugcgacaucaccggcuucgcccccuucuccaaggacaacuccauccgccucuccgccggcggcgacaucugggucacccgcgagcccuacgucuccugcgaccccgacaagugcuaccaguucgcccucggccagggcaccacccucaacaacguccacuccaacgacaccguccgcgaccgcacccccuaccgcacccuccucaugaacgagcucggcguccccuuccaccucggcaccaagcaggucugcaucgccugguccuccuccuccugccacgacggcaaggccuggcuccacgucugcaucaccggcgacgacaagaacgccaccgccuccuucaucuacaacggccgccucgucgacuccgucgucuccugguccaaggagauccuccgcacccaggaguccgagugcgucugcaucaacggcaccugcaccgucgucaugaccgacggcuccgccuccggcaaggccgacaccaagauccucuucaucgaggagggcaagaucguccacaccuccacccucuccggcuccgcccagcacgucgaggagugcuccugcuacccccgcuaccccggcguccgcugcgucugccgcgacaacuggaagggcuccaaccgccccaucgucgacaucaacaucaaggaccacuccaucgucuccuccuacgucugcuccggccucgucggcgacaccccccgcaagaacgacuccuccuccuccucccacugccucgaccccaacaacgaggagggcggccacggcgucaagggcugggccuucgacgacggcaacgacgucuggaugggccgcaccaucuccgagaagucccgccucggcuacgagaccuucaaggucaucgagggcugguccaaccccaaguccaagcuccagaucaaccgccaggucaucgucgaccgcggcgaccgcuccggcuacuccggcaucuucuccgucgagggcaaguccugcaucaaccgcugcuucuacgucgagcucauccgcggccgcaaggaggagaccgagguccucuggaccuccaacuccaucgucgucuucugcggcaccuccggcaccuacggcaccggcuccuggcccgacggcgccgacaucaaccucaugcccaucuga

SEQ ID NO: 113289 - RNA, 1410 nt, Artificial Sequence
  derived and/or modified CDS sequence (opt2) from neuraminidase__InfluenzaA__ACU80658
augaaccccaaccagaagaucaucaccaucggcuccgucucccucaccaucuccaccaucugcuucuucaugcagaucgccauccucaucaccaccgucacccuccacuucaagcaguacgaguucaacuccccccccaacaaccaggucaugcucugcgagcccaagaucaucgagcgcaacaucaccgagaucgucuaccucaccaacaccaccaucgagaaggagaucugccccaagcucgccgaguaccgcaacugguccaagccccagugcgacaucaccggcuucgcccccuucuccaaggacaacuccauccgccucuccgccggcggcgacaucugggucacccgcgagcccuacgucuccugcgaccccgacaagugcuaccaguucgcccucggccagggcaccacccucaacaacguccacuccaacgacaccguccgcgaccgcacccccuaccgcacccuccucaugaacgagcucggcguccccuuccaccucggcaccaagcaggucugcaucgccugguccuccuccuccugccacgacggcaaggccuggcuccacgucugcaucaccggcgacgacaagaacgccaccgccuccuucaucuacaacggccgccucgucgacuccgucgucuccugguccaaggagauccuccgcacccaggaguccgagugcgucugcaucaacggcaccugcaccgucgucaugaccgacggcuccgccuccggcaaggccgacaccaagauccucuucaucgaggagggcaagaucguccacaccuccacccucuccggcuccgcccagcacgucgaggagugcuccugcuacccccgcuaccccggcguccgcugcgucugccgcgacaacuggaagggcuccaaccgccccaucgucgacaucaacaucaaggaccacuccaucgucuccuccuacgucugcuccggccucgucggcgacaccccccgcaagaacgacuccuccuccuccucccacugccucgaccccaacaacgaggagggcggccacggcgucaagggcugggccuucgacgacggcaacgacgucuggaugggccgcaccaucuccgagaagucccgccucggcuacgagaccuucaaggucaucgagggcugguccaaccccaaguccaagcuccagaucaaccgccaggucaucgucgaccgcggcaaccgcuccggcuacuccggcaucuucuccgucgagggcaaguccugcaucaaccgcugcuucuacgucgagcucauccgcggccgcaaggaggagaccgagguccucuggaccuccaacuccaucgucgucuucugcggcaccuccggcaccuacggcaccggcuccuggcccgacggcgccgacaucaaccucaugcccaucuga

SEQ ID NO: 113290 - RNA, 1410 nt, Artificial Sequence; identical to SEQ ID NO: 112548
  derived and/or modified CDS sequence (opt2) from neuraminidase__InfluenzaA__ACU80669

SEQ ID NO: 113291 - RNA, 1410 nt, Artificial Sequence; identical to SEQ ID NO: 112635
  derived and/or modified CDS sequence (opt2) from neuraminidase__InfluenzaA__ACU80691

SEQ ID NO: 113292 - RNA, 1410 nt, Artificial Sequence; identical to SEQ ID NO: 112639
  derived and/or modified CDS sequence (opt2) from neuraminidase__InfluenzaA__ACU80702

SEQ ID NO: 113293 - RNA, 1410 nt, Artificial Sequence; identical to SEQ ID NO: 112639
  derived and/or modified CDS sequence (opt2) from neuraminidase__InfluenzaA__ACU80713

SEQ ID NO: 113294 - RNA, 1410 nt, Artificial Sequence; identical to SEQ ID NO: 112635
  derived and/or modified CDS sequence (opt2) from neuraminidase__InfluenzaA__ACU80724

SEQ ID NO: 113295 - RNA, 1410 nt, Artificial Sequence; identical to SEQ ID NO: 112548
  derived and/or modified CDS sequence (opt2) from neuraminidase__InfluenzaA__ACU80735

SEQ ID NO: 113296 - RNA, 1410 nt, Artificial Sequence; identical to SEQ ID NO: 112635
  derived and/or modified CDS sequence (opt2) from neuraminidase__InfluenzaA__ACU80746

SEQ ID NO: 113297 - RNA, 1410 nt, Artificial Sequence
  derived and/or modified CDS sequence (opt2) from neuraminidase__InfluenzaA__ACU80757
augaaccccaaccagaagaucaucaccaucggcuccgucucccucaccaucuccaccaucugcuucuucaugcagaucgccauccucaucaccaccgucacccuccacuucaagcaguacgaguucaacuccccccccaacaaccaggucaugcucugcgagcccaccaucaucgagcgcaacaucaccgaggucgucuaccucaccaacaccaccaucgagaaggagaucugccccaagcucgccgaguaccgcaacugguccaagccccagugcgacaucaccggcuucgcccccuucuccaaggacaacuccauccgccucuccgccggcggcgacaucugggucacccgcgagcccuacgucuccugcgaccccgacaagugcuaccaguucgcccucggccagggcaccacccucaacaacguccacuccaacgacaccguccgcgaccgcacccccuaccgcacccuccucaugaacgagcucggcguccccuuccaccucggcaccaagcaggucugcaucgccugguccuccuccuccugccacgacggcaaggccuggcuccacgucugcaucaccggcgacgacaagaacgccaccgccuccuucaucuacaacggccgccucgucgacuccgucgucuccugguccaaggagauccuccgcacccaggaguccgagugcgucugcaucaacggcaccugcaccgucgucaugaccgacggcuccgccuccggcaaggccgacaccaagauccucuucaucgaggagggcaagaucguccacaccuccacccucuccggcuccgcccagcacgucgaggagugcuccugcuacccccgcuaccccggcguccgcugcgucugccgcgacaacuggaagggcuccaaccgccccaucgucgacaucaacaucaaggaccacuccaucgucuccuccuacgucugcuccggccucgucggcgacaccccccgcaagaacgacuccuccuccuccucccacugccucgaccccaacaacgaggagggcggccacggcgucaagggcugggccuucgacgacggcaacgacgucuggaugggccgcaccaucuccgagaagucccgccucggcuacgagaccuucaaggucaucgagggcugguccaaccccaaguccaagcuccagaucaaccgccaggucaucgucgaccgcggcaaccgcuccggcuacuccggcaucuucuccgucgagggcaaguccugcaucaaccgcugcuucuacgucgagcucauccgcggccgcaaggaggagaccgagguccucuggaccuccaacuccaucgucgucuucugcggcaccuccggcaccuacggcaccggcuccuggcccgacggcgccgacaucaaccucaugcccaucuga

SEQ ID NO: 113298 - RNA, 1410 nt, Artificial Sequence; identical to SEQ ID NO: 113263
  derived and/or modified CDS sequence (opt2) from neuraminidase__InfluenzaA__ACU80768

SEQ ID NO: 113299 - RNA, 1410 nt, Artificial Sequence; identical to SEQ ID NO: 112635
  derived and/or modified CDS sequence (opt2) from neuraminidase__InfluenzaA__ACU80779

SEQ ID NO: 113300 - RNA, 1410 nt, Artificial Sequence; identical to SEQ ID NO: 112548
  derived and/or modified CDS sequence (opt2) from neuraminidase__InfluenzaA__ACU80790

SEQ ID NO: 113301 - RNA, 1410 nt, Artificial Sequence; identical to SEQ ID NO: 112635
  derived and/or modified CDS sequence (opt2) from neuraminidase__InfluenzaA__ACU80801

SEQ ID NO: 113302 - RNA, 1410 nt, Artificial Sequence
  derived and/or modified CDS sequence (opt2) from neuraminidase__InfluenzaA__ACU81106
augaaccccaaccagaagaucaucaccaucggcuccgucucccucaccaucuccaccaucugcuucuucaugcagaucgccauccucaucaccaccgucacccuccacuucaagcaguacgaguucaacuccccccccaacaaccaggucaugcucugcgagcccaccaucaucgagcgcaacaucaccgagaucgucuaccucaccaacaccaccaucgagaaggagaucugccccaagcucgccgaguaccgcaacugguccaagccccagugcgacaucaccggcuucgcccccuucuccaaggacaacuccauccgccucuccgccggcggcgacaucugggucacccgcgagcccuacgucuccugcgaccccgacaagugcuaccaguucgcccucggccagggcaccacccucaacaacguccacuccaacaacaccguccgcgaccgcacccccuaccgcacccuccucaugaacgagcucggcguccccuuccaccucggcaccaagcaggucugcaucgccugguccuccuccuccugccacgacggcaaggccuggcuccacgucugcaucaccggcgacgacaagaacgccaccgccuccuucaucuacaacggccgccucgucgacuccgucgucuccugguccaaggagauccuccgcacccaggaguccgagugcgucugcaucaacggcaccugcaccgucgucaugaccgacggcuccgccuccggcaaggccgacaccaagauccucuucaucgaggagggcaagaucguccacaccuccacccucuccggcuccgcccagcacgucgaggagugcuccugcuacccccgcuaccccggcguccgcugcgucugccgcgacaacuggaagggcuccaaccgccccaucgucgacaucaacaucaaggaccacuccaucgucuccuccuacgucugcuccggccucgucggcgacaccccccgcaagaacgacuccuccuccuccucccacugccucgaccccaacaacgaggagggcggccacggcgucaagggcugggccuucgacgacggcaacgacgucuggaugggccgcaccaucuccgagaagucccgccucggcuacgagaccuucaaggucaucgagggcugguccaaccccaaguccaagcuccagaucaaccgccaggucaucgucgaccgcggcaacuccuccggcuacuccggcaucuucuccgucgagggcaaguccugcaucaaccgcugcuucuacgucgagcucauccgcggccgcaaggaggagaccgagguccucuggaccuccaacuccaucgucgucuucugcggcaccuccggcaccuacggcaccggcuccuggcccgacggcgccgacaucaaccucaugcccaucuga

SEQ ID NO: 113303 - RNA, 1410 nt, Artificial Sequence; identical to SEQ ID NO: 112929
  derived and/or modified CDS sequence (opt2) from neuraminidase__InfluenzaA__ACU87265

SEQ ID NO: 113304 - RNA, 1410 nt, Artificial Sequence; identical to SEQ ID NO: 112774
  derived and/or modified CDS sequence (opt2) from neuraminidase__InfluenzaA__ACU87273

SEQ ID NO: 113305 - RNA, 1410 nt, Artificial Sequence; identical to SEQ ID NO: 112774
  derived and/or modified CDS sequence (opt2) from neuraminidase__InfluenzaA__ACV04231

SEQ ID NO: 113306 - RNA, 1410 nt, Artificial Sequence; identical to SEQ ID NO: 112774
  derived and/or modified CDS sequence (opt2) from neuraminidase__InfluenzaA__ACV04241

SEQ ID NO: 113307 - RNA, 1410 nt, Artificial Sequence; identical to SEQ ID NO: 112774
  derived and/or modified CDS sequence (opt2) from neuraminidase__InfluenzaA__ACV04251

SEQ ID NO: 113308 - RNA, 1410 nt, Artificial Sequence; identical to SEQ ID NO: 112774
  derived and/or modified CDS sequence (opt2) from neuraminidase__InfluenzaA__ACV04261

SEQ ID NO: 113309 - RNA, 1410 nt, Artificial Sequence; identical to SEQ ID NO: 112774
  derived and/or modified CDS sequence (opt2) from neuraminidase__InfluenzaA__ACV04271

SEQ ID NO: 113310 - RNA, 1410 nt, Artificial Sequence
  derived and/or modified CDS sequence (opt2) from neuraminidase__InfluenzaA__ACV04281
augaaccccaaccagaagaucaucaccaucggcuccgucugcaugaccaucggcauggccaaccucauccuccagaucggcaacaucaucuccaucuggaucucccacuccauccagcucggcaaccagaaccagaucgagaccugcaaccaguccgucaucaccuacgagaacaacaccugggucaaccagaccuacgucaacaucggcaacaccaacuucgccgccggccaguccgucgucuccgucaagcucgccggcaacuccucccucugccccgucuccggcugggccaucuacuccaaggacaacuccauccgcaucggcuccaagggcgacgucuucgucauccgcgagcccuucaucuccugcuccccccucgagugccgcaccuucuuccucacccagggcgcccuccucaacgacaagcacuccaacggcaccaucaaggaccgcucccccuaccgcacccucauguccugccccaucggcgagguccccucccccuacaacucccgcuucgaguccgucgccugguccgccuccgccugccacgacggcaucaacuggcucaccaucggcaucuccggccccgacaacggcgccgucgccguccucaaguacaacggcaucaucaccgacaccaucaaguccuggcgcaacaacauccuccgcacccaggaguccgagugcgccugcgucaacggcuccugcuucaccgucaugaccgacggccccuccgacggccaggccuccuacaagaucuuccgcaucgagaagggcaagaucgucaaguccgucgagaugaacgcccccaacuaccacuacgaggagugcuccugcuaccccgacuccuccgagaucaccugcgucugccgcgacaacuggcacggcuccaaccgccccugggucuccuucaaccagaaccucgaguaccagaucggcuacaucugcuccggcaucuucggcgacaacccccgccccaacgacaagaccggcuccugcggccccgucuccuccaacggcgccaacggcgucaagggcuucuccuucaaguacggcaacggcgucuggaucggccgcaccaaguccaucuccucccgcaacggcuucgagaugaucugggaccccaacggcuggaccggcaccgacaacaacuucuccaucaagcaggacaucgucggcaucaacgagugguccggcuacuccggcuccuucguccagcaccccgagcucaccggccucgacugcauccgccccugcuucugggucgagcucauccgcggccgccccaaggagaacaccaucuggaccuccggcuccuccaucuccuucugcggcgucaacuccgacaccgucggcugguccuggcccgacggcgccgagcuccccuucaccaucgacaaguga

SEQ ID NO: 113311 - RNA, 1410 nt, Artificial Sequence; identical to SEQ ID NO: 112774
  derived and/or modified CDS sequence (opt2) from neuraminidase__InfluenzaA__ACV04291

SEQ ID NO: 113312 - RNA, 1410 nt, Artificial Sequence; identical to SEQ ID NO: 112774
  derived and/or modified CDS sequence (opt2) from neuraminidase__InfluenzaA__ACV04301

SEQ ID NO: 113313 - RNA, 1410 nt, Artificial Sequence; identical to SEQ ID NO: 112774
  derived and/or modified CDS sequence (opt2) from neuraminidase__InfluenzaA__ACV04321

SEQ ID NO: 113314 - RNA, 1410 nt, Artificial Sequence; identical to SEQ ID NO: 112774
  derived and/or modified CDS sequence (opt2) from neuraminidase__InfluenzaA__ACV04331

SEQ ID NO: 113315 - RNA, 1410 nt, Artificial Sequence; identical to SEQ ID NO: 112774
  derived and/or modified CDS sequence (opt2) from neuraminidase__InfluenzaA__ACV04341

SEQ ID NO: 113316 - RNA, 1410 nt, Artificial Sequence; identical to SEQ ID NO: 112774
  derived and/or modified CDS sequence (opt2) from neuraminidase__InfluenzaA__ACV04351

SEQ ID NO: 113317 - RNA, 1410 nt, Artificial Sequence; identical to SEQ ID NO: 112774
  derived and/or modified CDS sequence (opt2) from neuraminidase__InfluenzaA__ACV04361

SEQ ID NO: 113318 - RNA, 1410 nt, Artificial Sequence; identical to SEQ ID NO: 112774
  derived and/or modified CDS sequence (opt2) from neuraminidase__InfluenzaA__ACV04371

SEQ ID NO: 113319 - RNA, 1410 nt, Artificial Sequence; identical to SEQ ID NO: 112774
  derived and/or modified CDS sequence (opt2) from neuraminidase__InfluenzaA__ACV04381

SEQ ID NO: 113320 - RNA, 1410 nt, Artificial Sequence; identical to SEQ ID NO: 112774
  derived and/or modified CDS sequence (opt2) from neuraminidase__InfluenzaA__ACV04391

SEQ ID NO: 113321 - RNA, 1410 nt, Artificial Sequence; identical to SEQ ID NO: 112774
  derived and/or modified CDS sequence (opt2) from neuraminidase__InfluenzaA__ACV04401

SEQ ID NO: 113322 - RNA, 1410 nt, Artificial Sequence; identical to SEQ ID NO: 112764
  derived and/or modified CDS sequence (opt2) from neuraminidase__InfluenzaA__ACV04411

SEQ ID NO: 113323 - RNA, 1410 nt, Artificial Sequence; identical to SEQ ID NO: 112774
  derived and/or modified CDS sequence (opt2) from neuraminidase__InfluenzaA__ACV04492

SEQ ID NO: 113324 - RNA, 1410 nt, Artificial Sequence; identical to SEQ ID NO: 112774
  derived and/or modified CDS sequence (opt2) from neuraminidase__InfluenzaA__ACV04502

SEQ ID NO: 113325 - RNA, 1410 nt, Artificial Sequence; identical to SEQ ID NO: 112764
  derived and/or modified CDS sequence (opt2) from neuraminidase__InfluenzaA__ACV04512

SEQ ID NO: 113326 - RNA, 1410 nt, Artificial Sequence
  derived and/or modified CDS sequence (opt2) from neuraminidase__InfluenzaA__ACV04522
augaaccccaaccagaagaucaucaccaucggcuccgucugcaugaccaucggcauggccaaccucauccuccagaucggcaacaucaucuccaucuggaucucccacuccauccagcucggcaaccagaaccagaucgagaccugcaaccaguccgucaucaccuacgagaacaacaccugggucaaccagaccuacgucaacaucuccaacaccaacuucgccgccggcaaguccgucgucuccgucaagcucgccggcaacuccucccucugccccgucuccggcugggccaucuacuccaaggacaacuccauccgcaucggcuccaagggcgacgucuucgucauccgcgagcccuucaucuccugcuccccccucgagugccgcaccuucuuccucacccagggcgcccuccucaacgacaagcacuccaacggcaccaucaaggaccgcucccccuaccgcacccucauguccugccccaucggcgagguccccucccccuacaacucccgcuucgaguccgucgccugguccgccuccgccugccacgacggcaucaacuggcucaccaucggcaucuccggccccgacaacggcgccgucgccguccucaaguacaacggcaucaucaccgacaccaucaaguccuggcgcaacaacauccuccgcacccaggaguccgagugcgccugcgucaacggcuccugcuucaccgucaugaccgacggccccuccgacggccaggccuccuacaagaucuuccgcaucgagaagggcaagaucgucaaguccgucgagaugaacgcccccaacuaccacuacgaggagugcuccugcuaccccgacuccuccgagaucaccugcgucugccgcgacaacuggcacggcuccaaccgccccugggucuccuucaaccagaaccucgaguaccagaucggcuacaucugcuccggcaucuucggcgacaacccccgccccaacgacaagaccggcuccugcggccccgucuccuccaacggcgccaacggcgucaagggcuucuccuucaaguacggcaacggcgucuggaucggccgcaccaaguccaucuccucccgcaacggcuucgagaugaucugggaccccaacggcuggaccggcaccgacaacaacuucuccaucaagcaggacaucgucggcaucaacgagugguccggcuacuccggcuccuucguccagcaccccgagcucaccggccucgacugcauccgccccugcuucugggucgagcucauccgcggccgccccaaggagaacaccaucuggaccuccggcuccuccaucuccuucugcggcgucaacuccgacaccgucggcugguccuggcccgacggcgccgagcuccccuucaccaucgacaaguga

SEQ ID NO: 113327 - RNA, 1410 nt, Artificial Sequence; identical to SEQ ID NO: 112774
  derived and/or modified CDS sequence (opt2) from neuraminidase__InfluenzaA__ACV04532

SEQ ID NO: 113328 - RNA, 1410 nt, Artificial Sequence; identical to SEQ ID NO: 112774
  derived and/or modified CDS sequence (opt2) from neuraminidase__InfluenzaA__ACV04542

SEQ ID NO: 113329 - RNA, 1410 nt, Artificial Sequence; identical to SEQ ID NO: 112774
  derived and/or modified CDS sequence (opt2) from neuraminidase__InfluenzaA__ACV04552

SEQ ID NO: 113330 - RNA, 1410 nt, Artificial Sequence; identical to SEQ ID NO: 112774
  derived and/or modified CDS sequence (opt2) from neuraminidase__InfluenzaA__ACV04562

SEQ ID NO: 113331 - RNA, 1410 nt, Artificial Sequence; identical to SEQ ID NO: 112764
  derived and/or modified CDS sequence (opt2) from neuraminidase__InfluenzaA__ACV04572

SEQ ID NO: 113332 - RNA, 1410 nt, Artificial Sequence; identical to SEQ ID NO: 112774
  derived and/or modified CDS sequence (opt2) from neuraminidase__InfluenzaA__ACV04582

SEQ ID NO: 113333 - RNA, 1410 nt, Artificial Sequence
  derived and/or modified CDS sequence (opt2) from neuraminidase__InfluenzaA__ACV04758
augaaccccaaccagaagaucaucaccaucggcuccgucugcaugaccaucggcauggccaaccucauccuccagaucggcaacaucaucuccaucuggaucucccacuccauccagcucggcaaccagaaccagaucgagaccugcaaccaguccgucaucaccuacgagaacaacaccugggucaaccagaccuacgucaacaucuccaacaccaacuucgccgccggccaguccgucgucuccgucaagcucgccggcaacuccucccucugccccgucuccggcugggccaucuacuccaaggacaacuccauccgcaucggcuccaagggcgacgucuucgucauccgcgagcccuucaucuccugcucccccuccgagugccgcaccuucuuccucacccagggcgcccuccucaacgacaagcacuccaacggcaccaucaaggaccgcucccccuaccgcacccucauguccugccccaucggcgagguccccucccccuacaacucccgcuucgaguccgucgccugguccgccuccgccugccacgacggcaucaacuggcucaccaucggcaucuccggccccgacaacggcgccgucgccguccucaaguacaacggcaucaucaccgacaccaucaaguccuggcgcaacaacauccuccgcacccaggaguccgagugcgccugcgucaacggcuccugcuucaccgucaugaccgacggccccuccaacggccaggccuccuacaagaucuuccgcaucgagaagggcaagaucgucaaguccgucgagaugaacgcccccaacuaccacuacgaggagugcuccugcuaccccgacuccuccgagaucaccugcgucugccgcgacaacuggcacggcuccaaccgccccugggucuccuucaaccagaaccucgaguaccagaucggcuacaucugcuccggcaucuucggcgacaacccccgccccaacgacaagaccggcuccugcggccccgucuccuccaacggcgccaacggcgucaagggcuucuccuucaaguacggcaacggcgucuggaucggccgcaccaaguccaucuccucccgcaacggcuucgagaugaucugggaccccaacggcuggaccggcaccgacaacaacuucuccaucaagcaggacaucgucggcaucaacgagugguccggcuacuccggcuccuucguccagcaccccgagcucaccggccucgacugcauccgccccugcuucugggucgagcucauccgcggccgccccaaggagaacaccaucuggaccuccggcuccuccaucuccuucugcggcgucaacuccgacaccgucggcugguccuggcccgacggcgccgagcuccccuucaccaucgacaaguga

SEQ ID NO: 113334 - RNA, 1410 nt, Artificial Sequence; identical to SEQ ID NO: 112764
  derived and/or modified CDS sequence (opt2) from neuraminidase__InfluenzaA__ACV33087

SEQ ID NO: 113335 - RNA, 1410 nt, Artificial Sequence; identical to SEQ ID NO: 112774
  derived and/or modified CDS sequence (opt2) from neuraminidase__InfluenzaA__ACV33107

SEQ ID NO: 113336 - RNA, 1410 nt, Artificial Sequence; identical to SEQ ID NO: 112774
  derived and/or modified CDS sequence (opt2) from neuraminidase__InfluenzaA__ACV33117

SEQ ID NO: 113337 - RNA, 1410 nt, Artificial Sequence; identical to SEQ ID NO: 112774
  derived and/or modified CDS sequence (opt2) from neuraminidase__InfluenzaA__ACV33127

SEQ ID NO: 113338 - RNA, 1410 nt, Artificial Sequence; identical to SEQ ID NO: 112774
  derived and/or modified CDS sequence (opt2) from neuraminidase__InfluenzaA__ACV33137

SEQ ID NO: 113339 - RNA, 1410 nt, Artificial Sequence; identical to SEQ ID NO: 112774
  derived and/or modified CDS sequence (opt2) from neuraminidase__InfluenzaA__ACV33147

SEQ ID NO: 113340 - RNA, 1410 nt, Artificial Sequence
  derived and/or modified CDS sequence (opt2) from neuraminidase__InfluenzaA__ACV33157
augaaccccaaccagaagaucaucaccaucggcuccgucugcaugaccaucggcauggccaaccucauccuccagaucggcaacaucaucuccaucuggaucucccacuccauccagcucggcaaccagaaccagaucgagaccugcaaccaguccgucaucaccuacgagaacaacaccugggucaaccagaccuacgucaacaucuccaacaccaacuucgccgccggccaguccgucgucuccgucaagcucgccggcaacuccucccucugccccgucuccggcugggccaucuacuccaaggacaacuccauccgcaucggcuccaagggcgacgucuucgucauccgcgagcccuucaucuccugcuccccccucgagugccgcaccuucuuccucacccagggcgcccuccucaacgacaagcacuccaacggcaccaucaaggaccgcucccccuaccgcacccucauguccugccccgucggcgagguccccucccccuacaacucccgcuucgaguccgucgccugguccgccuccgccugccacgacggcaucaacuggcucaccaucggcaucuccggccccgacaacggcgccgucgccguccucaaguacaacggcaucaucaccgacaccaucaaguccuggcgcaacaacauccuccgcacccaggaguccgagugcgccugcgucaacggcuccugcuucaccgucaugaccgacggccccuccgacggccaggccuccuacaagaucuuccgcaucgagaagggcaagaucgucaaguccgucgagaugaacgcccccaacuaccacuacgaggagugcuccugcuaccccgacuccuccgagaucaccugcgucugccgcgacaacuggcacggcuccaaccgccccugggucuccuucaaccagaaccucgaguaccagaucggcuacaucugcuccggcaucuucggcgacaacccccgccccaacgacaagaccggcuccugcggccccgucuccuccaacggcgccaacggcgucaagggcuucuccuucaaguacggcaacggcgucuggaucggccgcaccaaguccaucuccucccgcaacggcuucgagaugaucugggaccccaacggcuggaccggcaccgacaacaacuucuccaucaagcaggacaucgucggcaucaacgagugguccggcuacuccggcuccuucguccagcaccccgagcucaccggccucgacugcauccgccccugcuucugggucgagcucauccgcggccgccccaaggagaacaccaucuggaccuccggcuccuccaucuccuucugcggcgucaacuccgacaccgucggcugguccuggcccgacggcgccgagcuccccuucaccaucgacaaguga

SEQ ID NO: 113341 - RNA, 1410 nt, Artificial Sequence
  derived and/or modified CDS sequence (opt2) from neuraminidase__InfluenzaA__ACV33167
augaaccccaaccagaagaucaucaccaucggcuccgucugcaugaccaucggcauggccaaccucauccuccagaucggcaacaucaucuccaucuggaucucccacuccauccagcucggcaaccagaaccagaucgagaccugcaaccaguccgucaucaccuacgagaacaacaccugggucaaccagaccuacgucaacaucuccaacaccaacuucgccgccggccaguccgucgucuccgucaagcucgccggcaacuccucccucugccccgucuccggcugggccaucuacuccaaggacaacuccauccgcaucggcuccaagggcgacgucuucgucauccgcgagcccuucaucuccugcuccccccucgagugccgcaccuucuuccucacccagggcgcccuccucaacgacaagcacuccaacggcaccaucaaggaccgcucccccuaccgcacccucauguccugccccaucggcgagguccccucccccuacaacucccgcuucgaguccgucgccugguccgccuccgccugccacgacggcaucaacuggcucaccaucggcaucuccggccccgacaacggcgccgucgccguccucaaguacaacggcaucaucaccgacaccaucaaguccuggcgcaacaacauccuccgcacccaggaguccgagugcgccugcgucaacggcuccugcuucaccgucaugaccgacggccccuccgacggccaggccuccuacaagaucuuccgcaucgagaagggcaagaucgucaaguccgucgagaugaacgcccccaacuaccacuacgaggagugcuccugcuaccccgacuccuccgagaucaccugcgucugccgcgacaacuggcacggcuccaaccgccccugggucuccuucaaccagaaccucgaguaccagaucggcuacaucugcuccggcaucuucggcgacaacccccgccccaacgacaagaccggcuccugcggccccgucuccuccaacggcgccaacggcgucaagggcuucuccuucaaguacggcaacggcgucuggaucggccgcaccaaguccaucuccucccgcaacggcuucgagaugaucugggaccccaacggcuggaccggcaccgacaacaacuucuccaucaagcaggacaucgucggcaucaacgagugguccggcuacuccggcuccuucguccagcaccccgagcucaccggccucgacugcauccgccccugcuucugggucgagcucauccgcggccgccccaaggagaacaccaucuggaccuccggcuccuccaucuccuucugcggcgucaacuccgacaccgucgacugguccuggcccgacggcgccgagcuccccuucaccaucgacaaguga

SEQ ID NO: 113342 - RNA, 1410 nt, Artificial Sequence; identical to SEQ ID NO: 112774
  derived and/or modified CDS sequence (opt2) from neuraminidase__InfluenzaA__ACV33177

SEQ ID NO: 113343 - RNA, 1410 nt, Artificial Sequence
  derived and/or modified CDS sequence (opt2) from neuraminidase__InfluenzaA__ACV41993
augaaccccaaccagaagaucaucaccaucggcuccgucugcaugaccaucggcauggccaaccucauccuccagaucggcaacaucaucuccaucuggaucucccacuccauccagcucggcaaccagaaccagaucgagaucugcaaccaguccgucaucaccuacgagaacaacaccugggucaaccagaccuacgucaacaucuccaacaccaacuucgccgccggccaguccgucgucuccgucaagcucgccggcaacuccucccucugccccgucggcggcugggccaucuacuccaaggacaacuccguccgcaucggcuccaagggcgacgucuucgucauccgcgagcccuucaucuccugcuccccccucgagugccgcaccuucuuccucacccagggcgcccuccucaacgacaagcacuccaacggcaccaucaaggaccgcucccccuaccgcacccucauguccugccccaucggcgagguccccucccccuacaacucccgcuucgaguccgucgccugguccgccuccgccugccacgacggcaucaacuggcucaccaucggcaucuccggccccgacaacggcgccgucgccguccucaaguacaacggcaucaucaccgacaccaucaaguccuggcgcaacaacauccuccgcacccaggaguccgagugcgccugcgucaacggcuccugcuucaccgucaugaccgacggccccuccaacggccaggccuccuacaagaucuuccgcaucgagaagggcaagaucgucaaguccgucgagaugaacgcccccaacuaccacuacgaggagugcuccugcuaccccgacuccuccgagaucaccugcgucugccgcgacaacuggcacggcuccaaccgccccugggucuccuucaaccagaaccucgaguaccagaucggcuacaucugcuccggcaucuucggcgacaacccccgccccaacgacaagaccggcuccugcggccccgucuccuccaacggcgccaacggcgucaagggcuucuccuucaaguacggcaacggcgucuggaucggccgcaccaaguccaucuccucccgcaacggcuucgagaugaucugggaccccaacggcuggaccggcaccgacaacaacuucuccaucaagcaggacaucgucggcaucaacgagugguccggcuacuccggcuccuucguccagcaccccgagcucaccggccucgacugcauccgccccugcuucugggucgagcucauccgcggccgccccaaggagaacaccaucuggaccuccggcuccuccaucuccuucugcggcgucaacuccgacaccgucggcugguccuggcccgacggcgccgagcuccccuucaccaucgacaaguga

SEQ ID NO: 113344 - RNA, 1410 nt, Artificial Sequence; identical to SEQ ID NO: 112774
  derived and/or modified CDS sequence (opt2) from neuraminidase__InfluenzaA__ACV42010

SEQ ID NO: 113345 - RNA, 1410 nt, Artificial Sequence; identical to SEQ ID NO: 112774
  derived and/or modified CDS sequence (opt2) from neuraminidase__InfluenzaA__ACV42020

SEQ ID NO: 113346 - RNA, 1410 nt, Artificial Sequence; identical to SEQ ID NO: 112539
  derived and/or modified CDS sequence (opt2) from neuraminidase__InfluenzaA__ACV49504

SEQ ID NO: 113347 - RNA, 1362 nt, Artificial Sequence
  derived and/or modified CDS sequence (opt2) from neuraminidase__InfluenzaA__ACV49537
augaaccccaaccagaagaucaucaccaucggcuccaucugcauggucgucggcaucaucucccucauccuccagaucggcaacaucaucuccaucuggaucucccacuccauccagaccggcaaccagaaccacaccggcaucugcaaccagggcaucaucaccuacaacgucgucgccggccaggacuccaccuccgucauccucaccggcaacuccucccucugccccauccgcggcugggccauccacuccaaggacaacggcauccgcaucggcuccaagggcgacgucuucgucauccgcgagcccuucaucuccugcucccaccucgagugccgcaccuucuuccucacccagggcgcccuccucaacgacaagcacuccaacggcgccgucaaggaccgcucccccuaccgcgcccucauguccugccccgucggcgaggcccccucccccuacaacucccgcuucgaguccgucgccugguccgccuccgccugccacgacggcaugggcuggcucaccaucggcaucuccggccccgacaacggcgccgucgccguccucaaguacaacggcaucaucaccgagaccaucaaguccuggcgcaagaagauccuccgcacccaggaguccgagugcaccugcgucaacggcuccugcuucaccaucaugaccgacggccccuccgacggccucgccuccuacaagaucuucaagaucgagaagggcaaggucaccaaguccaucgagcucaacgcccccaacucccacuacgaggagugcuccugcuaccccgacaccggcaaggucaugugcgucugccgcgacaacuggcacggcuccaaccgccccugggucuccuucgaccagaaccucgacuaccagaucggcuacaucugcuccggcgucuucggcgacaacccccgccccaaggacggcaccggcuccugcggccccgucuccgccgacggcgccaacggcgucaagggcuucuccuaccgcuacggcaacggcgucuggaucggccgcaccaaguccgacuccucccgccacggcuucgagaugaucugggaccccaacggcuggaccgagaccgacucccgcuucuccguccgccaggacgucgucgccaugaccgaccgcuccggcuacuccggcuccuucguccagcaccccgagcucaccggccucgacugcaugcgccccugcuucugggucgagcucauccgcggccgccccgaggagaagaccaucuggaccuccggcuccaucaucuccuucugcggcgucaacuccgacaccgucgacugguccuggcccgacggcgccgagcuccccuucaccaucgacaaguga

SEQ ID NO: 113348 - RNA, 1362 nt, Artificial Sequence
  derived and/or modified CDS sequence (opt2) from neuraminidase__InfluenzaA__ACV49559
augaaccccaaccagaagaucaucaccaucggcuccaucugcauggucgucggcaucaucucccucauccuccagaucggcaacaucaucuccaucuggaucucccacuccauccaggccggcuccuccaccugggucaaccagaccuacgucaacaucuccaacaccaacgucgucgccggccaggacgccaccuccgucauccucaccggcaacuccucccucugccccauccgcggcugggccaucuacuccaaggacaacggcauccgcaucggcuccaagggcgacaucuucgucauccgcgagcccuucaucuccugcucccaccucgagugccgcgccuucuuccucacccagggcgcccuccucaacgacaagcacuccaacggcaccgucaaggaccgcucccccuaccgcgcccucauguccugccccgucggcgaggcccccucccccuacaacucccgcuucgaguccgucgccugguccgccuccgccugccacgacggcaugggcuggcucaccaucggcaucuccggccccgacaacggcgccgucgccguccucaaguacaacggcaucaucaccgagaccaucaaguccuggcgcaagaagauccuccgcacccaggaguccgagugcgccugcgucaacggcuccugcuucaccaucaugaccgacggccccuccgacggccccgccuccuacaagaucuucaagaucgagaagggcaaggucaccaaguccaucgagcucgacgcccccaacucccacuacgaggagugcuccugcuaccccgacaccggcaaggucaugugcgucugccgcgacaacuggcacggcuccaaccgccccugggucuccuucgaccagaaccucgacuaccagaucggcuacaucugcuccggcgucuucggcgacaccccccgccccaaggacggcaccggcuccugcggccccgucuccgucgacggcgccaacggcgucaagggcuucuccuaccgcuacggcgacggcgucuggaucggccgcaccaagucccaguccucccgccacggcuucgagaugaucugggaccccaacggcuggaccgagaccgacucccgcuucuccguccgccaggacgucgucgccaucaccgacugguccggcuacuccggcuccuucguccagcaccccgagcucaccggccucgacugcaugcgccccugcuucugggucgagcucauccgcggccagcccaaggagaagaccaucuggaccuccggcuccuccaucuccuucugcggcgucaacuccgacaccgucgacugguccuggcccgacggcgccgagcuccccuucaccaucgacaaguga

SEQ ID NO: 113349 - RNA, 1395 nt, Artificial Sequence
  derived and/or modified CDS sequence (opt2) from neuraminidase__InfluenzaA__ACV49570
augaaccccaaccagaagaucaucaccaucggcuccaucugcauggucgucggcaucaucucccucauccuccagaucggcaacaucgucuccaucuggaucucccacuccauccagaccggcaaccagaaccacaccggcaccugcgaccaguccaucaucaccuacaagaacuccaccugggucaaccagaccuacgucaacgucgucgccggcaaggacaccaccuccgucauccucgccggcaacuccucccucugccccauccgcggcugggccaucuacuccaaggacaacggcguccgcaucggcuccaagggcgacgucuucgucauccgcgagcccuucaucuccugcucccaccucgagugccgcaccuucuuccucacccagggcgcccuccucaacgacaagcacuccaacggcaccgucaaggaccgcucccccuaccgcgcccucauguccugccccgucggcgaggcccccucccccuacaacucccgcuucgaguccgucgccugguccgccuccgccugccacgacggcaugggcuggcucaccaucggcaucuccggccccgacgacggcgccgucgccguccucaaguacaacggcaucaucaccgagaccaucaaguccuggcgcaaggagauccuccgcacccaggaguccgagugcgucugcgucaacggcuccugcuucaccaucaugaccgacggccccuccggcggccccgccuccuacaagaucuucaagaucgagaagggcaaggucaccaaguccaucgagcucgacgcccccaacucccacuacgaggagugcuccugcuaccccgacaccuccaaggucaugugcgucugccgcgacaacuggcacggcuccaaccgccccugggucuccuucgaccagaaccucgacuaccagaugggcuacaucugcuccggcgucuucggcgacaacccccgccccaaggacggcaagggcuccugcggccccgucuacgucgacggcgccaacggcgucaagggcuucuccuacaaguacggcaacggcgucuggaucggccgcaccaaguccaacuccucccgccagggcuucgagaugaucugggaccccaacggcuggaccgagaccgacuccaacuucuucaccaagcaggacgucgucgccgucaccgacugguccggcuacuccggcuccuucguccagcaccccgagcucaccggccucgacugcaugcgccccugcuucugggucgagcucauccgcggccgccccaaggagaacaccaucuggaccuccggcuccuccaucuccuucugcggcgucaacuccgacaccgucgacugguccuggcccgacggcgccgagcuccccuucaccaucgacaaguga

SEQ ID NO: 113350 - RNA, 1410 nt, Artificial Sequence; identical to SEQ ID NO: 112440
  derived and/or modified CDS sequence (opt2) from neuraminidase__InfluenzaA__ACV49581

SEQ ID NO: 113351 - RNA, 1410 nt, Artificial Sequence; identical to SEQ ID NO: 112440
  derived and/or modified CDS sequence (opt2) from neuraminidase__InfluenzaA__ACV49592

SEQ ID NO: 113352 - RNA, 1410 nt, Artificial Sequence
  derived and/or modified CDS sequence (opt2) from neuraminidase__InfluenzaA__ACV49603
augaaccccaaccagaagaucaucaccaucggcuccgucucccucaccaucgagaccgucugcuuccucaugcagaucgccauccucgccaccaccgucacccuccacuucaagcagcacgagugcgacucccccgccuccaaccaggucaugcccugcgagcccaucaucaucgagcgcaacaucaccgagaucgucuaccucaacaacaccaccaucgagaaggagaucugccccgaggucgucgaguaccgcaacugguccaagccccagugccagaucaccggcuucgcccccuucuccaaggacaacuccauccgccucuccgccggcggcgacaucugggucacccgcgagcccuacgucuccugcgaccccggcaagugcuaccaguucgcccucggccagggcaccacccucgacaacaagcacuccaacggcaccauccacgaccgcaucccccaccgcacccuccucaugaacgagcucggcguccccuuccaccucggcaccaagcaggucugcgucgccugguccuccuccuccugccacgacggcaaggccuggcuccacgucugcgucaccggcgacgaccgcaacgccaccgccuccuucaucuacgacggccgccucgucgacuccaucggcuccuggucccagaacauccuccgcacccaggaguccgagugcgucugcaucaacggcaccugcaccgucgucaugaccgacggcuccgccuccggccgcgccgacacccgcauccucuucaucaaggagggcaagaucguccacaucuccccccucuccggcuccgcccagcacaucgaggagugcuccugcuacccccgcuaccccgacguccgcugcaucugccgcgacaacuggaagggcuccaaccgccccgucaucgacaucaacauggaggacuacuccaucgacuccuccuacgucugcuccggccucgucggcgacaccccccgcaacgacgacuccuccuccaacuccaacugccgcgaccccaacaacgagcgcggcaaccccggcgucaagggcugggccuucgacaacggcgacgacgucuggaugggccgcaccaucuccaaggacucccgcuccggcuacgagaccuucaaggucaucggcggcugguccacccccaacuccaagucccaggucaaccgccaggucaucgucgacaacaacaacugguccggcuacuccggcaucuucuccgucgagggcaaguccugcaucaaccgcugcuucuacgucgagcucauccgcggccgcccccaggagacccgcgucugguggaccuccaacuccaucgucgucuucugcggcaccuccggcaccuacggcaccggcuccuggcccgacggcgccaacaucaacuucaugcccaucuga

SEQ ID NO: 113353 - RNA, 1410 nt, Artificial Sequence
  derived and/or modified CDS sequence (opt2) from neuraminidase__InfluenzaA__ACV49625
augaaccccaaccagaagaccaucaccaucggcuccgucucccucaccaucgagaccgucugcuuccucaugcagaucgccauccucgccaccaccgucacccuccacuucaagcagcacgagugcgacucccccgccuccaaccaggucaugcccugcgagcccaucaucaucgagcgcaacaucaccgagaucgucuaccucaacaacaccaccaucgagaaggagaucugccccgaggucgucgaguaccgcaacugguccaagccccagugccagaucaccggcuucgcccccuucuccaaggacaacuccauccgccucuccgccggcggcgacaucugggucacccgcggccccuacgucuccugcgaccccggcaagugcuaccaguucgcccucggccagggcaccacccucgacaacaagcacuccaacggcaccauccacgaccgcaucccccaccgcacccuccucaugaacgagcucggcguccccuuccaccucggcaccaagcaggucugcgucgccugguccuccuccuccugccacgacggcaaggccuggcuccacgucugcgucaccggcgacgaccgcaacgccaccgccuccuucaucuacgacggccgccucgucgacuccaucggcuccuggucccagaacauccuccgcacccaggaguccgagugcgucugcaucaacggcaccugcaccgucgucaugaccgacggcuccgccuccggccgcgccgacacccgcauccucuucaucaaggagggcaagaucguccacaucuccccccucuccggcuccgcccagcacaucgaggagugcuccugcuacccccgcuaccccgacguccgcugcaucugccgcgacaacuggaagggcuccaaccgccccgucaucgacaucaacauggaggacuacuccaucgacuccuccuacgucugcuccggccucgucggcgacaccccccgcaacgacgacuccuccuccaacuccaacugccgcgaccccaacaacgagcgcggcaaccccggcgucaagggcugggccuucgacaacggcgacgacgucuggaugggccgcaccaucuccaaggacucccgcuccggcuacgagaccuucaaggucaucggcggcugguccacccccaacuccaagucccaggucaaccgccaggucaucgucgacaacaacaacugguccggcuacuccggcaucuucuccgucgagggcaaguccugcaucaaccgcugcuucuacgucgagcucauccgcggccgcccccaggagacccgcgucugguggaccuccaacuccaucgucgucuucugcggcaccuccggcaccuacggcaccggcuccuggcccgacggcgccaacaucaacuucaugcccaucuga

SEQ ID NO: 113354 - RNA, 1410 nt, Artificial Sequence; identical to SEQ ID NO: 112492
  derived and/or modified CDS sequence (opt2) from neuraminidase__InfluenzaA__ACV49647

SEQ ID NO: 113355 - RNA, 1413 nt, Artificial Sequence
  derived and/or modified CDS sequence (opt2) from neuraminidase__InfluenzaA__ACV49669
augaaccccaaccagaagaucaucaccaucggcuccaucugcauggccaucggcaucaucucccucauccuccagaucggcaacaucgucuccaucuggaucucccacuccauccagaccggcucccagaacuacaccggcaucugcaaccagcgcaucaucaccuacgagaacuccaccugggucaaccagaccuacgucaacaucaacaacaccaacgucgucgccggccaggacaccaccuccgucacccucgccggcaacuccucccucugccccaucuccggcugggccaucuacuccaaggacaacuccauccgcaucggcuccaagggcgacgucuucgucauccgcgagcccuucaucuccugcucccaccucgagugccgcaccuucuuccucacccagggcgcccuccucaacgacaagcacuccaacggcaccgucaaggaccgcucccccuaccgcgcccucauguccugccccaucggcgaggcccccucccccuacaacucccgcuucgaguccgucgccugguccgccuccgccugccacgacggcaugggcuggcucaccaucggcaucuccggccccgacgacggcgccgucgccguccucaaguacaacggcaucaucaccgagaccaucaaguccuggcgcaagcgcauccuccgcacccaggaguccgagugcgucugcgucaacggcuccugcuucaccaucaugaccgacggccccaacaacggccccgccuccuacaagaucuucaagaucgagaagggcaagaucaccaaguccaucgagcucgacgcccccaacucccacuacgaggagugcuccugcuaccccgacgccggcaccgucaugugcgucugccgcgacaacuggcacggcuccaaccgccccugggucuccuucaaccagaaccucgacuaccagaucggcuacaucugcuccggcgucuucggcgacaacccccgccccaaggacggcaagggcuccugcggccccgucaccgucgacggcgccgacggcgucaagggcuucuccuaccgcuacggcaacggcgucuggaucggccgcaccaaguccaacuccucccgccgcggcuucgagaugaucugggaccccaacggcuggaccgacaccgacuccaaguuccucgucaagcaggacgucgucgccaugaccgacugguccggcuacuccggcuccuucguccagcaccccgagcucaccggccucgacugcaugcgccccugcuucugggucgagcucauccgcggccgcccccgcgagaacaccaccaucuggaccuccggcuccuccaucuccuucugcggcgucaacggcgacaccgccaacugguccuggcccgacggcgccgagcuccccuucaccaucgacaaguga

SEQ ID NO: 113356 - RNA, 1413 nt, Artificial Sequence
  derived and/or modified CDS sequence (opt2) from neuraminidase__InfluenzaA__ACV49679
augaaccccaaccagaagaucaucaccaucggcuccaucuccaucgccaucggcaucaucucccucaugcuccagaucggcuccaucaucuccaucugggccucccacuccauccgcaccggcucccagaacaacaccggcaucugcaaccagcgcaucaucaccuacgagaacuccaccugggucaaccacaccuacgucaacaucaacaacaccaacgucgucgccggcgaggacaagaccuccgucacccucgccggcaacuccucccucugcuccaucuccggcugggccaucuacaccaaggacaacuccauccgcaucggcuccaagggcgacgucuucgucauccgcgagcccuucaucuccugcucccaccucgagugccgcaccuucuuccucacccagggcgcccuccucaacgacaagcacuccaacggcaccgucaaggaccgcucccccuaccgcgcccucauguccugcccccucggcgaggcccccucccccuacaacuccaaguucgaguccgucgccugguccgccuccgccugccacgacggcaugggcuggcucaccaucggcaucuccggccccgacaacggcgccgucgccguccucaaguacaacggcaucaucaccggcaccaucaaguccuggaagaagcagauccuccgcacccaggaguccgagugcgucugcaugaacggcuccugcuucaccaucaugaccgacggccccuccaacaaggccgccuccuacaagaucuucaagaucgagaagggcaaggucaccaaguccaucgagcucaacgcccccaacuucuacuacgaggagugcuccugcuaccccgacaccggcaucgucaugugcgucugccgcgacaacuggcacggcuccaaccgccccugggucuccuucaaccagaaccucgacuaccagaucggcuacaucugcuccggcgucuucggcgacaacccccgccccgaggacggcgagggcuccugcaaccccgucaccgucgacggcgccaacggcgucaagggcuucuccuacaaguacggcaacggcgucuggaucggccgcaccaaguccaaccgccuccgcaagggcuucgagaugaucugggaccccaacggcuggaccaacaccgacuccgacuucuccgucaagcaggacgucgucgccaucaccgacugguccggcuacuccggcuccuucguccagcaccccgagcucaccggccucgacugcauccgccccugcuucugggucgagcucguccgcggccucccccgcgagaacaccaccaucuggaccuccggcuccuccaucuccuucugcggcgucaacuccgacaccgccaacugguccuggcccgacggcgccgagcuccccuucaccaucgacaaguga

SEQ ID NO: 113357 - RNA, 1410 nt, Artificial Sequence
  derived and/or modified CDS sequence (opt2) from neuraminidase__InfluenzaA__ACV53442
augaaccccaaccagaagaucaucaccaucggcuccgucugcaugaccaucggcauggccaaccucauccuccagaucggcaacaucaucuccaucuggaucucccacuccauccagcucggcaaccagaaccagaucgagaccugcaaccaguccgucaucaccuacgagaacaacaccugggucaaccagaccuacgucaacaucuccaacaccaacuucgccgccggccaguccgucgucuccgucaagcucgccggcaacuccucccucugccccgucuccggcugggccaucuacuccaaggacaacuccguccgcaucggcuccaagggcgacgucuucgucauccgcgagcccuucaucuccugcuccccccucgagugccgcaccuucuuccucacccagggcgcccuccucaacgacaagcacuccaacggcaccaucaaggaccgcucccccuaccgcacccucauguccugccccaucggcgagguccccucccccuacaacucccgcuucgaguccgucgccugguccgccuccgccugccacgacggcaucaacuggcucaccaucggcaucuccggccccgacaacggcgccgucgccguccucaaguacaacggcaucaucaccgacaccaucaaguccuggcgcaacaacauccuccgcacccaggaguccgagugcgccugcgucaacggcuccugcuucaccgucaugaccgacggccccuccgacggccaggccuccuacaagaucuuccgcaucgagaagggcaagaucgucaaguccgucgagaugaacgcccccaacuaccacuacgaggagugcuccugcuaccccgacuccuccgagaucaccugcgucugccgcgacaacuggcacggcuccaaccgccccugggucuccuucaaccagaaccucgaguaccagaucggcuacaucugcuccggcaucuucggcgacaacccccgccccaacgacaagaccggcuccugcggccccgucuccuccaacggcgccaacggcgucaagggcuucuccuucaaguacggcaacggcgucuggaucggccgcaccaaguccaucuccucccgcaacggcuucgagaugaucugggaccccaacggcuggaccggcaccgacaacaacuucuccaucaagcaggacaucgucggcaucaacgagugguccggcuacuccggcuccuucguccagcaccccgagcucaccggccucgacugcauccgccccugcuucugggucgagcucauccgcggccgccccaaggagaacaccaucuggaccuccggcuccuccaucuccuucugcggcgucaacuccgacaccgucggcugguccuggcccgacggcgccgagcuccccuucaccaucgacaaguga

SEQ ID NO: 113358 - RNA, 1410 nt, Artificial Sequence; identical to SEQ ID NO: 113141
  derived and/or modified CDS sequence (opt2) from neuraminidase__InfluenzaA__ACV53452

SEQ ID NO: 113359 - RNA, 1410 nt, Artificial Sequence; identical to SEQ ID NO: 112764
  derived and/or modified CDS sequence (opt2) from neuraminidase__InfluenzaA__ACV53462

SEQ ID NO: 113360 - RNA, 1410 nt, Artificial Sequence; identical to SEQ ID NO: 112774
  derived and/or modified CDS sequence (opt2) from neuraminidase__InfluenzaA__ACV53472

SEQ ID NO: 113361 - RNA, 1410 nt, Artificial Sequence
  derived and/or modified CDS sequence (opt2) from neuraminidase__InfluenzaA__ACV53482
augaaccccaaccagaagaucaucaccaucggcuccgucugcaugaccaucggcauggccaaccucauccuccagaucggcaacaucaucuccaucuggaucucccacuccauccagcucggcaaccagaaccagaucgagaccugcaaccaguccgucaucaccuacgagaacaacaccugggucaaccagaccuacgucaacaucuccaacaccaacuucgccgccggccaguccgucgucuccgucaagcucgccggcaacuccucccucugccccgucuccggcugggccaucuacuccaaggacaacuccguccgcaucggcuccaagggcgacgucuucgucauccgcgagcccuucaucuccugcuccccccucgagugccgcaccuucuuccucacccagggcgcccuccucaacgacaagcacuccaacggcaccaucaaggaccgcucccccuaccgcacccucauguccugccccaucggcgagguccccucccccuacaacucccgcuucgaguccgucgccugguccgccuccgccugccacgacggcaucaacuggcucaccaucggcaucuccggccccgacaacggcgccgucgccguccucaaguacaacggcaucaucaccgacaccaucaaguccuggcgcaacaacauccuccgcacccaggaguccgagugcgccugcgucaacggcuccugcuucaccgucaugaccgacggccccuccaacggccaggccuccuacaagaucuuccgcaucgagaagggcaagaucgucaaguccgucgagaugaacgcccccaacuaccacuacgaggagugcuccugcuaccccgacuccggcgagaucaccugcgucugccgcgacaacuggcacggcuccaaccgccccugggucuccuucaaccagaaccucgaguaccagaucggcuacaucugcuccggcaucuucggcgacaacccccgccccaacgacaagaccggcuccugcggccccgucuccuccaacggcgccaacggcgucaagggcuucuccuucaaguacggcaacggcgucuggaucggccgcaccaaguccaucuccucccgcaacggcuucgagaugaucugggaccccaacggcuggaccgccaccgacaacaacuucuccaucaagcaggacaucgucggcaucaacgagugguccggcuacuccggcuccuucguccagcaccccgagcucaccggccucgacugcauccgccccugcuucugggucgagcucauccgcggccgccccaaggagaacaccaucuggaccuccggcuccuccaucuccuucugcggcgucaacuccgacaccgucggcugguccuggcccgacggcgccgagcuccccuucaccaucgacaaguga

SEQ ID NO: 113362 - RNA, 1410 nt, Artificial Sequence
  derived and/or modified CDS sequence (opt2) from neuraminidase__InfluenzaA__ACV53492
augaaccccaaccagaagaucaucaccaucggcuccgucugcaugaccaucggcauggccaaccucauccuccagaucggcaacaucaucuccaucuggaucucccacuccauccagcucggcaaccagaaccagaucgagaccugcaaccaguccgucaucaccuacgagaacaacaccugggucaaccagaccuacgucaacaucuccaacaccaacuucgccgccggccaguccgucgucuccgucaagcucgccggcaacuccucccucugccccgucuccggcugggccaucuacuccaaggacaacuccauccgcaucggcuccaagggcgacgucuucgucauccgcgagcccuucaucuccugcuccccccucgagugccgcaccuucuuccucacccagggcgcccuccucaacgacaagcacuccaacggcaccaucaaggaccgcucccccuaccgcacccucauguccugccccaucggcgagguccccucccccuacaacucccgcuucgaguccgucgccugguccgccuccgccugccacgacggcaucaacuggcucaccaucggcaucuccggccccgacaacggcgccgucgccguccucaaguacaacggcaucaucaccgacaccaucaaguccuggcgcaacaacauccuccgcacccaggaguccgagugcgccugcgucaacggcuccugcuucaccgucaugaccgacggccccuccgacggccaggccuccuacaagaucuuccgcaucgagaagggcaagaucgucaaguccgucgagaugaacgcccccaacuaccacuacgaggagugcuccugcuaccccgacuccuccgagaucaccugcgucugccgcgacaacuggcacggcuccaaccgccccugggucuccuucaaccagaaccucgaguaccagaucggcuacaucugcuccggcaucuucggcgacaacccccgccccaacgacaaggccggcuccugcggccccgucuccuccaacggcgccaacggcgucaagggcuucuccuucaaguacggcaacggcgucuggaucggccgcaccaaguccaucuccucccgcaacggcuucgagaugaucugggaccccaacggcuggaccgagaccgacaacaacuuccucaucaagcaggacaucgucggcaucaacgagugguccggcuacuccggcuccuucguccagcaccccgagcucaccggccucgacugcauccgccccugcuucugggucgagcucauccgcggccgccccaaggagaacaccaucuggaccuccggcuccuccaucuccuucugcggcgucaacuccgacaccgucggcugguccuggcccgacggcgccgagcuccccuucaccaucgacaaguga

SEQ ID NO: 113363 - RNA, 1410 nt, Artificial Sequence
  derived and/or modified CDS sequence (opt2) from neuraminidase__InfluenzaA__ACV53502
augaaccccaaccagaagaucaucaccaucggcuccgucugcaugaccaucggcauggccaaccucauccuccagaucggcaacaucaucuccaucuggaucucccacuccauccagcucggcaaccagaaccagaucgagaccugcaaccaguccgucaucaccuacgagaacaacaccugggucaaccagaccuacgucaacaucuccaacaccaacuucgccgccggccaguccgucgucuccgucaagcucgccggcaacuccucccucugccccgucuccggcugggccaucuacuccaaggacaacuccauccgcaucggcuccaagggcgacgucuucgucauccgcgagcccuucaucuccugcuccccccucgagugccgcaccuucuuccucacccagggcgcccuccucaacgacaagcacuccaacggcaccaucaaggaccgcucccccuaccgcacccucauguccugccccaucggcgagguccccucccccuacaacucccgcuucgaguccgucgccugguccgccuccgccugccacgacggcaucaacuggcucaccaucggcaucuccggccccgacaacggcgccgucgccguccucaaguacaacggcaucaucaccgacaccaucaaguccuggcgcaacaacauccuccgcacccaggaguccgagugcgccugcgucaacggcuccugcuucaccgucaugaccgacggccccuccgacggccaggccuccuacaagaucuuccgcaucgagaagggcaagaucgucaaguccgucgagaugaacgcccccaacuaccacuacgaggagugcuccugcuaccccgacuccuccgagaucaccugcgucugccgcgacaacuggcacggcuccaaccgccccugggucuccuucaaccagaaccucgaguaccagaucggcuacaucugcuccggcaucuucggcgacaacccccgccccaacgacaaggccggcuccugcggccccgucuccuccaacggcgccaacggcgucaagggcuucuccuucaaguacggcaacggcgucuggaucggccgcaccaaguccaucuccucccgcaacggcuucgagaugaucugggaccccaacggcuggaccggcaccgacaacaacuuccucaucaagcaggacaucgucggcaucaacgagugguccggcuacuccggcuccuucguccagcaccccgagcucaccggccucgacugcauccgccccugcuucugggucgagcucauccgcggccgccccaaggagaacaccaucuggaccuccggcuccuccaucuccuucugcggcgucaacuccgacaccgucggcugguccuggcccgacggcgccgagcuccccuucaccaucgacaaguga

SEQ ID NO: 113364 - RNA, 1410 nt, Artificial Sequence
  derived and/or modified CDS sequence (opt2) from neuraminidase__InfluenzaA__ACV53891
augaaccccaaccagaagaucaucaccaucggcuccgucugcaugaccaucggcauggccaaccucauccuccagaucggcaacaucaucuccaucuggaucucccacuccauccagcucggcaaccagaaccagaucgagaccugcaaccaguccgucaucaccuacgagaacaacaccugggucaaccagaccuacgucaacaucuccaacaccaacuucgccgccggccaguccgucgucuccgucaagcucgccggcaacuccucccucugccccgucuccggcugggccaucuacuccaaggacaacuccauccgcaucggcuccaagggcgacgucuucgucauccgcgagcccuucaucuccugcuccccccucgagugccgcaccuucuuccucacccagggcgcccuccucaacgacaagcacuccaacggcaccaucaaggaccgcucccccuaccgcacccucauguccugccccaucggcgagguccccucccccuacaacucccgcuucgaguccgucgccugguccgccuccgccugccacgacggcaucaacuggcucaccaucggcaucuccggccccgacaacggcgccgucgccguccucaaguacaacggcaucaucaccgacaccaucaaguccuggcgcaacaagauccuccgcacccaggaguccgagugcgccugcgucaacggcuccugcuucaccgucaugaccgacggccccuccgacggccaggccuccuacaagaucuuccgcaucgagaagggcaagaucgucaaguccgucgagaugaacgcccccaacuaccacuacgaggagugcuccugcuaccccgacuccuccgagaucaccugcgucugccgcgacaacuggcacggcuccaaccgccccugggucuccuucaaccagaaccucgaguaccagaucggcuacaucugcuccggcaucuucggcgacaacccccgccccaacgacaagaccggcuccugcggccccgucuccuccaacggcgccaacggcgucaagggcuucuccuucaaguacggcaacggcgucuggaucggccgcaccaaguccaucuccucccgcaacggcuucgagaugaucugcgaccccaacggcuggaccggcaccgacaacaacuucuccaucaagcaggacaucgucggcaucaacgagugguccggcuacuccggcuccuucguccagcaccccgagcucaccggccucgacugcauccgccccugcuucugggucgagcucauccgcggccgccccaaggagaacaccaucuggaccuccggcuccuccaucuccuucugcggcgucaacuccgacaccgucggcugguccuggcccgacggcgccgagcuccccuucaccaucgacaaguga

SEQ ID NO: 113365 - RNA, 1410 nt, Artificial Sequence
  derived and/or modified CDS sequence (opt2) from neuraminidase__InfluenzaA__ACV53901
augaaccccaaccagaagaucaucaccaucggcuccgucugcaugaccaucggcauggccaaccucauccuccagaucggcaacaucaucuccaucuggaucucccacuccauccagcucggcaaccagaaccagaucgagaccugcaaccaguccgucaucaccuacgagaacaacaccugggucaaccagaccuacgucaacaucuccaacaccaacuucgccgccggccaguccgucgucuccgucaagcucgccggcaacuccucccucugccccgucuccggcugggccaucuacuccaaggacaacuccauccgcaucggcuccaagggcgacgucuucgucauccgcgagcccuucaucuccugcuccccccucgagugccgcaccuucuuccucacccagggcgcccuccucaacgacaagcacuccaacggcaccaucaaggaccgcucccccuaccgcacccucauguccugccccaucggcgagguccccucccccuacaacucccgcuucgaguccgucgccugguccgccuccgccugccacgacggcaucaacuggcucaccaucggcaucuccggccccgacaacggcgccgucgccguccucaaguacaacggcaucaucaccgacaccaucaaguccuggcgcaacaacauccuccgcacccaggaguccgagugcgccugcgucaacggcuccugcuucaccgucaugaccgacggccccuccgacggccaggccuccuacaagaucuuccgcaucgagaagggcaagaucgucaaguccgucgagaugaacgcccccaacuaccacuacgaggagugcuccugcuaccccgacuccuccgagaucaccugcgucugccgcgacaacuggcacggcuccaaccgccccugggucuccuucaaccagaaccucgaguaccagaucggcuacaucugcuccggcaucuucggcgacaacccccgccccaacgacaagaccggcuccugcggccccgucuccuccaacggcgccaacggcgucaagggcuucuccuucaaguacggcaacggcgucuggaucggccgcaccaaguccaucuccucccgcaacggcuucgagaugaucugggaccccaacggcuggaccggcaccgacaacaacuucuccaucaagcaggacaucgucggcaucaacgagugguccggcuacucccgcuccuucguccagcaccccgagcucaccggccucgacugcauccgccccugcuucugggucgagcucauccgcggccgccccaaggagaacaccaucuggaccuccggcuccuccaucuccuucugcggcgucaacuccgacaccgucggcugguccuggcccgacggcgccgagcuccccuucaccaucgacaaguga

SEQ ID NO: 113366 - RNA, 1410 nt, Artificial Sequence; identical to SEQ ID NO: 112774
  derived and/or modified CDS sequence (opt2) from neuraminidase__InfluenzaA__ACV53911

SEQ ID NO: 113367 - RNA, 1410 nt, Artificial Sequence; identical to SEQ ID NO: 112764
  derived and/or modified CDS sequence (opt2) from neuraminidase__InfluenzaA__ACV67088

SEQ ID NO: 113368 - RNA, 1410 nt, Artificial Sequence; identical to SEQ ID NO: 112774
  derived and/or modified CDS sequence (opt2) from neuraminidase__InfluenzaA__ACV67168

SEQ ID NO: 113369 - RNA, 1410 nt, Artificial Sequence; identical to SEQ ID NO: 112764
  derived and/or modified CDS sequence (opt2) from neuraminidase__InfluenzaA__ACV67169

SEQ ID NO: 113370 - RNA, 1410 nt, Artificial Sequence; identical to SEQ ID NO: 112774
  derived and/or modified CDS sequence (opt2) from neuraminidase__InfluenzaA__ACV67171

SEQ ID NO: 113371 - RNA, 1410 nt, Artificial Sequence; identical to SEQ ID NO: 112774
  derived and/or modified CDS sequence (opt2) from neuraminidase__InfluenzaA__ACV67172

SEQ ID NO: 113372 - RNA, 1410 nt, Artificial Sequence; identical to SEQ ID NO: 112804
  derived and/or modified CDS sequence (opt2) from neuraminidase__InfluenzaA__ACV67173

SEQ ID NO: 113373 - RNA, 1410 nt, Artificial Sequence; identical to SEQ ID NO: 112764
  derived and/or modified CDS sequence (opt2) from neuraminidase__InfluenzaA__ACV67174

SEQ ID NO: 113374 - RNA, 1410 nt, Artificial Sequence
  derived and/or modified CDS sequence (opt2) from neuraminidase__InfluenzaA__ACV67175
augaaccccaaccagaagaucaucaccaucggcuccgucugcaugaccaucggcauggccaaccucauccuccagaucggcaacaucaucuccaucuggaucucccacuccauccagcucggcaaccagaaccagaucgagaccugcaaccaguccgucaucaccuacgagaacaacaccugggucaaccagaccuacgucaacaucuccaacaccaacuucgccgccggccaguccgucgucuccgucaagcucgccggcaacuccucccucugccccgucuccggcugggccaucuacuccaaggacaacuccauccgcaucggcuccaagggcgacgucuucgucauccgcgagcccuucaucuccugcuccccccucgagugccgcaccuucuuccucacccagggcgcccuccucaacgacaagcacuccaacggcaccaucaaggaccgcucccccuaccgcacccucauguccugccccaucggcgagguccccucccccuacaacucccgcuucgaguccgucgccugguccgccuccgccugccacgacggcaucaacuggcucaccaucggcaucuccggccccgacaacggcgccgucgccguccucaaguacaacggcaucaucaccgacaccaucaaguccuggcgcaacaacauccuccgcacccaggaguccgagugcgccugcgucaacggcuccugcuucaccgucaugaccgacggccccuccgacggccaggccuccuacaagaucuuccgcaucgagaagggcaagaucgucaaguccgucgagaugaacgcccccaacuaccacuacgaggagugcuccugcuaccccgacuccuccgagaucaccugcgucugccgcgacaacuggcacggcuccaaccgccccugggucuccuucaaccagaaccucgaguaccagaucggcuacaucugcuccggcaucuucggcgacaacccccgccccaacgacaagaccggcuccugcggccccgucuccuccaacggcuccaacggcgucaagggcuucuccuucaaguacggcaacggcgucuggaucggccgcaccaaguccaucuccucccgcaacggcuucgagaugaucugggaccccaacggcuggaccggcaccgacaacaacuucuccaucaagcaggacaucgucggcaucaacgagugguccggcuacuccggcuccuucguccagcaccccgagcucaccggccucgacugcauccgccccugcuucugggucgagcucauccgcggccgccccaaggagaacaccaucuggaccuccggcuccuccaucuccuucugcggcgucaacuccgacaccgucggcugguccuggcccgacggcgccgagcuccccuucaccaucgacaaguga

SEQ ID NO: 113375 - RNA, 1410 nt, Artificial Sequence; identical to SEQ ID NO: 112774
  derived and/or modified CDS sequence (opt2) from neuraminidase__InfluenzaA__ACV67176

SEQ ID NO: 113376 - RNA, 1410 nt, Artificial Sequence; identical to SEQ ID NO: 112764
  derived and/or modified CDS sequence (opt2) from neuraminidase__InfluenzaA__ACV67177

SEQ ID NO: 113377 - RNA, 1410 nt, Artificial Sequence; identical to SEQ ID NO: 112774
  derived and/or modified CDS sequence (opt2) from neuraminidase__InfluenzaA__ACV67178

SEQ ID NO: 113378 - RNA, 1410 nt, Artificial Sequence; identical to SEQ ID NO: 112774
  derived and/or modified CDS sequence (opt2) from neuraminidase__InfluenzaA__ACV67179

SEQ ID NO: 113379 - RNA, 1410 nt, Artificial Sequence
  derived and/or modified CDS sequence (opt2) from neuraminidase__InfluenzaA__ACV67180
augaaccccaaccagaagaucaucaccaucggcuccgucugcaugaccaucggcauggccaaccucauccuccagaucggcaacaucaucuccaucuggaucucccacuccauccagcucggcaaccagaaccagaucgagaccugcaaccaguccgucaucaccuacgagaacaacaccugggucaaccagaccuacgucaacaucuccaacaccaacuucgccgccggccagcccgucgucuccgucaagcucgccggcaacuccucccucugccccgucuccggcugggccaucuacuccaaggacaacuccauccgcaucggcuccaagggcgacgucuucgucauccgcgagcccuucaucuccugcuccccccucgagugccgcaccuucuuccucacccagggcgcccuccucaacgacaagcacuccaacggcaccaucaaggaccgcucccccuaccgcacccucauguccugccccaucggcgagguccccucccccuacaacucccgcuucgaguccgucgccugguccgccuccgccugccacgacggcaucaacuggcucaccaucggcaucuccggccccgacaacggcgccgucgccguccucaaguacaacggcaucaucaccgacaccaucaaguccuggcgcaacaacauccuccgcacccaggaguccgagugcgccugcgucaacggcuccugcuucaccgucaugaccgacggccccuccgacggccaggccuccuacaagaucuuccgcaucgagaagggcaagaucgucaaguccgucgagaugaacgcccccaacuaccacuacgaggagugcuccugcuaccccgacuccuccgagaucaccugcgucugccgcgacaacuggcacggcuccaaccgccccugggucuccuucaaccagaaccucgaguaccagaucggcuacaucugcuccggcaucuucggcgacaacccccgccccaacgacaagaccggcuccugcggccccgucuccuccaacggcgccaacggcgucaagggcuucuccuucaaguacggcaacggcgucuggaucggccgcaccaaguccaucuccucccgcaacggcuucgagaugaucugggaccccaacggcuggaccggcaccgacaacaacuucuccaucaagcaggacaucgucggcaucaacgagugguccggcuacuccggcuccuucguccagcaccccgagcucaccggccucgacugcauccgccccugcuucugggucgagcucauccgcggccgccccaaggagaacaccaucuggaccuccggcuccuccaucuccuucugcggcgucaacuccgacaccgucggcugguccuggcccgacggcgccgagcuccccuucaccaucgacaaguga

SEQ ID NO: 113380 - RNA, 1410 nt, Artificial Sequence
  derived and/or modified CDS sequence (opt2) from neuraminidase__InfluenzaA__ACV67181
augaaccccaaccagaagaucaucaccaucggcuccgucugcaugaccaucggcauggccaaccucauccuccagaucggcaacaucaucuccaucuggaucucccacuccauccagcucggcaaccagaaccagaucgagaccugcaaccaguccgucaucaccuacgagaacaacaccugggucaaccagaccuacgucaacaucuccaacaccaacuucgccgccggccaguccgucgucuccgucaagcucgccggcaacuccucccucugccccgucuccggcugggccaucuacuccaaggacaacuccauccgcaucggcuccaagggcgacgucuucaucauccgcgagcccuucaucuccugcuccccccucgagugccgcaccuucuuccucacccagggcgcccuccucaacgacaagcacuccaacggcaccaucaaggaccgcucccccuaccgcacccucauguccugccccaucggcgagguccccucccccuacaacucccgcuucgaguccgucgccugguccgccuccgccugccacgacggcaucaacuggcucaccaucggcaucuccggccccgacaacggcgccgucgccguccucaaguacaacggcaucaucaccgacaccaucaaguccuggcgcaacaacauccuccgcacccaggaguccgagugcgccugcgucaacggcuccugcuucaccgucaugaccgacggccccuccgacggccaggccuccuacaagaucuuccgcaucgagaagggcaagaucaucaaguccgucgagaugaacgcccccaacuaccacuacgaggagugcuccugcuaccccgacuccuccgagaucaccugcgucugccgcgacaacuggcacggcuccaaccgccccugggucuccuucaaccagaaccucgaguaccagaucggcuacaucugcuccggcaucuucggcgacaacccccgccccaacgacaagaccggcuccugcggccccgucuccuccaacggcgccaacggcgucaagggcuucuccuucaaguacggcaacggcgucuggaucggccgcaccaaguccaucuccucccgcaacggcuucgagaugaucugggaccccaacggcuggaccggcaccgacaacaacuucuccaucaagcaggacaucgucggcaucaacgagugguccggcuacuccggcuccuucguccagcaccccgagcucaccggccucgacugcauccgccccugcuucugggucgagcucauccgcggccgccccaaggagaacaccaucuggaccuccggcuccuccaucuccuucugcggcgucaacuccgacaccgucggcugguccuggcccgacggcgccgagcuccccuucaccaucgacaaguga

SEQ ID NO: 113381 - RNA, 1410 nt, Artificial Sequence; identical to SEQ ID NO: 113198
  derived and/or modified CDS sequence (opt2) from neuraminidase__InfluenzaA__ACV67182

SEQ ID NO: 113382 - RNA, 1410 nt, Artificial Sequence
  derived and/or modified CDS sequence (opt2) from neuraminidase__InfluenzaA__ACV67183
augaaccccaaccagaagaucaucaccaucggcuccgucugcaugaccaucggcauggccaaccucauccuccagaucggcaacaucaucuccaucuggaucucccacuccauccagcucggcaaccagaaccagaucgagaccugcaaccaguccgucaucaccuacgagaacaacaccugggucaaccagaccuacgucaacaucuccaacaccaacuucgccgccggccaguccgucgucuccgucaagcucgccggcaacuccucccucugccccgucuccggcugggccaucuacuccaaggacaacuccguccgcaucggcuccaagggcgacgucuucgucauccgcgagcccuucaucuccugcuccccccucgagugccgcaccuucuuccucacccagggcgcccuccucaacgacaagcacuccaacggcaccaucaaggaccgcucccccuaccgcacccucauguccugccccaucggcgagguccccucccccuacaacucccgcuucgaguccgucgccugguccgccuccgccugccacgacggcaucaacuggcucaccaucggcaucuccggccccgacaacggcgccgucgccguccucaaguacaacggcaucaucaccgacaccaucaaguccuggcgcaacaacauccuccgcacccaggaguccgagugcgccugcgucaacggcuccugcuucaccgucaugaccgacggccccuccaacggccaggccuccuacaagaucuuccgcaucgagaagggcaagaucgucaaguccgucgagaugaacgcccccaacuaccacuacgaggagugcuccugcuaccccgacuccaacgagaucaccugcgucugccgcgacaacuggcacggcuccaaccgccccugggucuccuucaaccagaaccucgaguaccagaucggcuacaucugcuccggcaucuucggcgacaacccccgccccaacgacaagaccggcuccugcggccccgucuccuccaacggcgccaacggcgucaagggcuucuccuucaaguacggcaacggcgucuggaucggccgcaccaaguccaucaacucccgcaacggcuucgagaugaucugggaccccaacggcuggaccggcaccgacaacaacuucuccaucaagcaggacaucgucggcaucaacgagugguccggcuacuccggcuccuucguccagcaccccgagcucaccggccucgacugcauccgccccugcuucugggucgagcucauccgcggccgccccaaggagaacaccaucuggaccuccggcuccuccaucuccuucugcggcgucaacuccgacaccgucggcugguccuggcccgacggcgccgagcuccccuucaccaucgacaaguga

SEQ ID NO: 113383 - RNA, 1410 nt, Artificial Sequence; identical to SEQ ID NO: 112774
  derived and/or modified CDS sequence (opt2) from neuraminidase__InfluenzaA__ACV67184

SEQ ID NO: 113384 - RNA, 1410 nt, Artificial Sequence; identical to SEQ ID NO: 112764
  derived and/or modified CDS sequence (opt2) from neuraminidase__InfluenzaA__ACV67186

SEQ ID NO: 113385 - RNA, 1410 nt, Artificial Sequence; identical to SEQ ID NO: 112774
  derived and/or modified CDS sequence (opt2) from neuraminidase__InfluenzaA__ACV67187

SEQ ID NO: 113386 - RNA, 1410 nt, Artificial Sequence; identical to SEQ ID NO: 112774
  derived and/or modified CDS sequence (opt2) from neuraminidase__InfluenzaA__ACV67188

SEQ ID NO: 113387 - RNA, 1410 nt, Artificial Sequence; identical to SEQ ID NO: 112804
  derived and/or modified CDS sequence (opt2) from neuraminidase__InfluenzaA__ACV67189

SEQ ID NO: 113388 - RNA, 1410 nt, Artificial Sequence; identical to SEQ ID NO: 112804
  derived and/or modified CDS sequence (opt2) from neuraminidase__InfluenzaA__ACV67190

SEQ ID NO: 113389 - RNA, 1410 nt, Artificial Sequence; identical to SEQ ID NO: 112764
  derived and/or modified CDS sequence (opt2) from neuraminidase__InfluenzaA__ACV67191

SEQ ID NO: 113390 - RNA, 1410 nt, Artificial Sequence; identical to SEQ ID NO: 112804
  derived and/or modified CDS sequence (opt2) from neuraminidase__InfluenzaA__ACV67192

SEQ ID NO: 113391 - RNA, 1410 nt, Artificial Sequence; identical to SEQ ID NO: 112804
  derived and/or modified CDS sequence (opt2) from neuraminidase__InfluenzaA__ACV67193

SEQ ID NO: 113392 - RNA, 1410 nt, Artificial Sequence; identical to SEQ ID NO: 112774
  derived and/or modified CDS sequence (opt2) from neuraminidase__InfluenzaA__ACV67194

SEQ ID NO: 113393 - RNA, 1410 nt, Artificial Sequence; identical to SEQ ID NO: 112774
  derived and/or modified CDS sequence (opt2) from neuraminidase__InfluenzaA__ACV67195

SEQ ID NO: 113394 - RNA, 1410 nt, Artificial Sequence; identical to SEQ ID NO: 112774
  derived and/or modified CDS sequence (opt2) from neuraminidase__InfluenzaA__ACV67196

SEQ ID NO: 113395 - RNA, 1410 nt, Artificial Sequence; identical to SEQ ID NO: 112764
  derived and/or modified CDS sequence (opt2) from neuraminidase__InfluenzaA__ACV67197

SEQ ID NO: 113396 - RNA, 1410 nt, Artificial Sequence; identical to SEQ ID NO: 112764
  derived and/or modified CDS sequence (opt2) from neuraminidase__InfluenzaA__ACV67199

SEQ ID NO: 113397 - RNA, 1410 nt, Artificial Sequence; identical to SEQ ID NO: 112764
  derived and/or modified CDS sequence (opt2) from neuraminidase__InfluenzaA__ACV67200

SEQ ID NO: 113398 - RNA, 1410 nt, Artificial Sequence; identical to SEQ ID NO: 112764
  derived and/or modified CDS sequence (opt2) from neuraminidase__InfluenzaA__ACV67201

SEQ ID NO: 113399 - RNA, 1410 nt, Artificial Sequence; identical to SEQ ID NO: 112764
  derived and/or modified CDS sequence (opt2) from neuraminidase__InfluenzaA__ACV67202

SEQ ID NO: 113400 - RNA, 1410 nt, Artificial Sequence; identical to SEQ ID NO: 112774
  derived and/or modified CDS sequence (opt2) from neuraminidase__InfluenzaA__ACV67203

SEQ ID NO: 113401 - RNA, 1410 nt, Artificial Sequence; identical to SEQ ID NO: 112774
  derived and/or modified CDS sequence (opt2) from neuraminidase__InfluenzaA__ACV67204

SEQ ID NO: 113402 - RNA, 1410 nt, Artificial Sequence; identical to SEQ ID NO: 112774
  derived and/or modified CDS sequence (opt2) from neuraminidase__InfluenzaA__ACV67205

SEQ ID NO: 113403 - RNA, 1410 nt, Artificial Sequence
  derived and/or modified CDS sequence (opt2) from neuraminidase__InfluenzaA__ACV67206
augaaccccaaccagaagaucaucaccaucggcuccgucugcaugaccaucggcauggccaaccucauccuccagaucggcaacaucaucuccaucuggaucucccacuccauccagcucggcaaccagaaccagaucgagaccugcaaccaguccgucaucaccuacgagaacaacaccugggucaaccagaccuacgucaacaucuccaacaccaacuucgccgccggccaguccauggucuccgucaagcucgccggcaacuccucccucugccccgucuccggcugggccaucuacuccaaggacaacuccguccgcaucggcuccaagggcgacgucuucgucauccgcgagcccuucaucuccugcuccccccucgagugccgcaccuucuuccucacccagggcgcccuccucaacgacaagcacuccaacggcaccaucaaggaccgcucccccuaccgcacccucauguccugccccaucggcgagguccccucccccuacaacucccgcuucgaguccgucgccugguccgccuccgccugccacgacggcaucaacuggcucaccaucggcaucuccggccccgacaacggcgccgucgccguccucaaguacaacggcaucaucaccgacaccaucaaguccuggcgcaacaacauccuccgcacccaggaguccgagugcgccugcgucaacggcuccugcuucaccgucaugaccgacggccccuccaacggccaggccuccuacaagaucuuccgcaucgagaagggcaagaucgucaaguccgucgagaugaacgcccccaacuacuacuacgaggagugcuccugcuaccccgacuccuccgagaucaccugcgucugccgcgacaacuggcacggcuccaaccgccccugggucuccuucaaccagaaccucgaguaccagaucggcuacaucugcuccggcaucuucggcgacaacccccgccccaacgacaagaccggcuccugcggccccgucuccuccaacggcgccaacggcgucaagggcuucuccuucaaguacggcaacggcgucuggaucggccgcaccaaguccaucuccucccgcaacggcuucgagaugaucugggaccccaacggcuggaccggcaccgacaacaacuucuccaucaagcaggacaucgucggcaucaacgagugguccggcuacuccggcuccuucguccagcaccccgagcucaccggccucgacugcauccgccccugcuucugggucgagcucauccgcggccgccccaaggagaacaccaucuggaccuccggcuccuccaucuccuucugcggcgucaacuccgacaccgucggcugguccuggcccgacggcgccgagcuccccuucaccaucgacaaguga

SEQ ID NO: 113404 - RNA, 1410 nt, Artificial Sequence; identical to SEQ ID NO: 112764
  derived and/or modified CDS sequence (opt2) from neuraminidase__InfluenzaA__ACV67207

SEQ ID NO: 113405 - RNA, 1410 nt, Artificial Sequence; identical to SEQ ID NO: 112774
  derived and/or modified CDS sequence (opt2) from neuraminidase__InfluenzaA__ACV67208

SEQ ID NO: 113406 - RNA, 1410 nt, Artificial Sequence; identical to SEQ ID NO: 112764
  derived and/or modified CDS sequence (opt2) from neuraminidase__InfluenzaA__ACV67210

SEQ ID NO: 113407 - RNA, 1410 nt, Artificial Sequence; identical to SEQ ID NO: 112774
  derived and/or modified CDS sequence (opt2) from neuraminidase__InfluenzaA__ACV67211

SEQ ID NO: 113408 - RNA, 1410 nt, Artificial Sequence; identical to SEQ ID NO: 112774
  derived and/or modified CDS sequence (opt2) from neuraminidase__InfluenzaA__ACV70076

SEQ ID NO: 113409 - RNA, 1410 nt, Artificial Sequence
  derived and/or modified CDS sequence (opt2) from neuraminidase__InfluenzaA__ACV70086
augaaccccaaccagaagaucaucaccaucggcuccgucugcaugaccaucggcauggccaaccucauccuccagaucggcaacaucaucuccaucuggaucucccacuccauccagcucggcaaccagaaccagaucgagaccugcaaccaguccaucaucaccuacgagaacaacaccugggucaaccagaccuacgucaacaucuccaacaccaacuucgccgccggccaguccgucgucuccgucaagcucgccggcaacuccucccucugccccgucuccggcugggccaucuacuccaaggacaacuccguccgcaucggcuccaagggcgacgucuucgucauccgcgagcccuucaucuccugcuccccccucgagugccgcaccuucuuccucacccagggcgcccuccucaacgacaagcacuccaacggcaccaucaaggaccgcucccccuaccgcacccucauguccugccccaucggcgagguccccucccccuacaacucccgcuucgaguccgucgccugguccgccuccgccugccacgacggcaucaacuggcucaccaucggcaucuccggccccgacaacggcgccgucgccguccucaaguacaacggcaucaucaccgacaccaucaaguccuggcgcaacaacauccuccgcacccaggaguccgagugcgccugcgucaacggcuccugcuucaccgucaugaccgacggccccuccaacggccaggccuccuacaagaucuuccgcaucgagaagggcaagaucgucaaguccgucgagaugaacgcccccaacuaccacuacgaggagugcuccugcuaccccgacuccuccgagaucaccugcgucugccgcgacaacuggcacggcuccaaccgccccugggucuccuucaaccagaaccucgaguaccagaucggcuacaucugcuccggcaucuucggcgacaacccccgccccaacgacaagaccggcuccugcggccccgucuccuccaacggcgccaacggcgucaagggcuucuccuucaaguacggcaacggcgucuggaucggccgcaccaaguccaucuccucccgcaacggcuucgagaugaucugggaccccaacggcuggaccggcaccgacaacaacuucuccaucaagcaggacaucgucggcaucaacgagugguccggcuacuccggcuccuucguccagcaccccgagcucaccggccucgacugcauccgccccugcuucugggucgagcucauccgcggccgccccaaggagaacaccaucuggaccuccggcuccuccaucuccuucugcggcgucaacuccgacaccgucggcugguccuggcccgacggcgccgagcuccccuucaccaucgacaaguga

SEQ ID NO: 113410 - RNA, 1410 nt, Artificial Sequence
  derived and/or modified CDS sequence (opt2) from neuraminidase__InfluenzaA__ACV70096
augaaccccaaccagaagaucaucaccaucggcuccgucugcaugaccaucggcauggccaaccucauccuccagaucggcaacaucaucuccaucuggaucucccacuccauccagcucggcaaccagaaccagaucgagaccugcaaccaguccgucaucaccuacgagaacaacaccugggucaaccagaccuacgucaacaucuccaacaccaacuucaccgccggccaguccgucgucuccgucaagcucgccggcaacuccucccucugccccgucuccggcugggccaucuacuccaaggacaacuccauccgcaucggcuccaagggcgacgucuucgucauccgcgagcccuucaucuccugcuccccccucgagugccgcaccuucuuccucacccagggcgcccuccucaacgacaagcacuccaacggcaccaucaaggaccgcucccccuaccgcacccucauguccugccccaucggcgagguccccucccccuacaacucccgcuucgaguccgucgccugguccgccuccgccugccacgacggcaucaacuggcucaccaucggcaucuccggccccgacaacggcgccgucgccguccucaaguacaacggcaucaucaccgacaccaucaaguccuggcgcaacaacauccuccgcacccaggaguccgagugcgccugcgucaacggcuccugcuucaccgucaugaccgacggccccuccgacggccaggccuccuacaagaucuuccgcaucgagaagggcaagaucgucaaguccgucgagaugaacgcccccaacuaccacuacgaggagugcuccugcuaccccgacuccuccgagaucaccugcgucugccgcgacaacuggcacggcuccaaccgccccugggucuccuucaaccagaaccucgaguaccagaucggcuacaucugcuccggcaucuucggcgacaacccccgccccaacgacaagaccggcuccugcggccccgucuccuccaacggcgccaacggcgucaagggcuucuccuucaaguacggcaacggcgucuggaucggccgcaccaaguccaucuccucccgcaacggcuucgagaugaucugggaccccaacggcuggaccggcaccgacaacaacuucuccaucaagcaggacaucgucggcaucaacgagugguccggcuacuccggcuccuucguccagcaccccgagcucaccggccucgacugcauccgccccugcuucugggucgagcucauccgcggccgccccaaggagaacaccaucuggaccuccggcuccuccaucuccuucugcggcgucaacuccgacaccgucggcugguccuggcccgacggcgccgagcuccccuucaccaucgacaaguga

SEQ ID NO: 113411 - RNA, 1410 nt, Artificial Sequence; identical to SEQ ID NO: 112774
  derived and/or modified CDS sequence (opt2) from neuraminidase__InfluenzaA__ACV70106

SEQ ID NO: 113412 - RNA, 1410 nt, Artificial Sequence; identical to SEQ ID NO: 112774
  derived and/or modified CDS sequence (opt2) from neuraminidase__InfluenzaA__ACV70116

SEQ ID NO: 113413 - RNA, 1410 nt, Artificial Sequence; identical to SEQ ID NO: 112774
  derived and/or modified CDS sequence (opt2) from neuraminidase__InfluenzaA__ACV70126

SEQ ID NO: 113414 - RNA, 1410 nt, Artificial Sequence; identical to SEQ ID NO: 112774
  derived and/or modified CDS sequence (opt2) from neuraminidase__InfluenzaA__ACV70157

SEQ ID NO: 113415 - RNA, 1410 nt, Artificial Sequence; identical to SEQ ID NO: 112764
  derived and/or modified CDS sequence (opt2) from neuraminidase__InfluenzaA__ACV70167

SEQ ID NO: 113416 - RNA, 1410 nt, Artificial Sequence; identical to SEQ ID NO: 112774
  derived and/or modified CDS sequence (opt2) from neuraminidase__InfluenzaA__ACV70177

SEQ ID NO: 113417 - RNA, 1410 nt, Artificial Sequence; identical to SEQ ID NO: 112774
  derived and/or modified CDS sequence (opt2) from neuraminidase__InfluenzaA__ACV70187

SEQ ID NO: 113418 - RNA, 1410 nt, Artificial Sequence; identical to SEQ ID NO: 112774
  derived and/or modified CDS sequence (opt2) from neuraminidase__InfluenzaA__ACV70197

SEQ ID NO: 113419 - RNA, 1410 nt, Artificial Sequence; identical to SEQ ID NO: 112774
  derived and/or modified CDS sequence (opt2) from neuraminidase__InfluenzaA__ACV70207

SEQ ID NO: 113420 - RNA, 1410 nt, Artificial Sequence
  derived and/or modified CDS sequence (opt2) from neuraminidase__InfluenzaA__ACV70217
augaaccccaaccagaagaucaucaccaucggcuccgucugcaugaccaucggcauggccaaccucauccuccagaucggcaacaucaucuccaucuggaucucccacuccauccagcucggcaaccagaaccagaucgagaccugcaaccaguccgucaucaccuacgagaacaacaccugggucaaccagaccuacgucaacaucuccaacaccaacuucgccgccggccaguccgucgucuccgucaagcucgccggcaacuccucccucugccccgucuccggcugggccaucuacuccaaggacaacuccguccgcaucggcuccaagggcgacgucuucgucauccgcgagcccuucaucuccugcucccaccucgagugccgcaccuucuuccucacccagggcgcccuccucaacgacaagcacuccaacggcaccaucaaggaccgcucccccuaccgcacccucauguccugccccaucggcgagguccccucccccuacaacucccgcuucgaguccgucgccugguccgccuccgccugccacgacggcaucaacuggcucaccaucggcaucuccggccccgacaacggcgccgucgccguccucaaguacaacggcaucaucaccgacaccaucaaguccuggcgcaacaacauccuccgcacccaggaguccgagugcgccugcgucaacggcuccugcuucaccgucaugaccgacggccccuccaacggccaggccuccuacaagaucuuccgcaucgagaagggcaagaucgucaaguccgucgagaugaacgcccccaacuaccacuacgaggagugcuccugcuaccccgacuccuccgagaucaccugcgucugccgcgacaacuggcacggcuccaaccgccccugggucuccuucaaccagaaccucgaguaccagaucggcuacaucugcuccggcaucuucggcgacaacccccgccccaacgacaagaccggcuccugcggccccgucuccuccaacggcgccaacggcgucaagggcuucuccuucaaguacggcaacggcgucuggaucggccgcaccaaguccaucuccucccgcaacggcuucgagaugaucugggaccccaacggcuggaccggcaccgacaacaacuucuccaucaagcaggacaucgucggcaucaacgagugguccggcuacuccggcuccuucguccagcaccccgagcucaccggccucgacugcauccgccccugcuucugggucgagcucauccgcggccgccccaaggagaacaccaucuggaccuccggcuccuccaucuccuucugcggcgucaacuccgacaccgucggcugguccuggcccgacggcgccgagcuccccuucaccaucgacaaguga

SEQ ID NO: 113421 - RNA, 1410 nt, Artificial Sequence; identical to SEQ ID NO: 112774
  derived and/or modified CDS sequence (opt2) from neuraminidase__InfluenzaA__ACV70227

SEQ ID NO: 113422 - RNA, 1410 nt, Artificial Sequence; identical to SEQ ID NO: 112774
  derived and/or modified CDS sequence (opt2) from neuraminidase__InfluenzaA__ACV70237

SEQ ID NO: 113423 - RNA, 1410 nt, Artificial Sequence; identical to SEQ ID NO: 112774
  derived and/or modified CDS sequence (opt2) from neuraminidase__InfluenzaA__ACV70247

SEQ ID NO: 113424 - RNA, 1410 nt, Artificial Sequence; identical to SEQ ID NO: 112774
  derived and/or modified CDS sequence (opt2) from neuraminidase__InfluenzaA__ACV70257

SEQ ID NO: 113425 - RNA, 1410 nt, Artificial Sequence; identical to SEQ ID NO: 112774
  derived and/or modified CDS sequence (opt2) from neuraminidase__InfluenzaA__ACV70267

SEQ ID NO: 113426 - RNA, 1410 nt, Artificial Sequence; identical to SEQ ID NO: 112774
  derived and/or modified CDS sequence (opt2) from neuraminidase__InfluenzaA__ACV70277

SEQ ID NO: 113427 - RNA, 1410 nt, Artificial Sequence; identical to SEQ ID NO: 112774
  derived and/or modified CDS sequence (opt2) from neuraminidase__InfluenzaA__ACV70287

SEQ ID NO: 113428 - RNA, 1410 nt, Artificial Sequence; identical to SEQ ID NO: 112774
  derived and/or modified CDS sequence (opt2) from neuraminidase__InfluenzaA__ACV70297

SEQ ID NO: 113429 - RNA, 1410 nt, Artificial Sequence; identical to SEQ ID NO: 112774
  derived and/or modified CDS sequence (opt2) from neuraminidase__InfluenzaA__ACV70307

SEQ ID NO: 113430 - RNA, 1410 nt, Artificial Sequence; identical to SEQ ID NO: 112764
  derived and/or modified CDS sequence (opt2) from neuraminidase__InfluenzaA__ACV70317

SEQ ID NO: 113431 - RNA, 1410 nt, Artificial Sequence; identical to SEQ ID NO: 112774
  derived and/or modified CDS sequence (opt2) from neuraminidase__InfluenzaA__ACV70327

SEQ ID NO: 113432 - RNA, 1410 nt, Artificial Sequence; identical to SEQ ID NO: 112774
  derived and/or modified CDS sequence (opt2) from neuraminidase__InfluenzaA__ACV70337

SEQ ID NO: 113433 - RNA, 1410 nt, Artificial Sequence; identical to SEQ ID NO: 112774
  derived and/or modified CDS sequence (opt2) from neuraminidase__InfluenzaA__ACV70347

SEQ ID NO: 113434 - RNA, 1410 nt, Artificial Sequence; identical to SEQ ID NO: 112774
  derived and/or modified CDS sequence (opt2) from neuraminidase__InfluenzaA__ACV70357

SEQ ID NO: 113435 - RNA, 1410 nt, Artificial Sequence; identical to SEQ ID NO: 112774
  derived and/or modified CDS sequence (opt2) from neuraminidase__InfluenzaA__ACV70367

SEQ ID NO: 113436 - RNA, 1410 nt, Artificial Sequence; identical to SEQ ID NO: 112774
  derived and/or modified CDS sequence (opt2) from neuraminidase__InfluenzaA__ACV70377

SEQ ID NO: 113437 - RNA, 1410 nt, Artificial Sequence; identical to SEQ ID NO: 112774
  derived and/or modified CDS sequence (opt2) from neuraminidase__InfluenzaA__ACV70387

SEQ ID NO: 113438 - RNA, 1410 nt, Artificial Sequence; identical to SEQ ID NO: 112774
  derived and/or modified CDS sequence (opt2) from neuraminidase__InfluenzaA__ACV70397

SEQ ID NO: 113439 - RNA, 1410 nt, Artificial Sequence; identical to SEQ ID NO: 112774
  derived and/or modified CDS sequence (opt2) from neuraminidase__InfluenzaA__ACV70407

SEQ ID NO: 113440 - RNA, 1410 nt, Artificial Sequence; identical to SEQ ID NO: 112764
  derived and/or modified CDS sequence (opt2) from neuraminidase__InfluenzaA__ACV70417

SEQ ID NO: 113441 - RNA, 1410 nt, Artificial Sequence; identical to SEQ ID NO: 112774
  derived and/or modified CDS sequence (opt2) from neuraminidase__InfluenzaA__ACV70427

SEQ ID NO: 113442 - RNA, 1410 nt, Artificial Sequence; identical to SEQ ID NO: 112774
  derived and/or modified CDS sequence (opt2) from neuraminidase__InfluenzaA__ACV70437

SEQ ID NO: 113443 - RNA, 1410 nt, Artificial Sequence; identical to SEQ ID NO: 112774
  derived and/or modified CDS sequence (opt2) from neuraminidase__InfluenzaA__ACV70447

SEQ ID NO: 113444 - RNA, 1410 nt, Artificial Sequence; identical to SEQ ID NO: 112774
  derived and/or modified CDS sequence (opt2) from neuraminidase__InfluenzaA__ACV70457

SEQ ID NO: 113445 - RNA, 1410 nt, Artificial Sequence; identical to SEQ ID NO: 112774
  derived and/or modified CDS sequence (opt2) from neuraminidase__InfluenzaA__ACV70467

SEQ ID NO: 113446 - RNA, 1410 nt, Artificial Sequence; identical to SEQ ID NO: 112774
  derived and/or modified CDS sequence (opt2) from neuraminidase__InfluenzaA__ACV70477

SEQ ID NO: 113447 - RNA, 1410 nt, Artificial Sequence; identical to SEQ ID NO: 112774
  derived and/or modified CDS sequence (opt2) from neuraminidase__InfluenzaA__ACV70487

SEQ ID NO: 113448 - RNA, 1410 nt, Artificial Sequence; identical to SEQ ID NO: 112774
  derived and/or modified CDS sequence (opt2) from neuraminidase__InfluenzaA__ACV70497

SEQ ID NO: 113449 - RNA, 1410 nt, Artificial Sequence; identical to SEQ ID NO: 112774
  derived and/or modified CDS sequence (opt2) from neuraminidase__InfluenzaA__ACV70507

SEQ ID NO: 113450 - RNA, 1410 nt, Artificial Sequence; identical to SEQ ID NO: 112774
  derived and/or modified CDS sequence (opt2) from neuraminidase__InfluenzaA__ACV70517

SEQ ID NO: 113451 - RNA, 1410 nt, Artificial Sequence; identical to SEQ ID NO: 112774
  derived and/or modified CDS sequence (opt2) from neuraminidase__InfluenzaA__ACV70527

SEQ ID NO: 113452 - RNA, 1410 nt, Artificial Sequence; identical to SEQ ID NO: 112774
  derived and/or modified CDS sequence (opt2) from neuraminidase__InfluenzaA__ACV70547

SEQ ID NO: 113453 - RNA, 1410 nt, Artificial Sequence; identical to SEQ ID NO: 112774
  derived and/or modified CDS sequence (opt2) from neuraminidase__InfluenzaA__ACV70557

SEQ ID NO: 113454 - RNA, 1410 nt, Artificial Sequence; identical to SEQ ID NO: 112774
  derived and/or modified CDS sequence (opt2) from neuraminidase__InfluenzaA__ACV70567

SEQ ID NO: 113455 - RNA, 1410 nt, Artificial Sequence; identical to SEQ ID NO: 112774
  derived and/or modified CDS sequence (opt2) from neuraminidase__InfluenzaA__ACV70577

SEQ ID NO: 113456 - RNA, 1410 nt, Artificial Sequence; identical to SEQ ID NO: 112774
  derived and/or modified CDS sequence (opt2) from neuraminidase__InfluenzaA__ACV70587

SEQ ID NO: 113457 - RNA, 1410 nt, Artificial Sequence; identical to SEQ ID NO: 112764
  derived and/or modified CDS sequence (opt2) from neuraminidase__InfluenzaA__ACV70597

SEQ ID NO: 113458 - RNA, 1410 nt, Artificial Sequence; identical to SEQ ID NO: 112774
  derived and/or modified CDS sequence (opt2) from neuraminidase__InfluenzaA__ACV70607

SEQ ID NO: 113459 - RNA, 1410 nt, Artificial Sequence; identical to SEQ ID NO: 113357
  derived and/or modified CDS sequence (opt2) from neuraminidase__InfluenzaA__ACV70617

SEQ ID NO: 113460 - RNA, 1410 nt, Artificial Sequence; identical to SEQ ID NO: 112774
  derived and/or modified CDS sequence (opt2) from neuraminidase__InfluenzaA__ACV70647

SEQ ID NO: 113461 - RNA, 1410 nt, Artificial Sequence; identical to SEQ ID NO: 112774
  derived and/or modified CDS sequence (opt2) from neuraminidase__InfluenzaA__ACV70657

SEQ ID NO: 113462 - RNA, 1410 nt, Artificial Sequence; identical to SEQ ID NO: 112774
  derived and/or modified CDS sequence (opt2) from neuraminidase__InfluenzaA__ACV70667

SEQ ID NO: 113463 - RNA, 1410 nt, Artificial Sequence; identical to SEQ ID NO: 112774
  derived and/or modified CDS sequence (opt2) from neuraminidase__InfluenzaA__ACV70677

SEQ ID NO: 113464 - RNA, 1410 nt, Artificial Sequence; identical to SEQ ID NO: 112774
  derived and/or modified CDS sequence (opt2) from neuraminidase__InfluenzaA__ACV70687

SEQ ID NO: 113465 - RNA, 1410 nt, Artificial Sequence; identical to SEQ ID NO: 112774
  derived and/or modified CDS sequence (opt2) from neuraminidase__InfluenzaA__ACV70697

SEQ ID NO: 113466 - RNA, 1410 nt, Artificial Sequence; identical to SEQ ID NO: 112774
  derived and/or modified CDS sequence (opt2) from neuraminidase__InfluenzaA__ACV70707

SEQ ID NO: 113467 - RNA, 1410 nt, Artificial Sequence; identical to SEQ ID NO: 112774
  derived and/or modified CDS sequence (opt2) from neuraminidase__InfluenzaA__ACV70717

SEQ ID NO: 113468 - RNA, 1410 nt, Artificial Sequence; identical to SEQ ID NO: 112774
  derived and/or modified CDS sequence (opt2) from neuraminidase__InfluenzaA__ACV70727

SEQ ID NO: 113469 - RNA, 1410 nt, Artificial Sequence; identical to SEQ ID NO: 112774
  derived and/or modified CDS sequence (opt2) from neuraminidase__InfluenzaA__ACV70737

SEQ ID NO: 113470 - RNA, 1410 nt, Artificial Sequence; identical to SEQ ID NO: 112774
  derived and/or modified CDS sequence (opt2) from neuraminidase__InfluenzaA__ACV70757

SEQ ID NO: 113471 - RNA, 1410 nt, Artificial Sequence; identical to SEQ ID NO: 112774
  derived and/or modified CDS sequence (opt2) from neuraminidase__InfluenzaA__ACV70767

SEQ ID NO: 113472 - RNA, 1410 nt, Artificial Sequence; identical to SEQ ID NO: 112774
  derived and/or modified CDS sequence (opt2) from neuraminidase__InfluenzaA__ACV70777

SEQ ID NO: 113473 - RNA, 1410 nt, Artificial Sequence; identical to SEQ ID NO: 112774
  derived and/or modified CDS sequence (opt2) from neuraminidase__InfluenzaA__ACV70787

SEQ ID NO: 113474 - RNA, 1410 nt, Artificial Sequence; identical to SEQ ID NO: 112774
  derived and/or modified CDS sequence (opt2) from neuraminidase__InfluenzaA__ACV70797

SEQ ID NO: 113475 - RNA, 1410 nt, Artificial Sequence; identical to SEQ ID NO: 112774
  derived and/or modified CDS sequence (opt2) from neuraminidase__InfluenzaA__ACV70807

SEQ ID NO: 113476 - RNA, 1410 nt, Artificial Sequence; identical to SEQ ID NO: 112774
  derived and/or modified CDS sequence (opt2) from neuraminidase__InfluenzaA__ACV70817

SEQ ID NO: 113477 - RNA, 1410 nt, Artificial Sequence; identical to SEQ ID NO: 112764
  derived and/or modified CDS sequence (opt2) from neuraminidase__InfluenzaA__ACV70827

SEQ ID NO: 113478 - RNA, 1410 nt, Artificial Sequence; identical to SEQ ID NO: 112774
  derived and/or modified CDS sequence (opt2) from neuraminidase__InfluenzaA__ACV70837

SEQ ID NO: 113479 - RNA, 1410 nt, Artificial Sequence
  derived and/or modified CDS sequence (opt2) from neuraminidase__InfluenzaA__ACV70847
augaaccccaaccagaagaucaucaccaucggcuccgucugcaugaccaucggcauggccaaccucauccuccagaucggcaacaucaucuccaucuggaucucccacuccauccagcucggcaaccagaaccagaucgagaccugcaaccaguccgucaucaccuacgagaacaacaccugggucaaccagaccuacgucaacaucuccaacaccaacuucgccgccggccaguccgucgucuccgucaagcucgccggcaacuccucccucugccccgucuccggcugggccaucuacuccaaggacaacuccauccgcaucggcuccaagggcgacgucuucgucauccgcgagcccuucauguccugcuccccccucgagugccgcaccuucuuccucacccagggcgcccuccucaacgacaagcacuccaacggcaccaucaaggaccgcucccccuaccgcacccucauguccugccccaucggcgagguccccucccccuacaacucccgcuucgaguccgucgccugguccgccuccgccugccacgacggcaucaacuggcucaccaucggcaucuccggccccgacaacggcgccgucgccguccucaaguacaacggcaucaucaccgacaccaucaaguccuggcgcaacaacauccuccgcacccaggaguccgagugcgccugcgucaacggcuccugcuucaccgucaugaccgacggccccuccgacggccaggccuccuacaagaucuuccgcaucgagaagggcaagaucgucaaguccgucgagaugaacgcccccaacuaccacuacgaggagugcuccugcuaccccgacuccuccgagaucaccugcgucugccgcgacaacuggcacggcuccaaccgccccugggucuccuucaaccagaaccucgaguaccagaucggcuacaucugcuccggcaucuucggcgacaacccccgccccaacgacaagaccggcuccugcggccccgucuccuccaacggcgccaacggcgucaagggcuucuccuucaaguacggcaacggcgucuggaucggccgcaccaaguccaucuccucccgcaacggcuucgagaugaucugggaccccaacggcuggaccggcaccgacaacaacuucuccaucaagcaggacaucgucggcaucaacgagugguccggcuacuccggcuccuucguccagcaccccgagcucaccggccucgacugcauccgccccugcuucugggucgagcucauccgcggccgccccaaggagaacaccaucuggaccuccggcuccuccaucuccuucugcggcgucaacuccgacaccgucggcugguccuggcccgacggcgccgagcuccccuucaccaucgacaaguga

SEQ ID NO: 113480 - RNA, 1410 nt, Artificial Sequence; identical to SEQ ID NO: 112774
  derived and/or modified CDS sequence (opt2) from neuraminidase__InfluenzaA__ACV70867

SEQ ID NO: 113481 - RNA, 1410 nt, Artificial Sequence; identical to SEQ ID NO: 112774
  derived and/or modified CDS sequence (opt2) from neuraminidase__InfluenzaA__ACV70877

SEQ ID NO: 113482 - RNA, 1410 nt, Artificial Sequence
  derived and/or modified CDS sequence (opt2) from neuraminidase__InfluenzaA__ACV70887
augaaccccaaccagaagaucaucaccaucggcuccgucugcaugaccaucggcauggccaaccucauccuccagaucggcaacaucaucuccaucuggaucucccacuccauccagcucggcaaccagaaccagaucgagaccugcaaccaguccgucaucaccuacgagaacaacaccugggucaaccagaccuacgucaacaucuccaacaccaacuucgccgccggccaguccauggucuccgucaagcucgccggcaacuccucccucugccccgucuccggcugggccaucuacuccaaggacaacuccguccgcaucggcuccaagggcgacgucuucgucauccgcgagcccuucaucuccugcuccccccucgagugccgcaccuucuuccucacccagggcgcccuccucaacgacaagcacuccaacggcaccaucaaggaccgcucccccuaccgcacccucauguccugccccaucggcgagguccccucccccuacaacucccgcuucgaguccgucgccugguccgccuccgccugccacgacggcaucaacuggcucaccaucggcaucuccggccccgacaacggcgccgucgccguccucaaguacaacggcaucaucaccgacaccaucaaguccuggcgcaacaacauccuccgcacccaggaguccgagugcgccugcgucaacggcuccugcuucaccgucaugaccgacggccccuccaacggccaggccuccuacaagaucuuccgcaucgagaagggcaagaucgucaaguccgucgagaugaacgcccccaacuaccacuacgaggagugcuccugcuaccccgacuccuccgagaucaccugcgucugccgcgacaacuggcacggcuccaaccgccccugggucuccuucaaccagaaccucgaguaccagaucggcuacaucugcuccggcaucuucggcgacaacccccgccccaacgacaagaccggcuccugcggccccgucuccuccaacggcgccaacggcgucaagggcuucuccuucaaguacggcaacggcgucuggaucggccgcaccaaguccaucuccucccgcaacggcuucgagaugaucugggaccccaacggcuggaccggcaccgacaacaacuucuccaucaagcaggacaucgucggcaucaacgagugguccggcuacuccggcuccuucguccagcaccccgagcucaccggccucgacugcauccgccccugcuucugggucgagcucauccgcggccgccccaaggagaacaccaucuggaccuccggcuccuccaucuccuucugcggcgucaacuccgacaccgucggcugguccuggcccgacggcgccgagcuccccuucaccaucgacaaguga

SEQ ID NO: 113483 - RNA, 1410 nt, Artificial Sequence; identical to SEQ ID NO: 112774
  derived and/or modified CDS sequence (opt2) from neuraminidase__InfluenzaA__ACV70897

SEQ ID NO: 113484 - RNA, 1410 nt, Artificial Sequence; identical to SEQ ID NO: 112774
  derived and/or modified CDS sequence (opt2) from neuraminidase__InfluenzaA__ACV70907

SEQ ID NO: 113485 - RNA, 1410 nt, Artificial Sequence; identical to SEQ ID NO: 112774
  derived and/or modified CDS sequence (opt2) from neuraminidase__InfluenzaA__ACV70917

SEQ ID NO: 113486 - RNA, 1410 nt, Artificial Sequence; identical to SEQ ID NO: 112764
  derived and/or modified CDS sequence (opt2) from neuraminidase__InfluenzaA__ACV70927

SEQ ID NO: 113487 - RNA, 1410 nt, Artificial Sequence; identical to SEQ ID NO: 112774
  derived and/or modified CDS sequence (opt2) from neuraminidase__InfluenzaA__ACV70937

SEQ ID NO: 113488 - RNA, 1410 nt, Artificial Sequence; identical to SEQ ID NO: 112774
  derived and/or modified CDS sequence (opt2) from neuraminidase__InfluenzaA__ACV70947

SEQ ID NO: 113489 - RNA, 1410 nt, Artificial Sequence; identical to SEQ ID NO: 112774
  derived and/or modified CDS sequence (opt2) from neuraminidase__InfluenzaA__ACV70957

SEQ ID NO: 113490 - RNA, 1410 nt, Artificial Sequence; identical to SEQ ID NO: 112774
  derived and/or modified CDS sequence (opt2) from neuraminidase__InfluenzaA__ACV70967

SEQ ID NO: 113491 - RNA, 1410 nt, Artificial Sequence; identical to SEQ ID NO: 112774
  derived and/or modified CDS sequence (opt2) from neuraminidase__InfluenzaA__ACV70977

SEQ ID NO: 113492 - RNA, 1410 nt, Artificial Sequence; identical to SEQ ID NO: 112774
  derived and/or modified CDS sequence (opt2) from neuraminidase__InfluenzaA__ACV70987

SEQ ID NO: 113493 - RNA, 1410 nt, Artificial Sequence; identical to SEQ ID NO: 112774
  derived and/or modified CDS sequence (opt2) from neuraminidase__InfluenzaA__ACV71007

SEQ ID NO: 113494 - RNA, 1410 nt, Artificial Sequence; identical to SEQ ID NO: 112635
  derived and/or modified CDS sequence (opt2) from neuraminidase__InfluenzaA__ACV82218

SEQ ID NO: 113495 - RNA, 1410 nt, Artificial Sequence; identical to SEQ ID NO: 112635
  derived and/or modified CDS sequence (opt2) from neuraminidase__InfluenzaA__ACV82219

SEQ ID NO: 113496 - RNA, 1410 nt, Artificial Sequence
  derived and/or modified CDS sequence (opt2) from neuraminidase__InfluenzaA__ACV82220
augaaccccaaccagaagaucaucaccaucggcuccgucucccucaccaucuccaccaucugcuucuucaugcagcucgccauccucaucaccaccgucacccuccacuucaagcaguacgaguucaacuccccccccaacaaccaggucaugcucugcgagcccaccaucaucgagcgcaacaucaccgagaucgucuaccucaccaacaccaccaucgagaaggagaucugccccaagcucgccgaguaccgcaacugguccaagccccagugcgacaucaccggcuucgcccccuucuccaaggacaacuccauccgccucuccgccggcggcgacaucugggucacccgcgagcccuacgucuccugcgaccccgacaagugcuaccaguucgcccucggccagggcaccacccucaacaacguccacuccaacaacaccguccgcgaccgcacccccuaccgcacccuccucaugaacgagcucggcguccccuuccaccucggcaccaagcaggucugcaucgccugguccuccuacuccugccacgacggcaaggccuggcuccacgucugcaucaccggcgacgacaagaacgccaccgccuccuucaucuacaacggccgccucgucgacuccgucgucuccugguccaaggagauccuccgcacccaggaguccgagugcgucugcaucaacggcaccugcaccgucgucaugaccgacggcuccgccuccggcaaggccgacaccaagauccucuucaucgaggagggcaagaucguccacaccuccacccucuccggcuccgcccagcacgucgaggagugcuccugcuacccccgcuaccccggcguccgcugcgucugccgcgacaacuggaagggcuccaaccgccccaucgucgacaucaacaucaaggaccacuccaucgucuccuccuacgucugcuccggccucgucggcgacaccccccgcaagaacgacuccuccuccuccucccacugccucgaccccaacaacgaggagggcggccacggcgucaagggcugggccuucgacgacggcaacgacgucuggaugggccgcaccaucuccgagaagucccgccucggcuacgagaccuucaaggucaucgagggcugguccaaccccaaguccaagcuccagaucaaccgccaggucaucgucgaccgcggcaaccgcuccggcuacuccggcaucuucuccgucgagggcaaguccugcaucaaccgcugcuucuacgucgagcucauccgcggccgcaaggagaagaccgagguccucuggaccuccaacuccaucgucgucuucugcggcaccuccggcaccuacggcaccggcuccuggcccgacggcgccgacaucaaccucaugcccaucuga

SEQ ID NO: 113497 - RNA, 1413 nt, Artificial Sequence
  derived and/or modified CDS sequence (opt2) from neuraminidase__InfluenzaA__ACV82221
augaaccccaaccagaagaucaucaccaucggcuccaucuccaucgccaucggcaucaucucccucaugcuccagaucggcaacaucaucuccaucugggccucccacuccauccagaccggcucccagaacaacaccggcaucugcaaccagcgcaucaucaccuacgagaacuccaccugggucaaccacaccuacgucaacaucaacaacaccaacgucgucgccggcgaggacaagaccuccgucacccucgccggcaacuccucccucugcuccaucuccggcugggccaucuacaccaaggacaacuccauccgcaucggcuccaagggcgacgucuucgucauccgcgagcccuucaucuccugcucccaccucgagugccgcaccuucuuccucacccagggcgcccuccucaacgacaagcacuccaacggcaccgucaaggaccgcucccccuaccgcgcccucauguccugcccccucggcgaggcccccucccccuacaacuccaaguucgaguccgucgccugguccgccuccgccugccacgacggcaugggcuggcucaccaucggcaucuccggccccgacaacggcgccgucgccguccucaaguacaacggcaucaucaccggcaccaucaaguccuggaagaagcagauccuccgcacccaggaguccgagugcgucugcaugaacggcuccugcuucaccaucaugaccgacggccccuccaacaaggccgccuccuacaagaucuucaagaucgagaagggcaaggucaccaaguccaucgagcucaacgcccccaacuucuacuacgaggagugcuccugcuaccccgacaccggcaucgucaugugcgucugccgcgacaacuggcacggcuccaaccgccccugggucuccuucaaccagaaccucgacuaccagaucggcuacaucugcuccggcgucuucggcgacaacccccgccccgaggacggcgagggcuccugcaaccccgucaccgucgacggcgccaacggcgucaagggcuucuccuacaaguacggcaacggcgucuggaucggccgcaccaaguccaaccgccuccgcaagggcuucgagaugaucugggaccccaacggcuggaccaacaccgacuccgacuucuccgucaagcaggacgucgucgccaucaccgacugguccggcuacuccggcuccuucguccagcaccccgagcucaccggccucgacugcauccgccccugcuucugggucgagcucguccgcggccucccccgcgagaacaccaccaucuggaccuccggcuccuccaucuccuucugcggcgucaacuccgacaccgccaacugguccuggcccgacggcgccgagcuccccuucaccaucgacaaguga

SEQ ID NO: 113498 - RNA, 1410 nt, Artificial Sequence; identical to SEQ ID NO: 112774
  derived and/or modified CDS sequence (opt2) from neuraminidase__InfluenzaA__ACV88402

SEQ ID NO: 113499 - RNA, 1410 nt, Artificial Sequence; identical to SEQ ID NO: 112774
  derived and/or modified CDS sequence (opt2) from neuraminidase__InfluenzaA__ACV88412

SEQ ID NO: 113500 - RNA, 1410 nt, Artificial Sequence; identical to SEQ ID NO: 112764
  derived and/or modified CDS sequence (opt2) from neuraminidase__InfluenzaA__ACV88422

SEQ ID NO: 113501 - RNA, 1365 nt, Artificial Sequence
  derived and/or modified CDS sequence (opt2) from neuraminidase__InfluenzaA__ACV89505
augaaccccaaccagaagaucaucaccaucggcuccaucugccucgucgucggccucaucucccucauccuccagaucggcaacaucaucuccaucuggaucucccacuccauccagaccggcucccagaaccacaccggcaucugcaaccagaacaucaucaccuacaagaacuccaccugggucaaggacaccaccuccgucauccucaccggcaacuccucccucugccccauccgcggcugggccaucuacuccaaggacaacuccauccgcaucggcuccaagggcgacgucuucgucauccgcgagcccuucaucuccugcucccaccucgagugccgcaccuucuuccucacccagggcgcccuccucaacgacaagcacuccuccggcaccgucaaggaccgcucccccuaccgcgcccucauguccugccccgucggcgaggcccccucccccuacaacucccgcuucgaguccgucgccugguccgccuccgccugccacgacggcaugggcuggcucaccaucggcaucuccggccccgacaacggcgccgucgccguccucaaguacaacggcaucaucaccgagaccaucaaguccuggcgcaagaagauccuccgcacccaggaguccgagugcgccugcgucaacggcuccugcuucaccaucaugaccgacggccccuccgacggccucgccuccuacaagaucuucaagaucgagaagggcaaggucaccaaguccaucgagcucaacgcccccaacucccacuacgaggagugcuccugcuaccccgacaccggcaaggucaugugcgucugccgcgacaacuggcacggcuccaaccgccccugggucuccuucgaccagaaccucgacuaccagaucggcuacaucugcuccggcgucuucggcgacaacccccgccccgaggacggcaccggcuccugcggccccgucuacgucgacggcgccaacggcgucaagggcuucuccuaccgcuacggcaacggcgucuggaucggccgcaccaagucccacuccucccgccacggcuucgagaugaucugggaccccaacggcuggaccgagaccgacuccaaguucuccguccgccaggacgucgucgccaugaccgacugguccggcuacuccggcuccuucguccagcaccccgagcucaccggccucgacugcaugcgccccugcuucugggucgagcucauccgcggccgccccaaggagggcaccaucuggaccuccgccuccuccaucuccuucugcggcgucaacuccgacaccgucgacugguccuggcccgacggcgccgagcuccccuucuccaucgacaaguga

SEQ ID NO: 113502 - RNA, 1410 nt, Artificial Sequence; identical to SEQ ID NO: 112774
  derived and/or modified CDS sequence (opt2) from neuraminidase__InfluenzaA__ACV91673

SEQ ID NO: 113503 - RNA, 1410 nt, Artificial Sequence; identical to SEQ ID NO: 112774
  derived and/or modified CDS sequence (opt2) from neuraminidase__InfluenzaA__ACV91681

SEQ ID NO: 113504 - RNA, 1410 nt, Artificial Sequence
  derived and/or modified CDS sequence (opt2) from neuraminidase__InfluenzaA__ACX31593
augaaccccaaccagaagaucaucaccaucggcuccgucucccucaccaucuccaccaucugcuucuucaugcagaucgccauccucaucaccaccgucacccuccacuucaagcaguacgaguucaacuccccccccaacaaccagguccuccucugcgagcccgccaucaucgagcgcaacaucaccgagaucgucuaccucaccaacaccaccaucgagaaggagaucugccccaagcucgccgaguaccgcaacugguccaagccccagugcgacaucaccggcuucgcccccuucuccaaggacaacuccauccgccucuccgccggcggcgacaucugggucacccgcgagcccuacgucuccugcgaccccgacaagugcuaccaguucgcccucggccagggcaccacccucaacaacguccacuccaacaacaccguccgcgaccgcacccccuaccgcacccuccucaugaacgagcucggcguccccuuccaccucggcaccaagcaggucugcaucgccugguccuccuccuccugccacgacggcaaggccuggcuccacgucugcaucaccggcgacgacaagaacgccaccgccuccuucaucuacaacggccgccucgucgacuccgucgucuccugguccaaggagauccuccgcacccaggaguccgagugcgucugcaucaacggcaccugcaccgucgucaugaccgacggcuccgccuccggcaaggccgacaccaagauccucuucaucgaggagggcaagaucguccacaccuccacccucuccggcuccgcccagcacgucgaggagugcuccugcuacccccgcuaccccggcguccgcugcgucugccgcgacaacuggaagggcuccaaccgccccaucgucgacaucaacaucaaggaccacuccaucgucuccuccuacgucugcuccggccucgucggcgacaccccccgcaagaacgacuccuccuccuccucccacugccucgaccccaacaacgaggagggcggccacggcgucaagggcugggccuucgacgacggcaacgacgucuggaugggccgcaccaucuccgagaagucccgccucggcuacgagaccuucaaggucaucgagggcugguccaaccccaaguccaagcuccagaucaaccgccaggucaucgucgaccgcggcaaccgcuccggcuacuccggcaucuucuccgucgagggcaaguccugcaucaaccgcugcuucuacgucgagcucauccgcggccgcaaggaggagaccgagguccucuggaccuccaacuccaucgucgucuucugcggcaccuccggcaccuacggcaccggcuccuggcccgacggcgccgacaucaaccucaugcccaucuga

SEQ ID NO: 113505 - RNA, 1410 nt, Artificial Sequence; identical to SEQ ID NO: 112774
  derived and/or modified CDS sequence (opt2) from neuraminidase__InfluenzaA__ACX31901

SEQ ID NO: 113506 - RNA, 1410 nt, Artificial Sequence; identical to SEQ ID NO: 112774
  derived and/or modified CDS sequence (opt2) from neuraminidase__InfluenzaA__ACX31902

SEQ ID NO: 113507 - RNA, 1410 nt, Artificial Sequence; identical to SEQ ID NO: 112774
  derived and/or modified CDS sequence (opt2) from neuraminidase__InfluenzaA__ACX31905

SEQ ID NO: 113508 - RNA, 1410 nt, Artificial Sequence; identical to SEQ ID NO: 112774
  derived and/or modified CDS sequence (opt2) from neuraminidase__InfluenzaA__ACX31906

SEQ ID NO: 113509 - RNA, 1410 nt, Artificial Sequence; identical to SEQ ID NO: 112774
  derived and/or modified CDS sequence (opt2) from neuraminidase__InfluenzaA__ACX31907

SEQ ID NO: 113510 - RNA, 1410 nt, Artificial Sequence; identical to SEQ ID NO: 112774
  derived and/or modified CDS sequence (opt2) from neuraminidase__InfluenzaA__ACX31908

SEQ ID NO: 113511 - RNA, 1410 nt, Artificial Sequence; identical to SEQ ID NO: 112929
  derived and/or modified CDS sequence (opt2) from neuraminidase__InfluenzaA__ACX31909

SEQ ID NO: 113512 - RNA, 1410 nt, Artificial Sequence; identical to SEQ ID NO: 112774
  derived and/or modified CDS sequence (opt2) from neuraminidase__InfluenzaA__ACX31911

SEQ ID NO: 113513 - RNA, 1410 nt, Artificial Sequence; identical to SEQ ID NO: 112774
  derived and/or modified CDS sequence (opt2) from neuraminidase__InfluenzaA__ACX31912

SEQ ID NO: 113514 - RNA, 1410 nt, Artificial Sequence; identical to SEQ ID NO: 112774
  derived and/or modified CDS sequence (opt2) from neuraminidase__InfluenzaA__ACX31913

SEQ ID NO: 113515 - RNA, 1410 nt, Artificial Sequence; identical to SEQ ID NO: 112774
  derived and/or modified CDS sequence (opt2) from neuraminidase__InfluenzaA__ACX31914

SEQ ID NO: 113516 - RNA, 1410 nt, Artificial Sequence; identical to SEQ ID NO: 112774
  derived and/or modified CDS sequence (opt2) from neuraminidase__InfluenzaA__ACX31915

SEQ ID NO: 113517 - RNA, 1410 nt, Artificial Sequence; identical to SEQ ID NO: 112774
  derived and/or modified CDS sequence (opt2) from neuraminidase__InfluenzaA__ACX31916

SEQ ID NO: 113518 - RNA, 1410 nt, Artificial Sequence
  derived and/or modified CDS sequence (opt2) from neuraminidase__InfluenzaA__ACX31917
augaaccccaaccagaagaucaucaccaucggcuccgucugcaugaccaucggcauggccaaccucauccuccagaucggcaacaucaucuccaucuggaucucccacuccauccagcucggcaaccagaaccagaucgagaccugcaaccaguccgucaucaccuacgagaacaacaccugggucaaccagaccuacgucaacaucuccaacaccaacuucgccgccggccaguccgucgucuccgucaagcucgccggcaacuccucccucugccccgucuccggcugggccaucuacuccaaggacaacuccauccgcaucggcuccaagggcgacgucuucgucauccgcgagcccuucaucuccugcuccccccucgagugccgcaccuucuuccucacccagggcgcccuccucaacgacaagcacuccaacggcaccaucaccgaccgcucccccuaccgcacccucauguccugccccaucggcgagguccccucccccuacaacucccgcuucgaguccgucgccugguccgccuccgccugccacgacggcaucaacuggcucaccaucggcaucuccggccccgacaacggcgccgucgccguccucaaguacaacggcaucaucaccgacaccaucaaguccuggcgcaacaacauccuccgcacccaggaguccgagugcgccugcgucaacggcuccugcuucaccgucaugaccgacggccccuccgacggccaggccuccuacaagaucuuccgcaucgagaagggcaagaucgucaaguccgucgagaugaacgcccccaacuaccacuacgaggagugcuccugcuaccccgacuccuccgagaucaccugcgucugccgcgacaacuggcacggcuccaaccgccccugggucuccuucaaccagaaccucgaguaccagaucggcuacaucugcuccggcaucuucggcgacaacccccgccccaacgacaagaccggcuccugcggccccgucuccuccaacggcgccaacggcgucaagggcuucuccuucaaguacggcaacggcgucuggaucggccgcaccaaguccaucuccucccgcaacggcuucgagaugaucugggaccccaacggcuggaccggcaccgacaacaacuucuccaucaagcaggacaucgucggcaucaacgagugguccggcuacuccggcuccuucguccagcaccccgagcucaccggccucgacugcauccgccccugcuucugggucgagcucauccgcggccgccccaaggagaacaccaucuggaccuccggcuccuccaucuccuucugcggcgucaacuccgacaccgucggcugguccuggcccgacggcgccgagcuccccuucaccaucgacaaguga

SEQ ID NO: 113519 - RNA, 1410 nt, Artificial Sequence; identical to SEQ ID NO: 112774
  derived and/or modified CDS sequence (opt2) from neuraminidase__InfluenzaA__ACX31918

SEQ ID NO: 113520 - RNA, 1410 nt, Artificial Sequence; identical to SEQ ID NO: 112774
  derived and/or modified CDS sequence (opt2) from neuraminidase__InfluenzaA__ACX31919

SEQ ID NO: 113521 - RNA, 1410 nt, Artificial Sequence; identical to SEQ ID NO: 112774
  derived and/or modified CDS sequence (opt2) from neuraminidase__InfluenzaA__ACX31920

SEQ ID NO: 113522 - RNA, 1410 nt, Artificial Sequence; identical to SEQ ID NO: 113128
  derived and/or modified CDS sequence (opt2) from neuraminidase__InfluenzaA__ACX31922

SEQ ID NO: 113523 - RNA, 1410 nt, Artificial Sequence; identical to SEQ ID NO: 112774
  derived and/or modified CDS sequence (opt2) from neuraminidase__InfluenzaA__ACX31923

SEQ ID NO: 113524 - RNA, 1410 nt, Artificial Sequence; identical to SEQ ID NO: 112764
  derived and/or modified CDS sequence (opt2) from neuraminidase__InfluenzaA__ACX31924

SEQ ID NO: 113525 - RNA, 1410 nt, Artificial Sequence
  derived and/or modified CDS sequence (opt2) from neuraminidase__InfluenzaA__ACX31925
augaaccccaaccagaagaucaucaccaucggcuccgucugcaugaccaucggcauggccaaccucauccuccagaucggcaacaucaucuccaucuggaucucccacuccauccagcucggcaaccagaaccagaucgagaccugcaaccaguccgucaucaccuacgagaacaacaccugggucaaccagaccuacgucaacaucuccaacaccaacuucgccgccggccaguccgucgucuccgucaagcucgccggcaacuccucccucugccccgucuccggcugggccaucuacuccaaggacaacuccauccgcaucggcuccaagggcgacgucuucgucauccgcgagcccuucaucuccugcuccccccucgagugccgcaccuucuuccucacccagggcgcccuccucaacgacaagcacuccaacggcaccaucaaggaccgcucccccuaccgcacccucauguccugccccaucggcgagguccccucccccuacaacucccgcuucgaguccgucgccugguccgccuccgccugccacgacggcaucaacuggcucaccaucggcaucuccggccccgacaacggcgccgucgccguccucaaguacaacggcaucaucaccgacaccaucaaguccuggcgcaacaacauccuccgcacccaggaguccgagugcgccugcgucaacggcuccugcuucacccucaugaccgacggccccuccgacggccaggccuccuacaagaucuuccgcaucgagaagggcaagaucgucaaguccgucgagaugaacgcccccaacuaccacuacgaggagugcuccugcuaccccgacuccuccgagaucaccugcgucugccgcgacaacuggcacggcuccaaccgccccugggucuccuucaaccagaaccucgaguaccagaucggcuacaucugcuccggcaucuucggcgacaacccccgccccaacgacaagaccggcuccugcggccccgucuccuccaacggcgccaacggcgucaagggcuucuccuucaaguacggcaacggcgucuggaucggccgcaccaaguccaucuccucccgcaacggcuucgagaugaucugggaccccaacggcuggaccggcaccgacaacaacuucuccaucaagcaggacaucgucggcaucaacgagugguccggcuacuccggcuccuucguccagcaccccgagcucaccggccucgacugcauccgccccugcuucugggucgagcucauccgcggccgccccaaggagaacaccaucuggaccuccggcuccuccaucuccuucugcggcgucaacuccgacaccgucggcugguccuggcccgacggcgccgagcuccccuucaucaucgacaaguga

SEQ ID NO: 113526 - RNA, 1410 nt, Artificial Sequence; identical to SEQ ID NO: 112774
  derived and/or modified CDS sequence (opt2) from neuraminidase__InfluenzaA__ACX31926

SEQ ID NO: 113527 - RNA, 1410 nt, Artificial Sequence; identical to SEQ ID NO: 112774
  derived and/or modified CDS sequence (opt2) from neuraminidase__InfluenzaA__ACX31927

SEQ ID NO: 113528 - RNA, 1410 nt, Artificial Sequence
  derived and/or modified CDS sequence (opt2) from neuraminidase__InfluenzaA__ACX31928
augaaccccaaccagaagaucaucaccaucggcuccgucugcaugaccaucggcauggccaaccucauccuccagaucggcaacaucaucuccaucuggaucucccacuccauccagcucggcaaccagaaccagaucgagaccugcaaccaguccgucaucaccuacgagaacaacaccugggucaaccagaccuacgucaacaucuccaacaccaacuucgccgccggccaguccgucgucuccgucaagcucgccggcaacuccucccucugccccgucuccggcugggccaucuacuccaaggacaacuccauccgcaucggcuccaagggcgacgucuucgucauccgcgagcccuucaucuccugcuccccccucgagugccgcaccuucuuccucacccagggcgcccuccucaacgacaagcacuccaacggcaccaucaaggaccgcucccccuaccgcacccucauguccugccccaucggcgagguccccucccccuacaacucccgcuucgaguccgucgccugguccgccuccgccugccacgacggcaucaacuggcucaccaucggcaucuccggccccgacaacggcgccgucgccguccucaaguacaacggcaucaucaccgacaccaucaaguccuggcgcaacaacauccuccgcacccaggaguccgagugcgccugcgucaacggcuccugcuucaccgucaugaccgacggccccuccgacggccaggccuccuacaagaucuuccgcaucgagaagggcaagaucgucaaguccgucgagaugaacgcccccaacuaccacuacgaggagugcuccugcuaccccgacuccuccgagaucaccugcgucugccgcgacaacuggcacggcuccaaccgccccugggucuccuucaaccagaaccucgaguaccagaucggcuacaucugcuccggcaucuucggcgacaacccccgccccaacgacaagaccggcuccugcggccccgucuccuccaacggcgagaacggcgucaagggcuucuccuucaaguacggcaacggcgucuggaucggccgcaccaaguccaucuccucccgcaacggcuucgagaugaucugggaccccaacggcuggaccggcaccgacaacaacuucuccaucaagcaggacaucgucggcaucaacgagugguccggcuacuccggcuccuucguccagcaccccgagcucaccggccucgacugcauccgccccugcuucugggucgagcucauccgcggccgccccaaggagaacaccaucuggaccuccggcuccuccaucuccuucugcggcgucaacggcgacaccgucggcugguccuggcccgacggcgccgagcuccccuucaccaucgacaaguga

SEQ ID NO: 113529 - RNA, 1410 nt, Artificial Sequence; identical to SEQ ID NO: 112804
  derived and/or modified CDS sequence (opt2) from neuraminidase__InfluenzaA__ACX31929

SEQ ID NO: 113530 - RNA, 1410 nt, Artificial Sequence; identical to SEQ ID NO: 113128
  derived and/or modified CDS sequence (opt2) from neuraminidase__InfluenzaA__ACX31930

SEQ ID NO: 113531 - RNA, 1410 nt, Artificial Sequence; identical to SEQ ID NO: 112774
  derived and/or modified CDS sequence (opt2) from neuraminidase__InfluenzaA__ACX31931

SEQ ID NO: 113532 - RNA, 1410 nt, Artificial Sequence; identical to SEQ ID NO: 112774
  derived and/or modified CDS sequence (opt2) from neuraminidase__InfluenzaA__ACX31932

SEQ ID NO: 113533 - RNA, 1410 nt, Artificial Sequence; identical to SEQ ID NO: 112774
  derived and/or modified CDS sequence (opt2) from neuraminidase__InfluenzaA__ACX35250

SEQ ID NO: 113534 - RNA, 1410 nt, Artificial Sequence; identical to SEQ ID NO: 112774
  derived and/or modified CDS sequence (opt2) from neuraminidase__InfluenzaA__ACX35260

SEQ ID NO: 113535 - RNA, 1410 nt, Artificial Sequence; identical to SEQ ID NO: 112774
  derived and/or modified CDS sequence (opt2) from neuraminidase__InfluenzaA__ACX35270

SEQ ID NO: 113536 - RNA, 1410 nt, Artificial Sequence
  derived and/or modified CDS sequence (opt2) from neuraminidase__InfluenzaA__ACX35280
augaaccccaaccagaagaucaucaccaucggcuccgucugcaugaccaucggcauggccaaccucauccuccagaucggcaacaucaucuccaucuggaucucccacuccauccagcucggcaaccagaaccagaucgagaccugcaaccaguccgucaucaccuacgagaacaacaccugggucaaccagaccuacgucaacaucuccaacaccaacuucgccgccggccaguccgucgucuccgucaagcucgccggcaacuccucccucugccccgucuccggcugggccaucuacuccaaggacaacuccauccgcaucggcuccaagggcgacgucuucgucauccgcgagcccuucaucuccugcuccccccucgagugccgcaccuucuuccucacccagggcgcccuccucaacgacaagcacuccaacggcaccaucaaggaccgcucccccuaccgcacccucauguccugccccaucggcgagguccccucccccuacaacucccgcuucgaguccgucgccugguccgccuccgccugccacgacggcaucaacuggcucaccaucggcaucuccggccccgacaacggcgccgucgccguccucaaguacaacggcaucaucaccgacaccaucaaguccuggcgcaacaacauccuccgcacccaggaguccgagugcgccugcgucaacggcuccugcuucaccgucaugaccgacggccccuccgacggccaggccuccuacaagaucuuccgcaucgagaagggcaagaucgucaaguccgucgacaugaacgcccccaacuaccacuacgaggagugcuccugcuaccccgacuccuccgagaucaccugcgucugccgcgacaacuggcacggcuccaaccgccccugggucuccuucaaccagaaccucgaguaccagaucggcuacaucugcuccggcaucuucggcgacaacccccgccccaacgacaagaccggcuccugcggccccgucuccuccaacggcgccaacggcgucaagggcuucuccuucaaguacggcaacggcgucuggaucggccgcaccaaguccaucuccucccgcaacggcuucgagaugaucugggaccccaacggcuggaccggcaccgacaacaacuucuccaucaagcaggacaucgucggcaucaacgagugguccggcuacuccggcuccuucguccagcaccccgagcucaccggccucgacugcauccgccccugcuucugggucgagcucauccgcggccgccccaaggagaacaccaucuggaccuccggcuccuccaucuccuucugcggcgucaacuccgacaccgucggcugguccuggcccgacggcgccgagcuccccuucaccaucgacaaguga

SEQ ID NO: 113537 - RNA, 1410 nt, Artificial Sequence; identical to SEQ ID NO: 112774
  derived and/or modified CDS sequence (opt2) from neuraminidase__InfluenzaA__ACX35290

SEQ ID NO: 113538 - RNA, 1410 nt, Artificial Sequence; identical to SEQ ID NO: 112774
  derived and/or modified CDS sequence (opt2) from neuraminidase__InfluenzaA__ACX35300

SEQ ID NO: 113539 - RNA, 1410 nt, Artificial Sequence
  derived and/or modified CDS sequence (opt2) from neuraminidase__InfluenzaA__ACX35310
augaaccccaaccagaagaucaucaccaucggcuccgucugcaugaccaucggcauggccaaccucauccuccagaucggcaacaucaucuccaucuggaucucccacuccauccagcucggcaaccagaaccagaucggcaccugcaaccaguccgucaucaccuacgagaacaacaccugggucaaccagaccuacgucaacaucuccaacaccaacuucgccgccggccaguccgucgucuccgucaagcucgccggcaacuccucccucugccccgucuccggcugggccaucuacuccaaggacaacuccauccgcaucggcuccaagggcgacgucuucgucauccgcgagcccuucaucuccugcuccccccucgagugccgcaccuucuuccucacccagggcgcccuccucaacgacaagcacuccaacggcaccaucaaggaccgcucccccuaccgcacccucauguccugccccaucggcgagguccccucccccuacaacucccgcuucgaguccgucgccugguccgccuccgccugccacgacggcaucaacuggcucaccaucggcaucuccggccccgacaacggcgccgucgccguccucaaguacaacggcaucaucaccgacaccaucaaguccuggcgcaacaacauccuccgcacccaggaguccgagugcgccugcgucaacggcuccugcuucaccgucaugaccgacggccccuccgacggccaggccuccuacaagaucuuccgcaucgagaagggcaagaucgucaaguccgucgagaugaacgcccccaacuaccacuacgaggagugcuccugcuaccccgacuccuccgagaucaccugcgucugccgcgacaacuggcacggcuccaaccgccccugggucuccuucaaccagaaccucgaguaccagaucggcuacaucugcuccggcaucuucggcgacaacccccgccccaacgacaagaccggcuccugcggccccgucuccuccaacggcgccaacggcgucaagggcuucuccuucaaguacggcaacggcgucuggaucggccgcaccaaguccaucuccucccgcaacggcuucgagaugaucugggaccccaacggcuggaccggcaccgacaacaacuucuccaucaagcaggacaucgucggcaucaacgagugguccggcuacuccggcuccuucguccagcaccccgagcucaccggccucgacugcauccgccccugcuucugggucgagcucauccgcggccgccccaaggagaacaccaucuggaccuccggcuccuccaucuccuucugcggcgucaacuccgacaccgucggcugguccuggcccgacggcgccgagcuccccuucaccaucgacaaguga

SEQ ID NO: 113540 - RNA, 1410 nt, Artificial Sequence; identical to SEQ ID NO: 112774
  derived and/or modified CDS sequence (opt2) from neuraminidase__InfluenzaA__ACX35320

SEQ ID NO: 113541 - RNA, 1410 nt, Artificial Sequence
  derived and/or modified CDS sequence (opt2) from neuraminidase__InfluenzaA__ACX35330
augaaccccaaccagaagaucaucaccaucggcuccgucugcaucaccaucggcauggccaaccucauccuccagaucggcaacaucaucuccaucuggaucucccacuccauccagcucggcaaccagaaccagaucgagaccugcaaccaguccgucaucaccuacgagaacaacaccugggucaaccagaccuacgucaacaucuccaacaccaacuucgccgccggccaguccgucgucuccgucaagcucgccggcaacuccucccucugccccgucuccggcugggccaucuacuccaaggacaacuccauccgcaucggcuccaagggcgacgucuucgucauccgcgagcccuucaucuccugcuccccccucgagugccgcaccuucuuccucacccagggcgcccuccucaacgacaagcacuccaacggcaccaucaaggaccgcucccccuaccgcacccucauguccugccccaucggcgagguccccucccccuacaacucccgcuucgaguccgucgccugguccgccuccgccugccacgacggcaucaacuggcucaccaucggcaucuccggccccgacaacggcgccgucgccguccucaaguacaacggcaucaucaccgacaccaucaaguccuggcgcaacaacauccuccgcacccaggaguccgagugcgccugcgucaacggcuccugcuucaccgucaugaccgacggccccuccgacggccaggccuccuacaagaucuuccgcaucgagaagggcaagaucgucaaguccgucgagaugaacgcccccaacuaccacuacgaggagugcuccugcuaccccgacuccuccgagaucaccugcgucugccgcgacaacuggcacggcuccaaccgccccugggucuccuucaaccagaaccucgaguaccagaucggcuacaucugcuccggcaucuucggcgacaacccccgccccaacgacaagaccggcuccugcggccccgucuccuccaacggcgccaacggcgucaagggcuucuccuucaaguacggcaacggcgucuggaucggccgcaccaaguccaucuccucccgcaacggcuucgagaugaucugggaccccaacggcuggaccggcaccgacaacaacuucuccaucaagcaggacaucgucggcaucaacgagugguccggcuacuccggcuccuucguccagcaccccgagcucaccggccucgacugcauccgccccugcuucugggucgagcucauccgcggccgccccaaggagaacaccaucuggaccuccggcuccuccaucuccuucugcggcgucaacuccgacaccgucggcugguccuggcccgacggcgccgagcuccccuucaccaucgacaaguga

SEQ ID NO: 113542 - RNA, 1410 nt, Artificial Sequence; identical to SEQ ID NO: 112774
  derived and/or modified CDS sequence (opt2) from neuraminidase__InfluenzaA__ACX48479

SEQ ID NO: 113543 - RNA, 1410 nt, Artificial Sequence; identical to SEQ ID NO: 112774
  derived and/or modified CDS sequence (opt2) from neuraminidase__InfluenzaA__ACX48481

SEQ ID NO: 113544 - RNA, 1410 nt, Artificial Sequence; identical to SEQ ID NO: 112774
  derived and/or modified CDS sequence (opt2) from neuraminidase__InfluenzaA__ACX55836

SEQ ID NO: 113545 - RNA, 1410 nt, Artificial Sequence
  derived and/or modified CDS sequence (opt2) from neuraminidase__InfluenzaA__ACX56269
augaaccccaagcagaagaucaucaccaucggcuccgucugcaugaccaucggcauggccaaccucauccuccagaucggcaacaucaucuccaucuggaucucccacuccauccagcucggcaaccagaaccagaucgagaccugcaaccaguccgucaucaccuacgagaacaacaccugggucaaccagaccuacgucaacaucuccaacaccaacuucgccgccggccaguccgucgucuccgucaagcucgccggcaacuccucccucugccccgucuccggcugggccaucuacuccaaggacaacuccauccgcaucggcuccaagggcgacgucuucgucauccgcgagcccuucaucuccugcuccccccucgagugccgcaccuucuuccucacccagggcgcccuccucaacgacaagcacuccaacggcaccaucaaggaccgcucccccuaccgcacccucauguccugccccaucggcgagguccccucccccuacaacucccgcuucgaguccgucgccugguccgccuccgccugccacgacggcaucaacuggcucaccaucggcaucuccggccccgacaacggcgccgucgccguccucaaguacaacggcaucaucaccgacaccaucaaguccuggcgcaacaacauccuccgcacccaggaguccgagugcgccugcgucaacggcuccugcuucaccgucaugaccgacggccccuccgacggccaggccuccuacaagaucuuccgcaucgagaagggcaagaucgucaaguccgucgagaugaacgcccccaacuaccacuacgaggagugcuccugcuaccccgacuccuccgagaucaccugcgucugccgcgacaacuggcacggcuccaaccgccccugggucuccuucaaccagaaccucgaguaccagaucggcuacaucugcuccggcaucuucggcgacaacccccgccccaacgacaagaccggcuccugcggccccgucuccuccaacggcgccaacggcgucaagggcuucuccuucaaguacggcaacggcgucuggaucggccgcaccaaguccaucuccucccgcaacggcuucgagaugaucugggaccccaacggcuggaccggcaccgacaacaacuucuccaucaagcaggacaucgucggcaucaacgagugguccggcuacuccggcuccuucguccagcaccccgagcucaccggccucgacugcauccgccccugcuucugggucgagcucauccgcggccgccccaaggagaacaccaucuggaccuccggcuccuccaucuccuucugcggcgucaacuccgacaccgucggcugguccuggcccgacggcgccgagcuccccuucaccaucgacaaguga

SEQ ID NO: 113546 - RNA, 1410 nt, Artificial Sequence
  derived and/or modified CDS sequence (opt2) from neuraminidase__InfluenzaA__ACX56270
augaaccccaagcagaagaucaucaccaucggcuccgucugcaugaccaucggcauggccaaccucauccuccagaucggcaacaucaucuccaucuggaucucccacuccauccagcucggcaaccagaaccagaucgagaccugcaaccaguccgucaucaccuacgagaacaacaccugggucaaccagaccuacgucaacaucuccaacaccaacuucgccgccggccaguccgucgucuccgucaagcucgccggcaacuccucccucugccccgucuccggcugggccaucuacuccaaggacaacuccauccgcaucggcuccaagggcgacgucuucgucauccgcgagcccuucaucuccugcuccccccucgagugccgcaccuucuuccucacccagggcgcccuccucaacgacaagcacuccaacggcaccaucaaggaccgcucccccuaccgcacccucauguccugccccaucggcgagguccccucccccuacaacucccgcuucgaguccgucgccugguccgccuccgccugccacgacggcaucaacuggcucaccaucggcaucuccggccccgacaacggcgccgucgccguccucaaguacaacggcaucaucaccgacaccaucaaguccuggcgcaacaacauccuccgcacccaggaguccgagugcgccugcgucaacggcuccugcuucaccgucaugaccgacggccccuccgacggccaggccuccuacaagaucuuccgcaucgagaagggcaagaucgucaaguccgucgagaugaacgcccccaacuaccacuacgaggagugcuccugcuaccccgacuccuccgagaucaccugcgucugccgcgacaacuggcacggcuccaaccgccccugggucuccuucaaccagaaccucgaguaccagaucggcuacaucugcuccggcaucuucggcgacaacccccgccccaacgacaagaccggcuccugcggccccgucuccuccaacggcgccaacggcgucaagggcuucuccuucaaguacggcaacggcgucuggaucggccgcaccaaguccaucuccucccgcaacggcuucgagaugaucugggaccccaacggcuggaccggcaccgacaacaacuucuccaucaagcaggacaucgucggcaucaacgagugguccggcuacuccggcuccuucguccagcaccccgagcucaccggccucgacugcauccgccccugcuucugggucgagcucauccgcggccgccccaaggagaacaccaucuggaccuccggcuccuccaucuccuucugcggcgucaacuccgacuccgucuccugguccuggcccgacggcgccgagcuccccuucaccaucgacaaguga

SEQ ID NO: 113547 - RNA, 1410 nt, Artificial Sequence
  derived and/or modified CDS sequence (opt2) from neuraminidase__InfluenzaA__ACX56271
augaaccccaagcagaagaucaucaccaucggcuccgucugcaugaccaucggcauggccaaccucauccuccagaucggcaacaucaucuccaucuggaucucccacuccauccagcucggcaaccagaaccagaucgagaccugcaaccaguccgucaucaccuacgagaacaacaccugggucaaccagaccuacgucaacaucuccaacaccaaccucgccgccggccaguccgucggcuccgucaagcucgccggcaacuccucccucugccccgucuccggcugggccaucuacuccaaggacaacuccauccgcaucggcuccaagggcgacgucuucgucauccgcgagcccuucaucuccugcuccccccucgagugccgcaccuucuuccucacccagggcgcccuccucaacgacaagcacuccaacggcaccaucaaggaccgcucccccuaccgcacccucauguccugccccaucggcgagguccccucccccuacaacucccgcuucgaguccgucgccugguccgccuccgccugccacgacggcaucaacuggcucaccaucggcaucuccggccccgacaacggcgccgucgccguccucaaguacaacggcaucaucaccgacaccaucaaguccuggcgcaacaacauccuccgcacccaggaguccgagugcgccugcgucaacggcuccugcuucaccgucaugaccgacggccccuccgacggccaggccuccuacaagaucuuccgcaucgagaagggcaagaucgucaaguccgucgagaugaacgcccccaacuaccacuacgaggagugcuccugcuaccccgacuccuccgagaucaccugcgucugccgcgacaacuggcacggcuccaaccgccccugggucuccuucaaccagaaccucgaguaccagaucggcuacaucugcuccggcaucuucggcgacaacccccgccccaacgacaagaccggcuccugcggccccgucuccuccaacggcgccaacggcgucaagggcuucuccuucaaguacggcaacggcgucuggaucggccgcaccaaguccaucuccucccgcaacggcuucgagaugaucugggaccccaacggcuggaccggcaccgacaacaacuucuccaucaagcaggacaucgucggcaucaacgagugguccggcuacuccggcuccuucguccagcaccccgagcucaccggccucgacugcauccgccccugcuucugggucgagcucauccgcggccgccccaaggagaacaccaucuggaccuccggcuccuccaucuccuucugcggcgucaacuccgacaccgucggcugguccuggcccgacggcgccgagcuccccuucaccaucgacaaguga

SEQ ID NO: 113548 - RNA, 1410 nt, Artificial Sequence; identical to SEQ ID NO: 112774
  derived and/or modified CDS sequence (opt2) from neuraminidase__InfluenzaA__ACX83579

SEQ ID NO: 113549 - RNA, 1410 nt, Artificial Sequence; identical to SEQ ID NO: 112774
  derived and/or modified CDS sequence (opt2) from neuraminidase__InfluenzaA__ACX85425

SEQ ID NO: 113550 - RNA, 1410 nt, Artificial Sequence; identical to SEQ ID NO: 112774
  derived and/or modified CDS sequence (opt2) from neuraminidase__InfluenzaA__ACX85426

SEQ ID NO: 113551 - RNA, 1410 nt, Artificial Sequence
  derived and/or modified CDS sequence (opt2) from neuraminidase__InfluenzaA__ACY02998
augaaccccaaccagaagaucaucaccaucggcuccgucugcaugaccaucggcauggccaaccucauccuccagaucggcaacaucaucuccaucuggaucucccacuccauccagcucggcaaccagaaccagaucgagaccugcaaccaguccgucaucaccuacgagaacaacaccugggucaaccagaccuacgucaacaucuccaacaccaacuucgccgccggccaguccgucgucuccgucaagcucgccggcaacuccucccucugccccgucuccggcugggccaucuacuccaaggacaacuccauccgcaucggcuccaagggcgacgucuucgucauccgcgagcccuucaucuccugcuccccccucgagugccgcaccuucuuccucacccagggcgcccuccucaacgacaagcacuccaacggcaccaucaaggaccgcucccccuaccgcacccucauguccugccccaucggcgagguccccucccccuacaacucccgcuucgaguccgucgccugguccgccuccgccugccacgacggcaucaacuggcucaccaucggcaucuccggccccgacaacggcgccgucgccguccucaaguacaacggcaucaucaccgacaccaucaaguccuggcgcaacaacauccuccgcacccaggaguccgagugcgccugcgucaacggcuccugcuucaccgucaugaccgacggccccuccaacggccaggccuccuacaagaucuuccgcaucgagaagggcaagaucgucaaguccgucgagaugaacgcccccaacuaccacuacgaggagugcuccugcuaccccgacuccggcgagaucaccugcgucugccgcgacaacuggcacggcuccaaccgccccugggucuccuucaaccagaaccucgaguaccagaucggcuacaucugcuccggcaucuucggcgacaacccccgccccaacgacaagaccggcuccugcggccccgucuccuccaacggcgccaacggcgucaagggcuucuccuucaaguacggcaacggcgucuggaucggccgcaccaaguccaucuccucccgcaacggcuucgagaugaucugggaccccaacggcuggaccggcaccgacaacaacuucuccaucaagcaggacaucgucggcaucaacgagugguccggcuacuccggcuccuucguccagcaccccgagcucaccggccucgacugcauccgccccugcuucugggucgagcucauccgcggccgccccaaggagaacaccaucuggaccuccggcuccuccaucuccuucugcggcgucaacuccgacaccgucggcugguccuggcccgacggcgccgagcuccccuucaccaucgacaaguga

SEQ ID NO: 113552 - RNA, 1410 nt, Artificial Sequence; identical to SEQ ID NO: 112774
  derived and/or modified CDS sequence (opt2) from neuraminidase__InfluenzaA__ACY03005

SEQ ID NO: 113553 - RNA, 1410 nt, Artificial Sequence; identical to SEQ ID NO: 112774
  derived and/or modified CDS sequence (opt2) from neuraminidase__InfluenzaA__ACY03008

SEQ ID NO: 113554 - RNA, 1410 nt, Artificial Sequence; identical to SEQ ID NO: 112774
  derived and/or modified CDS sequence (opt2) from neuraminidase__InfluenzaA__ACY03011

SEQ ID NO: 113555 - RNA, 1410 nt, Artificial Sequence; identical to SEQ ID NO: 112774
  derived and/or modified CDS sequence (opt2) from neuraminidase__InfluenzaA__ACY03012

SEQ ID NO: 113556 - RNA, 1410 nt, Artificial Sequence; identical to SEQ ID NO: 112774
  derived and/or modified CDS sequence (opt2) from neuraminidase__InfluenzaA__ACY03016

SEQ ID NO: 113557 - RNA, 1410 nt, Artificial Sequence; identical to SEQ ID NO: 112774
  derived and/or modified CDS sequence (opt2) from neuraminidase__InfluenzaA__ACY26194

SEQ ID NO: 113558 - RNA, 1410 nt, Artificial Sequence; identical to SEQ ID NO: 112774
  derived and/or modified CDS sequence (opt2) from neuraminidase__InfluenzaA__ACY26204

SEQ ID NO: 113559 - RNA, 1410 nt, Artificial Sequence; identical to SEQ ID NO: 112774
  derived and/or modified CDS sequence (opt2) from neuraminidase__InfluenzaA__ACY30123

SEQ ID NO: 113560 - RNA, 1410 nt, Artificial Sequence; identical to SEQ ID NO: 112774
  derived and/or modified CDS sequence (opt2) from neuraminidase__InfluenzaA__ACY30124

SEQ ID NO: 113561 - RNA, 1410 nt, Artificial Sequence; identical to SEQ ID NO: 112774
  derived and/or modified CDS sequence (opt2) from neuraminidase__InfluenzaA__ACY30125

SEQ ID NO: 113562 - RNA, 1410 nt, Artificial Sequence; identical to SEQ ID NO: 112774
  derived and/or modified CDS sequence (opt2) from neuraminidase__InfluenzaA__ACY30127

SEQ ID NO: 113563 - RNA, 1410 nt, Artificial Sequence; identical to SEQ ID NO: 112774
  derived and/or modified CDS sequence (opt2) from neuraminidase__InfluenzaA__ACY30128

SEQ ID NO: 113564 - RNA, 1410 nt, Artificial Sequence; identical to SEQ ID NO: 112774
  derived and/or modified CDS sequence (opt2) from neuraminidase__InfluenzaA__ACY46105

SEQ ID NO: 113565 - RNA, 1410 nt, Artificial Sequence; identical to SEQ ID NO: 112774
  derived and/or modified CDS sequence (opt2) from neuraminidase__InfluenzaA__ACY46165

SEQ ID NO: 113566 - RNA, 1410 nt, Artificial Sequence; identical to SEQ ID NO: 112774
  derived and/or modified CDS sequence (opt2) from neuraminidase__InfluenzaA__ACY46175

SEQ ID NO: 113567 - RNA, 1410 nt, Artificial Sequence; identical to SEQ ID NO: 112774
  derived and/or modified CDS sequence (opt2) from neuraminidase__InfluenzaA__ACY46345

SEQ ID NO: 113568 - RNA, 1410 nt, Artificial Sequence; identical to SEQ ID NO: 112774
  derived and/or modified CDS sequence (opt2) from neuraminidase__InfluenzaA__ACY46385

SEQ ID NO: 113569 - RNA, 1410 nt, Artificial Sequence; identical to SEQ ID NO: 112774
  derived and/or modified CDS sequence (opt2) from neuraminidase__InfluenzaA__ACY46485

SEQ ID NO: 113570 - RNA, 1410 nt, Artificial Sequence; identical to SEQ ID NO: 112804
  derived and/or modified CDS sequence (opt2) from neuraminidase__InfluenzaA__ACY77536

SEQ ID NO: 113571 - RNA, 1410 nt, Artificial Sequence; identical to SEQ ID NO: 112764
  derived and/or modified CDS sequence (opt2) from neuraminidase__InfluenzaA__ACY77546

SEQ ID NO: 113572 - RNA, 1410 nt, Artificial Sequence; identical to SEQ ID NO: 112804
  derived and/or modified CDS sequence (opt2) from neuraminidase__InfluenzaA__ACY77565

SEQ ID NO: 113573 - RNA, 1410 nt, Artificial Sequence
  derived and/or modified CDS sequence (opt2) from neuraminidase__InfluenzaA__ACY77575
augaaccccaaccagaagaucaucaccaucggcuccgucugcaugaccaucggcauggccaaccucauccuccagaucggcaacaucaucuccaucuggaucucccacuccauccagcucggcaaccagaaccagaucgagaccugcaaccaguccgucaucaccuacgagaacaacaccugggucaaccagaccuacgucaacaucuccaacaccaacuucgccgccggccaguccgucgucuccgucaagcucgccggcaacuccucccucugccccgucuccggcugggccaucuacuccaaggacaacuccauccgcaucggcuccaagggcgacgucuucgucauccgcgagcccuucaucuccugcuccccccucgagugccgcaccuucuuccucacccagggcgcccuccucaacgacaagcacuccaacggcaccaucaaggaccgcucccccuaccgcacccucauguccugccccaucggcgagguccccucccccuacaacucccgcuucgaguccgucgccugguccgccuccgccugccacgacggcaucaacuggcucaccaucggcaucuccggccccgacaacggcgccgucgccguccucaaguacaacggcaucaucaccgacaccaucaaguccuggcgcaacaacauccuccgcacccaggaguccgagugcgccugcgucaacggcuccugcuucaccgucaugaccgacggccccuccgacggccaggccuccuacaagaucuuccgcaucgagaagggcaagaucgucaaguccgucgagaugaacgcccccaacuaccacuacgaggagugcuccugcuaccccgacuccuccgagaucaccugcgucugccgcgacaacuggcacggcuccaaccgccccugggucuccuucaaccagaaccucgaguaccagaucggcuacaucugcuccggcaucuucggcgacaacccccgccccuccgacaagaccggcuccugcggccccgucuccuccaacggcgccaacggcgucaagggcuucuccuucaaguacggcaacggcgucuggaucggccgcaccaaguccaucuccucccgcaacggcuucgagaugaucugggaccccaacggcuggaccggcaccgacaacaacuucuccaucaagcaggacaucgucggcaucaacgagugguccggcuacuccggcuccuucguccagcaccccgagcucaccggccucgacugcauccgccccugcuucugggucgagcucauccgcggccgccccaaggagaacaccaucuggaccuccggcuccuccaucuccuucugcggcgucaacuccgacaccgucggcugguccuggcccgacggcgccgagcuccccuucaccaucgacaaguga

SEQ ID NO: 113574 - RNA, 1410 nt, Artificial Sequence; identical to SEQ ID NO: 112774
  derived and/or modified CDS sequence (opt2) from neuraminidase__InfluenzaA__ACY77585

SEQ ID NO: 113575 - RNA, 1410 nt, Artificial Sequence; identical to SEQ ID NO: 112804
  derived and/or modified CDS sequence (opt2) from neuraminidase__InfluenzaA__ACY77595

SEQ ID NO: 113576 - RNA, 1410 nt, Artificial Sequence; identical to SEQ ID NO: 112804
  derived and/or modified CDS sequence (opt2) from neuraminidase__InfluenzaA__ACY77605

SEQ ID NO: 113577 - RNA, 1410 nt, Artificial Sequence; identical to SEQ ID NO: 112774
  derived and/or modified CDS sequence (opt2) from neuraminidase__InfluenzaA__ACY77625

SEQ ID NO: 113578 - RNA, 1410 nt, Artificial Sequence
  derived and/or modified CDS sequence (opt2) from neuraminidase__InfluenzaA__ACY77655
augaaccccaaccagaagaucaucaccaucggcuccgucugcaugaccaucggcauggccaaccucauccuccagaucggcaacaucaucuccaucuggaucucccacuccauccagcucggcaaccagaaccagaucgagaccugcaaccaguccgucaucaccuacgagaacaacaccugggucaaccagaccuacgucaacaucuccaacaccaacuucgccgccggccaguccgucgucuccgucaagcucgccggcaacuccucccucugccccgucuccggcugggccaucuacuccaaggacaacuccguccgcaucggcuccaagggcgacgucuucgucauccgcgagcccuucaucuccugcuccccccucgagugccgcaccuucuuccucacccagggcgcccuccucaacgacaagcacuccaacggcaccaucaaggaccgcucccccuaccgcacccucauguccugccccaucggcgagguccccucccccuacaacucccgcuucgaguccgucgccugguccgccuccgccugccacgacggcaucaacuggcucaccaucggcaucuccggccccgacaacggcgccgucgccguccucaaguacaacggcaucaucaccgacaccaucaaguccuggcgcaacaacauccuccgcacccaggaguccgagugcgccugcgucaacggcuccugcuucaccgucaugaccgacggccccuccaacggccaggccuccuacaagaucuuccgcaucgagaagggcaagaucgucaaguccgucgagaugaacgcccccaacuaccacuacgaggagugcuccugcuaccccgacuccuccgagaucaccugcgucugccgcgacaacuggcacggcuccaaccgccccugggucuccuucaaccagaaccucgaguaccagaucggcuacaucugcuccggcaucuucggcgacaacccccgccccaacgacaagaccggcuccugcggccccgucuccuucaacggcgccaacggcgucaagggcuucuccuucaaguacggcaacggcgucuggaucggccgcaccaaguccaucuccucccgcaacggcuucgagaugaucugggaccccaacggcuggaccggcaccgacaacaacuucuccaucaagcaggacaucgucggcaucaacgagugguccggcuacuccggcuccuucguccagcaccccgagcucaccggccucgacugcauccgccccugcuucugggucgagcucauccgcggccgccccaaggagaacaccaucuggaccuccggcuccuccaucuccuucugcggcgucaacuccgacaccgucggcugguccuggcccgacggcgccgagcuccccuucaccaucgacaaguga

SEQ ID NO: 113579 - RNA, 1410 nt, Artificial Sequence; identical to SEQ ID NO: 112774
  derived and/or modified CDS sequence (opt2) from neuraminidase__InfluenzaA__ACY77665

SEQ ID NO: 113580 - RNA, 1410 nt, Artificial Sequence; identical to SEQ ID NO: 112774
  derived and/or modified CDS sequence (opt2) from neuraminidase__InfluenzaA__ACY77675

SEQ ID NO: 113581 - RNA, 1410 nt, Artificial Sequence; identical to SEQ ID NO: 112764
  derived and/or modified CDS sequence (opt2) from neuraminidase__InfluenzaA__ACY77685

SEQ ID NO: 113582 - RNA, 1410 nt, Artificial Sequence; identical to SEQ ID NO: 112764
  derived and/or modified CDS sequence (opt2) from neuraminidase__InfluenzaA__ACY77695

SEQ ID NO: 113583 - RNA, 1410 nt, Artificial Sequence; identical to SEQ ID NO: 112764
  derived and/or modified CDS sequence (opt2) from neuraminidase__InfluenzaA__ACY77705

SEQ ID NO: 113584 - RNA, 1410 nt, Artificial Sequence; identical to SEQ ID NO: 112764
  derived and/or modified CDS sequence (opt2) from neuraminidase__InfluenzaA__ACY77725

SEQ ID NO: 113585 - RNA, 1410 nt, Artificial Sequence; identical to SEQ ID NO: 112764
  derived and/or modified CDS sequence (opt2) from neuraminidase__InfluenzaA__ACY77735

SEQ ID NO: 113586 - RNA, 1410 nt, Artificial Sequence; identical to SEQ ID NO: 112774
  derived and/or modified CDS sequence (opt2) from neuraminidase__InfluenzaA__ACY77745

SEQ ID NO: 113587 - RNA, 1410 nt, Artificial Sequence; identical to SEQ ID NO: 112774
  derived and/or modified CDS sequence (opt2) from neuraminidase__InfluenzaA__ACY77755

SEQ ID NO: 113588 - RNA, 1410 nt, Artificial Sequence; identical to SEQ ID NO: 112774
  derived and/or modified CDS sequence (opt2) from neuraminidase__InfluenzaA__ACY77775

SEQ ID NO: 113589 - RNA, 1410 nt, Artificial Sequence; identical to SEQ ID NO: 112774
  derived and/or modified CDS sequence (opt2) from neuraminidase__InfluenzaA__ACY77785

SEQ ID NO: 113590 - RNA, 1410 nt, Artificial Sequence; identical to SEQ ID NO: 112774
  derived and/or modified CDS sequence (opt2) from neuraminidase__InfluenzaA__ACY77795

SEQ ID NO: 113591 - RNA, 1410 nt, Artificial Sequence
  derived and/or modified CDS sequence (opt2) from neuraminidase__InfluenzaA__ACY77825
augaaccccaaccagaagaucaucaccaucggcuccgucugcaugaccaucggcauggccaaccucauccuccagaucggcaacaucaucuccaucuggaucucccacuccauccagcucggcaaccagaaccagaucgagaccugcaaccaguccgucaucaccuacgagaacaacaccugggucaaccagaccuacgucaacaucuccaacaccaacuucgccgccggccaguccgucgucuccgccaagcucgccggcaacuccucccucugccccgucuccggcugggccaucuacuccaaggacaacuccauccgcaucggcuccaagggcgacgucuucgucauccgcgagcccuucaucuccugcuccccccucgagugccgcaccuucuuccucacccagggcgcccuccucaacgacaagcacuccaacggcaccaucaaggaccgcucccccuaccgcacccucauguccugccccaucggcgagguccccucccccuacaacucccgcuucgaguccgucgccugguccgccuccgccugccacgacggcaucaacuggcucaccaucggcaucuccggccccgacaacggcgccgucgccguccucaaguacaacggcaucaucaccgacaccaucaaguccuggcgcaacaacauccuccgcacccaggaguccgagugcgccugcgucaacggcuccugcuucaccgucaugaccgacggccccuccgacggccaggccuccuacaagaucuuccgcaucgagaagggcaagaucgucaaguccgucgagaugaacgcccccaacuaccacuacgaggagugcuccugcuaccccgacuccuccgagaucaccugcgucugccgcgacaacuggcacggcuccaaccgccccugggucuccuucaaccagaaccucgaguaccagaucggcuacaucugcuccggcaucuucggcgacaacccccgccccaacgacaagaccggcuccugcggccccgucuccuccaacggcgccaacggcgucaagggcuucuccuucaaguacggcaacggcgucuggaucggccgcaccaaguccaucaacucccgcaacggcuucgagaugaucugggaccccaacggcuggaccggcaccgacaacaacuucuccaucaagcaggacaucgucggcaucaacgagugguccggcuacuccggcuccuucguccagcaccccgagcucaccggccucgacugcauccgccccugcuucugggucgagcucauccgcggccgccccaaggagaacaccaucuggaccuccggcuccuccaucuccuucugcggcgucaacuccgacaccgucggcugguccuggcccgacggcgccgagcuccccuucaccaucgacaaguga

SEQ ID NO: 113592 - RNA, 1410 nt, Artificial Sequence; identical to SEQ ID NO: 113591
  derived and/or modified CDS sequence (opt2) from neuraminidase__InfluenzaA__ACY77835

SEQ ID NO: 113593 - RNA, 1410 nt, Artificial Sequence; identical to SEQ ID NO: 112804
  derived and/or modified CDS sequence (opt2) from neuraminidase__InfluenzaA__ACY77845

SEQ ID NO: 113594 - RNA, 1410 nt, Artificial Sequence; identical to SEQ ID NO: 112774
  derived and/or modified CDS sequence (opt2) from neuraminidase__InfluenzaA__ACY77865

SEQ ID NO: 113595 - RNA, 1410 nt, Artificial Sequence
  derived and/or modified CDS sequence (opt2) from neuraminidase__InfluenzaA__ACY77870
augaaccccaaccagaagaucaucaccaucggcuccgucugcaugaccaucggcauggccaaccucauccuccagaucggcaacaucaucuccaucuggaucucccacuccauccagcucggcaaccagaaccagaucgagaccugcaaccaguccgucaucaccuacgagaacaacaccugggucaaccagaccuacgucaacaucuccaacaccaaccucgccgccggccaguccgucgucuccgucaagcucgccggcaacuccucccucugccccgucuccggcugggccaucuacuccaaggacaacuccauccgcaucggcuccaagggcgacgucuucgucauccgcgagcccuucaucuccugcuccccccucgagugccgcaccuucuuccucacccagggcgcccuccucaacgacaagcacuccaacggcaccaucaaggaccgcucccccuaccgcacccucauguccugccccaucggcgagguccccucccccuacaacucccgcuucgaguccgucgccugguccgccuccgccugccacgacggcaucaacuggcucaccaucggcaucuccggccccgacaacggcgccgucgccguccucaaguacaacggcaucaucaccgacaccaucaaguccuggcgcaacaacauccuccgcacccaggaguccgagugcgccugcgucaacggcuccugcuucaccgucaugaccgacggccccuccgacggccaggccuccuacaagaucuuccgcaucgagaagggcaagaucgucaaguccgucgagaugaacgcccccaacuaccacuacgaggagugcuccugcuaccccgacuccuccgagaucaccugcgucugccgcgacaacuggcacggcuccaaccgccccugggucuccuucaaccagaaccucgaguaccagaucggcuacaucugcuccggcaucuucggcgacaacccccgccccaacgacaagaccggcuccugcggccccgucuccuccaacggcgccaacggcgucaagggcuucuccuucaaguacggcaacggcgucuggaucggccgcaccaaguccaucuccucccgcaacggcuucgagaugaucugggaccccaacggcuggaccggcaccgacaacaacuucuccaucaagcaggacaucgucggcaucaacgagugguccggcuacuccggcuccuucguccagcaccccgagcucaccggccucgacugcauccgccccugcuucugggucgagcucauccgcggccgccccaaggagaacaccaucuggaccuccggcuccuccaucuccuucugcggcgucaacuccgacaccgucggcugguccuggcccgacggcgccgagcuccccuucaccaucgacaaguga

SEQ ID NO: 113596 - RNA, 1410 nt, Artificial Sequence; identical to SEQ ID NO: 112774
  derived and/or modified CDS sequence (opt2) from neuraminidase__InfluenzaA__ACY77877

SEQ ID NO: 113597 - RNA, 1410 nt, Artificial Sequence; identical to SEQ ID NO: 112774
  derived and/or modified CDS sequence (opt2) from neuraminidase__InfluenzaA__ACY77887

SEQ ID NO: 113598 - RNA, 1410 nt, Artificial Sequence; identical to SEQ ID NO: 112774
  derived and/or modified CDS sequence (opt2) from neuraminidase__InfluenzaA__ACY77907

SEQ ID NO: 113599 - RNA, 1410 nt, Artificial Sequence; identical to SEQ ID NO: 112804
  derived and/or modified CDS sequence (opt2) from neuraminidase__InfluenzaA__ACY77917

SEQ ID NO: 113600 - RNA, 1410 nt, Artificial Sequence
  derived and/or modified CDS sequence (opt2) from neuraminidase__InfluenzaA__ACY77927
augaaccccaaccagaagaucaucaccaucggcuccgucugcaugaccaucggcauggccaaccucauccuccagaucggcaacaucaucuccaucuggaucucccacuccauccagcucggcaaccagaaccagaucgagaccugcaaccaguccgucaucaccuacgagaacaacaccugggucaaccagaccuacgucaacaucuccaacaccaacuucgccgccggccaguccgucgucuccgucaagcucgccggcaacuccucccucugccccgucuccggcugggccaucuacuccaaggacaacuccauccgcaucggcuccaagggcgacgucuucgucauccgcgagcccuucaucuccugcuccccccucgagugccgcaccuucuuccucacccagggcgcccuccucaacgacaagcacuccaacggcaccaucaaggaccgcucccccuaccgcacccucauguccugccccaucggcgagguccccucccccuacaacucccgcuucgaguccgucgccugguccgccuccgccugccacgacggcaucaacuggcucaccaucggcaucuccggccccaacaacggcgccgucgccguccucaaguacaacggcaucaucaccgacaccaucaaguccuggcgcaacaacauccuccgcacccaggaguccgagugcgccugcgucaacggcuccugcuucaccgucaugaccgacggccccuccgacggccaggccuccuacaagaucuuccgcaucgagaagggcaagaucgucaaguccgucgagaugaacgcccccaacuaccacuacgaggagugcuccugcuaccccgacuccuccgagaucaccugcgucugccgcgacaacuggcacggcuccaaccgccccugggucuccuucaaccagaaccucgaguaccagaucggcuacaucugcuccggcaucuucggcgacaacccccgccccaacgacaagaccggcuccugcggccccgucuccuccaacggcgccaacggcgucaagggcuucuccuucaaguacggcaacggcgucuggaucggccgcaccaaguccaucuccucccgcaacggcuucgagaugaucugggaccccaacggcuggaccggcaccgacaacaacuucuccaucaagcaggacaucgucggcaucaacgagugguccggcuacuccggcuccuucguccagcaccccgagcucaccggccucgacugcauccgccccugcuucugggucgagcucauccgcggccgccccaaggagaacaccaucuggaccuccggcuccuccaucuccuucugcggcgucaacuccgacaccgucggcugguccuggcccgacggcgccgagcuccccuucaccaucgacaaguga

SEQ ID NO: 113601 - RNA, 1410 nt, Artificial Sequence; identical to SEQ ID NO: 112774
  derived and/or modified CDS sequence (opt2) from neuraminidase__InfluenzaA__ACY77937

SEQ ID NO: 113602 - RNA, 1410 nt, Artificial Sequence; identical to SEQ ID NO: 112774
  derived and/or modified CDS sequence (opt2) from neuraminidase__InfluenzaA__ACY77947

SEQ ID NO: 113603 - RNA, 1410 nt, Artificial Sequence; identical to SEQ ID NO: 112774
  derived and/or modified CDS sequence (opt2) from neuraminidase__InfluenzaA__ACY77967

SEQ ID NO: 113604 - RNA, 1410 nt, Artificial Sequence; identical to SEQ ID NO: 112764
  derived and/or modified CDS sequence (opt2) from neuraminidase__InfluenzaA__ACY77977

SEQ ID NO: 113605 - RNA, 1410 nt, Artificial Sequence; identical to SEQ ID NO: 112774
  derived and/or modified CDS sequence (opt2) from neuraminidase__InfluenzaA__ACY77987

SEQ ID NO: 113606 - RNA, 1410 nt, Artificial Sequence
  derived and/or modified CDS sequence (opt2) from neuraminidase__InfluenzaA__ACY77997
augaaccccaaccagaagaucaucaccaucggcuccgucugcaugaccaucggcauggccaaccucauccuccagaucggcaacaucaucuccaucuggaucucccacuccauccagcucggcaaccagaaccagaucgagaccugcaaccaguccgucaucaccuacgagaacaacaccugggucaaccagaccuacgucaacaucuccaacaccaacuucgccgccggccaguccgucgucuccgucacccucgccggcaacuccucccucugccccgucuccggcugggccaucuacuccaaggacaacuccauccgcaucggcuccaagggcgacgucuucgucauccgcgagcccuucaucuccugcuccccccucgagugccgcaccuucuuccucacccagggcgcccuccucaacgacaagcacuccaacggcaccaucaaggaccgcucccccuaccgcacccucauguccugccccaucggcgagguccccucccccuacaacucccgcuucgaguccgucgccugguccgccuccgccugccacgacggcaucaacuggcucaccaucggcaucuccggccccgacaacggcgccgucgccguccucaaguacaacggcaucaucaccgacaccaucaaguccuggcgcaacaacauccuccgcacccaggaguccgagugcgccugcgucaacggcuccugcuucaccgucaugaccgacggccccuccgacggccaggccuccuacaagaucuuccgcaucgagaagggcaagaucgucaaguccgucgagaugaacgcccccaacuaccacuacgaggagugcuccugcuaccccgacuccuccgagaucaccugcgucugccgcgacaacuggcacggcuccaaccgccccugggucuccuucaaccagaaccucgaguaccagaucggcuacaucugcuccggcaucuucggcgacaacccccgccccaacgacaagaccggcuccugcggccccgucuccuccaacggcgccaacggcgucaagggcuucuccuucaaguacggcaacggcgucuggaucggccgcaccaaguccaucuccucccgcaacggcuucgagaugaucugggaccccaacggcuggaccggcaccgacaacaacuucuccaucaagcaggacaucgucggcaucaacgagugguccggcuacuccggcuccuucguccagcaccccgagcucaccggccucgacugcauccgccccugcuucugggucgagcucauccgcggccgccccaaggagaacaccaucuggaccuccggcuccuccaucuccuucugcggcgucaacuccgacaccgucggcugguccuggcccgacggcgccgagcuccccuucaccaucgacaaguga

SEQ ID NO: 113607 - RNA, 1410 nt, Artificial Sequence; identical to SEQ ID NO: 112774
  derived and/or modified CDS sequence (opt2) from neuraminidase__InfluenzaA__ACY78017

SEQ ID NO: 113608 - RNA, 1410 nt, Artificial Sequence
  derived and/or modified CDS sequence (opt2) from neuraminidase__InfluenzaA__ACZ01955
augaaccccaaccagaagaucaucaccaucggcuccgucugcaugaccaucggcauggccaaccucauccuccagaucggcaacaucaucuccaucuggaucucccacuccauccagcucggcaaccagaaccagaucgagaccugcaaccaguccgucaucaccuacgagaacaacaccugggucaaccagaccuacgucaacaucuccaacaccaacuucgccgccggccaguccgucgucuccgucaagcucgccggcaacuccucccucugccccgucuccggcugggccaucuacuccaaggacaacuccauccgcaucggcuccaagggcgacgucuucgucauccgcgagcccuucaucuccugcuccccccucgagugccgcaccuucuuccucacccagggcgcccuccucaacgacaagcacuccaacggcaccaucaaggaccgcucccccuaccgcacccucauguccugccccaucggcgagguccccucccccuacaacucccgcuucgaguccgucgccugguccgccuccgccugccacgacggcaucaacuggcucaccaucggcaucuccggccccggcaacggcgccgucgccguccucaaguacaacggcaucaucaccgacaccaucaaguccuggcgcaacaacauccuccgcacccaggaguccgagugcgccugcgucaacggcuccugcuucaccgucaugaccgacggccccuccgacggccaggccuccuacaagaucuuccgcaucgagaagggcaagaucgucaaguccgucgagaugaacgcccccaacuaccacuacgaggagugcuccugcuaccccgacuccuccgagaucaccugcgucugccgcgacaacuggcacggcuccaaccgccccugggucuccuucaaccagaaccucgaguaccagaucggcuacaucugcuccggcaucuucggcgacaacccccgccccaacgacaagaccggcuccugcggccccgucuccuccaacggcgccaacggcgucaagggcuucuccuucaaguacggcaacggcgucuggaucggccgcaccaaguccaucuccucccgcaacggcuucgagaugaucugggaccccaacggcuggaccggcaccgacaacaacuucuccaucaagcaggacaucgucggcaucaacgagugguccggcuacuccggcuccuucguccagcaccccgagcucaccggccucgacugcauccgccccugcuucugggucgagcucauccgcggccgccccaaggagaacaccaucuggaccuccggcuccuccaucuccuucugcggcgucaacuccgacaccgucggcugguccuggcccgacggcgccgagcuccccuucaccaucgacaaguga

SEQ ID NO: 113609 - RNA, 1410 nt, Artificial Sequence; identical to SEQ ID NO: 112774
  derived and/or modified CDS sequence (opt2) from neuraminidase__InfluenzaA__ACZ05053

SEQ ID NO: 113610 - RNA, 1410 nt, Artificial Sequence; identical to SEQ ID NO: 112764
  derived and/or modified CDS sequence (opt2) from neuraminidase__InfluenzaA__ACZ05064

SEQ ID NO: 113611 - RNA, 1410 nt, Artificial Sequence; identical to SEQ ID NO: 112774
  derived and/or modified CDS sequence (opt2) from neuraminidase__InfluenzaA__ACZ05074

SEQ ID NO: 113612 - RNA, 1410 nt, Artificial Sequence; identical to SEQ ID NO: 112774
  derived and/or modified CDS sequence (opt2) from neuraminidase__InfluenzaA__ACZ05084

SEQ ID NO: 113613 - RNA, 1410 nt, Artificial Sequence; identical to SEQ ID NO: 112774
  derived and/or modified CDS sequence (opt2) from neuraminidase__InfluenzaA__ACZ05094

SEQ ID NO: 113614 - RNA, 1410 nt, Artificial Sequence; identical to SEQ ID NO: 112774
  derived and/or modified CDS sequence (opt2) from neuraminidase__InfluenzaA__ACZ05104

SEQ ID NO: 113615 - RNA, 1410 nt, Artificial Sequence; identical to SEQ ID NO: 112774
  derived and/or modified CDS sequence (opt2) from neuraminidase__InfluenzaA__ACZ05114

SEQ ID NO: 113616 - RNA, 1410 nt, Artificial Sequence; identical to SEQ ID NO: 112774
  derived and/or modified CDS sequence (opt2) from neuraminidase__InfluenzaA__ACZ05124

SEQ ID NO: 113617 - RNA, 1410 nt, Artificial Sequence; identical to SEQ ID NO: 112774
  derived and/or modified CDS sequence (opt2) from neuraminidase__InfluenzaA__ACZ05144

SEQ ID NO: 113618 - RNA, 1410 nt, Artificial Sequence; identical to SEQ ID NO: 112774
  derived and/or modified CDS sequence (opt2) from neuraminidase__InfluenzaA__ACZ05154

SEQ ID NO: 113619 - RNA, 1410 nt, Artificial Sequence; identical to SEQ ID NO: 112635
  derived and/or modified CDS sequence (opt2) from neuraminidase__InfluenzaA__ACZ05164

SEQ ID NO: 113620 - RNA, 1410 nt, Artificial Sequence; identical to SEQ ID NO: 112635
  derived and/or modified CDS sequence (opt2) from neuraminidase__InfluenzaA__ACZ05175

SEQ ID NO: 113621 - RNA, 1413 nt, Artificial Sequence
  derived and/or modified CDS sequence (opt2) from neuraminidase__InfluenzaA__ACZ05197
augaaccccaaccagaagaucaugaccaucggcuccaucuccaucgccaucggcaucaucucccucaugcuccagaucggcaacaucaucuccaucugggccucccacuccauccagaccggcucccagaacaacaccggcaucugcaaccagcgcaucaucaccuacgagaacuccaccugggucaaccacaccuacgucaacaucaacaacaccaacgucgucgccggcgaggacaagaccuccgucacccucgccggcaacuccucccucugcuccaucuccggcugggccaucuacaccaaggacaacuccauccgcaucggcuccaagggcgacgucuucgucauccgcgagcccuucaucuccugcucccaccucgagugccgcaccuucuuccucacccagggcgcccuccucaacgacaagcacuccaacggcaccgucaaggaccgcucccccuaccgcgcccucauguccugcccccucggcgaggcccccucccccuacaacuccaaguucgaguccgucgccugguccgccuccgccugccacgacggcaugggcuggcucaccaucggcaucuccggccccgacaacggcgccgucgccguccucaaguacaacggcaucaucaccggcaccaucaaguccuggaagaagcagauccuccgcacccaggaguccgagugcgucugcaugaacggcuccugcuucaccaucaugaccgacggccccuccaacaaggccgccuccuacaagaucuucaagaucgagaagggcaaggucaccaaguccaucgagcucaacgcccccaacuucuacuacgaggagugcuccugcuaccccgacaccggcaucgucaugugcgucugccgcgacaacuggcacggcuccaaccgccccugggucuccuucaaccagaaccucgacuaccagaucggcuacaucugcuccggcgucuucggcgacaacccccgccccgaggacggcgagggcuccugcaaccccgucaccgucgacggcgccaacggcgucaagggcuucuccuacaaguacggcaacggcgucuggaucggccgcaccaaguccaaccgccuccgcaagggcuucgagaugaucugggaccccaacggcuggaccaacaccgacuccgacuucuccgucaagcaggacgucgucgccaucaccgacugguccggcuacuccggcuccuucguccagcaccccgagcucaccggccucgacugcauccgccccugcuucugggucgagcucguccgcggccucccccgcgagaacaccaccaucuggaccuccggcuccuccaucuccuucugcggcgucaacuccgacaccgccaacugguccuggcccgacggcgccgagcuccccuucaccaucgacaaguga

SEQ ID NO: 113622 - RNA, 1410 nt, Artificial Sequence
  derived and/or modified CDS sequence (opt2) from neuraminidase__InfluenzaA__ACZ05208
augaaccccaaccagaagaucaucaccaucggcuccgucucccucaccaucuccaccaucugcuucuucaugcagaucgccauccucaucaccaccgucacccuccacuucaagcaguacgaguucaacuccccccccaacaaccaggucaugcucugcgagcccaccaucaucgagcgcaacaucaccgagaucgucuaccucaccaacaccaccaucgagaaggagaucugccccaagcucgccgaguaccgcaacugguccaagccccagugcgacaucaccggcuucgcccccuucuccaaggacaacuccauccgccucuccgccggcggcgacaucugggucacccgcgagcccuacgucuccugcgaccccgacaagugcuaccaguucgcccucggccagggcaccacccucaacaacguccacuccaacaacaccguccgcgaccgcacccccuaccgcacccuccucaugaacgagcucggcguccccuuccaccucggcaccaagcaggucugcaucgccugguccuccuccuccugccacgacggcaaggccuggcuccacgucugcaucaccggcgacgacaagaacgccaccgccuccuucaucuacaacggccgccucgucgacuccgucgucuccugguccaaggagauccuccgcacccaggaguccgagugcgucugcaucaacggcaccugcaccgucgucaugaccgacggcuccgccuccggcaaggccgacaccaagauccucuucaucgaggagggcaagaucguccacaccuccacccucuccggcuccgcccagcacgucgaggagugcuccugcuacccccgcuaccccggcguccgcugcgucugccgcgacaacuggaagggcuccaaccgccccaucgucgacaucaacaucaaggaccacuccaucgucuccuccuacgucugcuccggccucgucggcgacaccccccgcaagaacgacuccuccuccuccucccacugcuccgaccccaacaacgaggagggcggccacggcgucaagggcugggccuucgacuccggcaacgacgucuggaugggccgcaccaucuccgagaagucccgccucggcuacgagaccuucaaggucaucgagggcugguccaaccccaaguccaagcuccagaucaaccgccaggucaucgucgaccgcggcaaccgcuccggcuacuccggcaucuucuccgucgagggcaaguccugcaucaaccgcugcuucuacgucgagcucauccgcggccgcaaggaggagaccgagguccucuggaccuccaacuccaucgucgucuucugcggcaccuccggcaccuacggcaccggcuccuggcccgacggcgccgacaucaaccucaugcccaucuga

SEQ ID NO: 113623 - RNA, 1410 nt, Artificial Sequence
  derived and/or modified CDS sequence (opt2) from neuraminidase__InfluenzaA__ACZ05219
augaaccccaaccagaagaucaucaccaucggcuccgucucccucaccaucuccaccaucugcuucuucaugcagaucgccauccucaucaccaccgucacccuccacuucaagcaguacgaguucaacuccccccccaacaaccaggucaugcucugcgagcccaccaucaucgagcgcaacaucaccgagaucgucuaccucaccaacaccaccaucgagaaggagaucugccccaagcucgccgaguaccgcaacugguccaagccccagugcggcaucaccggcuucgcccccuucuccaaggacaacuccauccgccucuccgccggcggcgacaucugggucacccgcgagcccuacgucuccugcgaccccgacaagugcuaccaguucgcccucggccagggcaccacccucaacaacguccacuccaacaacaccguccgcgaccgcacccccuaccgcacccuccucaugaacgagcucggcguccccuuccaccucggcaccaagcaggucugcaucgccugguccuccuccuccugccacgacggcaaggccuggcuccacgucugcaucaccggcgacgacaagaacgccaccgccuccuucaucuacaacggccgccucgucgacuccgucgucuccugguccaaggagauccuccgcacccaggaguccgagugcgucugcaucaacggcaccugcaccgucgucaugaccgacggcuccgccuccggcaaggccgacaccaagauccucuucaucgaggagggcaagaucguccacaccuccacccucuccggcuccgcccagcacgucgaggagugcuccugcuacccccgcuaccccggcguccgcugcgucugccgcgacaacuggaagggcuccaaccgccccaucgucgacaucaacaucaaggaccacuccaucgucuccuccuacgucugcuccggccucgucggcgacaccccccgcaagaacgacuccuccuccuccucccacugccucgaccccaacaacgaggagggcggccacggcgucaagggcugggccuucgacgacggcaacgacgucuggaugggccgcaccaucuccgagaagucccgccucggcuacgagaccuucaaggucaucgagggcugguccaaccccaaguccaagcuccagaucaaccgccaggucaucgucgaccgcggcaaccgcuccggcuacuccggcaucuucuccgucgagggcaaguccugcaucaaccgcugcuucuacgucgagcucauccgcggccgcaaggaggagaccgagguccucuggaccuccaacuccaucgucgucuucugcggcaccuccggcaccuacggcaccggcuccuggcccgacggcgccgacaucaaccucaugcccaucuga

SEQ ID NO: 113624 - RNA, 1410 nt, Artificial Sequence; identical to SEQ ID NO: 112635
  derived and/or modified CDS sequence (opt2) from neuraminidase__InfluenzaA__ACZ05230

SEQ ID NO: 113625 - RNA, 1410 nt, Artificial Sequence
  derived and/or modified CDS sequence (opt2) from neuraminidase__InfluenzaA__ACZ05241
augaaccccaaccagaagaucaucaccaucggcuccgucucccucaccaucuccaccaucugcuucuucaugcagaucgccauccucaucaccaccgucacccuccacuucaagcaguacgaguucaacuccccccccaacaaccaggucaugcucugcgagcccaccaucaucgagcgcaacaucaccgagaucgucuaccucaccaacaccaccaucgagaaggagaucugccccaagcucgccgaguaccgcaacugguccaagccccagugcgacaucaccggcuucgcccccuucuccaaggacaacuccauccgccucuccgccggcggcgacaucugggucacccgcgagcccuacgucuccugcgaccccgacaagugcuaccaguucgcccucggccagggcaccacccucaacaacguccacuccaacaacaccguccgcgaccgcacccccuaccgcacccuccucaugaacgagcucggcguccccuuccaccucggcaccaagcaggucugcaucgccugguccuccuccuccugccacgacggcaaggccuggcuccacgucugcaucaccggcgacgacaagaacgccaccgccuccuucaucuacaacggccgccucgucgacuccgucgucuccugguccaaggagauccuccgcacccaggaguccgagugcgucugcaucaacggcaccugcaccgucgucaugaccgacggcuccgccuccggcaaggccgacaccaagauccucuucaucgaggagggcaagaucguccacaccuccaagcucuccggcuccgcccagcacgucgaggagugcuccugcuacccccgcuaccccggcguccgcugcgucugccgcgacaacuggaagggcuccaaccgccccaucgucgacaucaacaucaaggaccacuccaucgucuccuccuacgucugcuccggccucgucggcgacaccccccgcaagaacgacuccuccuccuccucccacugccucgaccccaacaacgaggagggcggccacggcgucaagggcugggccuucgacgacggcaacgacgucuggaugggccgcaccaucuccgagaagucccgccucggcuacgagaccuucaaggucaucgagggcugguccaaccccaaguccaagcuccagaucaaccgccaggucaucgucgaccgcggcaaccgcuccggcuacuccggcaucuucuccgucgagggcaaguccugcaucaaccgcugcuucuacgucgagcucauccgcggccgcaaggaggagaccgagguccucuggaccuccaacuccaucgucgucuucugcggcaccuccggcaccuacggcaccggcuccuggcccgacggcgccgacaucaaccucaugcccaucuga

SEQ ID NO: 113626 - RNA, 1413 nt, Artificial Sequence
  derived and/or modified CDS sequence (opt2) from neuraminidase__InfluenzaA__ACZ05296
augaaccccaaccagaagaucaucaccaucggcuccaucuccaucgccaucggcaucaucucccucaugcuccagaucggcaacaucaucuccaucugggccucccacuccauccagaccggcucccagaacaacaccggcaucugcaaccagcgcaucaucaccuacgagaacuccaccugggucaaccacaccuacgucaacaucaacaacaccaacgucgucgccggcgaggacaagaccuccgucacccucgccggcaacuccucccucugcuccaucuccggcugggccaucuacaccaaggacaacuccauccgcaucggcuccaagggcgacgucuucgucauccgcgagcccuucaucuccugcucccaccucgagugccgcaccuucuuccucacccagggcgcccuccucaacgacaagcacuccaacggcaccgucaaggaccgcucccccuaccgcgcccucauguccugcccccucggcgaggcccccucccccuacaacuccaaguucgaguccgucgccugguccgccuccgccugccacgacggcaugggcuggcucaccaucggcaucuccggccccgacaacggcgccgucgccguccucaaguacaacggcaucaucaccggcaccaucaaguccuggaagaagcagauccuccgcacccaggaguccgagugcgucugcaugaacggcuccugcuucaccaucaugaccgacggccccuccaacaaggccgccuccuacaagaucuucaagaucgagaagggcaaggucaccaaguccaucgagcucaacgcccccaacuucuacuacgaggagugcuccugcuaccccgacaccggcaucgucaugugcgucugccgcgacaacuggcacggcuccaaccgccccugggucuccuucaaccagaaccucgacuaccagaucggcuacaucugcuccggcgucuucggcgacaacccccgccccgaggacggcgagggcuccugcaaccccgucgccgucgacggcgccaacggcgucaagggcuucuccuacaaguacggcaacggcgucuggaucggccgcaccaaguccaaccgccuccgcaagggcuucgagaugaucugggaccccaacggcuggaccaacaccgacuccgacuucuccgucaagcaggacgucgucgccaucaccgacugguccggcuacuccggcuccuucguccagcaccccgagcucaccggccucgacugcauccgccccugcuucugggucgagcucguccgcggccucccccgcgagaacaccaccaucuggaccuccggcuccuccaucuccuucugcggcgucaacuccgacaccgccaacugguccuggcccgacggcgccgagcuccccuucaccaucgacaaguga

SEQ ID NO: 113627 - RNA, 1410 nt, Artificial Sequence; identical to SEQ ID NO: 112635
  derived and/or modified CDS sequence (opt2) from neuraminidase__InfluenzaA__ACZ05307

SEQ ID NO: 113628 - RNA, 1410 nt, Artificial Sequence
  derived and/or modified CDS sequence (opt2) from neuraminidase__InfluenzaA__ACZ05318
augaaccccaaccagaagaucaucaccaucggcuccgucucccucaccaucuccaccaucugcuucuucaugcagaccgccauccucaucaccaccgucacccuccacuucaagcagugcgaguucaacuccccccccaacaaccaggucaugcucugcgagcccaccaucaucgagcgcaacaucaccgagaucgucuaccucaccaacaccaccaucgagaaggagaucugccccaagcucgccgaguaccgcaacugguccaagccccagugcgacaucaccggcuucgcccccuucuccaaggacaacuccauccgccucuccgccggcggcgacaucugggucacccgcgagcccuacgucuccugcgaccccgacaagugcuaccaguucgcccucggccagggcaccacccucaacaacguccacuccaacaacaccguccgcgaccgcacccccuaccgcacccuccucaugaacgagcucggcguccccuuccaccucggcaccaagcaggucugcaucgccugguccuccuccuccugccacgacggcaaggccuggcuccacgucugcaucaccggcgacgacaagaacgccaccgccuccuucaucuacaacggccgccucgucgacuccgucgucuccugguccaaggagauccuccgcacccaggaguccgagugcgucugcaucaacggcaccugcaccgucgucaugaccgacggcuccgccuccggcaaggccgacaccaagauccucuucaucgaggagggcaagaucguccacaccuccacccucuccggcuccgcccagcacgucgaggagugcuccugcuacccccgcuaccccggcguccgcugcgucugccgcgacaacuggaagggcuccaaccgccccaucgucgacaucaacaucaaggaccacuccaucgucuccuccuacgucugcuccggccucgucggcgacaccccccgcaagaacgacuccuccuccuccucccacugccucgaccccaacaacgaggagggcggccacggcgucaagggcugggccuucgacgacggcaacgacgucuggaugggccgcaccaucuccgagaagucccgccucggcuacgagaccuucaaggucaucgagggcugguccaaccccaaguccaagcuccagaucaaccgccaggucaucgucgaccgcggcaaccgcuccggcuacuccggcaucuucuccgucgagggcaaguccugcaucaaccgcugcuucuacgucgagcucauccgcggccgcaaggaggagaccgagguccucuggaccuccaacuccaucgucgucuucugcggcaccuccggcaccuacggcaccggcuccuggcccgacggcgccgacaucaaccucaugcccaucuga

SEQ ID NO: 113629 - RNA, 1410 nt, Artificial Sequence; identical to SEQ ID NO: 112635
  derived and/or modified CDS sequence (opt2) from neuraminidase__InfluenzaA__ACZ05329

SEQ ID NO: 113630 - RNA, 1410 nt, Artificial Sequence; identical to SEQ ID NO: 112548
  derived and/or modified CDS sequence (opt2) from neuraminidase__InfluenzaA__ACZ05340

SEQ ID NO: 113631 - RNA, 1410 nt, Artificial Sequence; identical to SEQ ID NO: 113625
  derived and/or modified CDS sequence (opt2) from neuraminidase__InfluenzaA__ACZ05362

SEQ ID NO: 113632 - RNA, 1410 nt, Artificial Sequence; identical to SEQ ID NO: 112635
  derived and/or modified CDS sequence (opt2) from neuraminidase__InfluenzaA__ACZ05373

SEQ ID NO: 113633 - RNA, 1410 nt, Artificial Sequence; identical to SEQ ID NO: 112635
  derived and/or modified CDS sequence (opt2) from neuraminidase__InfluenzaA__ACZ05395

SEQ ID NO: 113634 - RNA, 1410 nt, Artificial Sequence; identical to SEQ ID NO: 112635
  derived and/or modified CDS sequence (opt2) from neuraminidase__InfluenzaA__ACZ05406

SEQ ID NO: 113635 - RNA, 1413 nt, Artificial Sequence
  derived and/or modified CDS sequence (opt2) from neuraminidase__InfluenzaA__ACZ05450
augaaccccaaccagaagaucaucaccaucggcuccaucuccaucgccaucggcaucaucucccucaugcuccagaucggcuccaucaucuccaucugggccucccacuccauccagaccggcucccagaacaacaccggcaucugcaaccagcgcaucaucaccuacgagaacuccaccugggucaaccacaccuacgucaacaucaacaacaccaacgucgucgccggcgaggacaagaccuccgucacccucgccggcaacuccucccucugcuccaucuccggcugggccaucuacaccaaggacaacuccguccgcaucggcuccaagggcgacgucuucgucauccgcgagcccuucaucuccugcucccaccucgagugccgcaccuucuuccucacccagggcgcccuccucaacgacaagcacuccaacggcaccgucaaggaccgcucccccuaccgcgcccucauguccugcccccucggcgaggcccccucccccuacaacuccaaguucgaguccgucgccugguccgccuccgccugccacgacggcaugggcuggcucaccaucggcaucuccggccccgacaacggcgccgucgccguccucaaguacaacggcaucaucaccggcaccaucaaguccuggaagaagcagauccuccgcacccaggaguccgagugcgucugcaugaacggcuccugcuucaccaucaugaccgacggccccuccaacaaggccgccuccuacaagaucuucaagaucgagaagggcaaggucaccaaguccaucgagcucaacgcccccaacuucuacuacgaggagugcuccugcuaccccgacaccggcaucgucaugugcgucugccgcgacaacuggcacggcuccaaccgccccugggucuccuucaaccagaaccucgacuaccagaucggcuacaucugcuccggcgucuucggcgacaacccccgccccgaggacggcgagggcuccugcaaccccgucaccgucgacggcgccaacggcgucaagggcuucuccuacaaguacggcaacggcgucuggaucggccgcaccaaguccaaccgccuccgcaagggcuucgagaugaucugggaccccaacggcuggaccaacaccgacuccgacuucuccgucaagcaggacgucgucgccaucaccgacugguccggcuacuccggcuccuucguccagcaccccgagcucaccggccucgacugcauccgccccugcuucugggucgagcucguccgcggccucccccgcgagaacaccaccaucuggaccuccggcuccuccaucuccuucugcggcgucaacuccgacaccgccaacugguccuggcccgacggcgccgagcuccccuucaccaucgacaaguga

SEQ ID NO: 113636 - RNA, 1410 nt, Artificial Sequence; identical to SEQ ID NO: 112635
  derived and/or modified CDS sequence (opt2) from neuraminidase__InfluenzaA__ACZ05461

SEQ ID NO: 113637 - RNA, 1410 nt, Artificial Sequence; identical to SEQ ID NO: 112635
  derived and/or modified CDS sequence (opt2) from neuraminidase__InfluenzaA__ACZ05472

SEQ ID NO: 113638 - RNA, 1410 nt, Artificial Sequence
  derived and/or modified CDS sequence (opt2) from neuraminidase__InfluenzaA__ACZ05483
augaaccccaaccagaagaucaucaccaucggcuccgucucccucaccaucuccaccaucugcuucuucaugcagaucgccauccucaucaccaccgucacccuccacuucaagcaguacgaguucaacuccccccccaacaaccaggucaugcucugcgagcccaccaucaucgagcgcaacaucaccgagaucgucuaccucaccaacaccaccgucgagaaggagaucugccccaagcucgccgaguaccgcaacugguccaagccccagugcgacaucaccggcuucgcccccuucuccaaggacaacuccauccgccucuccgccggcggcgacaucugggucacccgcgagcccuacgucuccugcgaccccgacaagugcuaccaguucgcccucggccagggcaccacccucaacaacguccacuccaacaacaccguccgcgaccgcacccccuaccgcacccuccucaugaacgagcucggcguccccuuccaccucggcaccaagcaggucugcaucgccugguccuccuccuccugccacgacggcaaggccuggcuccacgucugcaucaccggcgacgacaagaacgccaccgccuccuucaucuacaacggccgccucgucgacuccgucgucuccugguccaaggagauccuccgcacccaggaguccgagugcgucugcaucaacggcaccugcaccgucgucaugaccgacggcuccgccuccggcaaggccgacaccaagauccucuucaucgaggagggcaagaucguccacaccuccacccucuccggcuccgcccagcacgucgaggagugcuccugcuacccccgcuaccccggcguccgcugcgucugccgcgacaacuggaagggcuccaaccgccccaucgucgacaucaacaucaaggaccacuccaucgucuccuccuacgucugcuccggccucgucggcgacaccccccgcaagaacgacuccuccuccuccucccacugccucgaccccaacaacgaggagggcggccacggcgucaagggcugggccuucgacgacggcaacgacgucuggaugggccgcaccaucuccgagaagucccgccucggcuacgagaccuucaaggucaucgagggcugguccaaccccaaguccaagcuccagaucaaccgccaggucaucgucgaccgcggcaaccgcuccggcuacuccggcaucuucuccgucgagggcaaguccugcaucaaccgcugcuucuacgucgagcucauccgcggccgcaaggaggagaccgagguccucuggaccuccaacuccaucgucgucuucugcggcaccuccggcaccuacggcaccggcuccuggcccgacggcgccgacaucaaccucaugcccaucuga

SEQ ID NO: 113639 - RNA, 1410 nt, Artificial Sequence; identical to SEQ ID NO: 112635
  derived and/or modified CDS sequence (opt2) from neuraminidase__InfluenzaA__ACZ05494

SEQ ID NO: 113640 - RNA, 1410 nt, Artificial Sequence; identical to SEQ ID NO: 113628
  derived and/or modified CDS sequence (opt2) from neuraminidase__InfluenzaA__ACZ05516

SEQ ID NO: 113641 - RNA, 1410 nt, Artificial Sequence
  derived and/or modified CDS sequence (opt2) from neuraminidase__InfluenzaA__ACZ05527
augaaccccaaccagaagaucaucaccaucggcuccgucucccucaccaucuccaccaucugcuucuucaugcagaucgccauccucaucaccaccgucacccuccacuucaagcaguacgaguucaacuccccccccaacaaccaggucaugcucugcgagcccaccaucaucgagcgcaacaucaccgagaucgucuaccucaccaacaccaccaucgagaaggagaucugccccaagcucgccgaguaccgcaacugguccaagccccagugcgacaucaccggcuucgcccccuucuccaaggacaacuccauccgccucuccgccggcggcgacaucugggucacccgcgagcccuacgucuccugcgaccccgacaagugcuaccaguucgcccucggccagggcaccacccucaacaacguccacuccaacaacaccguccgcgaccgcacccccuaccgcacccuccucaugaacgagcucggcguccccuuccaccucggcaccaagcaggucugcaucgccugguccuccuccuccugccacgacggcaaggccuggcuccacgucugcaucaccggcgacgacaagaacgccaccgccuccuucaucuacaacggccgccucgucgacuccgucgucuccugguccaaggagauccuccgcacccaggaguccgagugcgucugcaucaacggcaccugcaccgucgucaugaccgacggcuccgccuccggcaaggccgacaccaagauccucuucaucgaggagggcaagaucguccacaccuccacccucuccggcuccgcccagcacgucgaggagugcuccugcuacccccgcuaccccggcguccgcugcgucugccgcgacaacuggaagggcuccaaccgccccaucgucgacaucaacaucaaggaccacuccaucgucuccuccuacgucugcuccggccucgucggcgacaccccccgcaagaacgacuccuccuccuccucccacugcuccgaccccaacaacgaggagggcggccacggcgucaagggcugggccuucgacgacggcaacgacgucuggaugggccgcaccaucuccgagaagucccgccucggcuacgagaccuucaaggucaucgagggcugguccaaccccaaguccaagcuccagaucaaccgccaggucaucgucgaccgcggcaaccgcuccggcuacuccggcaucuucuccgucgagggcaaguccugcaucaaccgcugcuucuacgucgagcucauccgcggccgcaaggaggagaccgagguccucuggaccuccaacuccaucgucgucuucugcggcaccuccggcaccuacggcaccggcuccuggcccgacggcgccgacaucaaccucaugcccaucuga

SEQ ID NO: 113642 - RNA, 1410 nt, Artificial Sequence; identical to SEQ ID NO: 113625
  derived and/or modified CDS sequence (opt2) from neuraminidase__InfluenzaA__ACZ05538

SEQ ID NO: 113643 - RNA, 1413 nt, Artificial Sequence; identical to SEQ ID NO: 113497
  derived and/or modified CDS sequence (opt2) from neuraminidase__InfluenzaA__ACZ05593

SEQ ID NO: 113644 - RNA, 1413 nt, Artificial Sequence
  derived and/or modified CDS sequence (opt2) from neuraminidase__InfluenzaA__ACZ05604
augaaccccaaccagaagaucaucaccaucggcuccaucuccaucgccaucggcaucaucucccucaugcuccagaucggcaacaucaucuccaucugggccucccacuccauccagaccggcucccagaacaacaccggcaucugcaaccagcgcaucaucaccuacgagaacuccaccugggucaaccacaccuacgucaacaucaacaacaccaacgucgucgccggcgaggacaagaccuccgucacccucgccggcaacuccucccucugcuccauccgcggcugggccaucuacaccaaggacaacuccauccgcaucggcuccaagggcgacgucuucgucauccgcgagcccuucaucuccugcucccaccucgagugccgcaccuucuuccucacccagggcgcccuccucaacgacaagcacuccaacggcaccgucaaggaccgcucccccuaccgcgcccucauguccugcccccucggcgaggcccccucccccuacaacuccaaguucgaguccgucgccugguccgccuccgccugccacgacggcaugggcuggcucaccaucggcaucuccggccccgacaacggcgccgucgccguccucaaguacaacggcaucaucaccggcaccaucaaguccuggaagaagcagauccuccgcacccaggaguccgagugcgucugcaugaacggcuccugcuucaccaucaugaccgacggccccuccaacaaggccgccuccuacaagaucuucaagaucgagaagggcaaggucaccaaguccaucgagcucaacgcccccaacuucuacuacgaggagugcuccugcuaccccgacaccggcaucgucaugugcgucugccgcgacaacuggcacggcuccaaccgccccugggucuccuucaaccagaaccucgacuaccagaucggcuacaucugcuccggcgucuucggcgacaacccccgccccgaggacggcgagggcuccugcaaccccgucaccgucgacggcgccaacggcgucaagggcuucuccuacaaguacggcaacggcgucuggaucggccgcaccaaguccaaccgccuccgcaagggcuucgagaugaucugggaccccaacggcuggaccaacaccgacuccgacuucuccgucaagcaggacgucgucgccaucaccgacugguccggcuacuccggcuccuucguccagcaccccgagcucaccggccucgacugcauccgccccugcuucugggucgagcucguccgcggccucccccgcgagaacaccaccaucuggaccuccggcuccuccaucuccuucugcggcgucaacuccgacaccgccaacugguccuggcccgacggcgccgagcuccccuucaccaucgacaaguga

SEQ ID NO: 113645 - RNA, 1410 nt, Artificial Sequence; identical to SEQ ID NO: 112635
  derived and/or modified CDS sequence (opt2) from neuraminidase__InfluenzaA__ACZ05953

SEQ ID NO: 113646 - RNA, 1410 nt, Artificial Sequence; identical to SEQ ID NO: 113641
  derived and/or modified CDS sequence (opt2) from neuraminidase__InfluenzaA__ACZ05964

SEQ ID NO: 113647 - RNA, 1410 nt, Artificial Sequence; identical to SEQ ID NO: 112635
  derived and/or modified CDS sequence (opt2) from neuraminidase__InfluenzaA__ACZ05997

SEQ ID NO: 113648 - RNA, 1410 nt, Artificial Sequence; identical to SEQ ID NO: 113641
  derived and/or modified CDS sequence (opt2) from neuraminidase__InfluenzaA__ACZ06008

SEQ ID NO: 113649 - RNA, 1410 nt, Artificial Sequence; identical to SEQ ID NO: 113641
  derived and/or modified CDS sequence (opt2) from neuraminidase__InfluenzaA__ACZ06019

SEQ ID NO: 113650 - RNA, 1413 nt, Artificial Sequence
  derived and/or modified CDS sequence (opt2) from neuraminidase__InfluenzaA__ACZ16015
augaaccccaaccagaagaucaucaccaucggcuccaucuccaucgccaucggcaucaucucccucaugcuccagaucggcaacaucaucuccaucugggccucccacuccauccagaccggcucccagaacaacaccggcaucugcaaccagcgcaucaucaccuacgagaacuccaccugggucaaccacaccuacgucaacaucaacaacaccaacgucgucgccggcgaggacaagaccuccgucacccucgccggcaacuccucccucugcuccaucuccggcugggccaucuacaccaaggacaacuccauccgcaucggcuccaagggcgacgucuucgucauccgcgagcccuucaucuccugcucccaccucgagugccgcaccuucuuccucacccagggcgcccuccucaacgacaagcacuccaacggcaccgucaaggaccgcucccccuaccgcgcccucauguccugcccccucggcgaggcccccucccccuacaacuccaaguucgaguccgucgccugguccgccuccgccugccacgacggcaugggcuggcucaccaucggcaucuccggccccgacaacggcgccgucgccguccucaaguacaacggcaucaucaccggcaccaucaaguccuggaagaagcagauccuccgcacccaggaguccgagugcgucugcaugaacggcuccugcuucaccaucaugaccgacggccccuccaacaaggccgccuccuacaagaucuucaagaucgagaagggcaaggucuccaaguccaucgagcucaacgcccccaacuucuacuacgaggagugcuccugcuaccccgacaccggcaucgucaugugcgucugccgcgacaacuggcacggcuccaaccgccccugggucuccuucaaccagaaccucgacuaccagaucggcuacaucugcuccggcgucuucggcgacaacccccgccccgaggacggcgagggcuccugcaaccccgucaccgucgacggcgccaacggcgucaagggcuucuccuacaaguacggcaacggcgucuggaucggccgcaccaaguccaaccgccuccgcaagggcuucgagaugaucugggaccccaacggcuggaccaacaccgacuccgacuucuccgucaagcaggacgucgucgccaucaccgacugguccggcuacuccggcuccuucguccagcaccccgagcucaccggccucgacugcauccgccccugcuucugggucgagcucguccgcggccucccccgcgagaacaccaccaucuggaccuccggcuccuccaucuccuucugcggcgucaacuccgacaccgccaacugguccuggcccgacggcgccgagcuccccuucaccaucgacaaguga

SEQ ID NO: 113651 - RNA, 1413 nt, Artificial Sequence
  derived and/or modified CDS sequence (opt2) from neuraminidase__InfluenzaA__ACZ16025
augaaccccaaccagaagaucaucaccaucggcuccaucuccaucgccaucggcaucaucucccucaugcuccagaucggcaacaucaucuccaucugggccucccacuccauccagaccggcucccagaacaacaccggcaucugcaaccagcgcaucaucaccuacgagaacuccaccugggucaaccacaccuacgucaacaucaacaacaccaacgucgucgccggcgaggacaagaccuccgucacccucgccggcaacuccucccucugcuccaucuccggcugggccaucuacaccaaggacaacuccauccgcaucggcuccaagggcgacgucuucgucauccgcgagcccuucaucuccugcucccaccucgagugccgcaccuucuuccucacccagggcgcccuccucaacgacaagcacuccaacggcaccaucaaggaccgcucccccuaccgcgcccucauguccugcccccucggcgaggcccccucccccuacaacuccaaguucgaguccgucgccugguccgccuccgccugccacgacggcaugggcuggcucaccaucggcaucuccggccccgacaacggcgccgucgccguccucaaguacaacggcaucaucaccggcaccaucaaguccuggaagaagcagauccuccgcacccaggaguccgagugcgucugcaugaacggcuccugcuucaccaucaugaccgacggccccuccaacaaggccgccuccuacaagaucuucaagaucgagaagggcaaggucaccaaguccaucgagcucaacgcccccaacuucuacuacgaggagugcuccugcuaccccgacaccggcaucgucaugugcgucugccgcgacaacuggcacggcuccaaccgccccugggucuccuucaaccagaaccucgacuaccagaucggcuacaucugcuccggcgucuucggcgacaacccccgccccgaggacggcgagggcuccugcaaccccgucaccgucgacggcgccaacggcgucaagggcuucuccuacaaguacggcaacggcgucuggaucggccgcaccaaguccaaccgccuccgcaagggcuucgagaugaucugggaccccaacggcuggaccaacaccgacuccgacuucuccgucaagcaggacgucgucgccaucaccgacugguccggcuacuccggcuccuucguccagcaccccgagcucaccggccucgacugcauccgccccugcuucugggucgagcucguccgcggccucccccgcgagaacaccaccaucuggaccuccggcuccuccaucuccuucugcggcgucaacuccgacaccgccaacugguccuggcccgacggcgccgagcuccccuucaccaucgacaaguga

SEQ ID NO: 113652 - RNA, 1413 nt, Artificial Sequence; identical to SEQ ID NO: 113497
  derived and/or modified CDS sequence (opt2) from neuraminidase__InfluenzaA__ACZ16035

SEQ ID NO: 113653 - RNA, 1410 nt, Artificial Sequence
  derived and/or modified CDS sequence (opt2) from neuraminidase__InfluenzaA__ACZ16043
augaaccccaaccagaagaucaucaccaucggcuccgucugcaugaccaucggcauggccaaccucauccuccagaucggcaacaucaucuccaucuggaucucccacuccauccagcucggcaaccagaaccagaucgagaccugcaaccaguccgucaucaccuacgagaacaacaccugggucaaccagaccuacgucaacaucuccaacaccaacuucgccgccggccaguccgucgucuccgucaagcucgccggcaacuccucccucugccccgucuccggcugggccaucuacuccaaggacaacaacauccgcaucggcuccaagggcgacgucuucgucauccgcgagcccuucaucuccugcuccccccucgagugccgcaccuucuuccucacccagggcgcccuccucaacgacaagcacuccaacggcaccaucaaggaccgcucccccuaccgcacccucauguccugccccaucggcgagguccccucccccuacaacucccgcuucgaguccgucgccugguccgccuccgccugccacgacggcaucaacuggcucaccaucggcaucuccggccccgacaacggcgccgucgccguccucaaguacaacggcaucaucaccgacaccaucaaguccuggcgcaacaacauccuccgcacccaggaguccgagugcgccugcgucaacggcuccugcuucaccgucaugaccgacggccccuccgacggccaggccuccuacaagaucuuccgcaucgagaagggcaagaucgucaaguccgucgagaugaacgcccccaacuaccacuacgaggagugcuccugcuaccccgacuccuccgagaucaccugcgucugccgcgacaacuggcacggcuccaaccgccccugggucuccuucaaccagaaccucgaguaccagaucggcuacaucugcuccggcaucuucggcgacaacccccgccccaacgacaagaccggcuccugcggccccgucuccuccaacggcgccaacggcgucaagggcuucuccuucaaguacggcaacggcgucuggaucggccgcaccaaguccaucuccucccgcaacggcuucgagaugaucugggaccccaacggcuggaccggcaccgacaacaacuucuccaucaagcaggacaucgucggcaucaacgagugguccggcuacuccggcuccuucguccagcaccccgagcucaccggccucgacugcauccgccccugcuucugggucgagcucauccgcggccgccccaaggagaacaccaucuggaccuccggcuccuccaucuccuucugcggcgucaacuccgacaccgucggcugguccuggcccgacggcgccgagcuccccuucaccaucgacaaguga

SEQ ID NO: 113654 - RNA, 1410 nt, Artificial Sequence
  derived and/or modified CDS sequence (opt2) from neuraminidase__InfluenzaA__ACZ16053
augaaccccaaccagaagaucaucaccaucggcuccgucugcaugaccaucggcauggccaaccucauccuccagaucggcaacaucaucuccaucuggaucucccacuccauccagcucggcaaccagaaccagaucgagaccugcaaccaguccgucaucaccuacgagaacaacaccugggucaaccagaccuacgucaacaucuccaacaccaacuucgccgccggccaguccgucgucuccgucaagcucgccggcaacuccucccucugccccgucuccggcugggccaucuacuccaaggacaacuccguccgcaucggcuccaagggcgacgucuucgucauccgcgagcccuucaucuccugcuccccccucgagugccgcaccuucuuccucacccagggcgcccuccucaacgacaagcacuccaacggcaccaucaaggaccgcucccccuaccgcacccucauguccugccccaucggcgagguccccucccccuacaacucccgcuucgaguccgucgccugguccgccuccgccugccacgacggcaucaacuggcucaccaucggcaucuccggccccgacaacggcgccgucgccguccucaaguacaacggcaucaucaccgacaccaucaaguccuggcgcaacaacauccuccgcacccaggaguccgagugcgccugcgucaacggcuccugcuucaccgucaugaccgacggccccuccaacggccaggccuccuacaagaucuuccgcaucgagaagggcaagaucgucaaguccgucgagaugaacgcccccaacuaccacuacgaggagugcuccugcuaccccgacuccuccgagaucaccugcgucugccgcgacaacuggcacggcuccaaccgccccugggucuccuucaaccagaaccucgaguaccagaucggcuacaucugcuccggcaucuucggcgacaacccccgccccaacgacaagaccggcuccugcggccccgucuccuccaacggcgccaacggcgucaagggcuucuccuucaaguacggcaacggcgucuggaucggccgcaccaaguccaucuccucccgcaacggcuucgagaugaucugggaccccaacggcuggaccggcaccgacaacaacuucuccaccaagcaggacaucgucggcaucaacgagugguccggcuacuccggcuccuucguccagcaccccgagcucaccggccucgacugcauccgccccugcuucugggucgagcucauccgcggccgccccaaggagaacaccaucuggaccuccggcuccuccaucuccuucugcggcgucaacuccgacaccgucggcugguccuggcccgacggcgccgagcuccccuucaccaucgacaaguga

SEQ ID NO: 113655 - RNA, 1410 nt, Artificial Sequence; identical to SEQ ID NO: 112764
  derived and/or modified CDS sequence (opt2) from neuraminidase__InfluenzaA__ACZ16073

SEQ ID NO: 113656 - RNA, 1410 nt, Artificial Sequence
  derived and/or modified CDS sequence (opt2) from neuraminidase__InfluenzaA__ACZ16083
augaaccccaaccagaagaucaucaccaucggcuccgucugcaugaccaucggcauggccaaccucauccuccagaucggcaacaucaucuccaucuggaucucccacuccauccagcucggcaaccagaaccagaucgagaccugcaaccaguccgucaucaccuacgagaacaacaccugggucaaccagaccuacgucaacaucuccaacaccaacuucgccgcccgccaguccgucgucuccgucaagcucgccggcaacuccucccucugccccgucuccggcugggccaucuacuccaaggacaacuccguccgcaucggcuccaagggcgacgucuucgucauccgcgagcccuucaucuccugcuccccccucggcugccgcaccuucuuccucacccagggcgcccuccucaacgacaagcacuccaacggcaccaucaaggaccgcucccccuaccgcacccucauguccugccccaucggcgagguccccucccccuacaacucccgcuucgaguccgucgccugguccgccuccgccugccacgacggcaucaacuggcucaccaucggcaucuccggccccgacaacggcgccgucgccguccucaaguacaacggcaucaucaccgacaccaucaaguccuggcgcaacaacauccuccgcacccaggaguccgagugcgccugcgucaacggcuccugcuucaccgucaugaccgacggccccuccaacggccaggccuccuacaagaucuuccgcaucgagaagggcaagaucgucaaguccgucgagaugaacgcccccaacuaccacuacgaggagugcuccugcuaccccgacuccuccgagaucaccugcgucugccgcgacaacuggcacggcuccaaccgccccugggucuccuucaaccagaaccucgaguaccagaucggcuacaucugcuccggcaucuucggcgacaacccccgccccaacgacaagaccggcuccugcggccccgucuccuccaacggcgccaacggcgucaagggcuucuccuucaaguacggcaacggcgucuggaucggccgcaccaaguccaucuccucccgcaacggcuucgagaugaucugggaccccaacggcuggaccggcaccgacaacaacuucuccaucaagcaggacaucgucggcaucaacgagugguccggcuacuccggcuccuucguccagcaccccgagcucaccggccucgacugcauccgccccugcuucuggaucgagcucauccgcggccgccccaaggagaacaccaucuggaccuccggcuccuccaucuccuucugcggcgucaacuccgacaccgucggcugguccuggcccgacggcgccgagcuccccuucaccaucgacaaguga

SEQ ID NO: 113657 - RNA, 1410 nt, Artificial Sequence; identical to SEQ ID NO: 112764
  derived and/or modified CDS sequence (opt2) from neuraminidase__InfluenzaA__ACZ16093

SEQ ID NO: 113658 - RNA, 1410 nt, Artificial Sequence; identical to SEQ ID NO: 112774
  derived and/or modified CDS sequence (opt2) from neuraminidase__InfluenzaA__ACZ16103

SEQ ID NO: 113659 - RNA, 1410 nt, Artificial Sequence; identical to SEQ ID NO: 112774
  derived and/or modified CDS sequence (opt2) from neuraminidase__InfluenzaA__ACZ16113

SEQ ID NO: 113660 - RNA, 1410 nt, Artificial Sequence; identical to SEQ ID NO: 112774
  derived and/or modified CDS sequence (opt2) from neuraminidase__InfluenzaA__ACZ16123

SEQ ID NO: 113661 - RNA, 1410 nt, Artificial Sequence
  derived and/or modified CDS sequence (opt2) from neuraminidase__InfluenzaA__ACZ16133
augaaccccaaccagaagaucaucaccaucggcuccgucugcaugaccaucggcauggccaaccucauccuccagaucggcaacaucaucuccaucuggaucucccacuccauccagcucggcaaccagaaccagaucgagaccugcaaccaguccgucaucaccuacgagaacaacaccugggucaaccagaccuacgucaacaucuccaacaccaacuucgccgccggccaguccgucgucuccgucaagcucgccggcaacuccucccucugccccgucuccggcugggccaucuacuccaaggacaacuccauccgcaucggcuccaagggcgacgucuucgucauccgcgagcccuucaucuccugcuccccccucgagugccgcaccuucuuccucacccagggcgcccuccucaacgacaagcacuccaacggcaccaucaaggaccgcucccccuaccgcacccucauguccugccccaucggcgagguccccucccccuacaacucccgcuucgaguccgucgccugguccgccuccgccugccacgacggcaucaacuggcucaccaucggcaucuccggccccgacaacggcgccgucgccguccucaaguacaacggcaucaucaccgacaccaucaaguccuggcgcaacaacauccuccgcacccaggaguccgagugcgccugcgucaacggcuccugcuucaccaucaugaccgacggccccuccgacggccaggccuccuacaagaucuuccgcaucgagaagggcaagaucgucaaguccgucgagaugaacgcccccaacuaccacuacgaggagugcuccugcuaccccgacuccuccgagaucaccugcgucugccgcgacaacuggcacggcuccaaccgccccugggucuccuucaaccagaaccucgaguaccagaucggcuacaucugcuccggcaucuucggcgacaacccccgccccaacgacaagaccggcuccugcggccccgucuccuccaacggcgccaacggcgucaagggcuucuccuucaaguacggcaacggcgucuggaucggccgcaccaaguccaucuccucccgcaacggcuucgagaugaucugggaccccaacggcuggaccggcaccgacaacaacuucuccaucaagcaggacaucgucggcaucaacgagugguccggcuacuccggcuccuucguccagcaccccgagcucaccggccucgacugcauccgccccugcuucugggucgagcucauccgcggccgccccaaggagaacaccaucuggaccuccggcuccuccaucuccuucugcggcgucaacuccgacaccgucggcugguccuggcccgacggcgccgagcuccccuucaccaucgacaaguga

SEQ ID NO: 113662 - RNA, 1410 nt, Artificial Sequence
  derived and/or modified CDS sequence (opt2) from neuraminidase__InfluenzaA__ACZ16143
augaaccccaaccagaagaucaucaccaucggcuccgucugcaugaccaucggcauggccaaccucauccuccagaucggcaacaucaucuccaucuggaucucccacuccauccagcucggcaaccagaaccagaucgagaccugcaaccaguccgucaucaccuacgagaacaacaccugggucaaccagaccuacgucaacaucuccaacaccaacuucgccgccggccaguccgucgucuccgucaagcucgccggcaacuccucccucugccccgucuccggcugggccaucuacuccaaggacaacuccauccgcaucggcuccaagggcgacgucuucgucauccgcgagcccuucaucuccugcuccccccucgagugccgcaccuucuuccucacccagggcgcccuccucaacgacaagcacuccaacggcaccaucaaggaccgcucccccuaccgcacccucauguccugccccaucggcgagguccccucccccuacaacucccgcuucgaguccgucgccugguccgccuccgccugccacgacggcaucaacuggcucaccaucggcaucuccggccccgacaacggcgccgucgccguccucaaguacaacggcaucaucaccgacaccaucaaguccuggcgcaacaacauccuccgcacccaggaguccgagugcgccugcgucaacggcuccugcuucaccgucaugaccgacggccccuccgacggccaggccuccuacaagaucuuccgcaucgagaagggcaagaucgucaaguccgucgagaugaacgcccccaacuaccacuacgaggagugcuccugcuaccccgacuccuccgagaucaccugcgucugccgcgacaacuggcacggcuccaaccgccccugggucuccuucaaccagaaccucgaguaccagaucggcuacaucugcuccggcaucuucggcgacaacccccgccccaacgacaagaccggcuccugcggcccccucuccuccaacggcgccaacggcgucaagggcuucuccuucaaguacggcaacggcgucuggaucggccgcaccaaguccaucuccucccgcaacggcuucgagaugaucugggaccccaacggcuggaccggcaccgacaacaacuucuccaucaagcaggacaucgucggcaucaacgagugguccggcuacuccggcuccuucguccagcaccccgagcucaccggccucgacugcauccgccccugcuucugggucgagcucauccgcggccgccccaaggagaacaccaucuggaccuccggcuccuccaucuccuucugcggcgucaacuccgacaccgucggcugguccuggcccgacggcgccgagcuccccuucaccaucgacaaguga

SEQ ID NO: 113663 - RNA, 1410 nt, Artificial Sequence; identical to SEQ ID NO: 112774
  derived and/or modified CDS sequence (opt2) from neuraminidase__InfluenzaA__ACZ16153

SEQ ID NO: 113664 - RNA, 1410 nt, Artificial Sequence; identical to SEQ ID NO: 112774
  derived and/or modified CDS sequence (opt2) from neuraminidase__InfluenzaA__ACZ16163

SEQ ID NO: 113665 - RNA, 1410 nt, Artificial Sequence; identical to SEQ ID NO: 112764
  derived and/or modified CDS sequence (opt2) from neuraminidase__InfluenzaA__ACZ16173

SEQ ID NO: 113666 - RNA, 1410 nt, Artificial Sequence; identical to SEQ ID NO: 112774
  derived and/or modified CDS sequence (opt2) from neuraminidase__InfluenzaA__ACZ16193

SEQ ID NO: 113667 - RNA, 1410 nt, Artificial Sequence; identical to SEQ ID NO: 112774
  derived and/or modified CDS sequence (opt2) from neuraminidase__InfluenzaA__ACZ16203

SEQ ID NO: 113668 - RNA, 1410 nt, Artificial Sequence; identical to SEQ ID NO: 112774
  derived and/or modified CDS sequence (opt2) from neuraminidase__InfluenzaA__ACZ16213

SEQ ID NO: 113669 - RNA, 1410 nt, Artificial Sequence
  derived and/or modified CDS sequence (opt2) from neuraminidase__InfluenzaA__ACZ16223
augaaccccaaccagaagaucaucaccaucggcuccgucugcaugaccaucggcauggccaaccucauccuccagaucggcaacaucaucuccaucuggaucucccacuccauccagcucggcaaccagaaccagaucgagaccugcaaccaguccgucaucaccuacgagaacaacaccugggucaaccagaccuacgucaacaucuccaacaccaacuucgccgccggccaguccgucgucuccgucaagcucgccggcaacuccucccucugccccgucuccggcugggccaucuacuccaaggacaacuccauccgcaucggcuccaagggcgacgucuucgucauccgcgagcccuucaucuccugcuccccccucgagugccgcaccuucuuccucacccagggcgcccuccucaacgacaagcacuccaacgagaccaucaaggaccgcucccccuaccgcacccucauguccugccccaucggcgagguccccucccccuacaacucccgcuucgaguccgucgccugguccgccuccgccugccacgacggcaucaacuggcucaccaucggcaucuccggccccgacaacggcgccgucgccguccucaaguacaacggcaucaucaccgacaccaucaaguccuggcgcaacaacauccuccgcacccaggaguccgagugcgccugcgucaacggcuccugcuucaccgucaugaccgacggccccuccgacggccaggccuccuacaagaucuuccgcaucgagaagggcaagaucgucaaguccgucgagaugaacgcccccaacuaccacuacgaggagugcuccugcuaccccgacuccuccgagaucaccugcgucugccgcgacaacuggcacggcuccaaccgccccugggucuccuucaaccagaaccucgaguaccagaucggcuacaucugcuccggcaucuucggcgacaacccccgccccaacgacaagaccggcuccugcggccccgucuccuccaacggcgccaacggcgucaagggcuucuccuucaaguacggcaacggcgucuggaucggccgcaccaaguccaucuccucccgcaacggcuucgagaugaucugggaccccaacggcuggaccggcaccgacaacaacuucuccaucaagcaggacaucaucggcaucaacgagugguccggcuacuccggcuccuucguccagcaccccgagcucaccggccucgacugcauccgccccugcuucugggucgagcucauccgcggccgccccaaggagaacaccaucuggaccuccggcuccuccaucuccuucugcggcgucaacuccgacaccgucggcugguccuggcccgacggcgccgagcuccccuucaccaucgacaaguga

SEQ ID NO: 113670 - RNA, 1410 nt, Artificial Sequence; identical to SEQ ID NO: 112774
  derived and/or modified CDS sequence (opt2) from neuraminidase__InfluenzaA__ACZ16233

SEQ ID NO: 113671 - RNA, 1410 nt, Artificial Sequence; identical to SEQ ID NO: 113482
  derived and/or modified CDS sequence (opt2) from neuraminidase__InfluenzaA__ACZ16243

SEQ ID NO: 113672 - RNA, 1410 nt, Artificial Sequence
  derived and/or modified CDS sequence (opt2) from neuraminidase__InfluenzaA__ACZ16253
augaaccccaaccagaagaucaucaccaucggcuccgucugcaugaccaucggcauggccaaccucauccuccagaucggcaacaucaucuccaucuggaucucccacuccauccagcucggcaaccagaaccagaucgagaccugcaaccaguccgucaucaccuacgagaacaacaccugggucaaccagaccuacgucaacaucuccaacaccaacuucgccgccggccaguccgucgucuccgucaagcucgccggcaacuccucccucugccccgucuccggcugggccaucuacuccaaggacaacuccauccgcaucggcuccaagggcgacgucuucgucauccgcgagcccuucaucuccugcuccccccucgagugccgcaccuucuuccucacccagggcgcccuccucaacgacaagcacuccaacggcaccaucaaggaccgcucccccuaccgcacccucauguccugccccaucggcgagguccccucccccuacaacucccgcuucgaguccgucgccugguccgccuccgccugccacgacggcaucaacuggcucaccaucggcaucuccggccccgacaacggcgccgucgccguccucaaguacaacggcaucaucaccgacaccaucaaguccuggcgcaacaacauccuccgcacccaggaguccgagugcgccugcgucaacggcuccugcuucaccgucaugaccgacggccccuccgacggccaggccuccuacaagaucuuccgcaucgagaagggcaagaucgucaaguccgucgagaugaacgcccccaacuaccacuacgaggagugcuccugcuaccccgacuccuccgagaucaccugcgucugccgcgacaacuggcacggcuccaaccgccccugggucuccuucaaccagaaccucgaguaccagaucggcuacaucugcuccggcaucuucggcgacaacccccgccccaacgacaagaccggcuccugcggccccgucuccuccaacggcgccaacggcgucaagggcuucuccuucaaguacggcaacggcgucuggaucggccgcaccaaguccaucuccucccgcaacggcuucgagaugaucugggaccccaacggcuggaccggcaccgacaacaacuucuccaucaagcaggacaucgucggcaucaacgagugguccggcuacuccggcuccuucguccagcaccccgagcucaccggccucgacugcauccgccccugcuucugggucgagcucauccgcggccgccccaaggagaacaccaucuggaccuccggcuccuccaucuccuucugcggcgucaacuccgacaccgucggcugguccuggcccgacggcgccgagcuccccuucaacaucgacaaguga

SEQ ID NO: 113673 - RNA, 1410 nt, Artificial Sequence; identical to SEQ ID NO: 112774
  derived and/or modified CDS sequence (opt2) from neuraminidase__InfluenzaA__ACZ16263

SEQ ID NO: 113674 - RNA, 1410 nt, Artificial Sequence; identical to SEQ ID NO: 112764
  derived and/or modified CDS sequence (opt2) from neuraminidase__InfluenzaA__ACZ16283

SEQ ID NO: 113675 - RNA, 1410 nt, Artificial Sequence; identical to SEQ ID NO: 112774
  derived and/or modified CDS sequence (opt2) from neuraminidase__InfluenzaA__ACZ16293

SEQ ID NO: 113676 - RNA, 1410 nt, Artificial Sequence; identical to SEQ ID NO: 112774
  derived and/or modified CDS sequence (opt2) from neuraminidase__InfluenzaA__ACZ16303

SEQ ID NO: 113677 - RNA, 1410 nt, Artificial Sequence; identical to SEQ ID NO: 112774
  derived and/or modified CDS sequence (opt2) from neuraminidase__InfluenzaA__ACZ16313

SEQ ID NO: 113678 - RNA, 1410 nt, Artificial Sequence; identical to SEQ ID NO: 112774
  derived and/or modified CDS sequence (opt2) from neuraminidase__InfluenzaA__ACZ16323

SEQ ID NO: 113679 - RNA, 1410 nt, Artificial Sequence; identical to SEQ ID NO: 112774
  derived and/or modified CDS sequence (opt2) from neuraminidase__InfluenzaA__ACZ16333

SEQ ID NO: 113680 - RNA, 1410 nt, Artificial Sequence; identical to SEQ ID NO: 113482
  derived and/or modified CDS sequence (opt2) from neuraminidase__InfluenzaA__ACZ16343

SEQ ID NO: 113681 - RNA, 1410 nt, Artificial Sequence; identical to SEQ ID NO: 112774
  derived and/or modified CDS sequence (opt2) from neuraminidase__InfluenzaA__ACZ16353

SEQ ID NO: 113682 - RNA, 1410 nt, Artificial Sequence; identical to SEQ ID NO: 112774
  derived and/or modified CDS sequence (opt2) from neuraminidase__InfluenzaA__ACZ16363

SEQ ID NO: 113683 - RNA, 1410 nt, Artificial Sequence; identical to SEQ ID NO: 112764
  derived and/or modified CDS sequence (opt2) from neuraminidase__InfluenzaA__ACZ16373

SEQ ID NO: 113684 - RNA, 1410 nt, Artificial Sequence; identical to SEQ ID NO: 112774
  derived and/or modified CDS sequence (opt2) from neuraminidase__InfluenzaA__ACZ16383

SEQ ID NO: 113685 - RNA, 1410 nt, Artificial Sequence; identical to SEQ ID NO: 112774
  derived and/or modified CDS sequence (opt2) from neuraminidase__InfluenzaA__ACZ16393

SEQ ID NO: 113686 - RNA, 1410 nt, Artificial Sequence; identical to SEQ ID NO: 112774
  derived and/or modified CDS sequence (opt2) from neuraminidase__InfluenzaA__ACZ16403

SEQ ID NO: 113687 - RNA, 1410 nt, Artificial Sequence; identical to SEQ ID NO: 112774
  derived and/or modified CDS sequence (opt2) from neuraminidase__InfluenzaA__ACZ16423

SEQ ID NO: 113688 - RNA, 1410 nt, Artificial Sequence; identical to SEQ ID NO: 112774
  derived and/or modified CDS sequence (opt2) from neuraminidase__InfluenzaA__ACZ16433

SEQ ID NO: 113689 - RNA, 1410 nt, Artificial Sequence; identical to SEQ ID NO: 112774
  derived and/or modified CDS sequence (opt2) from neuraminidase__InfluenzaA__ACZ16443

SEQ ID NO: 113690 - RNA, 1410 nt, Artificial Sequence; identical to SEQ ID NO: 112774
  derived and/or modified CDS sequence (opt2) from neuraminidase__InfluenzaA__ACZ16453

SEQ ID NO: 113691 - RNA, 1410 nt, Artificial Sequence; identical to SEQ ID NO: 113482
  derived and/or modified CDS sequence (opt2) from neuraminidase__InfluenzaA__ACZ16463

SEQ ID NO: 113692 - RNA, 1410 nt, Artificial Sequence; identical to SEQ ID NO: 112774
  derived and/or modified CDS sequence (opt2) from neuraminidase__InfluenzaA__ACZ16483

SEQ ID NO: 113693 - RNA, 1410 nt, Artificial Sequence; identical to SEQ ID NO: 112774
  derived and/or modified CDS sequence (opt2) from neuraminidase__InfluenzaA__ACZ16493

SEQ ID NO: 113694 - RNA, 1410 nt, Artificial Sequence
  derived and/or modified CDS sequence (opt2) from neuraminidase__InfluenzaA__ACZ16503
augaaccccaaccagaagaucaucaccaucggcuccgucugcaugaccaucggcauggccaaccucauccuccagaucggcaacaucaucuccaucuggaucucccacuccauccagcucggcaaccagaaccagaucgagaccugcaaccaguccgucaucaccuacgagaacaacaccugggucaaccagaccuacgucaacaucuccaacaccaacuucgccgccggccaguccgucgucuccgucaagcucgccggcaacuccucccucugccccgucuccggcugggccaucuacuccaaggacaacuccauccgcaucggcuccaagggcgacgucuucgucauccgcgagcccuucaucuccugcuccccccucgagugccgcaccuucuuccucacccagggcgcccuccucaacgacaagcacuccaacggcaccaucaaggaccgcucccccuaccgcacccucauguccugccccaucggcgagguccccucccccuacaacucccgcuucgaguccgucgccugguccgccuccgccugccacgacggcaucaacuggcucaccaucggcaucuccggccccgacaacggcgccgucgccguccucaaguacaacggcaucaucaccgacaccaucaaguccuggcgcaacaacauccuccgcacccaggaguccgagugcgccugcgucaacggcuccugcuucaccgucaugaccgacggccccuccgacggccaggccuccuacaagaucuuccgcaucgagaagggcaagaucgucaaguccgucgagauggacgcccccaacuaccacuacgaggagugcuccugcuaccccgacuccuccgagaucaccugcgucugccgcgacaacuggcacggcuccaaccgccccugggucuccuucaaccagaaccucgaguaccagaucggcuacaucugcuccggcaucuucggcgacaacccccgccccaacgacaagaccggcuccugcggccccgucuccuccaacggcgccaacggcgucaagggcuucuccuucaaguacggcaacggcgucuggaucggccgcaccaaguccaucuccucccgcaacggcuucgagaugaucugggaccccaacggcuggaccggcaccgacaacaacuucuccaucaagcaggacaucgucggcaucaacgagugguccggcuacuccggcuccuucguccagcaccccgagcucaccggccucgacugcauccgccccugcuucugggucgagcucauccgcggccgccccaaggagaacaccaucuggaccuccggcuccuccaucuccuucugcggcgucaacuccgacaccgucggcugguccuggcccgacggcgccgagcuccccuucaccaucgacaaguga

SEQ ID NO: 113695 - RNA, 1410 nt, Artificial Sequence; identical to SEQ ID NO: 113482
  derived and/or modified CDS sequence (opt2) from neuraminidase__InfluenzaA__ACZ16513

SEQ ID NO: 113696 - RNA, 1410 nt, Artificial Sequence; identical to SEQ ID NO: 112774
  derived and/or modified CDS sequence (opt2) from neuraminidase__InfluenzaA__ACZ16523

SEQ ID NO: 113697 - RNA, 1410 nt, Artificial Sequence; identical to SEQ ID NO: 112774
  derived and/or modified CDS sequence (opt2) from neuraminidase__InfluenzaA__ACZ16533

SEQ ID NO: 113698 - RNA, 1410 nt, Artificial Sequence; identical to SEQ ID NO: 112764
  derived and/or modified CDS sequence (opt2) from neuraminidase__InfluenzaA__ACZ16543

SEQ ID NO: 113699 - RNA, 1410 nt, Artificial Sequence; identical to SEQ ID NO: 112774
  derived and/or modified CDS sequence (opt2) from neuraminidase__InfluenzaA__ACZ16553

SEQ ID NO: 113700 - RNA, 1410 nt, Artificial Sequence; identical to SEQ ID NO: 112774
  derived and/or modified CDS sequence (opt2) from neuraminidase__InfluenzaA__ACZ16586

SEQ ID NO: 113701 - RNA, 1410 nt, Artificial Sequence; identical to SEQ ID NO: 112774
  derived and/or modified CDS sequence (opt2) from neuraminidase__InfluenzaA__ACZ16596

SEQ ID NO: 113702 - RNA, 1410 nt, Artificial Sequence; identical to SEQ ID NO: 112774
  derived and/or modified CDS sequence (opt2) from neuraminidase__InfluenzaA__ACZ16606

SEQ ID NO: 113703 - RNA, 1410 nt, Artificial Sequence; identical to SEQ ID NO: 112774
  derived and/or modified CDS sequence (opt2) from neuraminidase__InfluenzaA__ACZ16633

SEQ ID NO: 113704 - RNA, 1410 nt, Artificial Sequence
  derived and/or modified CDS sequence (opt2) from neuraminidase__InfluenzaA__ACZ16643
augaaccccaaccagaagaucaucaccaucggcuccgucugcaugaccaucggcauggccaaccucauccuccagaucggcaacaucaucuccaucuggaucucccacuccauccagcucggcaaccagaaccagaucgagaccugcaaccaguccgucaucaccuacgagaacaacaccugggucaaccagaccuacgucaacaucuccaacaccaacuucgccgccggccaguccgucgucuccgucaagcucgccggcaacuccucccucugccccgucuccggcugggccaucuacuccaaggacaacuccauccgcaucggcuccaagggcgacgucuucgucauccgcgagcccuucaucuccugcuccccccucgagugccgcaccuucuuccucacccagggcgcccuccucaacgacaagcacuccaacggcaccaucaaggaccgcucccccuaccgcacccucauguccugccccaucggcgagguccccucccccuacaacucccgcuucgaguccgucgccugguccgccuccgccugccacgacggcaucaacuggcucaccaucggcaucuccggccccgacaacggcgccgucgccguccuccgcuacaacggcaucaucaccgacaccaucaaguccuggcgcaacaacauccuccgcacccaggaguccgagugcgccugcgucaacggcuccugcuucaccgucaugaccgacggccccuccgacggccaggccuccuacaagaucuuccgcaucgagaagggcaagaucgucaaguccgucgagaugaacgcccccaacuaccacuacgaggagugcuccugcuaccccgacuccuccgagaucaccugcgucugccgcgacaacuggcacggcuccaaccgccccugggucuccuucaaccagaaccucgaguaccagaucggcuacaucugcuccggcaucuucggcgacaacccccgccccaacgacaagaccggcuccugcggccccgucuccuccaacggcgccaacggcgucaagggcuucuccuucaaguacggcaacggcgucuggaucggccgcaccaaguccaucuccucccgcaacggcuucgagaugaucugggaccccaacggcuggaccggcaccgacaacaacuucuccaucaagcaggacaucgucggcaucaacgagugguccggcuacuccggcuccuucguccagcaccccgagcucaccggccucgacugcauccgccccugcuucugggucgagcucauccgcggccgccccaaggagaacaccaucuggaccuccggcuccuccaucuccuucugcggcgucaacuccgacaccgucggcugguccuggcccgacggcgccgagcuccccuucaccaucgacaaguga

SEQ ID NO: 113705 - RNA, 1410 nt, Artificial Sequence; identical to SEQ ID NO: 112774
  derived and/or modified CDS sequence (opt2) from neuraminidase__InfluenzaA__ACZ16653

SEQ ID NO: 113706 - RNA, 1410 nt, Artificial Sequence; identical to SEQ ID NO: 112774
  derived and/or modified CDS sequence (opt2) from neuraminidase__InfluenzaA__ACZ16663

SEQ ID NO: 113707 - RNA, 1410 nt, Artificial Sequence; identical to SEQ ID NO: 112774
  derived and/or modified CDS sequence (opt2) from neuraminidase__InfluenzaA__ACZ16673

SEQ ID NO: 113708 - RNA, 1410 nt, Artificial Sequence; identical to SEQ ID NO: 112774
  derived and/or modified CDS sequence (opt2) from neuraminidase__InfluenzaA__ACZ16683

SEQ ID NO: 113709 - RNA, 1410 nt, Artificial Sequence; identical to SEQ ID NO: 112774
  derived and/or modified CDS sequence (opt2) from neuraminidase__InfluenzaA__ACZ16693

SEQ ID NO: 113710 - RNA, 1410 nt, Artificial Sequence; identical to SEQ ID NO: 112774
  derived and/or modified CDS sequence (opt2) from neuraminidase__InfluenzaA__ACZ16703

SEQ ID NO: 113711 - RNA, 1410 nt, Artificial Sequence; identical to SEQ ID NO: 112774
  derived and/or modified CDS sequence (opt2) from neuraminidase__InfluenzaA__ACZ16713

SEQ ID NO: 113712 - RNA, 1410 nt, Artificial Sequence; identical to SEQ ID NO: 112774
  derived and/or modified CDS sequence (opt2) from neuraminidase__InfluenzaA__ACZ16723

SEQ ID NO: 113713 - RNA, 1410 nt, Artificial Sequence; identical to SEQ ID NO: 112774
  derived and/or modified CDS sequence (opt2) from neuraminidase__InfluenzaA__ACZ16733

SEQ ID NO: 113714 - RNA, 1410 nt, Artificial Sequence; identical to SEQ ID NO: 112774
  derived and/or modified CDS sequence (opt2) from neuraminidase__InfluenzaA__ACZ16743

SEQ ID NO: 113715 - RNA, 1410 nt, Artificial Sequence; identical to SEQ ID NO: 112774
  derived and/or modified CDS sequence (opt2) from neuraminidase__InfluenzaA__ACZ16753

SEQ ID NO: 113716 - RNA, 1410 nt, Artificial Sequence; identical to SEQ ID NO: 112774
  derived and/or modified CDS sequence (opt2) from neuraminidase__InfluenzaA__ACZ16763

SEQ ID NO: 113717 - RNA, 1410 nt, Artificial Sequence; identical to SEQ ID NO: 112764
  derived and/or modified CDS sequence (opt2) from neuraminidase__InfluenzaA__ACZ16773

SEQ ID NO: 113718 - RNA, 1410 nt, Artificial Sequence; identical to SEQ ID NO: 112774
  derived and/or modified CDS sequence (opt2) from neuraminidase__InfluenzaA__ACZ16783

SEQ ID NO: 113719 - RNA, 1410 nt, Artificial Sequence; identical to SEQ ID NO: 112774
  derived and/or modified CDS sequence (opt2) from neuraminidase__InfluenzaA__ACZ16793

SEQ ID NO: 113720 - RNA, 1410 nt, Artificial Sequence; identical to SEQ ID NO: 112774
  derived and/or modified CDS sequence (opt2) from neuraminidase__InfluenzaA__ACZ16803

SEQ ID NO: 113721 - RNA, 1410 nt, Artificial Sequence; identical to SEQ ID NO: 112774
  derived and/or modified CDS sequence (opt2) from neuraminidase__InfluenzaA__ACZ16813

SEQ ID NO: 113722 - RNA, 1410 nt, Artificial Sequence; identical to SEQ ID NO: 112764
  derived and/or modified CDS sequence (opt2) from neuraminidase__InfluenzaA__ACZ16823

SEQ ID NO: 113723 - RNA, 1410 nt, Artificial Sequence; identical to SEQ ID NO: 112774
  derived and/or modified CDS sequence (opt2) from neuraminidase__InfluenzaA__ACZ16833

SEQ ID NO: 113724 - RNA, 1410 nt, Artificial Sequence; identical to SEQ ID NO: 112774
  derived and/or modified CDS sequence (opt2) from neuraminidase__InfluenzaA__ACZ16843

SEQ ID NO: 113725 - RNA, 1410 nt, Artificial Sequence; identical to SEQ ID NO: 113694
  derived and/or modified CDS sequence (opt2) from neuraminidase__InfluenzaA__ACZ16853

SEQ ID NO: 113726 - RNA, 1410 nt, Artificial Sequence; identical to SEQ ID NO: 112774
  derived and/or modified CDS sequence (opt2) from neuraminidase__InfluenzaA__ACZ16863

SEQ ID NO: 113727 - RNA, 1410 nt, Artificial Sequence; identical to SEQ ID NO: 112774
  derived and/or modified CDS sequence (opt2) from neuraminidase__InfluenzaA__ACZ16873

SEQ ID NO: 113728 - RNA, 1410 nt, Artificial Sequence; identical to SEQ ID NO: 112774
  derived and/or modified CDS sequence (opt2) from neuraminidase__InfluenzaA__ACZ16883

SEQ ID NO: 113729 - RNA, 1410 nt, Artificial Sequence; identical to SEQ ID NO: 112774
  derived and/or modified CDS sequence (opt2) from neuraminidase__InfluenzaA__ACZ16893

SEQ ID NO: 113730 - RNA, 1410 nt, Artificial Sequence; identical to SEQ ID NO: 112774
  derived and/or modified CDS sequence (opt2) from neuraminidase__InfluenzaA__ACZ16903

SEQ ID NO: 113731 - RNA, 1410 nt, Artificial Sequence; identical to SEQ ID NO: 112774
  derived and/or modified CDS sequence (opt2) from neuraminidase__InfluenzaA__ACZ16913

SEQ ID NO: 113732 - RNA, 1410 nt, Artificial Sequence; identical to SEQ ID NO: 112774
  derived and/or modified CDS sequence (opt2) from neuraminidase__InfluenzaA__ACZ16923

SEQ ID NO: 113733 - RNA, 1410 nt, Artificial Sequence; identical to SEQ ID NO: 112774
  derived and/or modified CDS sequence (opt2) from neuraminidase__InfluenzaA__ACZ16933

SEQ ID NO: 113734 - RNA, 1410 nt, Artificial Sequence; identical to SEQ ID NO: 112774
  derived and/or modified CDS sequence (opt2) from neuraminidase__InfluenzaA__ACZ16943

SEQ ID NO: 113735 - RNA, 1410 nt, Artificial Sequence; identical to SEQ ID NO: 112764
  derived and/or modified CDS sequence (opt2) from neuraminidase__InfluenzaA__ACZ16953

SEQ ID NO: 113736 - RNA, 1410 nt, Artificial Sequence; identical to SEQ ID NO: 112774
  derived and/or modified CDS sequence (opt2) from neuraminidase__InfluenzaA__ACZ16963

SEQ ID NO: 113737 - RNA, 1410 nt, Artificial Sequence; identical to SEQ ID NO: 112774
  derived and/or modified CDS sequence (opt2) from neuraminidase__InfluenzaA__ACZ16973

SEQ ID NO: 113738 - RNA, 1410 nt, Artificial Sequence; identical to SEQ ID NO: 112774
  derived and/or modified CDS sequence (opt2) from neuraminidase__InfluenzaA__ACZ16983

SEQ ID NO: 113739 - RNA, 1410 nt, Artificial Sequence; identical to SEQ ID NO: 112774
  derived and/or modified CDS sequence (opt2) from neuraminidase__InfluenzaA__ACZ16993

SEQ ID NO: 113740 - RNA, 1410 nt, Artificial Sequence; identical to SEQ ID NO: 112774
  derived and/or modified CDS sequence (opt2) from neuraminidase__InfluenzaA__ACZ17003

SEQ ID NO: 113741 - RNA, 1410 nt, Artificial Sequence; identical to SEQ ID NO: 112774
  derived and/or modified CDS sequence (opt2) from neuraminidase__InfluenzaA__ACZ17023

SEQ ID NO: 113742 - RNA, 1410 nt, Artificial Sequence; identical to SEQ ID NO: 112774
  derived and/or modified CDS sequence (opt2) from neuraminidase__InfluenzaA__ACZ17043

SEQ ID NO: 113743 - RNA, 1410 nt, Artificial Sequence; identical to SEQ ID NO: 112774
  derived and/or modified CDS sequence (opt2) from neuraminidase__InfluenzaA__ACZ17053

SEQ ID NO: 113744 - RNA, 1410 nt, Artificial Sequence
  derived and/or modified CDS sequence (opt2) from neuraminidase__InfluenzaA__ACZ17063
augaaccccaaccagaagaucaucaccaucggcuccgucugcaugaccaucggcauggccaaccucauccuccagaucggcaacaucaucuccaucuggaucucccacuccauccagcucggcgaccagaaccagaucgagaccugcaaccaguccgucaucaccuacgagaacaacaccugggucaaccagaccuacgucaacaucuccaacaccaacuucgccgccggccaguccgucgucuccgucaagcucgccggcaacuccucccucugccccgucuccggcugggccaucuacuccaaggacaacuccauccgcaucggcuccaagggcgacgucuucgucauccgcgagcccuucaucuccugcuccccccucgagugccgcaccuucuuccucacccagggcgcccuccucaacgacaagcacuccaacggcaccaucaaggaccgcucccccuaccgcacccucauguccugccccaucggcgagguccccucccccuacaacucccgcuucgaguccgucgccugguccgccuccgccugccacgacggcaucaacuggcucaccaucggcaucuccggccccgacaacggcgccgucgccguccucaaguacaacggcaucaucaccgacaccaucaaguccuggcgcaacaacauccuccgcacccaggaguccgagugcgccugcgucaacggcuccugcuucaccgucaugaccgacggccccuccgacggccaggccuccuacaagaucuuccgcaucgagaagggcaagaucgucaaguccgucgagaugaacgcccccaacuaccacuacgaggagugcuccugcuaccccgacuccuccgagaucaccugcgucugccgcgacaacuggcacggcuccaaccgccccugggucuccuucaaccagaaccucgaguaccagaucggcuacaucugcuccggcaucuucggcgacaacccccgccccaacgacaagaccggcuccugcggccccgucuccuccaacggcgccaacggcgucaagggcuucuccuucaaguacggcaacggcgucuggaucggccgcaccaaguccaucuccucccgcaacggcuucgagaugaucugggaccccaacggcuggaccggcaccgacaacaacuucuccaucaagcaggacaucgucggcaucaacgagugguccggcuacuccggcuccuucguccagcaccccgagcucaccggccucgacugcauccgccccugcuucugggucgagcucauccgcggccgccccaaggagaacaccaucuggaccuccggcuccuccaucuccuucugcggcgucaacuccgacaccgucggcugguccuggcccgacggcgccgagcuccccuucaccaucgacaaguga

SEQ ID NO: 113745 - RNA, 1410 nt, Artificial Sequence; identical to SEQ ID NO: 112774
  derived and/or modified CDS sequence (opt2) from neuraminidase__InfluenzaA__ACZ17073

SEQ ID NO: 113746 - RNA, 1410 nt, Artificial Sequence; identical to SEQ ID NO: 113482
  derived and/or modified CDS sequence (opt2) from neuraminidase__InfluenzaA__ACZ17083

SEQ ID NO: 113747 - RNA, 1410 nt, Artificial Sequence
  derived and/or modified CDS sequence (opt2) from neuraminidase__InfluenzaA__ACZ17093
augaaccccaaccagaagaucaucaccaucggcuccgucugcaugaccaucggcauggccaaccucauccuccagaucggcaacaucaucuccaucuggaucucccacuccauccagcucggcaaccagaaccagaucgagaccugcaaccaguccgucaucaccuacgagaacaacaccugggucaaccagaccuacgucaacaucuccaacaccaacuucgccgccggccaguccgucgucuccgucaagcucgccggcaacuccucccucugccccgucuccggcugggccaucuacuccaaggacaacuccauccgcaucggcuccaagggcgacgucuucgucauccgcgagcccuucaucuccugcucccccuucgagugccgcaccuucuuccucacccagggcgcccuccucaacgacaagcacuccaacggcaccaucaaggaccgcucccccuaccgcacccucauguccugccccaucggcgagguccccucccccuacaacucccgcuucgaguccgucgccugguccgccuccgccugccacgacggcaucaacuggcucaccaucggcaucuccggccccgacaacggcgccgucgccguccucaaguacaacggcaucaucaccgacaccaucaaguccuggcgcaacaacauccuccgcacccaggaguccgagugcgccugcgucaacggcuccugcuucaccgucaugaccgacggccccuccgacggccaggccuccuacaagaucuuccgcaucgagaagggcaagaucgucaaguccgucgagaugaacgcccccaacuaccacuacgaggagugcuccugcuaccccgacuccuccgagaucaccugcgucugccgcgacaacuggcacggcuccaaccgccccugggucuccuucaaccagaaccucgaguaccagaucggcuacaucugcuccggcaucuucggcgacaacccccgccccaacgacaagaccggcuccugcggccccgucuccuccaacggcgccaacggcgucaagggcuucuccuucaaguacggcaacggcgucuggaucggccgcaccaaguccaucuccucccgcaacggcuucgagaugaucugggaccccaacggcuggaccggcaccgacaacaacuucuccaucaagcaggacaucgucggcaucaacgagugguccggcuacuccggcuccuucguccagcaccccgagcucaccggccucgacugcauccgccccugcuucugggucgagcucauccgcggccgccccaaggagaacaccaucuggaccuccggcuccuccaucuccuucugcggcgucaacuccgacaccgucggcugguccuggcccgacggcgccgagcuccccuucaccaucgacaaguga

SEQ ID NO: 113748 - RNA, 1410 nt, Artificial Sequence
  derived and/or modified CDS sequence (opt2) from neuraminidase__InfluenzaA__ACZ17113
augaaccccaaccagaagaucaucaccaucggcuccgucugcaugaccaucggcauggccaaccucauccuccagaucggcaacaucaucuccaucuggaucucccacuccauccagcucggcaaccagaaccagaucgagaccugcaaccaguccgucaucaccuacgagaacaacaccugggucaaccagaccuacgucaacaucuccaacaccaacuucgccgccggccaguccgucgucuccgucaagcucgccggcaacuccucccucugccccgucaacggcugggccaucuacuccaaggacaacuccauccgcaucggcuccaagggcgacgucuucgucauccgcgagcccuucaucuccugcuccccccucgagugccgcaccuucuuccucacccagggcgcccuccucaacgacaagcacuccaacggcaccaucaaggaccgcucccccuaccgcacccucauguccugccccaucggcgagguccccucccccuacaacucccgcuucgaguccgucgccugguccgccuccgccugccacgacggcaucaacuggcucaccaucggcaucuccggccccgacaacggcgccgucgccguccucaaguacaacggcaucaucaccgacaccaucaaguccuggcgcaacaacauccuccgcacccaggaguccgagugcgccugcgucaacggcuccugcuucaccgucaugaccgacggccccuccgacggccaggccuccuacaagaucuuccgcaucgagaagggcaagaucgucaaguccgucgagaugaacgcccccaacuaccacuacgaggagugcuccugcuaccccgacuccuccgagaucaccugcgucugccgcgacaacuggcacggcuccaaccgccccugggucuccuucaaccagaaccucgaguaccagaucggcuacaucugcuccggcaucuucggcgacaacccccgccccaacgacaagaccggcuccugcggccccgucuccuccaacggcgccaacggcgucaagggcuucuccuucaaguacggcaacggcgucuggaucggccgcaccaaguccaucuccucccgcaacggcuucgagaugaucugggaccccaacggcuggaccggcaccgacaacaacuucuccaucaagcaggacaucgucggcaucaacgagugguccggcuacuccggcuccuucguccagcaccccgagcucaccggccucgacugcauccgccccugcuucugggucgagcucauccgcggccgccccaaggagaacaccaucuggaccuccggcuccuccaucuccuucugcggcgucaacuccgacaccgucggcugguccuggcccgacggcgccgagcuccccuucaccaucgacaaguga

SEQ ID NO: 113749 - RNA, 1410 nt, Artificial Sequence; identical to SEQ ID NO: 112774
  derived and/or modified CDS sequence (opt2) from neuraminidase__InfluenzaA__ACZ17123

SEQ ID NO: 113750 - RNA, 1410 nt, Artificial Sequence; identical to SEQ ID NO: 112774
  derived and/or modified CDS sequence (opt2) from neuraminidase__InfluenzaA__ACZ17133

SEQ ID NO: 113751 - RNA, 1410 nt, Artificial Sequence
  derived and/or modified CDS sequence (opt2) from neuraminidase__InfluenzaA__ACZ17163
augaaccccaaccagaagaucaucaccaucggcuccgucugcaugaccaucggcauggccaaccucauccuccagaucggcaacaucaucuccaucuggaucucccacuccauccagcucggcaaccagaaccagaucgagaccugcaaccaguccgucaucaccuacgagaacaacaccugggucaaccagaccuacgucaacaucuccaacaccaacuucgccgccggccaguccgucgucuccgucaagcucgccggcaacuccucccucugccccgucuccggcugggccaucuacuccaaggacaacuccauccgcaucggcuccaagggcgacgucuucgucauccgcgagcccuucaucuccugcuccccccucgagugccgcaccuucuuccucacccagggcgcccuccucaacgacaagcacuccaacggcaccaucaaggaccgcucccccuaccgcacccucauguccugccccaucggcgagguccccucccccuacaacucccgcuucgaguccgucgccugguccgccuccgccugccacgacggcaucaacuggcucaccaucggcaucuccggccccgacaacggcgccgucgccguccucaaguacaacggcaucaucaccgacaccaucaaguccuggcgcaacaacauccuccgcacccaggaguccgagugcgccugcgucaacggcuccugcuucaccgucaugaccgacggccccuccgacggccaggccuccuacaagaucuuccgcaucgagaagggcaagaucgucaaguccgucgagaugaacgcccccaacuaccacuacgaggagugcuccugcuaccccgacuccuccgagaucaccugcgucugccgcgacaacuggcacggcuccaaccgccccugggucuccuucaaccgcaaccucgaguaccagaucggcuacaucugcuccggcaucuucggcgacaacccccgccccaacgacaagaccggcuccugcggccccgucuccuccaacggcgccaacggcgucaagggcuucuccuucaaguacggcaacggcgucuggaucggccgcaccaaguccaucuccucccgcaacggcuucgagaugaucugggaccccaacggcuggaccggcaccgacaacaacuucuccaucaagcaggacaucgucggcaucaacgagugguccggcuacuccggcuccuucguccagcaccccgagcucaccggccucgacugcauccgccccugcuucugggucgagcucauccgcggccgccccaaggagaacaccaucuggaccuccggcuccuccaucuccuucugcggcgucaacuccgacaccgucggcugguccuggcccgacggcgccgagcuccccuucaccaucgacaaguga

SEQ ID NO: 113752 - RNA, 1410 nt, Artificial Sequence; identical to SEQ ID NO: 113751
  derived and/or modified CDS sequence (opt2) from neuraminidase__InfluenzaA__ACZ17173

SEQ ID NO: 113753 - RNA, 1410 nt, Artificial Sequence; identical to SEQ ID NO: 113751
  derived and/or modified CDS sequence (opt2) from neuraminidase__InfluenzaA__ACZ17183

SEQ ID NO: 113754 - RNA, 1410 nt, Artificial Sequence; identical to SEQ ID NO: 113751
  derived and/or modified CDS sequence (opt2) from neuraminidase__InfluenzaA__ACZ17193

SEQ ID NO: 113755 - RNA, 1410 nt, Artificial Sequence; identical to SEQ ID NO: 113751
  derived and/or modified CDS sequence (opt2) from neuraminidase__InfluenzaA__ACZ17203

SEQ ID NO: 113756 - RNA, 1410 nt, Artificial Sequence; identical to SEQ ID NO: 112774
  derived and/or modified CDS sequence (opt2) from neuraminidase__InfluenzaA__ACZ17213

SEQ ID NO: 113757 - RNA, 1410 nt, Artificial Sequence; identical to SEQ ID NO: 112774
  derived and/or modified CDS sequence (opt2) from neuraminidase__InfluenzaA__ACZ17223

SEQ ID NO: 113758 - RNA, 1410 nt, Artificial Sequence; identical to SEQ ID NO: 112774
  derived and/or modified CDS sequence (opt2) from neuraminidase__InfluenzaA__ACZ17233

SEQ ID NO: 113759 - RNA, 1410 nt, Artificial Sequence; identical to SEQ ID NO: 112774
  derived and/or modified CDS sequence (opt2) from neuraminidase__InfluenzaA__ACZ17243

SEQ ID NO: 113760 - RNA, 1410 nt, Artificial Sequence; identical to SEQ ID NO: 112774
  derived and/or modified CDS sequence (opt2) from neuraminidase__InfluenzaA__ACZ17263

SEQ ID NO: 113761 - RNA, 1410 nt, Artificial Sequence
  derived and/or modified CDS sequence (opt2) from neuraminidase__InfluenzaA__ACZ17273
augaaccccaaccagaagaucaucaccaucggcuccgucugcaugaccaucggcauggccaaccucauccuccagaucggcaacaucaucuccaucuggaucucccacuccauccagcucggcaaccagaaccagaucgagaccugcaaccaguccgucaucaccuacgagaacaacaccugggucaaccagaccuacgucaacaucuccaacaccaacuucgccgccggccaguccgucgucuccgucaagcucgccggcaacuccucccucugccccgucuccggcugggccaucuacuccaaggacaacuccauccgcaucggcuccaagggcgacgucuucgucauccgcgagcccuucaucuccugcuccccccucgagugccgcaccuucuuccucacccagggcgcccuccucaacgacaagcacuccaacggcaccaucaaggaccgcucccccuaccgcacccucauguccugccccaucggcgagguccccucccccuacaacucccgcuucgaguccgucgccugguccgccuccgccugccacgacggcuucaacuggcucaccaucggcaucuccggccccgacaacggcgccgucgccguccucaaguacaacggcaucaucaccgacaccaucaaguccuggcgcaacaacauccuccgcacccaggaguccgagugcgccugcgucaacggcuccugcuucaccgucaugaccgacggccccuccgacggccaggccuccuacaagaucuuccgcaucgagaagggcaagaucgucaaguccgucgagaugaacgcccccaacuaccacuacgaggagugcuccugcuaccccgacuccuccgagaucaccugcgucugccgcgacaacuggcacggcuccaaccgccccugggucuccuucaaccagaaccucgaguaccagaucggcuacaucugcuccggcaucuucggcgacaacccccgccccaacgacaagaccggcuccugcggccccguccucuccaacggcgccaacggcgucaagggcuucuccuucaaguacggcaacggcgucuggaucggccgcaccaaguccaucuccucccgcaacggcuucgagaugaucugggaccccaacggcuggaccggcaccgacaacaacuucuccaucaagcaggacaucgucggcaucaacgagugguccggcuacuccggcuccuucguccagcaccccgagcucaccggccucgacugcauccgccccugcuucugggucgagcucauccgcggccgccccaaggagaacaccaucuggaccuccggcuccuccaucuccuucugcggcgucaacuccgacaccgucggcugguccuggcccgacggcgccgagcuccccuucaccaucgacaaguga

SEQ ID NO: 113762 - RNA, 1410 nt, Artificial Sequence; identical to SEQ ID NO: 112774
  derived and/or modified CDS sequence (opt2) from neuraminidase__InfluenzaA__ACZ17283

SEQ ID NO: 113763 - RNA, 1410 nt, Artificial Sequence; identical to SEQ ID NO: 112804
  derived and/or modified CDS sequence (opt2) from neuraminidase__InfluenzaA__ACZ17293

SEQ ID NO: 113764 - RNA, 1410 nt, Artificial Sequence; identical to SEQ ID NO: 112804
  derived and/or modified CDS sequence (opt2) from neuraminidase__InfluenzaA__ACZ17303

SEQ ID NO: 113765 - RNA, 1410 nt, Artificial Sequence; identical to SEQ ID NO: 112804
  derived and/or modified CDS sequence (opt2) from neuraminidase__InfluenzaA__ACZ17313

SEQ ID NO: 113766 - RNA, 1410 nt, Artificial Sequence; identical to SEQ ID NO: 112774
  derived and/or modified CDS sequence (opt2) from neuraminidase__InfluenzaA__ACZ17401

SEQ ID NO: 113767 - RNA, 1410 nt, Artificial Sequence; identical to SEQ ID NO: 112774
  derived and/or modified CDS sequence (opt2) from neuraminidase__InfluenzaA__ACZ17411

SEQ ID NO: 113768 - RNA, 1410 nt, Artificial Sequence; identical to SEQ ID NO: 112774
  derived and/or modified CDS sequence (opt2) from neuraminidase__InfluenzaA__ACZ17421

SEQ ID NO: 113769 - RNA, 1410 nt, Artificial Sequence
  derived and/or modified CDS sequence (opt2) from neuraminidase__InfluenzaA__ACZ17431
augaaccccaaccagaagaucaucaccaucggcuccgucugcaugaccaucggcauggccaaccucauccuccagaucggcaacaucaucuccaucuggaucucccacuccauccagcucggcaaccagaaccagaucgagaccugcaaccaguccgucaucaccuacgagaacaacaccugggucaaccagaccuacgucaacaucuccaacaccaacuucgccgccggccaguccgucgucuccgucaagcucgccggcaacuccucccucugccccgucuccggcugggccaucuacuccaaggacaacuccguccgcaucggcuccaagggcgacgucuucgucauccgcgagcccuucaucuccugcuccccccucgagugccgcaccuucuuccucacccagggcgcccuccucaacgacaagcacuccaacggcaccaucaaggaccgcucccccuaccgcacccucauguccugccccaucggcgagguccccucccccuacaacucccgcuucgaguccgucgccugguccgccuccgccugccacgacggcaucaacuggcucaccaucggcaucuccggccccgacaacggcgccgucgccguccucaaguacaacggcaucaucaccgacaccaucaaguccuggcgcaacaacauccuccgcacccaggaguccgagugcgccugcgucaacggcuccugcuucaccgucaugaccgacggccccuccaacggccaggccuccuacaagaucuuccgcaucgagaagggcaagaucgucaaguccgucgagaugaacgcccccaacuaccacuacgaggagugcuccugcuaccccgacuccuccgagaucaccugcgucugccgcgacaacuggcacggcuccaaccgccccugggucuccuucaaccagaaccucgaguaccagaucggcuacaucugcuccggcaucuucggcgacaacccccgccccaacgacaagaccggcuccugcggccccgucuccuccaacggcgccaacggcgucaagggcuucuccuucaaguacggcaacggcgucuggaucggccgcaccaaguccaucaacucccgcaacggcuucgagaugaucugggaccccaacggcuggaccggcaccgacaacaacuucuccaucaagcaggacaucgucggcaucaacgagugguccggcuacuccggcuccuucguccagcaccccgagcucaccggccucgacugcauccgccccugcuucugggucgagcucauccgcggccgccccaaggagaacaccaucuggaccuccggcuccuccaucuccuucugcggcgucaacuccgacaccgucggcugguccuggcccgacggcgccgagcuccccuucaccaucgacaaguga

SEQ ID NO: 113770 - RNA, 1410 nt, Artificial Sequence; identical to SEQ ID NO: 113769
  derived and/or modified CDS sequence (opt2) from neuraminidase__InfluenzaA__ACZ17441

SEQ ID NO: 113771 - RNA, 1410 nt, Artificial Sequence; identical to SEQ ID NO: 112764
  derived and/or modified CDS sequence (opt2) from neuraminidase__InfluenzaA__ACZ17451

SEQ ID NO: 113772 - RNA, 1410 nt, Artificial Sequence; identical to SEQ ID NO: 112774
  derived and/or modified CDS sequence (opt2) from neuraminidase__InfluenzaA__ACZ17461

SEQ ID NO: 113773 - RNA, 1410 nt, Artificial Sequence; identical to SEQ ID NO: 112774
  derived and/or modified CDS sequence (opt2) from neuraminidase__InfluenzaA__ACZ17471

SEQ ID NO: 113774 - RNA, 1410 nt, Artificial Sequence; identical to SEQ ID NO: 112804
  derived and/or modified CDS sequence (opt2) from neuraminidase__InfluenzaA__ACZ17481

SEQ ID NO: 113775 - RNA, 1410 nt, Artificial Sequence; identical to SEQ ID NO: 112774
  derived and/or modified CDS sequence (opt2) from neuraminidase__InfluenzaA__ACZ17491

SEQ ID NO: 113776 - RNA, 1410 nt, Artificial Sequence; identical to SEQ ID NO: 113240
  derived and/or modified CDS sequence (opt2) from neuraminidase__InfluenzaA__ACZ27803

SEQ ID NO: 113777 - RNA, 1410 nt, Artificial Sequence; identical to SEQ ID NO: 112764
  derived and/or modified CDS sequence (opt2) from neuraminidase__InfluenzaA__ACZ27813

SEQ ID NO: 113778 - RNA, 1410 nt, Artificial Sequence; identical to SEQ ID NO: 112774
  derived and/or modified CDS sequence (opt2) from neuraminidase__InfluenzaA__ACZ27823

SEQ ID NO: 113779 - RNA, 1410 nt, Artificial Sequence; identical to SEQ ID NO: 112764
  derived and/or modified CDS sequence (opt2) from neuraminidase__InfluenzaA__ACZ27833

SEQ ID NO: 113780 - RNA, 1410 nt, Artificial Sequence; identical to SEQ ID NO: 112774
  derived and/or modified CDS sequence (opt2) from neuraminidase__InfluenzaA__ACZ45022

SEQ ID NO: 113781 - RNA, 1410 nt, Artificial Sequence
  derived and/or modified CDS sequence (opt2) from neuraminidase__InfluenzaA__ACZ53958
augaaccccaaccagaagaucaucaccaucggcuccgucucccucaccaucgccaccaucugcuuccucaugcagaucgccauccucgucaccaccgucacccuccacuucaagcaguacgagugcaacuccccccccaacaaccaggucaugcucugcgagcccaccaucaucgagcgcaacaucaccgagaucgucuaccucaccaacaccaccaucgagaaggagaucugccccaagcucgccgaguaccgcaacugguccaagccccagugcaacaucaccggcuucgcccccuucuccaaggacaacuccauccgccucuccgccggcggcgacaucugggucacccgcgagcccuacgucuccugcgaccccgacaagugcuaccaguucgcccucggccagggcaccacccucaacaacggccacuccaacgacaccguccacgaccgcacccccuaccgcacccuccucaugaacgagcucggcguccccuuccaccucggcaccaagcaggucugcaucgccugguccuccuccuccugccacgacggcaaggccuggcuccacgucugcgucaccggcgacgacgagaacgccaccgccuccuucaucuacaacggccgccucgucgacuccaucggcuccugguccaagaagauccuccgcacccaggaguccgagugcgucugcaucaacggcaccugcaccgucgucaugaccgacggcuccgccuccggcaaggccgacaccaagauccucuucaucgaggagggcaagaucguccacaccuccucccucuccggcuccgcccagcacgucgaggagugcuccugcuacccccgcuaccccggcguccgcugcgucugccgcgacaacuggaagggcuccaaccgccccaucgucgacaucaacgucaaggacuacuccaucgucuccuccuacgucugcuccggccucgucggcgacaccccccgcaagaacgacuccuccuccuccucccacugccucgaccccaacaacgaggagggcggccacggcgucaagggcugggccuucgacgacggcaacgacgucuggaugggccgcaccaucuccgagaagcuccgcuccggcuacgagaccuucaaggucaucgagggcugguccaagcccaacuccaagcuccagaucaaccgccaggucaucgucgaccgcggcaaccgcuccggcuacuccggcaucuucuccgucgagggcaaguccugcaucaaccgcugcuucuacgucgagcucauccgcggccgcaagcaggagaccgagguccucuggaccuccaacuccaucgucgucuucugcggcaccuccggcaccuacggcaccggcuccugccccgacggcuccguccucaaccucaugcccaucuga

SEQ ID NO: 113782 - RNA, 1410 nt, Artificial Sequence
  derived and/or modified CDS sequence (opt2) from neuraminidase__InfluenzaA__ACZ53969
augaaccccaaccagaagaucaucaccaucggcuccgucucccucaccaucgccaccaucugcuuccucaugcagaucgccauccucgucaccaccgucacccuccacuucaagcaguacgagugcaacuccccccccaacaaccaggucaugcucugcgagcccaccaucaucgagcgcaacaucaccgagaucgucuaccucaccaacaccaccaucgagaaggagaucugccccaagcucgccgaguaccgcaacugguccaagccccagugcaacaucaccggcuucgcccccuucuccaaggacaacuccauccgccucuccgccggcggcgacaucugggucacccgcgagcccuacgucuccugcgaccccgacaagugcuaccaguucgcccucggccagggcaccacccucaacaacggccacuccaacgacaccguccacgaccgcacccccuaccgcacccuccucaugaacgagcucggcguccccuuccaccucggcaccaagcaggucugcaucgccugguccuccuccuccugccacgacggcaaggccuggcuccacgucugcgucaccggcgacgacgagaacgccaccgccuccuucaucuacaacggccgccucgucgacuccaucggcuccugguccaagaagauccuccgcacccaggaguccgagugcgucugcaucaacggcaccugcaccgucgucaugaccgacggcuccgccuccggcaaggccgacaccaagauccucuucaucgaggagggcgagaucguccacaccuccccccucuccggcuccgcccagcacgucgaggagugcuccugcuacccccgcuaccccggcguccgcugcgucugccgcgacaacuggaagggcuccaaccgccccaucgucgacaucaacgucaaggacuacuccaucgucuccuccuacgucugcuccggccucgucggcgacaccccccgcaagaacgacuccuccuccuccucccacugccucgaccccaacaacgaggagggcggccacggcgucaagggcugggccuucgacgacggcaacgacgucuggaugggccgcaccaucuccgagaagucccgcuccggcuacgagaccuucaaggucaucgagggcugguccaagcccaacuccaagcuccagaucaaccgccaggucaucgucgaccgcggcaaccgcuccggcuacuccggcaucuucuccgucgagggcaaguccugcaucaaccgcugcuucuacgucgagcucauccgcggccgcaagcaggagaccgagguccucuggaccuccaacuccaucgucgucuucugcggcaccuccggcaccuacggcaccggcuccuggcccgacggcuccguccucaaccucaugcccaucuga

SEQ ID NO: 113783 - RNA, 1410 nt, Artificial Sequence
  derived and/or modified CDS sequence (opt2) from neuraminidase__InfluenzaA__ACZ53980
augaaccccaaccagaacaagcuccccaucggcuccgucucccucaccaucgccaccaucugcuuccucaugcagaucgccauccucaagaccaccgucacccuccacuucaagcaguacgagugcaacuccccccccaacaaccaggucaugcucugcgagcccaccaucaucgagcgcaaccucaccaagaucgucuaccucaccaacaccaccaucaagaaggagaucugccccaagcagcccaaguaccgcaacugguccaagcccaagugcaagaucaccgagcucgcccccuucuccaaggacaacuccauccgccucuccgccggcggcgacaucugggucacccgcgagcccuacgucuccugcgaccccgacaagugcuaccaguucgcccucggccagggcaccacccucaacaacggccacuccaacgacaccguccacgaccgcacccccuaccgcacccuccucaugaacgagcucggcguccccuuccaccucggcaccaagcaggucugcaucgccugguccuccuccuccugccacgacggcaaggccuggcuccacgucugcaucaccggcgacgacaagaacgccaccgccuccuucaucuacaacggccgccucgucgacuccaucgucuccugguccaaggagauccuccgcacccaggaguccgagugcgucugcaucaacggcaccugcaccgucgucaugaccgacggcuccgccuccggcaaggccgacaccaagauccucuucaucgaggagggcaagaucguccacaucuccccccucuccggcuccgcccagcacgucgaggagugcuccugcuacccccgcuaccccggcguccgcugcaucugccgcgacaacuggaagggcuccaaccgccccgucgucgacaucaacauggaggacuacuccaucgacuccuccuacgucugcuccggccucgucggcgacaccccccgcaagaacgacuccuccuccuccucccacugccucgaccccaacaacgaggagggcggccacggcgucaagggcugggccuucgacgacggcaacgacgucuggaugggccgcaccaucuccgagaagcuccgcuccggcuacgagaccuucaaggucaucggcggcugguccaagcccaacuccaagcuccagaucaaccgccaggucaucgucgaccgcggcaaccgcuccggcuacuccggcaucuucuccgucgagggcaaguccugcaucaaccgcugcuucuacgucgagcucauccgcggccgcaagcaggagaccgagguccucuggaccuccaacuccaucgucgucuucugcggcaccuccggcaccuacggcaccggcuccuggcccgacggcuccguccucaaccucaugcccaucuga

SEQ ID NO: 113784 - RNA, 1410 nt, Artificial Sequence; identical to SEQ ID NO: 112774
  derived and/or modified CDS sequence (opt2) from neuraminidase__InfluenzaA__ACZ56082

SEQ ID NO: 113785 - RNA, 1410 nt, Artificial Sequence; identical to SEQ ID NO: 113357
  derived and/or modified CDS sequence (opt2) from neuraminidase__InfluenzaA__ACZ57183

SEQ ID NO: 113786 - RNA, 1413 nt, Artificial Sequence
  derived and/or modified CDS sequence (opt2) from neuraminidase__InfluenzaA__ACZ81542
augaaccccaaccagaaggucaucaccaucggcuccaucuccaucgccaucggcaucaucucccucaugcuccagaucggcaacaucaucuccaucugggccucccacuccauccagaccggcucccagaacaacaccggcaucugcaaccagcgcaucaucaccuacgagaacuccaccugggucaaccacaccuacgucaacaucaacaacaccaacgucgucgccggcgaggacaagaccuccgucacccucgccggcaacuccucccucugcuccaucuccggcugggccaucuacaccaaggacaacuccauccgcaucggcuccaagggcgacgucuucgucauccgcgagcccuucaucuccugcucccaccucgagugccgcaccuucuuccucacccagggcgcccuccucaacgacaagcacuccaacggcaccgucaaggaccgcucccccuaccgcgcccucauguccugcccccucggcgaggcccccucccccuacaacuccaaguucgaguccgucgccugguccgccuccgccugccacgacggcaugggcuggcucaccaucggcaucuccggccccgacaacggcgccgucgccguccucaaguacaacggcaucaucaccggcaccaucaaguccuggaagaagcagauccuccgcacccaggaguccgagugcgucugcaugaacggcuccugcuucaccaucaugaccgacggccccuccaacaaggccgccuccuacaagaucuucaagaucgagaagggcaaggucaccaaguccaucgagcucaacgcccccaacuucuacuacgaggagugcuccugcuaccccgacaccggcaucgucaugugcgucugccgcgacaacuggcacggcuccaaccgccccugggucuccuucaaccagaaccucgacuaccagaucggcuacaucugcuccggcgucuucggcgacaacccccgccccgaggacggcgagggcuccugcaaccccgucaccgucgacggcgccaacggcgucaagggcuucuccuacaaguacggcaacggcgucuggaucggccgcaccaaguccaaccgccuccgcaagggcuucgagaugaucugggaccccaacggcuggaccaacaccgacuccgacuucuccgucaagcaggacgucgucgccaucaccgacugguccggcuacuccggcuccuucguccagcaccccgagcucaccggccucgacugcauccgccccugcuucugggucgagcucguccgcggccucccccgcgagaacaccaccaucuggaccuccggcuccuccaucuccuucugcggcgucaacuccgacaccgccaacugguccuggcccgacggcgccgagcuccccuucaccaucgacaaguga

SEQ ID NO: 113787 - RNA, 1413 nt, Artificial Sequence
  derived and/or modified CDS sequence (opt2) from neuraminidase__InfluenzaA__ACZ81543
augaaccccaaccagaagaucaucaccaucggcuccaucuccaucgccaucggcaucaucucccucaugcuccagaucggcaacaucaucuccaucugggccucccacuccauccagaccggcucccagaacaacaccggcaucugcaaccagcgcaucaucaccuacgagaacaacaccugggucaaccacaccuacgucaacaucaacaacaccaacgucgucgccggcgaggacaagaccuccgucacccucgccggcaacuccucccucugcuccaucuccggcugggccaucuacaccaaggacaacuccauccgcaucggcuccaagggcgacgucuucgucauccgcgagcccuucaucuccugcucccaccucgagugccgcaccuucuuccucacccagggcgcccuccucaacgacaagcacuccaacggcaccgucaaggaccgcucccccuaccgcgcccucauguccugcccccucggcgaggcccccucccccuacaacuccaaguucgaguccgucgccugguccgccuccgccugccacgacggcaugggcuggcucaccaucggcaucuccggccccgacaacggcgccgucgccguccucaaguacaacggcaucaucaccggcaccaucaaguccuggaaggagcagauccuccgcacccaggaguccgagugcgucugcaugaacggcuccugcuucaccaucaugaccgacggccccuccaacaaggccgccuccuacaagaucuucaagaucgagaagggcaaggucaccaaguccaucgagcucaacgcccccaacuucuacuacgaggagugcuccugcuaccccgacaccggcaucgucaugugcgucugccgcgacaacuggcacggcuccaaccgccccugggucuccuucaaccagaaccucgacuaccagaccggcuacaucugcuccggcgucuucggcgacaacccccgccccgaggacggcgagggcuccugcaaccccgucaccgucgacggcgccaacggcgucaagggcuucuccuacaaguacggcaacggcgucuggaucggccgcaccaaguccaaccgccuccgcaagggcuucgagaugaucugggaccccaacggcuggaccaacaccgacuccgacuucuccgucaagcaggacgucgucgccaucaccgacugguccggcuacuccggcuccuucguccagcaccccgagcucaccggccucgacugcauccgccccugcuucugggucgagcucguccgcggccucccccgcgagaacaccaccaucuggaccuccggcuccuccaucuccuucugcggcgucaacuccgacaccgccaacugguccuggcccgacggcgccgagcuccccuucaccaucgacaaguga

SEQ ID NO: 113788 - RNA, 1410 nt, Artificial Sequence
  derived and/or modified CDS sequence (opt2) from neuraminidase__InfluenzaA__ACZ81546
augaaccccaaccagaagaucaucaccaucggcuccgucucccucaccaucuccaccaucugcuucuucaugcagaucgccauccucaucaccaccgucacccuccacuucaagcaguacgaguucaacuccccccccaacaaccaggucaugcucugcgagcccaccaucaucgagcgcaacaucaccgagaucgucuaccucaccaacaccaccaucgagaaggagaucugccccaagcucgccgaguaccgcaacugguccaagccccagugcgacaucaccggcuccgcccccuucuccaaggacaacuccauccgccucuccgccggcggcgacaucugggucacccgcgagcccuacgucuccugcgaccccgacaagugcuaccaguucgcccucggccagggcaccacccucaacaacguccacuccaacaacaccguccacgaccgcacccccuaccgcacccuccucaugaacgagcucggcguccccuuccaccucggcaccaagcaggucugcaucgccugguccuccuccuccugccacgacggcaaggccuggcuccacgucugcaucaccggcgacgacaagaacgccaccgccuccuucaucuacaacggccgccucgucgacuccgucgucuccugguccaaggagauccuccgcacccaggaguccgagugcgucugcaucaacggcaccugcaccgucgucaugaccgacggcuccgccuccggcaaggccgacaccaagauccucuucaucgaggagggcaagaucguccacaccuccacccucuccggcuccgcccagcacgucgaggagugcuccugcuacccccgcuaccccggcguccgcugcgucugccgcgacaacuggaagggcuccaaccgccccaucgucgacaucaacaucaaggaccacuccaucgucuccuccuacgucugcuccggccucgucggcgacaccccccgcaagaacgacuccuccuccuccucccacugccucgaccccaacaacgaggagggcggccacggcgucaagggcugggccuucgacgacggcaacgacgucuggaugggccgcaccaucuccgagaagucccgccucggcuacgagaccuucaaggucaucgagggcugguccaaccccaaguccaagcuccagaucaaccgccaggucaucgucgaccgcggcaaccgcuccggcuacuccggcaucuucuccgucgagggcaaguccugcaucaaccgcugcuucuacgucgagcucauccgcggccgcaaggaggagaccgagguccucuggaccuccaacuccaucgucgucuucugcggcaccuccggcaccuacggcaccggcuccuggcccgacggcgccgacaucaaccucaugcccaucuga

SEQ ID NO: 113789 - RNA, 1410 nt, Artificial Sequence
  derived and/or modified CDS sequence (opt2) from neuraminidase__InfluenzaA__ACZ81547
augaaccccaaccagaagaucaucaccaucggcuccgucucccucaccaucuccaccaucugcuucuucaugcagaucgccauccucaucaccaccgucacccuccacuucaagcaguacgaguucaacuccccccccaacaaccaggucaugcucugcgagcccaccaucaucgagcgcaacaucaccgagaucgucuaccucaccaacaccaccaucgagaaggagaucugccccaagcucgccgaguaccgcaacugguccaagccccagugcgacaucaccggcuucgcccccuucuccaaggacaacuccauccgccucuccgccggcggcgacaucugggucacccgcgagcccuacgucuccugcgaccccgacaagugcuaccaguucgcccucggccagggcaccacccucaacaacguccacuccaacaacaccguccgcgaccgcacccccuaccgcacccuccucaugaacgagcucggcguccccuuccaccucggcaccaagcaggucugcaucgccugguccuccuccuccugccacgacggcaaggccuggcuccacgucugcaucaccggcgacgacaagaacgccaccgccuccuucaucuacaacggccgccucgucgacuccgucgucuccugguccaaggagauccuccgcacccaggaguccgagugcgucugcaucaacggcaccugcaccgucgucaugaccgacggcuccgccuccggcaaggccgacaccaagauccucuucaucgaggagggcaagaucguccacaccuccacccucuccggcuccgcccagcacgucgaggagugcuccugcuacccccgcuaccccggcguccgcugcgucugccgcgacaacuggaagggcuccaaccgccccaucgucgacaucaacaccaaggaccacuccaucgucuccuccuacgucugcuccggccucgucggcgacaccccccgcaagaacgacuccuccuccuccucccacugccucgaccccaacaacgaggagggcggccacggcgucaagggcugggccuucgacgacggcaacgacgucuggaugggccgcaccaucuccgagaagucccgccucggcuacgagaccuucaaggucaucgagggcugguccaaccccaaguccaagcuccagaucaaccgccaggucaucgucgacaagggcaaccgcuccggcuacuccggcaucuucuccgucgagggcaaguccugcaucaaccgcugcuucuacgucgagcucauccgcggccgcaaggaggagaccgagguccucuggaccuccaacuccaucgucgucuucugcggcaccuccggcaccuacggcaccggcuccuggcccgacggcgccgacaucaaccucaugcccaucuga

SEQ ID NO: 113790 - RNA, 1410 nt, Artificial Sequence; identical to SEQ ID NO: 112774
  derived and/or modified CDS sequence (opt2) from neuraminidase__InfluenzaA__ACZ81634

SEQ ID NO: 113791 - RNA, 1410 nt, Artificial Sequence
  derived and/or modified CDS sequence (opt2) from neuraminidase__InfluenzaA__ACZ81644
augaaccccaaccagaagaucaucaccaucggcuccgucugcaugaccaucggcauggccaaccucauccuccagaucggcaacaucaucuccaucuggaucucccacuccauccagcucggcaaccagaaccagaucgagaccugcaaccaguccgucaucaccuacgagaacaacaccugggucaaccagaccuacgucaacaucuccaacaccaacuucgccgccggccaguccgucgucuccgucaagcucgccggcaacuccucccucugccccgucuccggcugggccaucuacuccaaggacaacuccauccgcaucggcuccaagggcgacgucuucgucauccgcgagcccuucaucuccugcuccccccucgagugccgcaccuucuuccucacccagggcgcccuccucaacgacaagcacuccaacggcaccaucaaggaccgcucccccuaccgcacccucauguccugccccaucggcgagguccccucccccuacaacucccgcuucgaguccgucgccugguccgccuccgccugccacgacggcaucaacuggcucaccaucggcaucuccggccccgacaacggcgccgucgccguccucaaguacaacggcaucaucaccgacaccaucaaguccuggcgcaacaacauccuccgcacccaggaguccgagugcgccugcgucaacggcuccugcuucaccgucaugaccgacggccccuccgacggccaggccuccuacaagaucuuccgcaucgagaagggcaagaucgucaaguccgucgagaugaacgcccccaacuaccacuacgaggagugcuccugcuaccccgacuccuccgagaucaccugcgucugccgcgacaacuggcacggcuccaaccgccccugggucuccuucaaccagaaccucgaguaccagaucggcuacaucugcuccggcaucuucggcgacaacccccgccccaacgacaagaccggcuccugcggccccgucuccuccaacggcgccaacggcgucaagggcuucuccuucaaguacggcaacggcgucuggaucggccgcaccaaguccaucuccucccgcaacggcuucgagaugaucugggaccccaacggcuggaccggcaccgacaacaacuucuccaucaagcaggacaucaucggcaucaacgagugguccggcuacuccggcuccuucguccagcaccccgagcucaccggccucgacugcauccgccccugcuucugggucgagcucauccgcggccgccccaaggagaacaccaucuggaccuccggcuccuccaucuccuucugcggcgucaacuccgacaccgucggcugguccuggcccgacggcgccgagcuccccuucaccaucgacaaguga

SEQ ID NO: 113792 - RNA, 1410 nt, Artificial Sequence
  derived and/or modified CDS sequence (opt2) from neuraminidase__InfluenzaA__ACZ81653
augaaccccaaccagaagaucaucaccaucggcuccgucugcaugaccaucggcauggccaaccucauccuccagaucggcaacaucaucuccaucuggaucucccacuccauccagcucggcaaccagaaccagaucgagaccugcaaccaguccgucaucaccuacgagaacaacaccugggucaaccagaccuacgucaacaucuccaacaccaacuucgccgccggccaguccgucgucuccgucaagcucgccggcaacuccucccucugccccgucuccggcugggccaucuacuccaaggacaacuccauccgcaucggcuccaagggcgacgucuucgucauccgcgagcccuucaucuccugcuccccccucgagugccgcaccuucuuccucacccagggcgcccuccucaacgacaagcacuccaacggcaccaucaaggaccgcucccccuaccgcacccucauguccugccccaucggcgagguccccucccccuacaacucccgcuucgaguccgucgccugguccgccuccgccugccacgacggcaucaacuggcucaccaucggcaucuccggccccgacaacggcgccgucgccguccucaaguacaacggcaucaucaccgacaccaucaaguccuggcgcaacaacauccuccgcacccaggaguccgagugcgccugcgucaacggcuccugcuucaccgucaugaccgacggccccuccgacggccaggccuccuacaagaucuuccgcaucgagaagggcaagaucgucaaguccgucgagaugaacgcccccaacuaccacuacgaggagugcuccugcuaccccgacuccuccgagaucaccugcgucugccgcgacaacuggcacggcuccaaccgccccugggucuccuucaaccagaaccucgaguaccagaucggcuacaucugcuccggcaucuucggcgacaacccccgccccaacgacaagaccggcuccugcggccccgucuccuccaacggcgccaacggcgucaagggcuucuccuucaaguacggcaacggcgucuggaucggccgcaccaaguccaucuccucccgcaacggcuucgagaugaucugggaccccaacggcuggaccggcaccgacaacaacuucuccaucaagcaggacaucgucggcaucaacgagugguccggcuacuccggcuccuucguccagcaccccgagcucaccggccucaacugcauccgccccugcuucugggucgagcucauccgcggccgccccaaggagaacaccaucuggaccuccggcuccuccaucuccuucugcggcgucaacuccgacaccgucggcugguccuggcccgacggcgccgagcuccccuucaccaucgacaaguga

SEQ ID NO: 113793 - RNA, 1410 nt, Artificial Sequence; identical to SEQ ID NO: 112774
  derived and/or modified CDS sequence (opt2) from neuraminidase__InfluenzaA__ACZ95840

SEQ ID NO: 113794 - RNA, 1410 nt, Artificial Sequence; identical to SEQ ID NO: 112774
  derived and/or modified CDS sequence (opt2) from neuraminidase__InfluenzaA__ACZ95850

SEQ ID NO: 113795 - RNA, 1410 nt, Artificial Sequence; identical to SEQ ID NO: 112774
  derived and/or modified CDS sequence (opt2) from neuraminidase__InfluenzaA__ACZ95860

SEQ ID NO: 113796 - RNA, 1410 nt, Artificial Sequence; identical to SEQ ID NO: 112774
  derived and/or modified CDS sequence (opt2) from neuraminidase__InfluenzaA__ACZ95870

SEQ ID NO: 113797 - RNA, 1410 nt, Artificial Sequence; identical to SEQ ID NO: 112774
  derived and/or modified CDS sequence (opt2) from neuraminidase__InfluenzaA__ACZ95880

SEQ ID NO: 113798 - RNA, 1410 nt, Artificial Sequence; identical to SEQ ID NO: 112774
  derived and/or modified CDS sequence (opt2) from neuraminidase__InfluenzaA__ACZ95890

SEQ ID NO: 113799 - RNA, 1410 nt, Artificial Sequence; identical to SEQ ID NO: 112774
  derived and/or modified CDS sequence (opt2) from neuraminidase__InfluenzaA__ACZ95900

SEQ ID NO: 113800 - RNA, 1410 nt, Artificial Sequence; identical to SEQ ID NO: 112774
  derived and/or modified CDS sequence (opt2) from neuraminidase__InfluenzaA__ACZ95910

SEQ ID NO: 113801 - RNA, 1410 nt, Artificial Sequence; identical to SEQ ID NO: 112774
  derived and/or modified CDS sequence (opt2) from neuraminidase__InfluenzaA__ACZ95920

SEQ ID NO: 113802 - RNA, 1410 nt, Artificial Sequence; identical to SEQ ID NO: 113661
  derived and/or modified CDS sequence (opt2) from neuraminidase__InfluenzaA__ACZ95930

SEQ ID NO: 113803 - RNA, 1410 nt, Artificial Sequence; identical to SEQ ID NO: 112774
  derived and/or modified CDS sequence (opt2) from neuraminidase__InfluenzaA__ACZ95940

SEQ ID NO: 113804 - RNA, 1410 nt, Artificial Sequence; identical to SEQ ID NO: 113791
  derived and/or modified CDS sequence (opt2) from neuraminidase__InfluenzaA__ACZ95950

SEQ ID NO: 113805 - RNA, 1410 nt, Artificial Sequence; identical to SEQ ID NO: 112774
  derived and/or modified CDS sequence (opt2) from neuraminidase__InfluenzaA__ACZ95960

SEQ ID NO: 113806 - RNA, 1410 nt, Artificial Sequence; identical to SEQ ID NO: 113791
  derived and/or modified CDS sequence (opt2) from neuraminidase__InfluenzaA__ACZ95970

SEQ ID NO: 113807 - RNA, 1410 nt, Artificial Sequence; identical to SEQ ID NO: 112774
  derived and/or modified CDS sequence (opt2) from neuraminidase__InfluenzaA__ACZ95980

SEQ ID NO: 113808 - RNA, 1410 nt, Artificial Sequence; identical to SEQ ID NO: 112774
  derived and/or modified CDS sequence (opt2) from neuraminidase__InfluenzaA__ACZ95990

SEQ ID NO: 113809 - RNA, 1410 nt, Artificial Sequence; identical to SEQ ID NO: 112774
  derived and/or modified CDS sequence (opt2) from neuraminidase__InfluenzaA__ACZ96000

SEQ ID NO: 113810 - RNA, 1410 nt, Artificial Sequence; identical to SEQ ID NO: 112774
  derived and/or modified CDS sequence (opt2) from neuraminidase__InfluenzaA__ACZ96010

SEQ ID NO: 113811 - RNA, 1410 nt, Artificial Sequence
  derived and/or modified CDS sequence (opt2) from neuraminidase__InfluenzaA__ACZ96020
augaaccccaaccagaagaucaucaccaucggcuccgucugcaugaccaucggcauggccaaccucauccuccagaucggcaacaucauccucaucuggaucucccacuccauccagcucggcaaccagaaccagaccgagaccugcaaccaguccgucaucaccuacgagaacaacaccugggucaaccagaccuacgucaacaucuccaacaccaacuucgccgccggccaguccgucgucuccgucaagcucgccggcaacuccucccucugccccgucuccggcugggccaucuacuccaaggacaacuccguccgcaucggcuccaagggcgacgucuucgucauccgcgagcccuucaucuccugcuccccccucgagugccgcaccuucuuccucacccagggcgcccuccucaacgacaagcacuccaacggcaccaucaaggaccgcucccccuaccgcacccucauguccugccccaucggcgagguccccucccccuacaacucccgcuucgaguccgucgccugguccgccuccgccugccacgacggcaucaacuggcucaccaucggcaucuccggccccgacaacggcgccgucgccguccucaaguacaacggcaucaucaccgacaccaucaaguccuggcgcaacaacauccuccgcacccaggaguccgagugcgccugcgucaacggcuccugcuucaccgucaugaccgacggccccuccaacggccaggccuccuacaagaucuuccgcaucgagaagggcaagaucgucaaguccgucgagaugaacgcccccaacuaccacuacgaggagugcuccugcuaccccgacuccuccgagaucaccugcgucugccgcgacaacuggcacggcuccaaccgccccugggucuccuucaaccagaaccucgaguaccagaucggcuacaucugcuccggcaucuucggcgacaacccccgccccaucgacaagaccggcuccugcggccccgucuccuccaacggcgccaacggcgucaagggcuucuccuucaaguacggcaacggcgucuggaucggccgcaccaaguccaucuccucccgcaacggcuucgagaugaucugggaccccaacggcuggaccggcaccgacaacaacuucuccaucaagcaggacaucgucggcaucaacgagugguccggcuacuccggcuccuucguccagcaccccgagcucaccggccucgacugcauccgccccugcuucugggucgagcucauccgcggccgccccaaggagaacaccaucuggaccuccggcuccuccaucuccuucugcggcgucaacuccgacaccgucggcugguccuggcccgacggcgccgagcuccccuucaccaucgacaaguga

SEQ ID NO: 113812 - RNA, 1410 nt, Artificial Sequence; identical to SEQ ID NO: 112774
  derived and/or modified CDS sequence (opt2) from neuraminidase__InfluenzaA__ACZ96050

SEQ ID NO: 113813 - RNA, 1410 nt, Artificial Sequence; identical to SEQ ID NO: 112774
  derived and/or modified CDS sequence (opt2) from neuraminidase__InfluenzaA__ACZ96060

SEQ ID NO: 113814 - RNA, 1410 nt, Artificial Sequence; identical to SEQ ID NO: 112774
  derived and/or modified CDS sequence (opt2) from neuraminidase__InfluenzaA__ACZ96072

SEQ ID NO: 113815 - RNA, 1410 nt, Artificial Sequence; identical to SEQ ID NO: 112774
  derived and/or modified CDS sequence (opt2) from neuraminidase__InfluenzaA__ACZ96082

SEQ ID NO: 113816 - RNA, 1410 nt, Artificial Sequence; identical to SEQ ID NO: 112774
  derived and/or modified CDS sequence (opt2) from neuraminidase__InfluenzaA__ACZ96092

SEQ ID NO: 113817 - RNA, 1410 nt, Artificial Sequence; identical to SEQ ID NO: 112774
  derived and/or modified CDS sequence (opt2) from neuraminidase__InfluenzaA__ACZ96102

SEQ ID NO: 113818 - RNA, 1410 nt, Artificial Sequence; identical to SEQ ID NO: 112774
  derived and/or modified CDS sequence (opt2) from neuraminidase__InfluenzaA__ACZ96112

SEQ ID NO: 113819 - RNA, 1410 nt, Artificial Sequence
  derived and/or modified CDS sequence (opt2) from neuraminidase__InfluenzaA__ACZ96122
augaaccccaaccagaagaucaucaccaucggcuccgucugcaugaccaucggcauggccaaccucauccuccagaucggcaacaucaucuccaucuggaucucccacuccauccagcucggcaaccagaaccagaucgaggccugcaaccaguccgucaucaccuacgagaacaacaccugggucaaccagaccuacgucaacaucuccaacaccaacuucgccgccggccaguccgucgucuccgucaagcucgccggcaacuccucccucugccccgucuccggcugggccaucuacuccaaggacaacuccauccgcaucggcuccaagggcgacgucuucgucauccgcgagcccuucaucuccugcuccccccucgagugccgcaccuucuuccucacccagggcgcccuccucaacgacaagcacuccaacggcaccaucaaggaccgcucccccuaccgcacccucauguccugccccaucggcgagguccccucccccuacaacucccgcuucgaguccgucgccugguccgccuccgccugccacgacggcaucaacuggcucaccaucggcaucuccggccccgacaacggcgccgucgccguccucaaguacaacggcaucaucaccgacaccaucaaguccuggcgcaacaacauccuccgcacccaggaguccgagugcgccugcgucaacggcuccugcuucaccgucaugaccgacggccccuccgacggccaggccuccuacaagaucuuccgcaucgagaagggcaagaucgucaaguccgucgagaugaacgcccccaacuaccacuacgaggagugcuccugcuaccccgacuccuccgagaucaccugcgucugccgcgacaacuggcacggcuccaaccgccccugggucuccuucaaccagaaccucgaguaccagaucggcuacaucugcuccggcaucuucggcgacaacccccgccccaacgacaagaccggcuccugcggccccgucuccuccaacggcgccaacggcgucaagggcuucuccuucaaguacggcaacggcgucuggaucggccgcaccaaguccaucuccucccgcaacggcuucgagaugaucugggaccccaacggcuggaccggcaaggacaacaacuucuccaucaagcaggacaucgucggcaucaacgagugguccggcuacuccggcuccuucguccagcaccccgagcucaccggccucgacugcauccgccccugcuucugggucgagcucauccgcggccgccccaaggagaacaccaucuggaccuccggcuccuccaucuccuucugcggcaucaacuccgacaccgucggcugguccuggcccgacggcgccgagcuccccuucaccaucgacaaguga

SEQ ID NO: 113820 - RNA, 1410 nt, Artificial Sequence; identical to SEQ ID NO: 112774
  derived and/or modified CDS sequence (opt2) from neuraminidase__InfluenzaA__ACZ96132

SEQ ID NO: 113821 - RNA, 1410 nt, Artificial Sequence; identical to SEQ ID NO: 112774
  derived and/or modified CDS sequence (opt2) from neuraminidase__InfluenzaA__ACZ96142

SEQ ID NO: 113822 - RNA, 1410 nt, Artificial Sequence; identical to SEQ ID NO: 112774
  derived and/or modified CDS sequence (opt2) from neuraminidase__InfluenzaA__ACZ96152

SEQ ID NO: 113823 - RNA, 1410 nt, Artificial Sequence; identical to SEQ ID NO: 112774
  derived and/or modified CDS sequence (opt2) from neuraminidase__InfluenzaA__ACZ96162

SEQ ID NO: 113824 - RNA, 1410 nt, Artificial Sequence; identical to SEQ ID NO: 112774
  derived and/or modified CDS sequence (opt2) from neuraminidase__InfluenzaA__ACZ96172

SEQ ID NO: 113825 - RNA, 1410 nt, Artificial Sequence
  derived and/or modified CDS sequence (opt2) from neuraminidase__InfluenzaA__ACZ96182
augaaccccaaccagaagaucaucaccaucggcuccgucugcaugaccaucggcauggccaaccucauccuccagaucggcaacaucaucuccaucuggaucucccacuccauccagcucggcaaccagaaccagaucgagaccugcaaccaguccgucaucaccuacgagaacaacaccugggucaaccagaccuacgucaacaucuccaacaccaacuucgccgccggccaguccgucgucuccgucaagcucgccggcaacuccucccucugccccgucuccggcugggccaucuacuccaaggacaacuccauccgcaucggcuccaagggcgacgucuucgucauccgcgagcccuucaucuccugcuccccccucgagugccgcaccuucuuccucacccagggcgcccuccucaacgaccgccacuccaacggcaccaucaaggaccgcucccccuaccgcacccucauguccugccccaucggcgagguccccucccccuacaacucccgcuucgaguccgucgccugguccgccuccgccugccacgacggcaucaacuggcucaccaucggcaucuccggccccgacaacggcgccgucgccguccucaaguacaacggcaucaucaccgacaccaucaaguccuggcgcaacaacauccuccgcacccaggaguccgagugcgccugcgucaacggcuccugcuucaccgucaugaccgacggccccuccgacggccaggccuccuacaagaucuuccgcaucgagaagggcaagaucgucaaguccgucgagaugaacgcccccaacuaccacuacgaggagugcuccugcuaccccgacuccuccgagaucaccugcgucugccgcgacaacuggcacggcuccaaccgccccugggucuccuucaaccagaaccucgaguaccagaucggcuacaucugcuccggcaucuucggcgacaacccccgccccaacgacaagaccggcuccugcggccccgucuccuccaacggcgccaacggcgucaagggcuucuccuucaaguacggcaacggcgucuggaucggccgcaccaaguccaucuccucccgcaacggcuucgagaugaucugggaccccaacggcuggaccggcaccgacaacaacuucuccaucaagcaggacaucgucggcaucaacgagugguccggcuacuccggcuccuucguccagcaccccgagcucaccggccucgacugcauccgccccugcuucugggucgagcucauccgcggccgccccaaggagaacaccaucuggaccuccggcuccuccaucuccuucugcggcgucaacuccgacaccgucggcugguccuggcccgacggcgccgagcuccccuucaccaucgacaaguga

SEQ ID NO: 113826 - RNA, 1410 nt, Artificial Sequence
  derived and/or modified CDS sequence (opt2) from neuraminidase__InfluenzaA__ACZ96192
augaaccccaaccagaagaucaucaccaucggcuccgucugcaugaccaucggcauggccaaccucauccuccagaucggcaacaucaucuccaucuggaucucccacuccauccagcucggcaaccagaaccagaucgagaccugcaaccaguccgucaucaccuacgagaacaacaccugggucaaccagaccuacgucaacaucuccaacaccaacuucgccgccggccaguccgucgucuccgucaagcucgccggcaacuccucccucugccccgucuccggcugggccaucuacuccaaggacaacuccauccgcaucggcuccaagggcgacgucuucgucauccgcgagcccuucaucuccugcuccccccucgagugccgcaccuucuuccucacccagggcgcccuccucaacgacaagcacuccaacggcaccaucaaggaccgcucccccuaccgcacccucauguccugccccaucggcgagguccccucccccuacaacucccgcuucgaguccgucgccugguccgccuccgccugccacgacggcaucaacuggcucaccaucggcaucuccggccccgacaacggcgccgucgccguccucaaguacaacggcaucaucaccgacaccaucaaguccuggcgcaacaacauccuccgcacccaggaguccgagugcgccugcgucaacggcuccugcuucaccgucaugaccgacggccccuccgacggccaggccuccuacaagaucuuccgcaucgagaagggcaagaucgucaaguccgucgagaugaacgcccccaacuaccacuacgaggagugcuccugcuaccccgacuccuccgagaucaccugcgucugccgcgacaacuggcacggcuccaaccgccccugggucuccuucaaccagaaccucgaguaccagaucggcuacaucugcuccggcaucuucggcgacaacccccgcuccaacgacaagaccggcuccugcggccccgucuccuccaacggcgccaacggcgucaagggcuucuccuucaaguacggcaacggcgucuggaucggccgcaccaaguccaucuccucccgcaacggcuucgagaugaucugggaccccaacggcuggaccggcaccgacaacaacuucuccaucaagcaggacaucgucggcaucaacgagugguccggcuacuccggcuccuucguccagcaccccgagcucaccggccucgacugcauccgccccugcuucugggucgagcucauccgcggccgccccaaggagaacaccaucuggaccuccggcuccuccaucuccuucugcggcgucaacuccgacaccgucggcugguccuggcccgacggcgccgagcuccccuucaccaucgacaaguga

SEQ ID NO: 113827 - RNA, 1410 nt, Artificial Sequence
  derived and/or modified CDS sequence (opt2) from neuraminidase__InfluenzaA__ACZ96232
augaaccccaaccagaagaucaucaccaucggcuccgucugcaugaccgucggcauggccaaccucauccuccagaucggcaacaucaucuccaucuggaucucccacuccauccagcucggcaaccagaaccagaucgagaccugcaaccaguccgucaucaccuacgagaacaacaccugggucaaccagaccuacgucaacaucuccaacaccaacuucgccgccggccaguccgucgucuccgucaagcucgccggcaacuccucccucugccccgucuccggcugggccaucuacuccaaggacaacuccauccgcaucggcuccaagggcgacgucuucgucauccgcgagcccuucaucuccugcuccccccucgagugccgcaccuucuuccucacccagggcgcccuccucaacgacaagcacuccaacggcaccaucaaggaccgcucccccuaccgcacccucauguccugccccaucggcgagguccccucccccuacaacucccgcuucgaguccgucgccugguccgccuccgccugccacgacggcaucaacuggcucaccaucggcaucuccggccccgacaacggcgccgucgccguccucaaguacaacggcaucaucaccgacaccaucaaguccuggcgcaacaacauccuccgcacccaggaguccgagugcgccugcgucaacggcuccugcuucaccgucaugaccgacggccccuccgacggccaggccuccuacaagaucuuccgcaucgagaagggcaagaucgucaaguccgucgagaugaacgcccccaacuaccacuacgaggagugcuccugcuaccccgacuccuccgagaucaccugcgucugccgcgacaacuggcacggcuccaaccgccccugggucuccuucaaccagaaccucgaguaccagaucggcuacaucugcuccggcaucuucggcgacaacccccgccccaacgacaagaccggcuccugcggccccgucuccuccaacggcgccaacggcgucaagggcuucuccuucaaguacggcaacggcgucuggaucggccgcaccaaguccaucuccucccgcaacggcuucgagaugaucugggaccccaacggcuggaccggcaccgacaacgacuucuccaucaagcaggacaucgucggcaucaacgagugguccggcuacuccggcuccuucguccagcaccccgagcucaccggccucgacugcauccgccccugcuucugggucgagcucauccgcggccgccccaaggagaacaccaucuggaccuccggcuccuccaucuccuucugcggcgucaacuccgacaccgucggcugguccuggcccgacggcgccgagcuccccuucaccaucgacaaguga

SEQ ID NO: 113828 - RNA, 1410 nt, Artificial Sequence
  derived and/or modified CDS sequence (opt2) from neuraminidase__InfluenzaA__ACZ96242
augaaccccaaccagaagaucaucaccaucggcuccgucugcaugaccaucggcauggccaaccucauccuccagaucggcaacaucaucuccaucuggaucucccacuccauccagcucggcaaccagaaccagaucgagaccugcaaccaguccgucaucaccuacgagaacaacaccugggucaaccagaccuacgucaacaucuccaacaccaacuucgccgccggccaguccgucgucuccgucaagcucgccggcaacuccucccucugccccgucuccggcugggccaucuacuccaaggacaacuccauccgcaucggcuccaagggcgacgucuucgucauccgcgagcccuucaucuccugcuccccccucgagugccgcaccuucuuccucacccagggcgcccuccucaacgacaagcacuccaacggcaccaucaaggaccgcucccccuaccgcacccucauguccugccccaucggcgagguccccucccccuacaacucccgcuucgaguccgucgccugguccgccuccgccugccacgacggcaucaacuggcucaccaucggcaucuccggccccgacaacggcgccgucgccguccucaaguacaacggcaucaucaccgacaccaucaaguccuggcgcaacaacauccuccgcacccaggaguccgagugcgccugcgucaacggcuccugcuucaccgucaugaccgacggccccuccgacggccaggccuccuacaagaucuuccgcaucgagaagggcaagaucgucaaguccgucgagaugaacgcccccaacuaccacuacgaggagugcuccugcuaccccgacuccuccgagaucaccugcgucugccgcgacaacuggcacggcuccaaccgccccugggucuccuucaaccagaaccucgaguaccagaucggcuacaucugcuccggcaucuucggcgacaacccccgccccaacgacaagaccggcuccugcggccccgucuccuccaacggcgccaacggcgucaagggcuucuccuucaaguacggcaacggcgucuggaucggccgcaccaaguccaucuccucccgcaacggcuucgagaugaucugggaccccaacggcuggaccggcaccgacaacaacuucuccaucaagcaggacaucgucggcaucaacgagugguccggcuacuccggcuccuucguccagcaccccgagcucaccggccucgacugcauccgccccugcuucugggucgagcucauccgcggccgccccaaggaguccaccaucuggaccuccggcuccuccaucuccuucugcggcgucaacuccgacaccgucggcugguccuggcccgacggcgccgagcuccccuucaccaucgacaaguga

SEQ ID NO: 113829 - RNA, 1410 nt, Artificial Sequence; identical to SEQ ID NO: 112774
  derived and/or modified CDS sequence (opt2) from neuraminidase__InfluenzaA__ACZ96252

SEQ ID NO: 113830 - RNA, 1410 nt, Artificial Sequence; identical to SEQ ID NO: 112774
  derived and/or modified CDS sequence (opt2) from neuraminidase__InfluenzaA__ACZ96292

SEQ ID NO: 113831 - RNA, 1410 nt, Artificial Sequence; identical to SEQ ID NO: 112774
  derived and/or modified CDS sequence (opt2) from neuraminidase__InfluenzaA__ACZ96302

SEQ ID NO: 113832 - RNA, 1410 nt, Artificial Sequence; identical to SEQ ID NO: 112774
  derived and/or modified CDS sequence (opt2) from neuraminidase__InfluenzaA__ACZ96312

SEQ ID NO: 113833 - RNA, 1410 nt, Artificial Sequence
  derived and/or modified CDS sequence (opt2) from neuraminidase__InfluenzaA__ACZ96322
augaaccccaaccagaagaucaucaccaucggcuccgucugcaugaccaucggcauggccaaccucauccuccagaucggcaacaucaucuccaucuggaucucccacuccauccagcucggcaaccagaaccagaucgagaccugcaaccaguccgucaucaccuacgagaacaacaccugggucaaccagaccuacgucaacaucuccaacaccaacuucgccgccggccaguccgucgucuccgucaagcucaccggcaacuccucccucugccccgucuccggcugggccaucuacuccaaggacaacuccauccgcaucggcuccaagggcgacgucuucgucauccgcgagcccuucaucuccugcuccccccucgagugccgcaccuucuuccucacccagggcgcccuccucaacgacaagcacuccaacggcaccaucaaggaccgcucccccuaccgcacccucauguccugccccaucggcgagguccccucccccuacaacucccgcuucgaguccgucgccugguccgccuccgccugccacgacggcaucaacuggcucaccaucggcaucuccggccccgacaacggcgccgucgccguccucaaguacaacggcaucaucaccgacaccaucaaguccuggcgcaacaacauccuccgcacccaggaguccgagugcgccugcgucaacggcuccugcuucaccgucaugaccgacggccccuccgacggccaggccuccuacaagaucuuccgcaucgagaagggcaagaucgucaaguccgucgagaugaacgcccccaacuaccacuacgaggagugcuccugcuaccccgacuccuccgagaucaccugcgucugccgcgacaacuggcacggcuccaaccgccccugggucuccuucaaccagaaccucgaguaccagaucggcuacaucugcuccggcaucuucggcgacaacccccgccccaacgacaagaccggcuccugcggccccgucuccuccaacggcgccaacggcgucaagggcuucuccuucaaguacggcaacggcgucuggaucggccgcaccaaguccaucuccucccgcaacggcuucgagaugaucugggaccccaacggcuggaccggcaccgacaacaacuucuccaucaagcaggacaucgucggcaucaacgagugguccggcuacuccggcuccuucguccagcaccccgagcucaccggccucgacugcauccgccccugcuucugggucgagcucauccgcggccgccccaaggagaacaccaucuggaccuccggcuccuccaucuccuucugcggcgucaacuccgacaccgucggcugguccuggcccgacggcgccgagcuccccuucaccaucgacaaguga

SEQ ID NO: 113834 - RNA, 1410 nt, Artificial Sequence; identical to SEQ ID NO: 113833
  derived and/or modified CDS sequence (opt2) from neuraminidase__InfluenzaA__ACZ96332

SEQ ID NO: 113835 - RNA, 1410 nt, Artificial Sequence; identical to SEQ ID NO: 112774
  derived and/or modified CDS sequence (opt2) from neuraminidase__InfluenzaA__ACZ96352

SEQ ID NO: 113836 - RNA, 1410 nt, Artificial Sequence; identical to SEQ ID NO: 113833
  derived and/or modified CDS sequence (opt2) from neuraminidase__InfluenzaA__ACZ96362

SEQ ID NO: 113837 - RNA, 1410 nt, Artificial Sequence; identical to SEQ ID NO: 112774
  derived and/or modified CDS sequence (opt2) from neuraminidase__InfluenzaA__ACZ96375

SEQ ID NO: 113838 - RNA, 1410 nt, Artificial Sequence; identical to SEQ ID NO: 113833
  derived and/or modified CDS sequence (opt2) from neuraminidase__InfluenzaA__ACZ96385

SEQ ID NO: 113839 - RNA, 1410 nt, Artificial Sequence
  derived and/or modified CDS sequence (opt2) from neuraminidase__InfluenzaA__ACZ96395
augaaccccaaccagaagaucaucaccaucggcuccgucugcaugaccaucggcauggccaaccucauccuccagaucggcaacaucaucuccaucuggaucucccacuccauccagcucggcaaccagaaccagaccgagaccugcaaccaguccgucaucaccuacgagaacaacaccugggucaaccagaccuacgucaacaucuccaacaccaacuucgccgccggccaguccgucgucuccgucaagcucgccggcaacuccucccucugccccgucuccggcugggccaucuacuccaaggacaacuccguccgcaucggcuccaagggcgacgucuucgucauccgcgagcccuucaucuccugcuccccccucgagugccgcaccuucuuccucacccagggcgcccuccucaacgacaagcacuccaacggcaccaucaaggaccgcucccccuaccgcacccucauguccugccccaucggcgagguccccucccccuacaacucccgcuucgaguccgucgccugguccgccuccgccugccacgacggcaucaacuggcucaccaucggcaucuccggccccgacaacggcgccgucgccguccucaaguacaacggcaucaucaccgacaccaucaaguccuggcgcaacaacauccuccgcacccaggaguccgagugcgccugcgucaacggcuccugcuucaccgucaugaccgacggccccuccaacggccaggccuccuacaagaucuuccgcaucgagaagggcaagaucgucaaguccgucgagaugaacgcccccaacuaccacuacgaggagugcuccugcuaccccgacuccuccgagaucaccugcgucugccgcgacaacuggcacggcuccaaccgccccugggucuccuucaaccagaaccucgaguaccagaucggcuacaucugcuccggcaucuucggcgacaacccccgccccaucgacaagaccggcuccugcggccccgucuccuccaacggcgccaacggcgucaagggcuucuccuucaaguacggcaacggcgucuggaucggccgcaccaaguccaucuccucccgcaacggcuucgagaugaucugggaccccaacggcuggaccggcaccgacaacaacuucuccaucaagcaggacaucgucggcaucaacgagugguccggcuacuccggcuccuucguccagcaccccgagcucaccggccucgacugcauccgccccugcuucugggucgagcucauccgcggccgccccaaggagaacaccaucuggaccuccggcuccuccaucuccuucugcggcgucaacuccgacaccgucggcugguccuggcccgacggcgccgagcuccccuucaccaucgacaaguga

SEQ ID NO: 113840 - RNA, 1410 nt, Artificial Sequence; identical to SEQ ID NO: 112774
  derived and/or modified CDS sequence (opt2) from neuraminidase__InfluenzaA__ACZ96408

SEQ ID NO: 113841 - RNA, 1410 nt, Artificial Sequence; identical to SEQ ID NO: 112774
  derived and/or modified CDS sequence (opt2) from neuraminidase__InfluenzaA__ACZ96428

SEQ ID NO: 113842 - RNA, 1410 nt, Artificial Sequence; identical to SEQ ID NO: 112774
  derived and/or modified CDS sequence (opt2) from neuraminidase__InfluenzaA__ACZ96438

SEQ ID NO: 113843 - RNA, 1410 nt, Artificial Sequence; identical to SEQ ID NO: 112774
  derived and/or modified CDS sequence (opt2) from neuraminidase__InfluenzaA__ACZ96448

SEQ ID NO: 113844 - RNA, 1410 nt, Artificial Sequence; identical to SEQ ID NO: 112774
  derived and/or modified CDS sequence (opt2) from neuraminidase__InfluenzaA__ACZ96479

SEQ ID NO: 113845 - RNA, 1410 nt, Artificial Sequence; identical to SEQ ID NO: 113791
  derived and/or modified CDS sequence (opt2) from neuraminidase__InfluenzaA__ACZ96489

SEQ ID NO: 113846 - RNA, 1410 nt, Artificial Sequence; identical to SEQ ID NO: 112774
  derived and/or modified CDS sequence (opt2) from neuraminidase__InfluenzaA__ACZ96499

SEQ ID NO: 113847 - RNA, 1410 nt, Artificial Sequence
  derived and/or modified CDS sequence (opt2) from neuraminidase__InfluenzaA__ACZ96509
augaaccccaaccagaagaucaucaccaucggcuccgucugcaugaccaucggcauggccaaccucauccuccagaucggcaacaucaucuccaucuggaucucccacuccauccagcucggcaaccagaaccagaucgagaccugcaaccaguccgucaucaccuacgagaacaacaccuggaucaaccagaccuacgucaacaucuccaacaccaacuucgccgccggccaguccgucgucuccgucaagcucgccggcaacuccucccucugccccgucuccggcugggccaucuacuccaaggacaacuccauccgcaucggcuccaagggcgacgucuucgucauccgcgagcccuucaucuccugcuccccccucgagugccgcaccuucuuccucacccagggcgcccuccucaacgacaagcacuccaacggcaccaucaaggaccgcucccccuaccgcacccucauguccugccccaucggcgagguccccucccccuacaacucccgcuucgaguccgucgccugguccgccuccgccugccacgacggcaucaacuggcucaccaucggcaucuccggccccgacaacggcgccgucgccguccucaaguacaacggcaucaucaccgacaccaucaaguccuggcgcaacaacauccuccgcacccaggaguccgagugcgccugcgucaacggcuccugcuucaccgucaugaccgacggccccuccgacggccaggccuccuacaagaucuuccgcaucgagaagggcaagaucgucaaguccgucgagaugaacgcccccaacuaccacuacgaggagugcuccugcuaccccgacuccuccgagaucaccugcgucugccgcgacaacuggcacggcuccaaccgccccugggucuccuucaaccagaaccucgaguaccagaucggcuacaucugcuccggcaucuucggcgacaacccccgccccaacgacaagaccggcuccugcggccccgucuccuccaacggcgccaacggcgucaagggcuucuccuucaaguacggcaacggcgucuggaucggccgcaccaaguccaucuccucccgcaacggcuucgagaugaucugggaccccaacggcuggaccggcaccgacaacaacuucuccaucaagcaggacaucgucggcaucaacgagugguccggcuacuccggcuccuucguccagcaccccgagcucaccggccucgacugcauccgccccugcuucugggucgagcucauccgcggccgccccaaggagaacaccaucuggaccuccggcuccuccaucuccuucugcggcgucaacuccgacaccgucggcugguccuggcccgacggcgccgagcuccccuucaccaucgacaaguga

SEQ ID NO: 113848 - RNA, 1410 nt, Artificial Sequence; identical to SEQ ID NO: 112774
  derived and/or modified CDS sequence (opt2) from neuraminidase__InfluenzaA__ACZ96519

SEQ ID NO: 113849 - RNA, 1410 nt, Artificial Sequence; identical to SEQ ID NO: 112774
  derived and/or modified CDS sequence (opt2) from neuraminidase__InfluenzaA__ACZ96529

SEQ ID NO: 113850 - RNA, 1410 nt, Artificial Sequence
  derived and/or modified CDS sequence (opt2) from neuraminidase__InfluenzaA__ACZ96552
augaaccccaaccagaagaucaucaccaucggcuccgucugcaugaccaucggcauggccaaccucauccuccagaucggcaacaucaucuccaucuggaucucccacuccucccagcucggcaaccagaaccagaucgagaccugcaaccaguccgucaucaccuacgagaacaacaccugggucaaccagaccuacgucaacaucuccaacaccaacuucgccgccggccaguccgucgucuccgucaagcucgccggcaacuccucccucugccccgucuccggcugggccaucuacuccaaggacaacuccauccgcaucggcuccaagggcgacgucuucgucauccgcgagcccuucaucuccugcuccccccucgagugccgcaccuucuuccucacccagggcgcccuccucaacgacaagcacuccaacggcaccaucaaggaccgcucccccuaccgcacccucauguccugccccaucggcgagguccccucccccuacaacucccgcuucgaguccgucgccugguccgccuccgccugccacgacggcaucaacuggcucaccaucggcaucuccggccccgacaacggcgccgucgccguccucaaguacaacggcaucaucaccgacaccaucaaguccuggcgcaacaacauccuccgcacccaggaguccgagugcgccugcgucaacggcuccugcuucaccgucaugaccgacggccccuccgacggccaggccuccuacaagaucuuccgcaucgagaagggcaagaucgucaaguccgucgagaugaacgcccccaacuaccacuacgaggagugcuccugcuaccccgacuccuccgagaucaccugcgucugccgcgacaacuggcacggcuccaaccgccccugggucuccuucaaccagaaccucgaguaccagaucggcuacaucugcuccggcaucuucggcgacaacccccgccccaacgacaagaccggcuccugcggccccgucuccuccaacggcgccaacggcgucaagggcuucuccuucaaguacggcaacggcgucuggaucggccgcaccaaguccaucuccucccgcaacggcuucgagaugaucugggaccccaacggcuggaccggcaccgacaacaacuucuccaucaagcaggacaucgucggcaucaacgagugguccggcuacuccggcuccuucguccagcaccccgagcucaccggccucgacugcauccgccccugcuucugggucgagcucauccgcggccgccccaaggagaacaccaucuggaccuccggcuccuccaucuccuucugcggcgucaacuccgacaccgucggcugguccuggcccgacggcgccgagcuccccuucaccaucgacaaguga

SEQ ID NO: 113851 - RNA, 1410 nt, Artificial Sequence; identical to SEQ ID NO: 112774
  derived and/or modified CDS sequence (opt2) from neuraminidase__InfluenzaA__ACZ96562

SEQ ID NO: 113852 - RNA, 1410 nt, Artificial Sequence; identical to SEQ ID NO: 112774
  derived and/or modified CDS sequence (opt2) from neuraminidase__InfluenzaA__ACZ96572

SEQ ID NO: 113853 - RNA, 1410 nt, Artificial Sequence; identical to SEQ ID NO: 112774
  derived and/or modified CDS sequence (opt2) from neuraminidase__InfluenzaA__ACZ96582

SEQ ID NO: 113854 - RNA, 1410 nt, Artificial Sequence
  derived and/or modified CDS sequence (opt2) from neuraminidase__InfluenzaA__ACZ96592
augaaccccaaccagaagaucaucaccaucggcuccgucugcaugaccaucggcauggccaaccucauccuccagaucggcaacaucaucuccaucuggaucucccacuccauccagcucggcaaccagaaccagaucgagaccugcaaccaguccgucaucaccuacgagaacaacaccugggucaaccagaccuacgucaacaucuccaacaccaacuucgccgccggccaguccgucgucuccgucaagcucgccggcaacuccucccucugccccgucuccggcugggccaucuacuccaaggacaacuccauccgcaucggcuccaagggcgacgucuucgucauccgcgagcccuucaucuccugcuccccccucgagugccgcaccuucuuccucacccagggcgcccuccucaacgacaagcacuccaacggcaccaucaaggaccgcucccccuaccgcacccucauguccugccccaucggcgagguccccucccccuacaacucccgcuucgaguccgucgccugguccgccuccgccugccacgacggcaucaacuggcucaccaucggcaucuccggccccgacaacggcgccgucgccguccucaaguacaacggcaucaucaccgacaccaucaaguccuggcgcaacaacauccuccgcacccaggaguccgagugcgccugcgucaacggcuccugcuucaccgucaugaccgacggccccuccgacggccaguccuccuacaagaucuucaagaucgagaagggcaagaucgucaaguccgucgagaugaacgcccccaacuaccacuacgaggagugcuccugcuaccccgacuccuccgagaucaccugcgucugccgcgacaacuggcacggcuccaaccgccccugggucuccuucaaccagaaccucgaguaccagaucggcuacaucugcuccggcaucuucggcgacaacccccgccccaacgacaagaccggcuccugcggccccgucuccuccaacggcgccaacggcgucaagggcuucuccuucaaguacggcaacggcgucuggaucggccgcaccaaguccaucuccucccgcaacggcuucgagaugaucugggaccccaacggcuggaccggcaccgacaacaacuucuccaucaagcaggacaucgucggcaucaacgagugguccggcuacuccggcuccuucguccagcaccccgagcucaccggccucgacugcauccgccccugcuucugggucgagcucauccgcggccgccccaaggagaacaccaucuggaccuccggcuccuccaucuccuucugcggcgucaacuccgacaccgucggcugguccuggcccgacggcgccgagcuccccuucaccaucgacaaguga

SEQ ID NO: 113855 - RNA, 1410 nt, Artificial Sequence; identical to SEQ ID NO: 112774
  derived and/or modified CDS sequence (opt2) from neuraminidase__InfluenzaA__ACZ96602

SEQ ID NO: 113856 - RNA, 1410 nt, Artificial Sequence
  derived and/or modified CDS sequence (opt2) from neuraminidase__InfluenzaA__ACZ96612
augaaccccaaccagaagaucaucaccaucggcuccgucugcaugaccaucggcauggccaaccucauccuccagaucggcaacaucaucuccaucuggaucucccacuccauccagcucggcaaccagaaccagaucgagaccugcaaccaguccgucgucaccuacgagaacaacaccugggucaaccagaccuacgucaacaucuccaacaccaacuucgccgccggccaguccgucgucuccgucaagcucgccggcaacuccucccucugccccgucuccggcugggccaucuacuccaaggacaacuccguccgcaucggcuccaagggcgacgucuucgucauccgcgagcccuucaucuccugcuccccccucgagugccgcaccuucuuccucacccagggcgcccuccucaacgacaagcacuccaacggcaccaucaaggaccgcucccccuaccgcacccucauguccugccccaucggcgagguccccucccccuacaacucccgcuucgaguccgucgccugguccgccuccgccugccacgacggcaucaacuggcucaccaucggcaucuccggccccgacaacggcgccgucgccguccucaaguacaacggcaucaucaccgacaccaucaaguccuggcgcaacaacauccuccgcacccaggaguccgagugcgccugcgucaacggcuccugcuucaccgucaugaccgacggccccuccaacggccaggccuccuacaagaucuuccgcaucgagaagggcaagaucgucaaguccgucgagaugaacgcccccaacuaccacuacgaggagugcuccugcuaccccgacuccuccgagaucaccugcgucugccgcgacaacuggcacggcuccaaccgccccugggucuccuucaaccagaaccucgaguaccagaucggcuacaucugcuccggcaucuucggcgacaacccccgccccaacgacaagaccggcuccugcggccccgucuccuccaacggcgccaacggcgucaagggcuucuccuucaaguacggcaacggcgucuggaucggccgcaccaaguccaucuccucccgcaacggcuucgagaugaucugggaccccaacggcuggaccggcaccgacaacaacuucuccaucaagcaggacaucgucggcaucaacgagugguccggcuacuccggcuccuucguccagcaccccgagcucaccggccucgacugcauccgccccugcuucugggucgagcucauccgcggccgccccaaggagaacaccaucuggaccuccggcuccuccaucuccuucugcggcgucaacuccgacaccgucggcugguccuggcccgacggcgccgagcuccccuucaccaucgacaaguga

SEQ ID NO: 113857 - RNA, 1410 nt, Artificial Sequence; identical to SEQ ID NO: 112804
  derived and/or modified CDS sequence (opt2) from neuraminidase__InfluenzaA__ACZ96622

SEQ ID NO: 113858 - RNA, 1410 nt, Artificial Sequence; identical to SEQ ID NO: 112804
  derived and/or modified CDS sequence (opt2) from neuraminidase__InfluenzaA__ACZ96632

SEQ ID NO: 113859 - RNA, 1410 nt, Artificial Sequence; identical to SEQ ID NO: 112804
  derived and/or modified CDS sequence (opt2) from neuraminidase__InfluenzaA__ACZ96642

SEQ ID NO: 113860 - RNA, 1410 nt, Artificial Sequence; identical to SEQ ID NO: 112804
  derived and/or modified CDS sequence (opt2) from neuraminidase__InfluenzaA__ACZ96652

SEQ ID NO: 113861 - RNA, 1410 nt, Artificial Sequence; identical to SEQ ID NO: 112804
  derived and/or modified CDS sequence (opt2) from neuraminidase__InfluenzaA__ACZ96662

SEQ ID NO: 113862 - RNA, 1410 nt, Artificial Sequence; identical to SEQ ID NO: 112804
  derived and/or modified CDS sequence (opt2) from neuraminidase__InfluenzaA__ACZ96672

SEQ ID NO: 113863 - RNA, 1410 nt, Artificial Sequence; identical to SEQ ID NO: 112804
  derived and/or modified CDS sequence (opt2) from neuraminidase__InfluenzaA__ACZ96682

SEQ ID NO: 113864 - RNA, 1410 nt, Artificial Sequence; identical to SEQ ID NO: 112804
  derived and/or modified CDS sequence (opt2) from neuraminidase__InfluenzaA__ACZ96692

SEQ ID NO: 113865 - RNA, 1410 nt, Artificial Sequence; identical to SEQ ID NO: 112804
  derived and/or modified CDS sequence (opt2) from neuraminidase__InfluenzaA__ACZ96702

SEQ ID NO: 113866 - RNA, 1410 nt, Artificial Sequence; identical to SEQ ID NO: 112804
  derived and/or modified CDS sequence (opt2) from neuraminidase__InfluenzaA__ACZ96712

SEQ ID NO: 113867 - RNA, 1410 nt, Artificial Sequence; identical to SEQ ID NO: 112804
  derived and/or modified CDS sequence (opt2) from neuraminidase__InfluenzaA__ACZ96722

SEQ ID NO: 113868 - RNA, 1410 nt, Artificial Sequence; identical to SEQ ID NO: 112804
  derived and/or modified CDS sequence (opt2) from neuraminidase__InfluenzaA__ACZ96732

SEQ ID NO: 113869 - RNA, 1410 nt, Artificial Sequence; identical to SEQ ID NO: 112804
  derived and/or modified CDS sequence (opt2) from neuraminidase__InfluenzaA__ACZ96742

SEQ ID NO: 113870 - RNA, 1410 nt, Artificial Sequence; identical to SEQ ID NO: 112764
  derived and/or modified CDS sequence (opt2) from neuraminidase__InfluenzaA__ACZ96752

SEQ ID NO: 113871 - RNA, 1410 nt, Artificial Sequence; identical to SEQ ID NO: 112764
  derived and/or modified CDS sequence (opt2) from neuraminidase__InfluenzaA__ACZ96762

SEQ ID NO: 113872 - RNA, 1410 nt, Artificial Sequence; identical to SEQ ID NO: 112764
  derived and/or modified CDS sequence (opt2) from neuraminidase__InfluenzaA__ACZ96772

SEQ ID NO: 113873 - RNA, 1410 nt, Artificial Sequence; identical to SEQ ID NO: 112764
  derived and/or modified CDS sequence (opt2) from neuraminidase__InfluenzaA__ACZ96782

SEQ ID NO: 113874 - RNA, 1410 nt, Artificial Sequence; identical to SEQ ID NO: 112764
  derived and/or modified CDS sequence (opt2) from neuraminidase__InfluenzaA__ACZ96792

SEQ ID NO: 113875 - RNA, 1410 nt, Artificial Sequence; identical to SEQ ID NO: 112774
  derived and/or modified CDS sequence (opt2) from neuraminidase__InfluenzaA__ACZ96802

SEQ ID NO: 113876 - RNA, 1410 nt, Artificial Sequence; identical to SEQ ID NO: 112774
  derived and/or modified CDS sequence (opt2) from neuraminidase__InfluenzaA__ACZ96812

SEQ ID NO: 113877 - RNA, 1410 nt, Artificial Sequence; identical to SEQ ID NO: 113357
  derived and/or modified CDS sequence (opt2) from neuraminidase__InfluenzaA__ACZ96822

SEQ ID NO: 113878 - RNA, 1410 nt, Artificial Sequence
  derived and/or modified CDS sequence (opt2) from neuraminidase__InfluenzaA__ACZ96842
augaaccccaaccagaagaucaucaccaucggcuccgucugcaugaccaucggcauggccaaccucauccuccagaucggcaacaucaucuccaucuggaucucccacuccauccagcucggcaaccagaaccagaucgagaccugcaaccaguccgucaucaccuacgagaacaacaccugggucaaccagaccuacgucaacaucuccaacaccaacuucgccgccggccaguccgucgucuccgucaagcucgccggcaacuccucccucugccccgucuccggcugggccaucuacuccaaggacaacuccguccgcaucggcuccaagggcgacgucuucgucauccgcgagcccuucaucuccugcuccccccucgagugccgcaccuucuuccucacccagggcgcccuccucaacgacaagcacuccaacggcaccaucaaggaccgcucccccuaccgcacccucauguccugccccaucggcgagguccccucccccuacaacucccgcuucgaguccgucgccugguccgccuccgccugccacgacggcaucaacuggcucaccaucggcaucuccggccccgacaacggcgccgucgccguccucaaguacaacggcaucaucaccgacaccaucaaguccuggcgcaacaacauccuccgcacccaggaguccgagugcgccugcgucaacggcuccugcuucaccgucaugaccgacggccccuccaacggccaggccuccuacaagaucuuccgcaucgagaagggcaagaucgucaaguccgucgagaugaucgcccccaacuaccacuacgaggagugcuccugcuaccccgacuccuccgagaucaccugcgucugccgcgacaacuggcacggcuccaaccgccccugggucuccuucaaccagaaccucgaguaccagaucggcuacaucugcuccggcaucuucggcgacaacccccgccccaacgacaagaccggcuccugcggccccgucuccuccaacggcgccaacggcgucaagggcuucuccuucaaguacggcaacggcgucuggaucggccgcaccaaguccaucuccucccgcaacggcuucgagaugaucugggaccccaacggcuggaccggcaccgacaacaacuucuccaucaagcaggacaucgucggcaucaacgagugguccggcuacuccggcuccuucguccagcaccccgagcucaccggccucgacugcauccgccccugcuucugggucgagcucauccgcggccgccccaaggagaacaccaucuggaccuccggcuccuccaucuccuucugcggcgucaacuccgacaccgucggcugguccuggcccgacggcgccgagcuccccuucaccaucgacaaguga

SEQ ID NO: 113879 - RNA, 1410 nt, Artificial Sequence; identical to SEQ ID NO: 112774
  derived and/or modified CDS sequence (opt2) from neuraminidase__InfluenzaA__ACZ96852

SEQ ID NO: 113880 - RNA, 1410 nt, Artificial Sequence; identical to SEQ ID NO: 112774
  derived and/or modified CDS sequence (opt2) from neuraminidase__InfluenzaA__ACZ96862

SEQ ID NO: 113881 - RNA, 1410 nt, Artificial Sequence
  derived and/or modified CDS sequence (opt2) from neuraminidase__InfluenzaA__ACZ96872
augaaccccaaccagaagaucaucaccaucggcuccgucugcaugaccaucggcauggccaaccucauccuccagaucggcaacaucaucuccaucuggaucucccacuccauccagcucggcaaccagaaccagaucgagaccugcaaccaguccgucaucaccuacgagaacaacaccugggucaaccagaccuacgucaacaucuccaacaccaacuucgccgccggccaguccgucgucuccaugaagcucgccggcaacuccucccucugccccgucuccggcugggccaucuacuccaaggacaacuccauccgcaucggcuccaagggcgacgucuucgucauccgcgagcccuucaucuccugcuccccccucgagugccgcaccuucuuccucacccagggcgcccuccucaacgacaagcacuccaacggcaccaucaaggaccgcucccccuaccgcacccucauguccugccccaucggcgagguccccucccccuacaacucccgcuucgaguccgucgccugguccgccuccgccugccacgacggcaucaacuggcucaccaucggcaucuccggccccgacaacggcgccgucgccguccucaaguacaacggcaucaucaccgacaccaucaaguccuggcgcaacaacauccuccgcacccaggaguccgagugcgccugcgucaacggcuccugcuucaccgucaugaccgacggccccuccgacggccaggccuccuacaagaucuuccgcaucgagaagggcaagaucgucaaguccgucgagaugaacgcccccaacuaccacuacgaggagugcuccugcuaccccgacuccuccgagaucaccugcgucugccgcgacaacuggcacggcuccaaccgccccugggucuccuucaaccagaaccucgaguaccagaucggcuacaucugcuccggcaucuucggcgacaacccccgccccaacgacaagaccggcuccugcggccccgucuccuccaacggcgccaacggcgucaagggcuucuccuucaaguacggcaacggcgucuggaucggccgcaccaaguccaucuccucccgcaacggcuucgagaugaucugggaccccaacggcuggaccggcaccgacaacaacuucuccaucaagcaggacaucgucggcaucaacgagugguccggcuacuccggcuccuucguccagcaccccgagcucaccggccucgacugcauccgccccugcuucugggucgagcucauccgcggccgccccaaggagaacaccaucuggaccuccggcuccuccaucuccuucugcggcgucaacuccgacaccgucggcugguccuggcccgacggcgccgagcuccccuucaccaucgacaaguga

SEQ ID NO: 113882 - RNA, 1410 nt, Artificial Sequence; identical to SEQ ID NO: 112764
  derived and/or modified CDS sequence (opt2) from neuraminidase__InfluenzaA__ACZ96882

SEQ ID NO: 113883 - RNA, 1410 nt, Artificial Sequence; identical to SEQ ID NO: 113881
  derived and/or modified CDS sequence (opt2) from neuraminidase__InfluenzaA__ACZ96892

SEQ ID NO: 113884 - RNA, 1410 nt, Artificial Sequence; identical to SEQ ID NO: 113881
  derived and/or modified CDS sequence (opt2) from neuraminidase__InfluenzaA__ACZ96902

SEQ ID NO: 113885 - RNA, 1410 nt, Artificial Sequence; identical to SEQ ID NO: 112764
  derived and/or modified CDS sequence (opt2) from neuraminidase__InfluenzaA__ACZ96912

SEQ ID NO: 113886 - RNA, 1410 nt, Artificial Sequence; identical to SEQ ID NO: 112764
  derived and/or modified CDS sequence (opt2) from neuraminidase__InfluenzaA__ACZ96922

SEQ ID NO: 113887 - RNA, 1410 nt, Artificial Sequence; identical to SEQ ID NO: 113881
  derived and/or modified CDS sequence (opt2) from neuraminidase__InfluenzaA__ACZ96932

SEQ ID NO: 113888 - RNA, 1410 nt, Artificial Sequence; identical to SEQ ID NO: 113881
  derived and/or modified CDS sequence (opt2) from neuraminidase__InfluenzaA__ACZ96942

SEQ ID NO: 113889 - RNA, 1410 nt, Artificial Sequence; identical to SEQ ID NO: 112764
  derived and/or modified CDS sequence (opt2) from neuraminidase__InfluenzaA__ACZ96952

SEQ ID NO: 113890 - RNA, 1410 nt, Artificial Sequence; identical to SEQ ID NO: 112764
  derived and/or modified CDS sequence (opt2) from neuraminidase__InfluenzaA__ACZ97024

SEQ ID NO: 113891 - RNA, 1410 nt, Artificial Sequence; identical to SEQ ID NO: 113881
  derived and/or modified CDS sequence (opt2) from neuraminidase__InfluenzaA__ACZ97336

SEQ ID NO: 113892 - RNA, 1410 nt, Artificial Sequence; identical to SEQ ID NO: 113881
  derived and/or modified CDS sequence (opt2) from neuraminidase__InfluenzaA__ACZ97346

SEQ ID NO: 113893 - RNA, 1410 nt, Artificial Sequence; identical to SEQ ID NO: 112774
  derived and/or modified CDS sequence (opt2) from neuraminidase__InfluenzaA__ACZ97366

SEQ ID NO: 113894 - RNA, 1410 nt, Artificial Sequence; identical to SEQ ID NO: 112774
  derived and/or modified CDS sequence (opt2) from neuraminidase__InfluenzaA__ACZ97376

SEQ ID NO: 113895 - RNA, 1410 nt, Artificial Sequence; identical to SEQ ID NO: 112774
  derived and/or modified CDS sequence (opt2) from neuraminidase__InfluenzaA__ACZ97386

SEQ ID NO: 113896 - RNA, 1410 nt, Artificial Sequence; identical to SEQ ID NO: 113881
  derived and/or modified CDS sequence (opt2) from neuraminidase__InfluenzaA__ACZ97396

SEQ ID NO: 113897 - RNA, 1410 nt, Artificial Sequence; identical to SEQ ID NO: 112774
  derived and/or modified CDS sequence (opt2) from neuraminidase__InfluenzaA__ACZ98171

SEQ ID NO: 113898 - RNA, 1410 nt, Artificial Sequence; identical to SEQ ID NO: 112774
  derived and/or modified CDS sequence (opt2) from neuraminidase__InfluenzaA__ACZ98181

SEQ ID NO: 113899 - RNA, 1410 nt, Artificial Sequence
  derived and/or modified CDS sequence (opt2) from neuraminidase__InfluenzaA__ACZ98191
augaaccccaaccagaagaucaucaccaucggcuccgucugcaugaccaucggcauggccaaccucauccuccagaucggcaacaucaucuccaucuggaucucccacuccauccagcucggcaaccagaaccagaucgagaccugcaaccaguccgucaucuccuacgagaacaacaccugggucaaccagaccuacgucaacaucuccaacaccaacuucgccgccggccaguccgucgucuccgucaagcucgccggcaacuccucccucugccccgucuccggcugggccaucuacuccaaggacaacuccauccgcaucggcuccaagggcgacgucuucgucauccgcgagcccuucaucuccugcuccccccucgagugccgcaccuucuuccucacccagggcgcccuccucaacgacaagcacuccaacggcaccaucaaggaccgcucccccuaccgcacccucauguccugccccaucggcgagguccccucccccuacaacucccgcuucgaguccgucgccugguccgccuccgccugccacgacggcaucaacuggcucaccaucggcaucuccggccccgacaacggcgccgucgccguccucaaguacaacggcaucaucaccgacaccaucaaguccuggcgcaacaacauccuccgcacccaggaguccgagugcgccugcgucaacggcuccugcuucaccgucaugaccgacggccccuccgacggccaggccuccuacaagaucuuccgcaucgagaagggcaagaucgucaaguccgucgagaugaacgcccccaacuaccacuacgaggagugcuccugcuaccccgacuccuccgagaucaccugcgucugccgcgacaacuggcacggcuccaaccgccccugggucuccuucaaccagaaccucgaguaccagaucggcuacaucugcuccggcaucuucggcgacaacccccgccccaacgacaagaccggcuccugcggccccgucuccuccaacggcgccaacggcgucaagggcuucuccuucaaguacggcaacggcgucuggaucggccgcaccaaguccaucuccucccgcaacggcuucgagaugaucugggaccccaacggcuggaccggcaccgacaacaacuucuccaucaagcaggacaucgucggcaucaacgagugguccggcuacuccggcuccuucguccagcaccccgagcucaccggccucgacugcauccgccccugcuucugggucgagcucauccgcggccgccccaaggagaacaccaucuggaccuccggcuccuccaucuccuucugcggcgucaacuccgacaccgucggcugguccuggcccgacggcgccgagcuccccuucaccaucgacaaguga

SEQ ID NO: 113900 - RNA, 1410 nt, Artificial Sequence; identical to SEQ ID NO: 112764
  derived and/or modified CDS sequence (opt2) from neuraminidase__InfluenzaA__ACZ98201

SEQ ID NO: 113901 - RNA, 1410 nt, Artificial Sequence; identical to SEQ ID NO: 112774
  derived and/or modified CDS sequence (opt2) from neuraminidase__InfluenzaA__ACZ98211

SEQ ID NO: 113902 - RNA, 1410 nt, Artificial Sequence; identical to SEQ ID NO: 112774
  derived and/or modified CDS sequence (opt2) from neuraminidase__InfluenzaA__ACZ98221

SEQ ID NO: 113903 - RNA, 1410 nt, Artificial Sequence; identical to SEQ ID NO: 112774
  derived and/or modified CDS sequence (opt2) from neuraminidase__InfluenzaA__ACZ98231

SEQ ID NO: 113904 - RNA, 1410 nt, Artificial Sequence; identical to SEQ ID NO: 112774
  derived and/or modified CDS sequence (opt2) from neuraminidase__InfluenzaA__ACZ98241

SEQ ID NO: 113905 - RNA, 1410 nt, Artificial Sequence; identical to SEQ ID NO: 113751
  derived and/or modified CDS sequence (opt2) from neuraminidase__InfluenzaA__ACZ98251

SEQ ID NO: 113906 - RNA, 1410 nt, Artificial Sequence; identical to SEQ ID NO: 112774
  derived and/or modified CDS sequence (opt2) from neuraminidase__InfluenzaA__ACZ98261

SEQ ID NO: 113907 - RNA, 1410 nt, Artificial Sequence; identical to SEQ ID NO: 112774
  derived and/or modified CDS sequence (opt2) from neuraminidase__InfluenzaA__ACZ98271

SEQ ID NO: 113908 - RNA, 1410 nt, Artificial Sequence; identical to SEQ ID NO: 112774
  derived and/or modified CDS sequence (opt2) from neuraminidase__InfluenzaA__ACZ98281

SEQ ID NO: 113909 - RNA, 1410 nt, Artificial Sequence; identical to SEQ ID NO: 112774
  derived and/or modified CDS sequence (opt2) from neuraminidase__InfluenzaA__ACZ98291

SEQ ID NO: 113910 - RNA, 1410 nt, Artificial Sequence; identical to SEQ ID NO: 112764
  derived and/or modified CDS sequence (opt2) from neuraminidase__InfluenzaA__ACZ98301

SEQ ID NO: 113911 - RNA, 1410 nt, Artificial Sequence
  derived and/or modified CDS sequence (opt2) from neuraminidase__InfluenzaA__ACZ98321
augaaccccaaccagaagaucaucaccaucggcuccgucugcaugaccaucggcauggccaaccucauccuccagaucggcaacaucaucuccaucuggaucucccacuccauccagcucggcaaccagaaccagaucgagaccugcaaccaguccgucaucaccuacgagaacaacaccugggucaaccagaccuacgucaacaucuccaacaccaacuucgccgccggccaguccgucgucuccgucaagcucgccggcaacuccucccucugccccgucuccggcugggccaucuacuccaaggacaacuccauccgcaucggcuccaagggcgacgucuucgucauccgcgagcccuucaucuccugcuccccccucgagugccgcaccuucuuccucacccagggcgcccuccucaacgacaagcacuccaacggcaccaucaaggaccgcucccccuaccgcacccucauguccugccccaucggcgagguccccucccccuacaacucccgcuucgaguccgucgccugguccgccuccgccugccacgacggcaucaacuggcucaccaucggcaucuccggccccgacaacggcgccgucgccguccucaaguacaacggcaucaucaccgacaccaucaaguccuggcgcaacaacauccuccgcacccaggaguccgagugcgccugcgucaacggcuccugcuucaccgucaugaccgacggccccuccgacggccaggccuccuacaagaucuuccgcaucgagaagggcaagaucgucaaguccgucgagaugaacgcccccaacuaccacuacgaggagugcuccugcuaccccgacuccuccgagaucaccugcgucugccgcgacaacuggcacggcuccaaccgccccugggucuccuucaaccagaaccucgaguaccagaucggcuacaucugcuccggcaucuucggcgacaacccccgccccaacgacaagaccggcuccugcggccccgucuccuccaacggcgccaacggcgucaagggcuucuccuucaaguacggcaacggcgucuggaucggccgcaccaaguccaucaacucccgcaacggcuucgagaugaucugggaccccaacggcuggaccggcaccgacaacaacuucuccaucaagcaggacaucgucggcaucaacgagugguccggcuacuccggcuccuucguccagcaccccgagcucaccggccucgacugcauccgccccugcuucugggucgagcucauccgcggccgccccaaggagaacaccaucuggaccuccggcuccuccaucuccuucugcggcgucaacuccgacaccgucggcugguccuggcccgacggcgccgagcuccccuucaccaucgacaaguga

SEQ ID NO: 113912 - RNA, 1410 nt, Artificial Sequence; identical to SEQ ID NO: 112774
  derived and/or modified CDS sequence (opt2) from neuraminidase__InfluenzaA__ACZ98331

SEQ ID NO: 113913 - RNA, 1410 nt, Artificial Sequence
  derived and/or modified CDS sequence (opt2) from neuraminidase__InfluenzaA__ACZ98341
augaaccccaaccagaagaucaucaccaucggcuccgucugcaucaccaucggcauggccaaccucauccuccagaucggcaacaucaucuccaucuggaucucccaccccauccagcucggcaaccagaaccagaucgagaccugcaaccaguccgucaucaccuacgagaacaacaccugggucaaccagaccuacgucaacaucuccaacaccaaccucgccgccggccaguccgucgucuccgucaagcucgccggcaacuccucccucugccccgucuccggcugggccaucuacuccaaggacaacuccauccgcaucggcuccaagggcgacgucuucgucauccgcgagcccuucaucuccugcuccccccucgagugccgcaccuucuuccucacccagggcgcccuccucaacgacaagcacuccaacggcaccaucaaggaccgcucccccuaccgcacccucauguccugccccaucggcgagguccccucccccuacaacucccgcuucgaguccgucgccugguccgccuccgccugccacgacggcaucaacuggcucaccaucggcaucuccggccccgacaacggcgccgucgccguccucaaguacaacggcaucaucaccgacaccaucaaguccuggcgcaacaacauccuccgcacccaggaguccgagugcgccugcgucaacggcuccugcuucaccgucaugaccgacggccccuccgacggccaggccuccuacaagaucuuccgcaucgagaagggcaagaucgucaaguccgucgagaugaacgcccccaacuaccacuacgaggagugcuccugcuaccccgacuccuccgagaucaccugcgucugccgcgacaacuggcacggcuccaaccgccccugggucuccuucaaccagaaccucgaguaccagaucggcuacaucugcuccggcaucuucggcgacaacccccgccccaacgacaagaccggcuccugcggccccgucuccuccaacggcgccaacggcgucaagggcuucuccuucaaguacggcaacggcgucuggaucggccgcaccaaguccaucuccucccgcaacggcuucgagaugaucugggaccccaacggcuggaccggcaccgacaacaacuucuccaucaagcaggacaucgucggcaucaacgagugguccggcuacuccggcuccuucguccagcaccccgagcucaccggccucgacugcauccgccccugcuucugggucgagcucauccgcggccgccccaaggagaacaccaucuggaccuccggcuccuccaucuccuucugcggcgucaacuccgacaccgucggcugguccuggcccgacggcgccgagcuccccuucaccaucgacaaguga

SEQ ID NO: 113914 - RNA, 1410 nt, Artificial Sequence; identical to SEQ ID NO: 112774
  derived and/or modified CDS sequence (opt2) from neuraminidase__InfluenzaA__ACZ98351

SEQ ID NO: 113915 - RNA, 1410 nt, Artificial Sequence; identical to SEQ ID NO: 112774
  derived and/or modified CDS sequence (opt2) from neuraminidase__InfluenzaA__ACZ98361

SEQ ID NO: 113916 - RNA, 1410 nt, Artificial Sequence; identical to SEQ ID NO: 112774
  derived and/or modified CDS sequence (opt2) from neuraminidase__InfluenzaA__ACZ98371

SEQ ID NO: 113917 - RNA, 1410 nt, Artificial Sequence; identical to SEQ ID NO: 112774
  derived and/or modified CDS sequence (opt2) from neuraminidase__InfluenzaA__ACZ98381

SEQ ID NO: 113918 - RNA, 1410 nt, Artificial Sequence; identical to SEQ ID NO: 112774
  derived and/or modified CDS sequence (opt2) from neuraminidase__InfluenzaA__ACZ98391

SEQ ID NO: 113919 - RNA, 1410 nt, Artificial Sequence; identical to SEQ ID NO: 112774
  derived and/or modified CDS sequence (opt2) from neuraminidase__InfluenzaA__ACZ98401

SEQ ID NO: 113920 - RNA, 1410 nt, Artificial Sequence; identical to SEQ ID NO: 112774
  derived and/or modified CDS sequence (opt2) from neuraminidase__InfluenzaA__ACZ98411

SEQ ID NO: 113921 - RNA, 1410 nt, Artificial Sequence; identical to SEQ ID NO: 112804
  derived and/or modified CDS sequence (opt2) from neuraminidase__InfluenzaA__ACZ98421

SEQ ID NO: 113922 - RNA, 1410 nt, Artificial Sequence; identical to SEQ ID NO: 112774
  derived and/or modified CDS sequence (opt2) from neuraminidase__InfluenzaA__ACZ98431

SEQ ID NO: 113923 - RNA, 1410 nt, Artificial Sequence; identical to SEQ ID NO: 112774
  derived and/or modified CDS sequence (opt2) from neuraminidase__InfluenzaA__ACZ98441

SEQ ID NO: 113924 - RNA, 1410 nt, Artificial Sequence; identical to SEQ ID NO: 112774
  derived and/or modified CDS sequence (opt2) from neuraminidase__InfluenzaA__ACZ98451

SEQ ID NO: 113925 - RNA, 1410 nt, Artificial Sequence; identical to SEQ ID NO: 112774
  derived and/or modified CDS sequence (opt2) from neuraminidase__InfluenzaA__ACZ98461

SEQ ID NO: 113926 - RNA, 1410 nt, Artificial Sequence; identical to SEQ ID NO: 113357
  derived and/or modified CDS sequence (opt2) from neuraminidase__InfluenzaA__ACZ98674

SEQ ID NO: 113927 - RNA, 1410 nt, Artificial Sequence; identical to SEQ ID NO: 113881
  derived and/or modified CDS sequence (opt2) from neuraminidase__InfluenzaA__ACZ98684

SEQ ID NO: 113928 - RNA, 1410 nt, Artificial Sequence; identical to SEQ ID NO: 113827
  derived and/or modified CDS sequence (opt2) from neuraminidase__InfluenzaA__ACZ98694

SEQ ID NO: 113929 - RNA, 1410 nt, Artificial Sequence; identical to SEQ ID NO: 112774
  derived and/or modified CDS sequence (opt2) from neuraminidase__InfluenzaA__ADA60801

SEQ ID NO: 113930 - RNA, 1410 nt, Artificial Sequence; identical to SEQ ID NO: 112774
  derived and/or modified CDS sequence (opt2) from neuraminidase__InfluenzaA__ADA69294

SEQ ID NO: 113931 - RNA, 1410 nt, Artificial Sequence; identical to SEQ ID NO: 112774
  derived and/or modified CDS sequence (opt2) from neuraminidase__InfluenzaA__ADA69304

SEQ ID NO: 113932 - RNA, 1410 nt, Artificial Sequence; identical to SEQ ID NO: 112774
  derived and/or modified CDS sequence (opt2) from neuraminidase__InfluenzaA__ADA69314

SEQ ID NO: 113933 - RNA, 1410 nt, Artificial Sequence; identical to SEQ ID NO: 112774
  derived and/or modified CDS sequence (opt2) from neuraminidase__InfluenzaA__ADA69324

SEQ ID NO: 113934 - RNA, 1410 nt, Artificial Sequence; identical to SEQ ID NO: 112774
  derived and/or modified CDS sequence (opt2) from neuraminidase__InfluenzaA__ADA69334

SEQ ID NO: 113935 - RNA, 1410 nt, Artificial Sequence; identical to SEQ ID NO: 112774
  derived and/or modified CDS sequence (opt2) from neuraminidase__InfluenzaA__ADA69451

SEQ ID NO: 113936 - RNA, 1410 nt, Artificial Sequence; identical to SEQ ID NO: 112774
  derived and/or modified CDS sequence (opt2) from neuraminidase__InfluenzaA__ADA69453

SEQ ID NO: 113937 - RNA, 1410 nt, Artificial Sequence
  derived and/or modified CDS sequence (opt2) from neuraminidase__InfluenzaA__ADA71153
augaaccccaaccagaagaucaucaccaucggcuccgucucccucaccaucuccaccaucugcuucuucaugcagaucgccauccucgucaccaccgucacccuccacuucaagcaguacgaguucaacuccccccccaacaaccaggucaugcucugcgagcccaccaucaucgagcgcaacaucaccgagaucgucuaccucaccaacaccaccaucgagaaggagaucugccccaagcucgccgaguaccgcaacugguccaagccccagugcgacaucaccggcuucgcccccuucuccaaggacaacuccauccgccucuccgccggcggcgacaucugggucacccgcgagcccuacgucuccugcgaccccgacaagugcuaccaguucgcccucggccagggcaccacccucaacaacguccacuccaacaacaccguccgcgaccgcacccccuaccgcacccuccucaugaacgagcucggcguccccuuccaccucggcaccaagcaggucugcaucgccugguccuccuccuccugccacgacggcaaggccuggcuccacgucugcaucaccggcgacgacaagaacgccaccgccuccuucaucuacaacggccgccucgucgacuccgucgucuccugguccaaggacauccuccgcacccaggaguccgagugcgucugcaucaacggcaccugcaccgucgucaugaccgacggcuccgccuccggcaaggccgacaccaagauccucuucaucgaggagggcaagaucguccacaccuccacccucuccggcuccgcccagcacgucgaggagugcuccugcuacccccgcuaccccggcguccgcugcgucugccgcgacaacuggaagggcuccaaccgccccaucgucgacaucaacaucaaggaccacuccaucgucucccgcuacgucugcuccggccucgucggcgaccccccccgcaagaacgacuccuccuccuccucccacugccucgaccccaacaacgaggagggcggccacggcgucaagggcugggccuucgacgacggcaacgacgucuggaugggccgcaccaucuccgagaagucccgccucggcuacgagaccuucaaggucaucgagggcugguccaaccccaaguccaagcuccagaucaaccgccaggucaucgucgaccgcggcaaccgcuccggcuacuccggcaucuucuccgucgagggcaaguccugcaucaaccgcugcuucuacgucgagcucauccgcggccgcaaggaggagaccgagguccucuggaccuccaacuccaucgucgucuucugcggcaccuccggcaccuacggcaccggcuccuggcccgacggcgccaacaucaaccucaugcccaucuga

SEQ ID NO: 113938 - RNA, 1413 nt, Artificial Sequence
  derived and/or modified CDS sequence (opt2) from neuraminidase__InfluenzaA__ADA71155
augaaccccaaccagaagaucaucaccaucggcuccaucuccaucgccaucggcaucaucucccucaugcuccagaucggcaacaucaucuccaucugggccucccacuccauccagaucggcucccagaacaacaccggcaucugcaaccagcgcaucaucaccuacgagaacuccaccugggucaaccacaccuacgucaacaucaacaacaccaaggucgucgccggcgaggacaagaccuccgucacccucgccggcaacuccucccucugcuccaucuccggcugggccaucuacaccaaggacaacuccauccgcaucggcuccaagggcgacgucuucgucauccgcgagcccuucaucuccugcucccaccucgagugccgcaccuucuuccucacccagggcgcccuccucaacgacaagcacuccaacggcaccgucaaggaccgcucccccuaccgcgcccucauguccugcccccucggcgaggcccccucccccuacaacuccaaguucgaguccgucgccugguccgccuccgccugccacgacggcaugggcuggcucaccaucggcaucuccggccccgacaacggcgccgucgccguccucaaguacaacggcaucaucaccggcaccaucaaguccuggaagaagcagauccuccgcacccaggaguccgagugcgucugcaugaacggcuccugcuucaccaucaugaccgacggccccuccaacaaggccgccuccuacaagaucuucaagaucgagaagggcaaggucaccaaguccaucgagcucaacgcccccaacuucuacuacgaggagugcuccugcuaccccgacaccggcaucgucaugugcgucugccgcgacaacuggcacggcuccaaccgccccugggucuccuucaaccagaaccucgacuaccagaucggcuacaucugcuccggcgucuucggcgacaacccccgccccgaggacggcgagggcuccugcaaccccgucaccgucgacggcgccaacggcgucaagggcuucuccuacaaguacggcaacggcgucuggaucggccgcaccaaguccaaccgccuccgcaagggcuucgagaugaucugggaccccaacggcuggaccaacaccgacuccgacuucuccgucaagcaggacgucgucgccaucaccgacugguccggcuacuccggcuccuucguccagcaccccgagcucaccggccucgacugcauccgccccugcuucugggucgagcucguccgcggccucccccgcgagaacaccaccaucuggaccuccggcuccuccaucuccuucugcggcgucaacuccgacaccgccaacugguccuggcccgacggcgccgagcuccccuucaccaucgacaaguga

SEQ ID NO: 113939 - RNA, 1413 nt, Artificial Sequence; identical to SEQ ID NO: 113497
  derived and/or modified CDS sequence (opt2) from neuraminidase__InfluenzaA__ADA71157

SEQ ID NO: 113940 - RNA, 1413 nt, Artificial Sequence
  derived and/or modified CDS sequence (opt2) from neuraminidase__InfluenzaA__ADA71159
augaaccccaaccagaagaucaucaccaucggcuccaucuccaucgccaucggcaucaucucccucaugcuccagaucggcaacaucaucuccaucugggccucccacuccauccagaucggcucccagaacaacaccggcaucugcaaccagcgcaucaucaccuacgagaacuccaccugggucaaccacaccuacgucaacaucaacaacaccaaggucgucgccggcgagggcaagaccuccgucacccucgccggcaacuccucccucugcuccaucuccggcugggccaucaacaccaaggacaacuccauccgcaucggcuccaagggcgacgucuucgucauccgcgagcccuucaucuccugcucccaccucgagugccgcaccuucuuccucacccagggcgcccuccucaacgacaagcacuccaaccgcaccgucaaggaccgcucccccuaccgcgcccucauguccugcccccucggcgaggcccccucccccuacaacuccaaguucgaguccgucgccugguccgccuccgccugccacgacggcaugggcuggcucaccaucggcaucuccggccccgacaacggcgccgucgccguccucaaguacaacggcaucaucaccggcaccaucaaguccuggaagaagcagauccuccgcacccaggaguccgagugcgucugcaugaacggcuccugcuucaccaucaugaccgacggccccuccaacaaggccgccuccuacaagaucuucaagaucgagaagggcaaggucaccaaguccaucgagcucaacgcccccaacuucuacuacgaggagugcuccugcuaccccgacaccggcaucgucaugugcgucugccgcgacaacuggcacggcuccaaccgccccugggucuccuucaaccagaaccucgacuaccagaucggcuacaucugcuccggcgucuucggcgacaacccccgccccgaggacggcgagggcuccugcaaccccgucaccgucgacggcgccaacggcgucaagggcuucuccuacaaguacggcaacggcgucuggaucggccgcaccaaguccaaccgccuccgcaagggcuucgagaugaucugggaccccaacggcuggaccaacaccgacuccgacuucuccgucaagcaggacgucgucgccaucaccgacugguccggcuacuccggcuccuucguccagcaccccgagcucaccggccucgacugcauccgccccugcuucugggucgagcucguccgcggccucccccgcgagaacaccaccaucuggaccuccggcuccuccaucuccuucugcggcgucaacuccgacaccgccaacugguccuggcccgacggcgccgagcuccccuucaccaucgacaaguga

SEQ ID NO: 113941 - RNA, 1410 nt, Artificial Sequence
  derived and/or modified CDS sequence (opt2) from neuraminidase__InfluenzaA__ADA71161
augaaccccaaccagaagaucaucaccaucggcuccgucucccucaccaucuccaccaucugcuucuucaugcagaucgccauccucaucaccaccgucacccuccacuucaagcaguacgaguucaacuccccccccaacaaccaggucaugcucugcgagcccaccaucaucgagcgcaacaucaccgagaucgucuaccucaccaacaccaccaucgagaaggagaucugccccaagcucgccgaguaccgcaacugguccaagccccagugcgacaucaccggcuucgcccccuucuccaaggacaacuccauccgccucuccgccggcggcgacaucugggucacccgcgagcccuacgucuccugcgaccccgacaagugcuaccaguucgcccucggccagggcaccacccucaacaacguccacuccaacaacaccguccgcgaccgcacccccuaccgcacccuccucaugaacgagcucggcguccccuuccaccucggcaccaagcaggucugcaucgccugguccuccuccuccugccacgacggcaaggccuggcuccacgucugcaucaccggcgacgacaagaacgccaccgccuccuucaucuacaacggccgccucgucgacuccgucgucuccugguccaaggagauccuccgcacccaggaguccgagugcgucugcaucaacggcaccugcaccgucgucaugaccgacggcuccgccuccggcaaggccgacaccaagauccucuucaucgaggagggcaagaucguccacaccuccacccucuccggcuccgcccagcacgucgaggagugcuccugcuacccccgcuaccccggcguccgcugcgucugccgcgacaacuggaagggcuccaaccgccccaucgucgacaucaacaucaaggaccacuccaucgucuccuccuacgucugcuccggccucgucggcgacaccccccgcaagaacgacuccuccuccuccucccacugccucgaccccaacaacgaggagggcggccacggcgucaagggcugggccuucgacgacggcaacgacgucuggaugggccgcaccaucuccgagaagucccgccucggcuacgagaccuucaaggucaucgagggcugguccaaccacaaguccaagcuccagaucaaccgccaggucaucgucgaccgcggcaaccgcuccggcuacuccggcaucuucuccgucgagggcaaguccugcaucaaccgcugcuucuacgucgagcucauccgcggccgcaaggaggagaccgagguccucuggaccuccaacuccaucgucgucuucugcggcaccuccggcaccuacggcaccggcuccuggcccgacggcgccgaccucaaccucaugcccaucuga

SEQ ID NO: 113942 - RNA, 1413 nt, Artificial Sequence
  derived and/or modified CDS sequence (opt2) from neuraminidase__InfluenzaA__ADA71165
augaaccccaaccagaagaucaucaccaucggcuccaucuccaucgccaucggcaucaucucccucaugcuccagaucggcaacaucaucuccaucugggccucccacuccauccagaccggcucccagaacaacaccggcaucugcaaccagcgcaucaucaccuacgagaacuccaccugggucaaccacaccuacgucaacaucaacaacaccaacgucgucgccggcgaggacaagaccuccgucacccucgccggcaacuccucccucugcuccaucuccggcugggccaucuacaccaaggacaacuccauccgcaucggcuccaagggcgacgucuucgucauccgcgagcccuucaucuccugcucccaccucgagugccgcaccuucuuccucacccagggcgcccuccucaacgacaagcacuccaacggcaccgucaaggaccgcucccccuaccgcgcccucauguccugcccccucggcgaggcccccucccccuacaacuccaaguucgaguccgucgccugguccgccuccgccugccacgacggcaugggcuggcucaccaucggcaucuccggccccgacaacggcgccgucgccguccucaaguacaacggcaucaucaccggcaccaucaaguccuggaagaagcagauccuccgcacccaggaguccgagugcgucugcaugaacggcuccugcuucaccaucaugaccgacggccccuccaacaaggccgccuccuacaagaucuccaagaucgagaagggcaaggucaccaaguccaucgagcucaacgcccccaacuucuacuacgaggagugcuccugcuaccccgacaccggcaucgucaugugcgucugccgcgacaacuggcacggcuccaaccgccccugggucuccuucaaccagaaccucgacuaccagaucggcuacaucugcuccggcgucuucggcgacaacccccgccccgaggacggcgagggcuccugcaaccccgucaccgucgacggcgccaacggcgucaagggcuucuccuacaaguacggcaacggcgucuggaucggccgcaccaaguccaaccgccuccgcaagggcuucgagaugaucugggaccccaacggcuggaccaacaccgacuccgacuucuccgucaagcaggacgucgucgccaucaccgacugguccggcuacuccggcuccuucguccagcaccccgagcucaccggccucgacugcauccgccccugcuucugggucgagcucguccgcggccucccccgcgagaacaccaccaucuggaccuccggcuccuccaucuccuucugcggcgucaacuccgacaccgccaacugguccuggcccgacggcgccgagcuccccuucaccaucgacaaguga

SEQ ID NO: 113943 - RNA, 1410 nt, Artificial Sequence
  derived and/or modified CDS sequence (opt2) from neuraminidase__InfluenzaA__ADA71167
augaaccccaaccagaagaucaucaccaucggcuccgucucccucaccaucuccaccaucugcuucuucaugcagaucgccauccucaucaccaccgucacccuccacuucaagcaguacgaguucaacuccccccccaacaaccaggucaugcucugcgagcccaccaucaucgagcgcaacaucaccgagaucgucuaccucaccaacaccaccaucgagaaggagaucugccccaagcucgccgaguaccgcaacugguccaagccccagugcgacaucaccggcuucgcccccuucuccaaggacaacuccauccgccucuccgccggcggcgacaucugggucacccgcgagcccuacgucuccugcgaccccgacaagugcuaccaguucgcccucggccagggcaccacccucaacaacguccacuccaacaacaccguccgcggccgcacccccuaccgcacccuccucaugaacgagcucggcguccccuuccaccucggcaccaagcaggucugcaucgccugguccuccuccuccugccacgacggcaaggccuggcuccacgucugcaucaccggcgacgacaagaacgccaccgccuccuucaucuacaacggccgccucgucgacuccgucgucuccugguccaaggacauccuccgcacccaggaguccgagugcgucugcaucaacggcaccugcaccgucgucaugaccgacggcuccgccuccggcaaggccgacaccaagauccucuucaucgaggagggcaagaucguccacaccuccacccucuccggcuccgcccagcacgucgaggagugcuccugcuacccccgcuaccccggcguccgcugcgucugccgcgacaacuggaagggcuccaaccgccccaucgucgacaucaacaucaaggaccacuccaucgucuccuccuacgucugcuccggccucgucggcgacaccccccgcaagaacgacuccuccuccuccucccacugccucaaccccaacaacgaggagggcggccacggcgucaagggcugggccuucgacgacggcaacgacgucuggaugggccgcaccaucuccgagaagucccgccucggcuacgagaccuucaaggucaucgagggcugguccaaccccaaguccaagcuccagaucaaccgccaggucaucgucgaccgcggcaaccgcuccggcuacuccggcaucuucuccgucgagggcaaguccugcaucaaccgcugcuucuacgucgagcucauccgcggccgcaaggaggagaccgagguccucuggaccuccaacuccaucgucgucuucugcggcaccuccggcaccuacggcaccggcuccuggcccgacggcgccaacaucaaccucaugcccaucuga

SEQ ID NO: 113944 - RNA, 1413 nt, Artificial Sequence
  derived and/or modified CDS sequence (opt2) from neuraminidase__InfluenzaA__ADA71169
augaaccccaaccagaagaucaucaccaucggcuccaucuccaucgccaucggcaucaucucccucaugcuccagaucggcaacaucaucuccaucugggccucccacuccauccagaccggcucccagaaccacaccggcaucugcaaccagcgcaucaucaccuacgagaacuccaccugggucaaccacaccuacgucaacaucaacaacaccaacgucgucgccggcaaggacaagacccccgucacccucgucggcaacuccucccucugcuccaucuccggcugggccaucuacaccaaggacaacuccauccgcaucggcuccaagggcgacgucuucgucauccgcgagcccuucaucuccugcucccaccucgagugcaagaccuucuuccucacccagggcgcccuccucaacgacaagcacuccaacggcaccgucaaggaccgcucccccuaccgcgcccucauguccugcccccucggcgaggcccccucccccuacaacuccaaguucgaguccgucgccugguccgccuccgccugccacgacggcaucggcuggcucaccaucggcaucuccggccccgacaacggcgccgucgccguccucaaguacaagggcaucaucaccggcaccaucaaguccuggaagaagcagauccuccgcacccaggaguccgagugcgucugcaucaacggcuccugcuucaccaucaugaccgacggccccuccgacggcgccgccuccuacaagaucuucaagaucgagaagggcaaggucaccaaguccauggagcucaacgcccccaacuuccacuacgaggagugcuccugcuaccccgacaccggcaccgucaugugcgucugccgcgacaacuggcacggcuccaaccgccccugggucuccuucaaccagaaccucgacuaccagaucggcuacaucugcuccggcgucuucggcgacaacccccgccccaaggacggcgagggcuccugcaaccccgucaccgucgacggcgccaacggcgucaagggcuucuccuacaaguacggcaacggcgucuggaucggccgcaccaaguccaaccgcauccgcaagggcuucgagaugaucugggaccccaacggcuggaccaacaccgacuccgacuucuccgucaagcaggacaucgucgccaucaccgacugguccggcuacuccggcuccuucguccagcaccccgagcucaccggccucgacugcauccgccccugcuucugggucgagcucguccgcggccucccccgcgagaacaccaccaucuggaccuccggcuccuccaucuccuucugcggcgucaacggcgacaucgccaacugguccuggcccgacggcgccgagcuccccuucaccaucgacaaguga

SEQ ID NO: 113945 - RNA, 1413 nt, Artificial Sequence; identical to SEQ ID NO: 113497
  derived and/or modified CDS sequence (opt2) from neuraminidase__InfluenzaA__ADA71171

SEQ ID NO: 113946 - RNA, 1410 nt, Artificial Sequence
  derived and/or modified CDS sequence (opt2) from neuraminidase__InfluenzaA__ADA71173
augaaccccaaccagaagaucaucaccaucggcuccgucucccucaccaucuccaccaucugcuucuucaugcagaucgccauccucaucaccaccgucacccuccacuucaagcaguacgaguucaacuccccccccaacaaccaggucaugcucugcgagcccaccaucaucgagcgcaacaucaccgagaucgucuaccucaccaacaccaccaucgagaaggagaucugccccaagcucgccgaguaccgcaacugguccaagccccagugcgacaucaccggcuucgcccccuucuccaaggacaacuccauccgccucuccgccggcggcgacaucugggucacccgcgagcccuacgucuccugcgaccccgacaagugcuaccaguucgcccucggccagggcaccacccucaacaacguccacuccaacaacaccguccgcgcccgcacccccuaccgcacccuccucaugaacgagcucggcguccccuuccaccucggcaccaagcaggucugcaucgccugguccuccuccuccugccacgacggcaaggccuggcuccacgucugcaucaccggcgacgacaagaacgccaccgccuccuucaucuacaacggccgccucgucgacuccgucgucuccugguccaaggacauccuccgcacccaggaguccgagugcgucugcaucaacggcaccugcaccgucgucaugaccgacggcuccgccuccggcaaggccgacaccaagauccucuucaucgaggagggcaagaucguccacaccuccacccucuccggcuccgcccagcacgucgaggagugcuccugcuacccccgcuaccccggcguccgcugcgucugccgcgacaacuggaagggcuccaaccgccccaucgucgacaucaacaucaaggaccacuccaucgucuccuccuacgucugcuccggccucgucggcgacaccccccgcaagaacgacuccuccuccuccucccacugccucaaccccaacaacgaggagggcggccacggcgucaagggcugggccuucgacgacggcaacgacgucuggaugggccgcaccaucuccgagaagucccgccucggcuacgagaccuucaaggucaucgagggcugguccaaccccaaguccaagcuccagaucaaccgccaggucaucgucgaccgcggcaaccgcuccggcuacuccggcaucuucuccgucgagggcaaguccugcaucaaccgcugcuucuacgucgagcucauccgcggccgcaaggaggagaccgagguccucuggaccuccaacuccaucgucgucuucugcggcaccuccggcaccuacggcaccggcuccuggcccgacggcgccaacaucaaccucaugcccaucuga

SEQ ID NO: 113947 - RNA, 1413 nt, Artificial Sequence
  derived and/or modified CDS sequence (opt2) from neuraminidase__InfluenzaA__ADA71175
augaaccccaaccagaagaucaucaccaucggcuccaucuccaucgccaucggcaucaucucccucaugcuccagaucggcaacaucaucuccaucugggccucccacuccauccagaucggcucccagaacaacaccggcaucugcaaccagcgcaucaucaccuacgagaacuccaccugggucaaccacaccuacgucaacaucaacaacaccaaggucgucgccggcgaggacaagaccuccgucacccucgccggcaacuccucccucugcuccaucuccggcugggccaucaacaccaaggacaacuccauccgcaucggcuccaagggcgacgucuucgucauccgcgagcccuucaucuccugcucccaccucgagugccgcaccuucuuccucacccagggcgcccuccucaacgacaagcacuccaacggcaccgucaaggaccgcucccccuaccgcgcccucauguccugcccccucggcgaggcccccucccccuacaacuccaaguucgaguccgucgccugguccgccuccgccugccacgacggcaugggcuggcucaccaucggcaucuccggccccgacaacggcgccgucgccguccucaaguacaacggcaucaucaccggcaccaucaaguccuggaagaagcagauccuccgcacccaggaguccgagugcgucugcaugaacggcuccugcuucaccaucaugaccgacggccccuccaacaaggccgccuccuacaagaucuucaagaucgagaagggcaaggucaccaaguccaucgagcucaacgcccccaacuucuacuacgaggagugcuccugcuaccccgacaccggcaucgucaugugcgucugccgcgacaacuggcacggcuccaaccgccccugggucuccuucaaccagaaccucgacuaccagaucggcuacaucugcuccggcgucuucggcgacaacccccgccccgaggacggcgagggcuccugcaaccccgucaccgucgacggcgccaacggcgucaagggcuucuccuacaaguacggcaacggcgucuggaucggccgcaccaaguccaaccgccuccgcaagggcuucgagaugaucugggaccccaacggcuggaccaacaccgacuccgacuucuccgucaagcaggacgucgucgccaucaccgacugguccggcuacuccggcuccuucguccagcaccccgagcucaccggccucgacugcauccgccccugcuucugggucgagcucguccgcggccucccccgcgagaacaccaccaucuggaccuccggcuccuccaucuccuucugcggcgucaacuccgacaccgccaacugguccuggcccgacggcgccgagcuccccuucaccaucgacaaguga

SEQ ID NO: 113948 - RNA, 1413 nt, Artificial Sequence; identical to SEQ ID NO: 113497
  derived and/or modified CDS sequence (opt2) from neuraminidase__InfluenzaA__ADA71177

SEQ ID NO: 113949 - RNA, 1410 nt, Artificial Sequence
  derived and/or modified CDS sequence (opt2) from neuraminidase__InfluenzaA__ADA71193
augaaccccaaccagaagaucaucaccaucggcuccgucugcaugaccaucggcauggccaaccucauccuccagaucggcaacaucaucuccaucuggaucucccacuccauccagcucggcaaccagaaccagaucgagaccugcaaccaguccgucaucaccuacgagaacaacaccugggucaaccagaccuacgucaacaucuccaacaccaacuucgccgccggccaguccgucgucuccgucaagcucgccggcaacuccucccucugccccgucuccggcugggccaucuacuccaaggacaacuccauccgcaucggcuccaagggcgacgucuucgucauccgcgagcccuucaucuccugcuccccccucgagugccgcaccuucuuccucacccagggcgcccuccucaacgacaagcacuccaacggcaccaucaaggaccgcucccccuaccgcacccucauguccugccccaucggcgagguccccucccccuacaacucccgcuucgaguccgucgccugguccgccuccgccugccacgacggcaucaacuggcucaccaucggcaucuccggccccgacaacggcgccgucgccguccucaaguacaacggcaucaucaccgacaccaucaaguccuggcgcaacaacauccuccgcacccaggaguccgagugcgccugcgucaacggcuccugcuucaccgucaugaccgacggccccuccgacggccaggccuccuacaagaucuuccgcaucgagaagggcaaggucgucaaguccgucgagaugaacgcccccaacuaccacuacgaggagugcuccugcuaccccgacuccuccgagaucaccugcgucugccgcgacaacuggcacggcuccaaccgccccugggucuccuucaaccagaaccucgaguaccagaucggcuacaucugcuccggcaucuucggcgacaacccccgccccaacgacaagaccggcuccugcggccccgucuccuccaacggcgccaacggcgucaagggcuucuccuucaaguacggcaacggcgucuggaucggccgcaccaaguccaucuccucccgcaacggcuucgagaugaucugggaccccaacggcuggaccggcaccgacaacaacuucuccaucaagcaggacaucgucggcaucaacgagugguccggcuacuccggcuccuucguccagcaccccgagcucaccggccucgacugcauccgccccugcuucugggucgagcucauccgcggccgccccaaggagaacaccaucuggaccuccggcuccuccaucuccuucugcggcgucaacuccgacaccgucggcugguccuggcccgacggcgccgagcuccccuucaccaucgacaaguga

SEQ ID NO: 113950 - RNA, 1410 nt, Artificial Sequence
  derived and/or modified CDS sequence (opt2) from neuraminidase__InfluenzaA__ADA79589
augaaccccaaccagaagaucaucaccaucggcuccgucugcaugaccaucggcauggccaaccucauccuccagaucggcaacaucaucuccaucuggaucucccacuccauccagcucggcaaccagaaccagaucgagaccugcaaccaguccgucaucaccuacgagaacaacaccugggucaaccagaccuacgucaacaucuccaacaccaacuucgccgccggccaguccgucgucuccgucaagcucgccggcuccuccucccucugccccgucuccggcugggccaucuacuccaaggacaacuccauccgcaucggcuccaagggcgacgucuucgucauccgcgagcccuucaucuccugcuccccccucgagugccgcaccuucuuccucacccagggcgcccuccucaacgacaagcacuccaacggcaccaucaaggaccgcucccccuaccgcacccucauguccugccccaucggcgagguccccucccccuacaagucccgcuucgaguccgucgccugguccgccuccgccugccacgacggcaucaacuggcucaccaucggcaucuccggccccgacaacggcgccgucgccguccucaaguacaacggcaucaucaccgacaccaucaaguccuggcgcaacaacauccuccgcacccaggaguccgagugcgccugcgucaacggcuccugcuucaccgucaugaccgacggccccuccgacggccaggccuccuacaagaucuuccgcaucgagaagggcaagaucgucaaguccgucgagaugaacgcccccaacuaccacuacgaggagugcuccugcuaccccgacuccuccgagaucaccugcgucugccgcgacaacuggcacggcuccaaccgccccugggucuccuucaaccagaaccucgaguaccagaucggcuacaucugcuccggcaucuucggcgacaacccccgccccaacgacaagaccggcuccugcggccccgucuccuccaacggcgccaacggcgucaagggcuucuccuucaaguacggcaacggcgucuggaucggccgcaccaaguccaucuccucccgcaacggcuucgagaugaucugggaccccaacggcuggaccggcaccgacaacaacuucuccaucaagcaggacaucgucggcaucaacgagugguccggcuacuccggcuccuucguccagcaccccgagcucaccggccucgacugcauccgccccugcuucugggucgagcucauccgcggccgccccaaggagaacaccaucuggaccuccggcuccuccaucuccuucugcggcgucaacuccgacaccgucggcugguccuggcccgacggcgccgagcuccccuucaccaucgacaaguga

SEQ ID NO: 113951 - RNA, 1410 nt, Artificial Sequence
  derived and/or modified CDS sequence (opt2) from neuraminidase__InfluenzaA__ADA79599
augaaccccaaccagaagaucaucaccaucggcuccgucugcaugaccaucggcauggccaaccucauccuccagaucggcaacaucaucuccaucuggaucucccacuccauccagcucggcaaccagaaccagaucgagaccugcaaccaguccgucaucaccuacgagaacaacaccugggucaaccagaccuacgucaacaucuccaacaccaacuucgccgccggccaguccgucgucuccgucaagcucgccggcaacuccucccucugccccgucuccggcugggccaucuacuccaaggacaacuccauccgcaucggcuccaagggcgacgucuucgucauccgcgagcccuucaucuccugcuccccccucgagugccgcaccuucuuccucacccagggcgcccuccucaacgacaagcacuccaacggcaccaucaaggaccgcucccccuaccgcacccucauguccugccccaucggcgagguccccucccccuacaacucccgcuucgaguccgucgccugguccgccuccgccugccacgacggcaucaacuggcucaccaucggcaucuccggccccgacaacggcgccgucgccguccucaaguacaacggcaucaucaccgacaccaucaaguccuggcgcaacaacauccuccgcacccaggaguccgagugcgccugcgucaacggcuccugcuucaccgucaugaccgacggccccuccgacggccaggccuccuacaagaucuuccgcaucgagaagggcaagaucgucaaguccgucgagaugaacgcccccaacuaccacuacgaggagugcuccugcuaccccgacuccuccgagaucaccugcgucugccgcgacaacuggcacggcuccaaccgccccugggucuccuucaaccagaaccucgaguaccagaucggcuacaucugcuccggcaucuucggcgacaacccccgccccaacgacaagaccggcuccugcggccccgucuccuccaacggcgccaacggcgucaagggcuucuccuucaaguacggcaacggcgucuggaucggccgcaccaaguccaucuccucccgcaacggcuucgagaugaucugggaccccaacggcuggaccggcaccgacaacaaguucuccaucaagcaggacaucgucggcaucaacgagugguccggcuacuccggcuccuucguccagcaccccgagcucaccggccucgacugcauccgccccugcuucugggucgagcucauccgcggccgccccaaggagaacaccaucuggaccuccggcuccuccaucuccuucugcggcgucaacuccgacaccgucggcugguccuggcccgacggcgccgagcuccccuucaccaucgacaaguga

SEQ ID NO: 113952 - RNA, 1410 nt, Artificial Sequence; identical to SEQ ID NO: 113951
  derived and/or modified CDS sequence (opt2) from neuraminidase__InfluenzaA__ADA79609

SEQ ID NO: 113953 - RNA, 1410 nt, Artificial Sequence
  derived and/or modified CDS sequence (opt2) from neuraminidase__InfluenzaA__ADA79619
augaaccccaaccagaagaucaucaccaucggcuccaucugcaugaccaucggcauggccaaccucauccuccagaucggcaacaucaucuccaucuggaucucccacuccauccagcucggcaaccagaaccagaucgagaccugcaaccaguccgucaucaccuacgagaacaacaccugggucaaccagaccuacgucaacaucuccaacaccaacuucgccgccggccaguccgucgccuccgucaagcucgccggcaacuccucccucugccccgucuccggcugggccaucuacuccaaggacaacuccauccgcaucggcuccaagggcgacgucuucgucauccgcgagcccuucaucuccugcuccccccucgagugccgcaccuucuuccucacccagggcgcccuccucaacgacaagcacuccaacggcaccaucaaggaccgcucccccuaccgcacccucauguccugccccaucggcgagguccccucccccuacaacucccgcuucgaguccgucgccugguccgccuccgccugccacgacggcaucaacuggcucaccaucggcaucuccggccccgacaacggcgccgucgccguccucaaguacaacggcaucaucaccgacaccaucaaguccuggcgcaacaacauccuccgcacccaggaguccgagugcgccugcgucaacggcuccugcuucaccgucaugaccgacggccccuccgacggccaggccuccuacaagaucuuccgcaucgagaagggcaagaucgucaaguccgucgagaugaacgcccccaacuaccacuacgaggagugcuccugcuaccccgacuccuccgagaucaccugcgucugccgcgacaacuggcacggcuccaaccgccccugggucuccuucaaccagaaccucgaguaccagaucggcuacaucugcuccggcaucuucggcgacaacccccgccccaacgacaagaccggcuccugcggccccgucuccuccaacggcgccaacggcgucaagggcuucuccuucaaguacggcaacggcgucuggaucggccgcaccaaguccaucuccucccgcaacggcuucgagaugaucugggaccccaacggcuggaccggcaccgacaacaacuucuccaucaagcaggacaucgucggcaucaacgagugguccggcuacuccggcuccuucguccagcaccccgagcucaccggccucgacugcauccgccccugcuucugggucgagcucauccgcggccgccccaaggagaacaccaucuggaccuccggcuccuccaucuccuucugcggcgucaacuccgacaccgucggcugguccuggcccgacggcgccgagcuccccuucaccaucgacaaguga

SEQ ID NO: 113954 - RNA, 1410 nt, Artificial Sequence; identical to SEQ ID NO: 112774
  derived and/or modified CDS sequence (opt2) from neuraminidase__InfluenzaA__ADA81211

SEQ ID NO: 113955 - RNA, 1410 nt, Artificial Sequence
  derived and/or modified CDS sequence (opt2) from neuraminidase__InfluenzaA__ADA83035
augaaccccaaccagaagaucaucaccaucggcuccgucugcaugaccaucggcauggccaaccucauccuccagaucggcaacaucaucuccaucuggaucucccacuccauccagcucggcaaccagaaccagaucgagaccugcaaccaguccgucaucaccuacgagaacaacaccugggucaaccagaccuacgucaacaucuccaacaccaacuucgccgccggccaguccgucgucuccgucaagcucgccggcaacuccucccucugccccgucuccggcugggccaucuacuccaaggacaacuccauccgcaucggcuccaagggcgacgucuucgucauccgcgagcccuucaucuccugcuccccccucgagugcuccaccuucuuccucacccagggcgcccuccucaacgacaagcacuccaacggcaccaucaaggaccgcucccccuaccgcacccucauguccugccccaucggcgagguccccucccccuacaacucccgcuucgaguccgucgccugguccgccuccgccugccacgacggcaucaacuggcucaccaucggcaucuccggccccgacaacggcgccgucgccguccucaaguacaacggcaucaucaccgacaccaucaaguccuggcgcaacaacauccuccgcacccaggaguccgagugcgccugcgucaacggcuccugcuucaccgucaugaccgacggccccuccgacggccaggccuccuacaagaucuuccgcaucgagaagggcaagaucgucaaguccgucgagaugaacgcccccaacuaccacuacgaggagugcuccugcuaccccgacuccuccgagaucaccugcgucugccgcgacaacuggcacggcuccaaccgccccugggucuccuucaaccagaaccucgaguaccagaucggcuacaucugcuccggcaucuucggcgacaacccccgccccaacgacaagaccggcuccugcggccccgucuccuccaacggcgccaacggcgucaagggcuucuccuucaaguacggcaacggcgucuggaucggccgcaccaaguccaucuccucccgcaacggcuucgagaugaucugggaccccaacggcuggaccggcaccgacaacaacuucuccaucaagcaggacaucgucggcaucaacgagugguccggcuacuccggcuccuucguccagcaccccgagcucaccggccucgacugcauccgccccugcuucugggucgagcucauccgcggccgccccaaggagaacaccaucuggaccuccggcuccuccaucuccuucugcggcgucaacuccgacaccgucggcugguccuggcccgacggcgccgagcuccccuucaccaucgacaaguga

SEQ ID NO: 113956 - RNA, 1410 nt, Artificial Sequence
  derived and/or modified CDS sequence (opt2) from neuraminidase__InfluenzaA__ADA83037
augaaccccaaccagaagaucaucaccaucggcuccgucugcaugaccaucggcauggccaaccucauccuccagaucggcaacaucaucuccaucuggaucucccacuccauccagcucggcaaccaggaccagaucgagaccugcaaccaguccgucaucaccuacgagaacaacaccugggucaaccagaccuacgucaacaucuccaacaccaacuucgccgccggccaguccgucgucuccgucaagcucgccggcaacuccucccucugccccgucuccggcugggccaucuacuccaaggacaacuccauccgcaucggcuccaagggcgacgucuucgucauccgcgagcccuucaucuccugcuccccccucgagugccgcaccuucuuccucacccagggcgcccuccucaacgacaagcacuccaacggcaccaucaaggaccgcucccccuaccgcacccucauguccugccccaucggcgagguccccucccccuacaacucccgcuucgaguccgucgccugguccgccuccgccugccacgacggcaucaacuggcucaccaucggcaucuccggccccgacaacggcgccgucgccguccucaaguacaacggcaucaucaccgacaccaucaaguccuggcgcaacaacauccuccgcacccaggaguccgagugcgccugcgucaacggcuccugcuucaccgucaugaccgacggccccuccgacggccaggccuccuacaagaucuuccgcaucgagaagggcaagaucgucaaguccgucgagaugaacgcccccaacuaccacuacgaggagugcuccugcuaccccgacuccuccgagaucaccugcgucugccgcgacaacuggcacggcuccaaccgccccugggucuccuucaaccagaaccucgaguaccagaucggcuacaucugcuccggcaucuucggcgacaacccccgccccaacgacaagaccggcuccugcggccccgucuccuccaacggcgccaacggcgucaagggcuucuccuucaaguacggcaacggcgucuggaucggccgcaccaaguccaucuccucccgcaacggcuucgagaugaucugggaccccaacggcuggaccggcaccgacaacaaguucuccaucaagcaggacaucgucggcaucaacgagugguccggcuacuccggcuccuucguccagcaccccgagcucaccggccucgacugcauccgccccugcuucugggucgagcucauccgcggccgccccaaggagaacaccaucuggaccuccggcuccuccaucuccuucugcggcgucaacuccgacaccgucggcugguccuggcccgacggcgccgagcuccccuucaccaucgacaaguga

SEQ ID NO: 113957 - RNA, 1410 nt, Artificial Sequence; identical to SEQ ID NO: 112774
  derived and/or modified CDS sequence (opt2) from neuraminidase__InfluenzaA__ADA83588

SEQ ID NO: 113958 - RNA, 1410 nt, Artificial Sequence; identical to SEQ ID NO: 112774
  derived and/or modified CDS sequence (opt2) from neuraminidase__InfluenzaA__ADA83592

SEQ ID NO: 113959 - RNA, 1410 nt, Artificial Sequence; identical to SEQ ID NO: 112774
  derived and/or modified CDS sequence (opt2) from neuraminidase__InfluenzaA__ADA83596

SEQ ID NO: 113960 - RNA, 1410 nt, Artificial Sequence; identical to SEQ ID NO: 112774
  derived and/or modified CDS sequence (opt2) from neuraminidase__InfluenzaA__ADA83600

SEQ ID NO: 113961 - RNA, 1410 nt, Artificial Sequence; identical to SEQ ID NO: 112774
  derived and/or modified CDS sequence (opt2) from neuraminidase__InfluenzaA__ADA83604

SEQ ID NO: 113962 - RNA, 1410 nt, Artificial Sequence; identical to SEQ ID NO: 112774
  derived and/or modified CDS sequence (opt2) from neuraminidase__InfluenzaA__ADA83608

SEQ ID NO: 113963 - RNA, 1410 nt, Artificial Sequence; identical to SEQ ID NO: 112774
  derived and/or modified CDS sequence (opt2) from neuraminidase__InfluenzaA__ADA83612

SEQ ID NO: 113964 - RNA, 1410 nt, Artificial Sequence; identical to SEQ ID NO: 113128
  derived and/or modified CDS sequence (opt2) from neuraminidase__InfluenzaA__ADA83616

SEQ ID NO: 113965 - RNA, 1410 nt, Artificial Sequence; identical to SEQ ID NO: 112774
  derived and/or modified CDS sequence (opt2) from neuraminidase__InfluenzaA__ADA83624

SEQ ID NO: 113966 - RNA, 1410 nt, Artificial Sequence; identical to SEQ ID NO: 112774
  derived and/or modified CDS sequence (opt2) from neuraminidase__InfluenzaA__ADA83630

SEQ ID NO: 113967 - RNA, 1410 nt, Artificial Sequence; identical to SEQ ID NO: 112774
  derived and/or modified CDS sequence (opt2) from neuraminidase__InfluenzaA__ADA83634

SEQ ID NO: 113968 - RNA, 1410 nt, Artificial Sequence; identical to SEQ ID NO: 112774
  derived and/or modified CDS sequence (opt2) from neuraminidase__InfluenzaA__ADA83638

SEQ ID NO: 113969 - RNA, 1410 nt, Artificial Sequence; identical to SEQ ID NO: 112774
  derived and/or modified CDS sequence (opt2) from neuraminidase__InfluenzaA__ADA83642

SEQ ID NO: 113970 - RNA, 1410 nt, Artificial Sequence; identical to SEQ ID NO: 112774
  derived and/or modified CDS sequence (opt2) from neuraminidase__InfluenzaA__ADA83649

SEQ ID NO: 113971 - RNA, 1410 nt, Artificial Sequence; identical to SEQ ID NO: 112774
  derived and/or modified CDS sequence (opt2) from neuraminidase__InfluenzaA__ADA83653

SEQ ID NO: 113972 - RNA, 1410 nt, Artificial Sequence; identical to SEQ ID NO: 112774
  derived and/or modified CDS sequence (opt2) from neuraminidase__InfluenzaA__ADA83657

SEQ ID NO: 113973 - RNA, 1410 nt, Artificial Sequence; identical to SEQ ID NO: 112774
  derived and/or modified CDS sequence (opt2) from neuraminidase__InfluenzaA__ADA83661

SEQ ID NO: 113974 - RNA, 1410 nt, Artificial Sequence; identical to SEQ ID NO: 112774
  derived and/or modified CDS sequence (opt2) from neuraminidase__InfluenzaA__ADA83669

SEQ ID NO: 113975 - RNA, 1410 nt, Artificial Sequence; identical to SEQ ID NO: 112774
  derived and/or modified CDS sequence (opt2) from neuraminidase__InfluenzaA__ADA83673

SEQ ID NO: 113976 - RNA, 1410 nt, Artificial Sequence; identical to SEQ ID NO: 112774
  derived and/or modified CDS sequence (opt2) from neuraminidase__InfluenzaA__ADA83677

SEQ ID NO: 113977 - RNA, 1410 nt, Artificial Sequence; identical to SEQ ID NO: 112774
  derived and/or modified CDS sequence (opt2) from neuraminidase__InfluenzaA__ADA83681

SEQ ID NO: 113978 - RNA, 1410 nt, Artificial Sequence; identical to SEQ ID NO: 112774
  derived and/or modified CDS sequence (opt2) from neuraminidase__InfluenzaA__ADA83685

SEQ ID NO: 113979 - RNA, 1410 nt, Artificial Sequence; identical to SEQ ID NO: 112774
  derived and/or modified CDS sequence (opt2) from neuraminidase__InfluenzaA__ADA86069

SEQ ID NO: 113980 - RNA, 1410 nt, Artificial Sequence; identical to SEQ ID NO: 112774
  derived and/or modified CDS sequence (opt2) from neuraminidase__InfluenzaA__ADB27973

SEQ ID NO: 113981 - RNA, 1410 nt, Artificial Sequence; identical to SEQ ID NO: 112774
  derived and/or modified CDS sequence (opt2) from neuraminidase__InfluenzaA__ADB27983

SEQ ID NO: 113982 - RNA, 1410 nt, Artificial Sequence
  derived and/or modified CDS sequence (opt2) from neuraminidase__InfluenzaA__ADB66693
augaaccccaaccagaagaucaucaccaucggcuccgucugcaugaccaucggcauggccaaccucauccuccagaucggcaacaucaucuccaucuggaucauccacuccauccagcucggcaaccagaaccagaucgagaccugcaaccaguccgucaucaccuacgagaacaacaccugggucaaccagaccuacgucaacaucuccaacaccaacuucgccgccggccaguccgucgucuccgucaagcucgccggcaacuccucccucugccccgucuccggcugggccaucuacuccaaggacaacuccauccgcaucggcuccaagggcgacgucuucgucauccgcgagcccuucaucuccugcuccccccucgagugccgcaccuucuuccucacccagggcgcccuccucaacgacaagcacuccaacggcaccaucaaggaccgcucccccuaccgcacccucauguccugccccaucggcgagguccccucccccuacaacucccgcuucgaguccgucgccugguccgccuccgccugccacgacggcaucaacuggcucaccaucggcaucuccggccccgacaacggcgccgucgccguccucaaguacaacggcaucaucaccgacaccaucaaguccuggcgcaacaacauccuccgcacccaggaguccgagugcgccugcgucaacggcuccugcuucaccgucaugaccgacggccccuccgacggccaggccuccuacaagaucuuccgcaucgagaagggcaagaucgucaaguccgucgagaugaacgcccccaacuaccacuacgaggagugcuccugcuaccccgacuccuccgagaucaccugcgucugccgcgacaacuggcacggcuccaaccgccccugggucuccuucaaccagaaccucgaguaccagaucggcuacaucugcuccggcaucuucggcgacaacccccgccccaacgacaagaccggcuccugcggccccgucuccuccaacggcgccaacggcgucaagggcuucuccuucaaguacggcaacggcgucuggaucggccgcaccaaguccaucuccucccgcaacggcuucgagaugaucugggaccccaacggcuggaccggcaccgacaacaacuucuccaucaagcaggacaucgucggcaucaacgagugguccggcuacuccggcuccuucguccagcaccccgagcucaccggccucgacugcauccgccccugcuucugggucgagcucauccgcggccgccccaaggagaacaccaucuggaccuccggcuccuccaucuccuucugcggcgucaacuccgacaccgucggcugguccuggcccgacggcgccgagcuccccuucaccaucgacaaguga

SEQ ID NO: 113983 - RNA, 1410 nt, Artificial Sequence; identical to SEQ ID NO: 112774
  derived and/or modified CDS sequence (opt2) from neuraminidase__InfluenzaA__ADB66695

SEQ ID NO: 113984 - RNA, 1410 nt, Artificial Sequence; identical to SEQ ID NO: 112774
  derived and/or modified CDS sequence (opt2) from neuraminidase__InfluenzaA__ADB66696

SEQ ID NO: 113985 - RNA, 1410 nt, Artificial Sequence
  derived and/or modified CDS sequence (opt2) from neuraminidase__InfluenzaA__ADB66697
augaaccccaaccagaagaucaucaccaucggcuccgucugcaucaccaucggcauggccaaccucauccuccagaucggcaacaucaucuccaucuggaucucccacuccauccagcucggcaaccagaaccagaucgagaccugcaaccaguccgucaucaccuacgagaacaacaccugggucaaccagaccuacgucaacaucuccaacaccaacuucgccgccggccaguccgucgucuccgucaagcucgccggcaacuccucccucugccccgucuccggcugggccaucuacuccaaggacaacuccauccgcaucggcuccaagggcgacgucuucgucauccgcgagcccuucaucuccugcuccccccucgagugccgcaccuucuuccucacccagggcgcccuccucaacgacaagcacuccaacggcaccaucaaggaccgcucccccuaccgcacccucauguccugccccaucggcgagguccccucccccuacaacucccgcuucgaguccgucgccugguccgccuccgccugccacgacggcaucaacuggcucaccaucggcaucuccggccccgacaacggcgccgucgccguccucaaguacaacggcaucaucaccgacaccaucaaguccuggcgcaacaacauccuccgcacccaggaguccgagugcgccugcgucaacggcuccugcuucaccgucaugaccgacggccccuccgacgagcaggccuccuacaagaucuuccgcaucgagaagggcaagaucgucaaguccgucgagaugaacgcccccaacuaccacuacgaggagugcuccugcuaccccgacuccuccgagaucaccugcgucugccgcgacaacuggcacggcuccaaccgccccugggucuccuucaaccagaaccucgaguaccgcaucggcuacaucugcuccggcaucuucggcgacaacccccgccccaacgacaagaccggcuccugcggccccgucuccuccaacggcgccaacggcgucaagggcuucuccuucaaguacggcaacggcgucuggaucggccgcaccaaguccaucuccucccgcaacggcuucgagaugaucugggaccccaacggcuggaccggcaccgacaacaacuucuccaucaagcaggacaucgucggcauccacgagugguccggcuacuccggcuccuucguccagcaccccgagcucaccggccucgacugcauccgccccugcuucugggucgagcucauccgcggccgccccaaggagaacaccaucuggaccuccggcuccuccaucuccuucugcggcgucaacuccgacaccgucggcugguccuggcccgacggcgccgagcuccccuucaccaucgacaaguga

SEQ ID NO: 113986 - RNA, 1410 nt, Artificial Sequence; identical to SEQ ID NO: 113949
  derived and/or modified CDS sequence (opt2) from neuraminidase__InfluenzaA__ADB81401

SEQ ID NO: 113987 - RNA, 1410 nt, Artificial Sequence; identical to SEQ ID NO: 113792
  derived and/or modified CDS sequence (opt2) from neuraminidase__InfluenzaA__ADB81421

SEQ ID NO: 113988 - RNA, 1410 nt, Artificial Sequence; identical to SEQ ID NO: 113128
  derived and/or modified CDS sequence (opt2) from neuraminidase__InfluenzaA__ADB81431

SEQ ID NO: 113989 - RNA, 1410 nt, Artificial Sequence; identical to SEQ ID NO: 112774
  derived and/or modified CDS sequence (opt2) from neuraminidase__InfluenzaA__ADB81441

SEQ ID NO: 113990 - RNA, 1410 nt, Artificial Sequence
  derived and/or modified CDS sequence (opt2) from neuraminidase__InfluenzaA__ADB81451
augaaccccaaccagaagaucaucaccaucggcuccgucugcaugaccaucggcauggccaaccucauccuccagaucggcaacaucaucuccaucuggaucucccacuccauccagcucggcaaccagaaccagaucgagaccugcaaccaguccgucaucaccuacgagaacaacaccugggucaaccagaccuacgucaacaucuccaacaccaacuucgccgccggccaguccgucgucuccgucaagcucgccggcaacuccucccucugccccgucuccggcugggccaucuacuccaaggacaacuccauccgcaucggcuccaagggcgacgucuucgucauccgcgagcccuucaucuccugcuccccccucgagugccgcaccuucuuccucacccagggcgcccuccucaacgacaagcacuccaacggcaccaucaaggaccgcucccccuaccgcacccucauguccugccccaucggcgagguccccucccccuacaacucccgcuucgaguccgucgccugguccgccuccgccugccacgacggcaucaacuggcucaccaucggcaucuccggccccgacaacggcgccgucgccguccucaaguacaacggcaucaucaccgacaccaucaaguccuggcgcaacaacauccuccgcacccaggaguccgagugcgucugcgucaacggcuccugcuucaccgucaugaccgacggccccuccgacggccaggccuccuacaagaucuuccgcaucgagaagggcaagaucgucaaguccgucgagaugaacgcccccaacuaccacuacgaggagugcuccugcuaccccgacuccuccgagaucaccugcgucugccgcgacaacuggcacggcuccaaccgccccugggucuccuucaaccagaaccucgaguaccagaucggcuacaucugcuccggcaucuucggcgacaacccccgccccaacgacaagaccggcuccugcggccccgucuccuccaacggcgccaacggcgucaagggcuucuccuucaaguacggcaacggcgucuggaucggccgcaccaaguccaucuccucccgcaacggcuucgagaugaucugggaccccaacggcuggaccggcaccgacaacaaguucuccaucaagcaggacaucgucggcaucaacgagugguccggcuacuccggcuccuucguccagcaccccgagcucaccggccucgacugcauccgccccugcuucugggucgagcucauccgcggccgccccaaggagaacaccaucuggaccuccggcuccuccaucuccuucugcggcgucaacuccgacaccgucggcugguccuggcccgacggcgccgagcuccccuucaccaucgacaaguga

SEQ ID NO: 113991 - RNA, 1410 nt, Artificial Sequence; identical to SEQ ID NO: 113951
  derived and/or modified CDS sequence (opt2) from neuraminidase__InfluenzaA__ADB81461

SEQ ID NO: 113992 - RNA, 1410 nt, Artificial Sequence; identical to SEQ ID NO: 113951
  derived and/or modified CDS sequence (opt2) from neuraminidase__InfluenzaA__ADB82942

SEQ ID NO: 113993 - RNA, 1410 nt, Artificial Sequence; identical to SEQ ID NO: 112929
  derived and/or modified CDS sequence (opt2) from neuraminidase__InfluenzaA__ADB82945

SEQ ID NO: 113994 - RNA, 1410 nt, Artificial Sequence; identical to SEQ ID NO: 112774
  derived and/or modified CDS sequence (opt2) from neuraminidase__InfluenzaA__ADB89132

SEQ ID NO: 113995 - RNA, 1410 nt, Artificial Sequence; identical to SEQ ID NO: 113357
  derived and/or modified CDS sequence (opt2) from neuraminidase__InfluenzaA__ADB89142

SEQ ID NO: 113996 - RNA, 1410 nt, Artificial Sequence; identical to SEQ ID NO: 112774
  derived and/or modified CDS sequence (opt2) from neuraminidase__InfluenzaA__ADB89224

SEQ ID NO: 113997 - RNA, 1410 nt, Artificial Sequence
  derived and/or modified CDS sequence (opt2) from neuraminidase__InfluenzaA__ADB89234
augaaccccaaccagaagaucaucaccaucggcuccgucugcaugaccaucggcauggccaaccucauccuccagaucggcaacaucaucuccaucuggaucucccacuccauccagcucggcaaccagaaccagaucgagaccugcaaccaguccgucaucaccuacgagaacaacaccugggucaaccagaccuacgucaacaucuccaacaccaacuucgccgccggccaguccgucgucuccgucaagcucgucggcaacuccucccucugccccgucuccggcugggccaucuacuccaaggacaacuccguccgcaucggcuccaagggcgacgucuucgucauccgcgagcccuucaucuccugcuccccccucgagugccgcaccuucuuccucacccagggcgcccuccucaacgacaagcacuccaacggcaccaucaaggaccgcucccccuaccgcacccucauguccugccccaucggcgagguccccucccccuacaacucccgcuucgaguccgucgccugguccgccuccgccugccacgacggcaucaacuggcucaccaucggcaucuccggccccgacaacggcgccgucgccguccucaaguacaacggcaucaucaccgacaccaucaaguccuggcgcaacaacauccuccgcacccaggaguccgagugcgccugcgucaacggcuccugcuucaccgucaugaccgacggccccuccaacggccaggccuccuacaagaucuuccgcaucgagaagggcaagaucgucaaguccgucgagaugaacgcccccaacuaccacuacgaggagugcuccugcuaccccgacuccuccgagaucaccugcgucugccgcgacaacuggcacggcuccaaccgccccugggucuccuucaaccagaaccucgaguaccagaucggcuacaucugcuccggcaucuucggcgacaacccccgccccaacgacaagaccggcuccugcggccccgucuccuccaacggcgccaacggcgucaagggcuucuccuucaaguacggcaacggcgucuggaucggccgcaccaaguccaucuccucccgcaacggcuucgagaugaucugggaccccaacggcuggaccggcaccgacaacaacuucuccaucaagcaggacaucgucggcaucaacgagugguccggcuacuccggcuccuucguccagcaccccgagcucaccggccucgacugcauccgccccugcuucugggucgagcucauccgcggccgccccaaggagaacaccaucuggaccuccggcuccuccaucuccuucugcggcgucaacuccgacaccgucggcugguccuggcccgacggcgccgagcuccccuucaccaucgacaaguga

SEQ ID NO: 113998 - RNA, 1410 nt, Artificial Sequence; identical to SEQ ID NO: 112764
  derived and/or modified CDS sequence (opt2) from neuraminidase__InfluenzaA__ADB89244

SEQ ID NO: 113999 - RNA, 1410 nt, Artificial Sequence; identical to SEQ ID NO: 112774
  derived and/or modified CDS sequence (opt2) from neuraminidase__InfluenzaA__ADB89264

SEQ ID NO: 114000 - RNA, 1410 nt, Artificial Sequence; identical to SEQ ID NO: 113744
  derived and/or modified CDS sequence (opt2) from neuraminidase__InfluenzaA__ADB89274

SEQ ID NO: 114001 - RNA, 1410 nt, Artificial Sequence; identical to SEQ ID NO: 112929
  derived and/or modified CDS sequence (opt2) from neuraminidase__InfluenzaA__ADB89284

SEQ ID NO: 114002 - RNA, 1410 nt, Artificial Sequence; identical to SEQ ID NO: 112774
  derived and/or modified CDS sequence (opt2) from neuraminidase__InfluenzaA__ADB89294

SEQ ID NO: 114003 - RNA, 1410 nt, Artificial Sequence; identical to SEQ ID NO: 112774
  derived and/or modified CDS sequence (opt2) from neuraminidase__InfluenzaA__ADB89304

SEQ ID NO: 114004 - RNA, 1410 nt, Artificial Sequence; identical to SEQ ID NO: 112774
  derived and/or modified CDS sequence (opt2) from neuraminidase__InfluenzaA__ADB89314

SEQ ID NO: 114005 - RNA, 1410 nt, Artificial Sequence; identical to SEQ ID NO: 112774
  derived and/or modified CDS sequence (opt2) from neuraminidase__InfluenzaA__ADB89324

SEQ ID NO: 114006 - RNA, 1410 nt, Artificial Sequence; identical to SEQ ID NO: 112774
  derived and/or modified CDS sequence (opt2) from neuraminidase__InfluenzaA__ADB89334

SEQ ID NO: 114007 - RNA, 1410 nt, Artificial Sequence; identical to SEQ ID NO: 112774
  derived and/or modified CDS sequence (opt2) from neuraminidase__InfluenzaA__ADB89344

SEQ ID NO: 114008 - RNA, 1410 nt, Artificial Sequence; identical to SEQ ID NO: 112774
  derived and/or modified CDS sequence (opt2) from neuraminidase__InfluenzaA__ADB89364

SEQ ID NO: 114009 - RNA, 1410 nt, Artificial Sequence; identical to SEQ ID NO: 112774
  derived and/or modified CDS sequence (opt2) from neuraminidase__InfluenzaA__ADB89374

SEQ ID NO: 114010 - RNA, 1410 nt, Artificial Sequence; identical to SEQ ID NO: 112774
  derived and/or modified CDS sequence (opt2) from neuraminidase__InfluenzaA__ADB89384

SEQ ID NO: 114011 - RNA, 1410 nt, Artificial Sequence; identical to SEQ ID NO: 112774
  derived and/or modified CDS sequence (opt2) from neuraminidase__InfluenzaA__ADB89394

SEQ ID NO: 114012 - RNA, 1410 nt, Artificial Sequence
  derived and/or modified CDS sequence (opt2) from neuraminidase__InfluenzaA__ADB89404
augaaccccaaccagaagaucaucaccaucggcuccgucugcaugaccaucggcauggccaaccucauccuccagaucggcaacaucaucuccaucuggaucucccacuccauccagcucggcaaccagaaccagaucgagaccugcaaccaguccgucaucaccuacgagaacaacaccugggucaaccagaccuacgucaacaucuccaacaccaacuucgccgccggccaguccgucgucuccgucaagcucgccggcaacuccucccucugccccgucuccggcugggccaucuacuccaaggacaacuccguccgcaucggcuccaagggcgacgucuucgucauccgcgagcccuucaucuccugcuccccccucgagugccgcaccuucuuccucacccagggcgcccuccucaacgacaagcacuccaacggcaccaucaaggaccgcucccccuaccgcacccucauguccugccccaucggcgagguccccucccccuacaacucccgcuucgaguccgucgccugguccgccuccgccugccacgacggcaucaacuggcucaccaucggcaucuccggccccgacaacggcgccgucgccguccucaaguacaacggcaucaucaccgacaccaucaaguccuggcgcaacuccauccuccgcacccaggaguccgagugcgccugcgucaacggcuccugcuucaccgucaugaccgacggccccuccaacggccaggccuccuacaagaucuuccgcaucgagaagggcaagaucgucaaguccgucgagaugaacgcccccaacuaccacuacgaggagugcuccugcuaccccgacuccuccgagaucaccugcgucugccgcgacaacuggcacggcuccaaccgccccugggucuccuucaaccagaaccucgaguaccagaucggcuacaucugcuccggcaucuucggcgacaacccccgccccaacgacaagaccggcuccugcggccccgucuccuccaacggcgccaacggcgucaagggcuucuccuucaaguacggcaacggcgucuggaucggccgcaccaaguccaucuccucccgcaacggcuucgagaugaucugggaccccaacggcuggaccggcaccgacaacaacuucuccaucaagcaggacaucgucggcaucaacgagugguccggcuacuccggcuccuucguccagcaccccgagcucaccggccucgacugcauccgccccugcuucugggucgagcucauccgcggccgccccaaggagaacaccaucuggaccuccggcuccuccaucuccuucugcggcgucaacuccgacaccgucggcugguccuggcccgacggcgccgagcuccccuucaccaucgacaaguga

SEQ ID NO: 114013 - RNA, 1410 nt, Artificial Sequence; identical to SEQ ID NO: 112774
  derived and/or modified CDS sequence (opt2) from neuraminidase__InfluenzaA__ADB89414

SEQ ID NO: 114014 - RNA, 1410 nt, Artificial Sequence; identical to SEQ ID NO: 112774
  derived and/or modified CDS sequence (opt2) from neuraminidase__InfluenzaA__ADB89424

SEQ ID NO: 114015 - RNA, 1410 nt, Artificial Sequence; identical to SEQ ID NO: 112774
  derived and/or modified CDS sequence (opt2) from neuraminidase__InfluenzaA__ADB89434

SEQ ID NO: 114016 - RNA, 1410 nt, Artificial Sequence; identical to SEQ ID NO: 112774
  derived and/or modified CDS sequence (opt2) from neuraminidase__InfluenzaA__ADB89444

SEQ ID NO: 114017 - RNA, 1410 nt, Artificial Sequence
  derived and/or modified CDS sequence (opt2) from neuraminidase__InfluenzaA__ADB89454
augaaccccaaccagaagaucaucaccaucggcuccgucugcaugaccaucggcauggccaaccucauccuccagaucggcaacaucaucuccaucuggaucucccacuccauccagcucggcaaccagaaccagaucgagaccugcaaccaguccgucaucaccuacgagaacaacaccugggucaaccagaccuacgucaacaucuccaacaccaacuucgccgccggccaguccgucgucuccgucaagcucgccggcaacuccucccucugccccgucuccggcugggccaucuacuccaaggacaacuccauccgcaucggcuccaagggcgacgucuucgucauccgcgagcccuucaucuccugcuccccccucgagugccgcaccuucuuccucacccagggcgcccuccucaacgacaagcacuccaacggcaccaucaaggaccgcucccccuaccgcacccucauguccugccccaucggcgagguccccucccccuacaacucccgcuucgaguccgucgccugguccgccuccgccugccacgacggcaucaacuggcucaccaucggcaucuccggccccgacaacggcgccgucgccguccucaaguacaacggcaucaucaccgacaccaucaaguccuggcgcaacaacauccuccgcacccaggaguccgagugcgccugcgucaacggcuccugcuucaccgucaugaccgacggccccaacgacggccaggccuccuacaagaucuuccgcaucgagaagggcaagaucgucaaguccgucgagaugaacgcccccaacuaccacuacgaggagugcuccugcuaccccgacuccuccgagaucaccugcgucugccgcgacaacuggcacggcuccaaccgccccugggucuccuucaaccagaaccucgaguaccagaucggcuacaucugcuccggcaucuucggcgacaacccccgccccaacgacaagaccggcuccugcggccccgucuccuccaacggcgccaacggcgucaagggcuucuccuucaaguacggcaacggcgucuggaucggccgcaccaaguccaucuccucccgcaacggcuucgagaugaucugggaccccaacggcuggaccggcaccgacaacaacuucuccaucaagcaggacaucgucggcaucaacgagugguccggcuacuccggcuccuucguccagcaccccgagcucaccggccucgacugcauccgccccugcuucugggucgagcucauccgcggccgccccaaggagaacaccaucuggaccuccggcuccuccaucuccuucugcggcgucaacuccgacaccgucggcugguccuggcccgacggcgccgagcuccccuucaccaucgacaaguga

SEQ ID NO: 114018 - RNA, 1410 nt, Artificial Sequence; identical to SEQ ID NO: 112774
  derived and/or modified CDS sequence (opt2) from neuraminidase__InfluenzaA__ADB89464

SEQ ID NO: 114019 - RNA, 1410 nt, Artificial Sequence; identical to SEQ ID NO: 112774
  derived and/or modified CDS sequence (opt2) from neuraminidase__InfluenzaA__ADB89484

SEQ ID NO: 114020 - RNA, 1410 nt, Artificial Sequence; identical to SEQ ID NO: 112774
  derived and/or modified CDS sequence (opt2) from neuraminidase__InfluenzaA__ADB89494

SEQ ID NO: 114021 - RNA, 1410 nt, Artificial Sequence; identical to SEQ ID NO: 112764
  derived and/or modified CDS sequence (opt2) from neuraminidase__InfluenzaA__ADB89504

SEQ ID NO: 114022 - RNA, 1410 nt, Artificial Sequence; identical to SEQ ID NO: 112774
  derived and/or modified CDS sequence (opt2) from neuraminidase__InfluenzaA__ADB89514

SEQ ID NO: 114023 - RNA, 1410 nt, Artificial Sequence; identical to SEQ ID NO: 112774
  derived and/or modified CDS sequence (opt2) from neuraminidase__InfluenzaA__ADB89524

SEQ ID NO: 114024 - RNA, 1410 nt, Artificial Sequence
  derived and/or modified CDS sequence (opt2) from neuraminidase__InfluenzaA__ADB89544
augaaccccaaccagaagaucaucaccaucggcuccgucugcaugaccaucggcauggccaaccucauccuccagaucggcaacaucaucuccaucuggaucucccacuccauccagcucggcaaccagaaccagaucgagaccugcaaccaguccgucaucaccuacgagaacaacaccugggucaaccagaccuacgucaacaucuccaacaccaacuucgccgccggccaguccgucgucuccgucaagcucgccggcaacuccucccucugccccgucuccggcugggccaucuacuccaaggacaacuccauccgcaucggcuccaagggcgacgucuucgucauccgcgagcccuucaucuccugcucccuccucgagugccgcaccuucuuccucacccagggcgcccuccucaacgacaagcacuccaacggcaccaucaaggaccgcucccccuaccgcacccucauguccugccccaucggcgagguccccucccccuacaacucccgcuucgaguccgucgccugguccgccuccgccugccacgacggcaucaacuggcucaccaucggcaucuccggccccgacaacggcgccgucgccguccucaaguacaacggcaucaucaccgacaccaucaaguccuggcgcaacaacauccuccgcacccaggaguccgagugcgccugcgucaacggcuccugcuucaccgucaugaccgacggccccuccgacggccaggccuccuacaagaucuuccgcaucgagaagggcaagaucgucaaguccgucgagaugaacgcccccaacuaccacuacgaggagugcuccugcuaccccgacuccuccgagaucaccugcgucugccgcgacaacuggcacggcuccaaccgccccugggucuccuucaaccagaaccucgaguaccagaucggcuacaucugcuccggcaucuucggcgacaacccccgccccaacgacaagaccggcuccugcggccccgucuccuccaacggcgccaacggcgucaagggcuucuccuucaaguacggcaacggcgucuggaucggccgcaccaaguccaucuccucccgcaacggcuucgagaugaucugggaccccaacggcuggaccggcaccgacaacaacuucuccaucaagcaggacaucgucggcaucaacgagugguccggcuacuccggcuccuucguccagcaccccgagcucaccggccucgacugcauccgccccugcuucugggucgagcucauccgcggccgccccaaggagaacaccaucuggaccuccggcuccuccaucuccuucugcggcgucaacuccgacaccgucggcugguccuggcccgacggcgccgagcuccccuucaccaucgacaaguga

SEQ ID NO: 114025 - RNA, 1410 nt, Artificial Sequence; identical to SEQ ID NO: 112774
  derived and/or modified CDS sequence (opt2) from neuraminidase__InfluenzaA__ADB89564

SEQ ID NO: 114026 - RNA, 1410 nt, Artificial Sequence; identical to SEQ ID NO: 112774
  derived and/or modified CDS sequence (opt2) from neuraminidase__InfluenzaA__ADB89574

SEQ ID NO: 114027 - RNA, 1410 nt, Artificial Sequence; identical to SEQ ID NO: 112774
  derived and/or modified CDS sequence (opt2) from neuraminidase__InfluenzaA__ADB89594

SEQ ID NO: 114028 - RNA, 1410 nt, Artificial Sequence; identical to SEQ ID NO: 112774
  derived and/or modified CDS sequence (opt2) from neuraminidase__InfluenzaA__ADB89604

SEQ ID NO: 114029 - RNA, 1410 nt, Artificial Sequence
  derived and/or modified CDS sequence (opt2) from neuraminidase__InfluenzaA__ADB89614
augaaccccaaccagaagaucaucaccaucggcuccgucugcaugaccaucggcauggccaaccucauccuccagaucggcaacaucaucuccaucuggaucucccacuccauccagcucggcaaccagaaccagaucgagaccugcaaccaguccgucaucaccuacgagaacaacaccugggucaaccagaccuacgucaacaucuccaacaccaacuucgccgccggccaguccgucgucuccgucaagcucgccggcaacuccucccucugccccgucuccggcugggccaucuacuccaaggacaacuccauccgcaucggcuccaagggcgacgucuucgucauccgcgagcccuucaucuccugcuccccccucgagugccgcaccuucuuccucacccagggcgcccuccucaacgacaagcacuccaacggcaccaucaaggaccgcucccccuaccgcacccucauguccugccccaucggcgagguccccucccccuacaacucccgcuucgaguccgucgccugguccgccuccgccugccacgacggcaucaacuggcucaccaucggcaucuccggccccgacaacggcgccgucgccguccucaaguacaacggcaucaucaccgacaccaucaaguccuggcgcaacaacauccuccgcacccaggaguccgagugcgccugcgucaacggcuccugcuucaccgucaugaccgacggccccuccgacggccaggccuccuacaagaucuuccgcaucgagaagggcaagaucgucaaguccgucgagaugaacgcccccaacuaccacuacgaggagugcuccugcuaccccgacuccuccgagaucaccugcgucugccgcgacaacuggcacggcuccaaccgccccugggucuccuucaaccagaaccucgaguaccagaucggcuacaucugcuccggcaucuucggcgacaacccccgccccaacgacaagaccggcuccugcggccccgucuccuccaacggcgccaacggcgucaagggcuucuccuucaaguacggcaacggcaucuggaucggccgcaccaaguccaucuccucccgcaacggcuucgagaugaucugggaccccaacggcuggaccggcaccgacaacaacuucuccaucaagcaggacaucgucggcaucaacgagugguccggcuacuccggcuccuucguccagcaccccgagcucaccggccucgacugcauccgccccugcuucugggucgagcucauccgcggccgccccaaggagaacaccaucuggaccuccggcuccuccaucuccuucugcggcgucaacuccgacaccgucggcugguccuggcccgacggcgccgagcuccccuucaccaucgacaaguga

SEQ ID NO: 114030 - RNA, 1410 nt, Artificial Sequence; identical to SEQ ID NO: 112774
  derived and/or modified CDS sequence (opt2) from neuraminidase__InfluenzaA__ADB89624

SEQ ID NO: 114031 - RNA, 1410 nt, Artificial Sequence; identical to SEQ ID NO: 112774
  derived and/or modified CDS sequence (opt2) from neuraminidase__InfluenzaA__ADB89634

SEQ ID NO: 114032 - RNA, 1410 nt, Artificial Sequence; identical to SEQ ID NO: 112774
  derived and/or modified CDS sequence (opt2) from neuraminidase__InfluenzaA__ADB89644

SEQ ID NO: 114033 - RNA, 1410 nt, Artificial Sequence; identical to SEQ ID NO: 113792
  derived and/or modified CDS sequence (opt2) from neuraminidase__InfluenzaA__ADB89664

SEQ ID NO: 114034 - RNA, 1410 nt, Artificial Sequence; identical to SEQ ID NO: 112774
  derived and/or modified CDS sequence (opt2) from neuraminidase__InfluenzaA__ADB89674

SEQ ID NO: 114035 - RNA, 1410 nt, Artificial Sequence; identical to SEQ ID NO: 112774
  derived and/or modified CDS sequence (opt2) from neuraminidase__InfluenzaA__ADB89684

SEQ ID NO: 114036 - RNA, 1410 nt, Artificial Sequence
  derived and/or modified CDS sequence (opt2) from neuraminidase__InfluenzaA__ADB89694
augaaccccaaccagaagaucaucaccaucggcuccgucugcaugaccaucggcauggccaaccucauccuccagaucggcaacaucaucuccaucuggaucucccacuccauccagcucggcaaccagaaccagaucgagaccugcaaccaguccgucaucaccuacgagaacaacaccugggucaaccagaccuacgucaacaucuccaacaccaacuucgccgccggccaguccgucgucuccgucaagcucgccggcaacuccucccucugccccgucuccggcugggccaucuacuccaaggacaacuccauccgcaucggcuccaagggcgacgucuucgucauccgcgagcccuucaucuccugcuccccccucgagugccgcaccuucuuccucacccagggcgcccuccucaacgacaagcacuccaacggcaccaucaaggaccgcucccccuaccgcacccucauguccugccccaucggcgagguccccucccccuacaacucccgcuucgaguccgucgccugguccgccuccgccugccacgacggcaucaacuggcucaccaucggcaucuccggccccgacaacggcgccgucgccguccucaaguacaacggcaucaucaccgacaccaucaaguccuggcgcaacaacauccuccgcacccaggaguccgagugcgccugcgucaacggcuccugcuucaccgucaugaccgacggccccuccgacggccaggccuccuacaagaucuuccgcaucgagaagggcaagaucgucaaguccgucgagaugaacgcccccaacuaccacuacgaggagugcuccugcuaccccgacuccuccgagaucaccugcgucugccgcgacaacuggcacggcuccaaccgccccugggucuccuucaaccagaaccucgaguaccagaucggcuacaucugcuccggcaucuucggcgacaacccccgccccaacgacaagaccggcuccugcggccccgucuccuccaacggcgccaacggcgucaagggcuucuccuucaaguacggcaacggcgucuggaucggccgcaccaaguccaucuccucccgcaacggcuucgagaugaucugggaccccaacggcuggaccggcaccgacaacaacuucaccaucaagcaggacaucgucggcaucaacgagugguccggcuacuccggcuccuucguccagcaccccgagcucaccggccucgacugcauccgccccugcuucugggucgagcucauccgcggccgccccaaggagaacaccaucuggaccuccggcuccuccaucuccuucugcggcgucaacuccgacaccgucggcugguccuggcccgacggcgccgagcuccccuucaccaucgacaaguga

SEQ ID NO: 114037 - RNA, 1410 nt, Artificial Sequence; identical to SEQ ID NO: 112774
  derived and/or modified CDS sequence (opt2) from neuraminidase__InfluenzaA__ADB89704

SEQ ID NO: 114038 - RNA, 1410 nt, Artificial Sequence; identical to SEQ ID NO: 112774
  derived and/or modified CDS sequence (opt2) from neuraminidase__InfluenzaA__ADB89714

SEQ ID NO: 114039 - RNA, 1410 nt, Artificial Sequence; identical to SEQ ID NO: 112635
  derived and/or modified CDS sequence (opt2) from neuraminidase__InfluenzaA__ADB89724

SEQ ID NO: 114040 - RNA, 1410 nt, Artificial Sequence; identical to SEQ ID NO: 112635
  derived and/or modified CDS sequence (opt2) from neuraminidase__InfluenzaA__ADB89735

SEQ ID NO: 114041 - RNA, 1410 nt, Artificial Sequence; identical to SEQ ID NO: 112774
  derived and/or modified CDS sequence (opt2) from neuraminidase__InfluenzaA__ADB90357

SEQ ID NO: 114042 - RNA, 1410 nt, Artificial Sequence; identical to SEQ ID NO: 112774
  derived and/or modified CDS sequence (opt2) from neuraminidase__InfluenzaA__ADB90358

SEQ ID NO: 114043 - RNA, 1410 nt, Artificial Sequence
  derived and/or modified CDS sequence (opt2) from neuraminidase__InfluenzaA__ADB90359
augaaccccaaccagaagaucaucaccaucggcuccgucugcaugaccaucggcauggccaaccucauccuccagaucggcaacaucaucuccaucuggaucucccacuccauccagcucggcaaccagaaccagaucgagaccugcaaccaguccaucaucaccuacgagaacaacaccugggucaaccagaccuacgucaacaucuccaacaccaacuucgccgccggccaguccgucgucuccgucaagcucgccggcaacuccucccucugccccgucuccggcugggccaucuacuccaaggacaacuccauccgcaucggcuccaagggcgacgucuucgucauccgcgagcccuucaucuccugcuccccccucgagugccgcaccuucuuccucacccagggcgcccuccucaacgacaagcacuccaacggcaccaucaaggaccgcucccccuaccgcacccucauguccugccccaucggcgagguccccucccccuacaacucccgcuucgaguccgucgccugguccgccuccgccugccacgacggcaucaacuggcucaccaucggcaucuccggccccgacaacggcgccgucgccguccucaaguacaacggcaucaucaccgacaccaucaaguccuggcgcaacaacauccuccgcacccaggaguccgagugcgccugcgucaacggcuccugcuucaccgucaugaccgacggccccuccgacggccaggccuccuacaagaucuuccgcaucgagaagggcaagaucgucaaguccgucgagaugaacgcccccaacuaccacuacgaggagugcuccugcuaccccgacuccuccgagaucaccugcgucugccgcgacaacuggcacggcuccaaccgccccugggucuccuucaaccagaaccucgaguaccgcaucggcuacaucugcuccggcaucuucggcgacaacccccgccccaacgacaagaccggcuccugcggccccgucuccuccaacggcgccaacggcgucaagggcuucuccuucaaguacggcaacggcgucuggaucggccgcaccaaguccaucuccucccgcaacggcuucgagaugaucugggaccccaacggcuggaccggcaccgacaacaacuucuccaucaagcaggacaucgucggcaccaacgagugguccggcuacuccggcuccuucguccagcaccccgagcucaccggccucgacugcauccgccccugcuucugggucgagcucauccgcggccgccccaaggagaacaccaucuggaccuccggcuccuccaucuccuucugcggcgucaacuccgacaccgucggcugguccuggcccgacggcgccgagcuccccuucaccaucgacaaguga

SEQ ID NO: 114044 - RNA, 1410 nt, Artificial Sequence; identical to SEQ ID NO: 112774
  derived and/or modified CDS sequence (opt2) from neuraminidase__InfluenzaA__ADB90363

SEQ ID NO: 114045 - RNA, 1410 nt, Artificial Sequence; identical to SEQ ID NO: 113951
  derived and/or modified CDS sequence (opt2) from neuraminidase__InfluenzaA__ADB90373

SEQ ID NO: 114046 - RNA, 1410 nt, Artificial Sequence; identical to SEQ ID NO: 112774
  derived and/or modified CDS sequence (opt2) from neuraminidase__InfluenzaA__ADB98137

SEQ ID NO: 114047 - RNA, 1410 nt, Artificial Sequence; identical to SEQ ID NO: 113128
  derived and/or modified CDS sequence (opt2) from neuraminidase__InfluenzaA__ADB98138

SEQ ID NO: 114048 - RNA, 1410 nt, Artificial Sequence; identical to SEQ ID NO: 112774
  derived and/or modified CDS sequence (opt2) from neuraminidase__InfluenzaA__ADB98139

SEQ ID NO: 114049 - RNA, 1410 nt, Artificial Sequence; identical to SEQ ID NO: 113128
  derived and/or modified CDS sequence (opt2) from neuraminidase__InfluenzaA__ADB98140

SEQ ID NO: 114050 - RNA, 1410 nt, Artificial Sequence; identical to SEQ ID NO: 113128
  derived and/or modified CDS sequence (opt2) from neuraminidase__InfluenzaA__ADB98141

SEQ ID NO: 114051 - RNA, 1410 nt, Artificial Sequence; identical to SEQ ID NO: 112774
  derived and/or modified CDS sequence (opt2) from neuraminidase__InfluenzaA__ADC32391

SEQ ID NO: 114052 - RNA, 1410 nt, Artificial Sequence; identical to SEQ ID NO: 112774
  derived and/or modified CDS sequence (opt2) from neuraminidase__InfluenzaA__ADC32392

SEQ ID NO: 114053 - RNA, 1410 nt, Artificial Sequence; identical to SEQ ID NO: 112774
  derived and/or modified CDS sequence (opt2) from neuraminidase__InfluenzaA__ADC32393

SEQ ID NO: 114054 - RNA, 1410 nt, Artificial Sequence; identical to SEQ ID NO: 112774
  derived and/or modified CDS sequence (opt2) from neuraminidase__InfluenzaA__ADC32394

SEQ ID NO: 114055 - RNA, 1410 nt, Artificial Sequence; identical to SEQ ID NO: 112774
  derived and/or modified CDS sequence (opt2) from neuraminidase__InfluenzaA__ADC32395

SEQ ID NO: 114056 - RNA, 1410 nt, Artificial Sequence; identical to SEQ ID NO: 112774
  derived and/or modified CDS sequence (opt2) from neuraminidase__InfluenzaA__ADC32396

SEQ ID NO: 114057 - RNA, 1410 nt, Artificial Sequence; identical to SEQ ID NO: 112774
  derived and/or modified CDS sequence (opt2) from neuraminidase__InfluenzaA__ADC32397

SEQ ID NO: 114058 - RNA, 1410 nt, Artificial Sequence; identical to SEQ ID NO: 112774
  derived and/or modified CDS sequence (opt2) from neuraminidase__InfluenzaA__ADC32398

SEQ ID NO: 114059 - RNA, 1410 nt, Artificial Sequence; identical to SEQ ID NO: 112774
  derived and/or modified CDS sequence (opt2) from neuraminidase__InfluenzaA__ADC32399

SEQ ID NO: 114060 - RNA, 1410 nt, Artificial Sequence; identical to SEQ ID NO: 112774
  derived and/or modified CDS sequence (opt2) from neuraminidase__InfluenzaA__ADC32400

SEQ ID NO: 114061 - RNA, 1410 nt, Artificial Sequence; identical to SEQ ID NO: 112774
  derived and/or modified CDS sequence (opt2) from neuraminidase__InfluenzaA__ADC32401

SEQ ID NO: 114062 - RNA, 1410 nt, Artificial Sequence
  derived and/or modified CDS sequence (opt2) from neuraminidase__InfluenzaA__ADC32404
augaaccccaaccagaagaucaucaccaucggcuccgucugcaugaccaucggcauggccaaccucauccuccagaucggcaacaucaucuccaucuggaucucccacuccauccagcucggcaaccagaaccagaucgagaccugcaaccaguccgucaucaccuacgagaacaacaccugggucaaccagaccuacgucaacaucuccaacaccaacuucgccgccggccaguccgucgucuccgucaagcucgccggcaacuccucccucugccccgucuccggcugggccaucuacuccaaggacaacuccauccgcaucggcuccaagggcgacgucuucgucauccgcgagcccuucaucuccugcuccccccucgagugccgcaccuucuuccucacccagggcgcccuccucaacgacaagcacuccaacggcaccaucaaggaccgcucccccuaccgcacccucauguccugccccaucggcgagguccccucccccuacaacucccgcuucgaguccgucgccugguccgccuccgccugccacgacggcaucaacuggcucaccaucggcaucuccggccccgacaacggcgccgucgccguccucaaguacaacggcaucaucaccgacaccaucaaguccuggcgcaacaacauccuccgcacccaggaguccgagugcgccugcgucaacggcuccugcuucaccgucaugaccgacggccccuccgacggccaggccuccuacaagaucuuccgcaucgagaagggcaagaucgucaaguccgucgagaugaacgcccccaacuaccacuacgaggagugcuccugcuaccccgacuccuccgagaucaccugcgucugccgcgacaacuggcacggcuccaaccgccccugggucuccuucaaccagaaccucgaguaccagaucggcuacaucugcuccggcaucuucggcgacaacccccgccccaacgacaagaagggcuccugcggccccgucuccuccaacggcgccaacggcgucaagggcuucuccuucaaguacggcaacggcgucuggaucggccgcaccaaguccaucuccucccgcaacggcuucgagaugaucugggaccccaacggcuggaccggcaccgacaacaacuucuccaucaagcaggacaucgucggcaucaacgagugguccggcuacuccggcuccuucguccagcaccccgagcucaccggccucgacugcauccgccccugcuucugggucgagcucauccgcggccgccccaaggagaacaccaucuggaccuccggcuccuccaucuccuucugcggcgucaacuccgacaccgucggcugguccuggcccgacggcgccgagcuccccuucaccaucgacaaguga

SEQ ID NO: 114063 - RNA, 1410 nt, Artificial Sequence
  derived and/or modified CDS sequence (opt2) from neuraminidase__InfluenzaA__ADC32407
augaaccccaagcagaagaucaucaccaucggcuccgucugcaugaccaucggcauggccaaccucauccuccagaucggcaacaucaucuccaucuggaucucccacuccauccagcucggcaaccagaaccagaucgagaccugcaaccaguccgucaucaccuacgagaacaacaccugggucaaccagaccuacgucaacaucuccaacaccaacuucgccgccggccaguccgucgucuccgucaagcucgccggcaacuccucccucugccccgucuccggcugggccaucuacuccaaggacaacuccauccgcaucggcuccaagggcgacgucuucgucauccgcgagcccuucaucuccugcuccccccucgagugccgcaccuucuuccucacccagggcgcccuccucaacgacaagcacuccaacggcaccaucaaggaccgcucccccuaccgcacccucauguccugccccaucggcgagguccccucccccuacaacucccgcuucgaguccgucgccugguccgccuccgccugccacgacggcaucaacuggcucaccaucggcaucuccggccccgacaacggcgccgucgccguccucaaguacaacggcaucaucaccgacaccaucaaguccuggcgcaacaacauccuccgcacccaggaguccgagugcgccugcgucaacggcuccugcuucaccgucaugaccgacggccccuccgacggccaggccuccuacaagaucuuccgcaucgagaagggcaagaucgucaaguccgucgagaugaacgcccccaacuaccacuacgaggagugcuccugcuaccccgacuccuccgagaucaccugcgucugccgcgacaacuggcacggcuccaaccgccccugggucuccuucaaccagaaccucgaguaccagaucggcuacaucugcuccggcaucuucggcgacaacccccgccccaacgacaagaagggcuccugcggccccgucuccuccaacggcgccaacggcgucaagggcuucuccuucaaguacggcaacggcgucuggaucggccgcaccaaguccaucuccucccgcaacggcuucgagaugaucugggaccccaacggcuggaccggcaccgacaacaacuucuccaucaagcaggacaucgucggcaucaacgagugguccggcuacuccggcuccuucguccagcaccccgagcucaccggccucgacugcauccgccccugcuucugggucgagcucauccgcggccgccccaaggagaacaccaucuggaccuccggcuccuccaucuccuucugcggcgucaacuccgacaccgucggcugguccuggcccgacggcgccgagcuccccuucaccaucgacaaguga

SEQ ID NO: 114064 - RNA, 1410 nt, Artificial Sequence
  derived and/or modified CDS sequence (opt2) from neuraminidase__InfluenzaA__ADC34942
augaaccccaaccagaagaucaucaccaucggcuccgucucccucaccaucuccaccaucugcuucuucaugcagaucgccauccucaucaccaccgucacccuccacuucaagcaguacgaguucaaccccccccccaacaaccaggucaugcucugcgagcccaccaucaucgagcgcaacaucaccgagaucgucuaccucaccaacaccaccaucgagaaggagaucugccccaagcucgccgaguaccgcgagugguccaagccccagugcaacaucaccggcuucgcccccuucuccaaggacaacuccauccgccucuccgccggcggcgacaucugggucacccgcgagcccuacgucuccugcgaccccgacaagugcuaccaguucgcccucggccagggcaccacccucaacaacguccacuccaacgacaucguccgcgaccgcacccccuaccgcacccuccucaugaacgagcucggcguccccuuccaccucggcaccaagcaggucugcaucgccugguccuccuccuccugccacgacggcaaggccuggcuccacgucugcgucaccggcgacgacaagaacgccaccgccuccuucaucuacaacggccgccucgucgacuccaucgucuccugguccaaggagauccuccgcacccaggaguccgagugcgucugcaucaacggcaccugcaccgucgucaugaccgacggcuccgccuccggcaaggccgacaccaagauccucuucaucgaggagggcaagaucguccacaccuccacccucuccggcuccgcccagcacgucgaggagugcuccugcuacccccgcuaccccggcguccgcugcgucugccgcgacaacuggcgcggcuccaaccgccccaucgucgacaucaacaugaaggacuacuccaucgucuccuccuacgucugcuccggccucgucggcgacaccccccgcaagaacgacuccuccuccuccggccacugccucaaccccaacaacgaggagggcggccacggcgucaagggcugggccuucgacgacggcaacgacgucuggaugggccgcaccaucuccgagaagcuccgcuccggcuacgagaccuucaaggucaucgagggcugguccaaccccaacuccaagcuccagaucaaccgccaggucaucgucgaccgcggcaaccgcuccggcuacuccggcaucuucuccgucgagggcaaguccugcaucaaccgcugcuucuacgucgagcucauccgcggccgcaaggaggagaccgagguccucuggaccuccaacuccaucgucgucuucugcggcaccuccggcaccuacggcaccggcuccuggcccgacggcgccgacaucaaccucaugcccaucuga

SEQ ID NO: 114065 - RNA, 1410 nt, Artificial Sequence
  derived and/or modified CDS sequence (opt2) from neuraminidase__InfluenzaA__ADC39000
augaaccccaaccagaagaucaucaccaucggcuccgucugcaugaccaucggcauggccaaccucauccuccagaucggcaacaucaucuccaucuggaucucccacuccauccagcucggcaaccagaaccagaucgagaccugcaaccaguccgucaucaccuacgagaacaacaccugggucaaccagaccuacgucaacaucuccaacaccaacuucgccgccggccaguccgucgucuccgucaagcucgccggcaacuccucccucugccccgucuccggcugggccaucuacuccaaggacaacuccauccgcaucggcuccaagggcgacgucuucgucauccgcgagcccuucaucuccugcuccccccucgagugccgcaccuucuuccucacccagggcgcccuccucaacgacaagcacuccaacggcaccaucaaggaccgcucccccuaccgcacccucauguccugccccaucggcgagguccccucccccuacaacucccgcuucgaguccgucgccugguccgccuccgccugccacgacggcaucaacuggcucaccaucggcaucuccggccccgacaacggcgccgucgccguccucaaguacaacggcaucaucaccgacaccaucaaguccuggcgcaacaacauccuccgcacccaggaguccgagugcgccugcgucaacggcuccugcuucaccgucaugaccgacggccccuccgacggccaggccuccuacaagaucuuccgcaucgagaagggcaagaucgucaaguccgucgagaugaacgcccccaacuaccacuacgaggagugcuccugcuaccccgacuccuccgagaucaccugcgucugccgcgacaacuggcacggcuccaaccgccccugggucuccuucaaccagaaccucgaguaccagaucggcuacaucugcuccggcaucuucggcgacaacccccgccccaacgacaagaccggcuccugcggccccgucuccuccaacggcgccaacggcgucaagggcuucuccuucaaguacggcaacggcgucuggaucggccgcaccaaguccaucuccucccgcaacggcuucgagaugaucugggaccccaacggcuggaccggcaccgacaacaacuucuccaucaagcaggacaucgucggcaucaacgagugguccggcuacuccggcuccuucguccagcaccccgagcucaccggccucgacugcauccgccccugcuucugggucgagcucauccgcggccgccccaaggagaacaccaucuggaccuccggcuccuccaucuccuucugcggcgucaacuccgacaacgucggcugguccuggcccgacggcgccgagcuccccuucaccaucgacaaguga

SEQ ID NO: 114066 - RNA, 1410 nt, Artificial Sequence; identical to SEQ ID NO: 112774
  derived and/or modified CDS sequence (opt2) from neuraminidase__InfluenzaA__ADC39010

SEQ ID NO: 114067 - RNA, 1413 nt, Artificial Sequence; identical to SEQ ID NO: 112668
  derived and/or modified CDS sequence (opt2) from neuraminidase__InfluenzaA__ADC45606

SEQ ID NO: 114068 - RNA, 1413 nt, Artificial Sequence
  derived and/or modified CDS sequence (opt2) from neuraminidase__InfluenzaA__ADC45628
augaaccccaaccagaagaucaucaccaucggcuccaucuccaucgccaucggcaucaucucccucaugcuccagaugggcaacaucaucuccaucugggccucccacuccauccagaccggcucccagaaccacaccggcaucugcaaccagcgcaucaucaccuacgagaacuccaccugggucaaccacaccuacgucaacaucaacaacaccaacgucgucgccggcaaggacaagacccccgucacccucgucggcaacuccucccucugcuccaucuccggcugggccaucuacaccaaggacaacuccauccgcaucggcuccaagggcgacgucuucgucauccgcgagcccuucaucuccugcucccaccucgagugcaagaccuucuuccucacccagggcgcccuccucaacgacaagcacuccaacggcaccgucaaggaccgcucccccuaccgcgcccucauguccugcccccucggcgaggcccccucccccuacaacuccaaguucgaguccgucgccugguccgccuccgccugccacgacggcaucggcuggcucaccaucggcaucuccggccccgacaacggcgccgucgccguccucaaguacaagggcaucaucaccggcaccaucaaguccuggaagaagcagauccuccgcacccaggaguccgagugcgucugcaugaacggcuccugcuucaccaucaugaccgacggccccuccaacggcgccgccuccuacaagaucuucaagaucgagaagggcaaggucaccaaguccauggagcucaacgcccccaacuuccacuacgaggagugcuccugcuaccccgacaccggcaccgucaugugcgucugccgcgacaacuggcacggcuccaaccgccccugggucuccuucaaccagaaccucgacuaccagaucggcuacaucugcuccggcgucuucggcgacaacccccgccccaaggaccgcgagggcuccugcaaccccgucaccgucgacggcgccaacggcgucaagggcuucuccuacaaguacggcaacggcgucuggaucggccgcaccaaguccaaccgcauccgcaagggcuucgagaugaucugggaccccaacggcuggaccaacaccgacuccgacuucuccgucaagcaggacaucgucgccaucaccgacugguccggcuacuccggcuccuucguccagcaccccgagcucaccggccucgacugcauccgccccugcuucugggucgagcucguccgcggccucccccgcgagaacaccaccaucuggaccuccggcuccuccaucuccuucugcggcgucaacggcgacaucgccaacugguccuggcccgacggcgccgagcuccccuucaccaucgacaaguga

SEQ ID NO: 114069 - RNA, 1413 nt, Artificial Sequence
  derived and/or modified CDS sequence (opt2) from neuraminidase__InfluenzaA__ADC45639
augaaccccaaccagaagaucaucaccaucggcuccaucuccaucgccaucggcaucaucucccucaugcuccagaucggcaacaucaucuccaucugggccucccacuccauccagaccggcucccagaaccacaccggcaucugcaaccagcgcaucaucaccuacgagaacuccaccugggucaaccacaccuacgucaacaucaacaacaccaacgucgucgccggcaaggacaagacccccgucacccucgucggcaacuccucccucugcuccaucuccggcugggccaucuacaccaaggacaacuccauccgcaucggcuccaagggcgacgucuucgucauccgcgagcccuucaucuccugcucccaccucgagugcaagaccuucuuccucacccagggcgcccuccucaacgacaagcacuccaacggcaccgucaaggaccgcucccccuaccgcgcccucauguccugcccccucggcgaggcccccucccccuacaacuccaaguucgaguccgucgccugguccgccuccgccugccacgacggcaucggcuggcucaccaucggcgucuccggccccgacaacggcgccgucgccguccucaaguacaagggcaucaucaccggcaccaucaaguccuggaagaagcagauccuccgcacccaggaguccgagugcgucugcaugaacggcuccugcuucaccaucaugaccgacggccccuccaacggcgccgccuccuacaagaucuucaagaucgagaagggcaaggucaccaaguccauggagcucaacgcccccaacuuccacuacgaggagugcuccugcuaccccgacaccggcaccgucaugugcgucugccgcgacaacuggcacggcuccaaccgccccugggucuccuucaaccagaaccucgacuaccagaucggcuacaucugcuccggcgucuucggcgacaacccccgccccaaggaccgcgagggcuccugcaaccccgucaccgucgacggcgccaacggcgucaagggcuucuccuacaaguacggcaacggcgucuggaucggccgcaccaaguccaaccgcauccgcaagggcuucgagaugaucugggaccccaacggcuggaccaacaccgacuccgacuucuccgucaagcaggacaucgucgccaucaccgacugguccggcuacuccggcuccuucguccagcaccccgagcucaccggccucgacugcauccgccccugcuucugggucgagcucguccgcggccucccccgcgagaacaccaccaucuggaccuccggcuccuccaucuccuucugcggcgucaacggcgacaucgccaacugguccuggcccgacggcgccgagcuccccuucaccaucgacaaguga

SEQ ID NO: 114070 - RNA, 1413 nt, Artificial Sequence; identical to SEQ ID NO: 112668
  derived and/or modified CDS sequence (opt2) from neuraminidase__InfluenzaA__ADC45650

SEQ ID NO: 114071 - RNA, 1413 nt, Artificial Sequence; identical to SEQ ID NO: 112668
  derived and/or modified CDS sequence (opt2) from neuraminidase__InfluenzaA__ADC45661

SEQ ID NO: 114072 - RNA, 1413 nt, Artificial Sequence
  derived and/or modified CDS sequence (opt2) from neuraminidase__InfluenzaA__ADC45683
augaaccccaaccagaagaucaucaccaucggcuccaucuccaucgccaucggcaucaucucccucaugcuccagaucggcaacaucaucuccaucugggccucccacuccauccagaccggcucccagaaccacaccggcaucugcaaccagcgcaucaucaccuacgagaacuccaccugggucaaccacaccuacgucaacaucaacaacaccaacgucgucgccggcgaggacaagacccccgucacccucgucggcaacuccucccucugcuccaucuccggcugggccaucuacaccaaggacaacuccauccgcaucggcuccaagggcgacgucuucgucauccgcgagcccuucaucuccugcucccaccucgagugcaagaccuucuuccucacccagggcgcccuccucaacgacaagcacuccaacggcaccgucaaggaccgcucccccuaccgcgcccucauguccugcccccucggcgaggcccccucccccuacaacuccaaguucgaguccgucgccugguccgccuccgccugccacgacggcaucggcuggcucaccaucggcaucuccggccccgacaacggcgccgucgccguccucaaguacaagggcaucaucaccggcaccaucaaguccuggaagaagcagauccuccgcacccaggaguccgagugcgucugcaugaacggcuccugcuucaccaucaugaccgacggccccuccaacggcgccgccuccuacaagaucuucaagaucgagaagggcaaggucaccaaguccauggagcucaacgcccccaacuuccacuacgaggagugcuccugcuaccccgacaccggcaccgucaugugcgucugccgcgacaacuggcacggcuccaaccgccccugggucuccuucaaccagaaccucgacuaccagaucggcuacaucugcuccggcgucuucggcgacaacccccgccccaaggaccgcgagggcuccugcaaccccgucaccgucgacggcgccaacggcgucaagggcuucuccuacaaguacggcaacggcgucuggaucggccgcaccaaguccaaccgcauccgcaagggcuucgagaugaucugggaccccaacggcuggaccaacaccgacuccgacuucuccgucaagcaggacaucgucgccaucaccgacugguccggcuacuccggcuccuucguccagcaccccgagcucaccggccucgacugcauccgccccugcuucugggucgagcucguccgcggccucccccgcgagaacaccaccaucuggaccuccggcuccuccaucuccuucugcggcgucaacggcgacaucgccaacugguccuggcccgacggcgccgagcuccccuucaccaucgacaaguga

SEQ ID NO: 114073 - RNA, 1413 nt, Artificial Sequence
  derived and/or modified CDS sequence (opt2) from neuraminidase__InfluenzaA__ADC45705
augaaccccaaccagaagaucaucaccaucggcuccaucuccaucgccaucggcaucaucucccucaugcuccagaucggcaacaucaucuccaucugggccucccacuccauccagaccggcucccagaacaacaccggcaucugcaaccagcgcaucaucaccuacgagaacuccaccugggucaaccacaccuacgucaacaucaacaacaccaacgucgucgccggcgaggacaagaccuccgucacccucgccggcaacuccucccucugcuccaucuccggcugggccaucuacaccaaggacaacuccauccgcaucggcuccaagggcgacgucuucgucauccgcgagcccuucaucuccugcucccaccucgagugccgcaccuucuuccucacccagggcgcccuccucaacgacaagcacuccaacggcaccgucaagaaccgcucccccuaccgcgcccucauguccugcccccucggcgaggcccccucccccuacaacuccaaguucgaguccgucgccugguccgccuccgccugccacgacggcaugggcuggcucaccaucggcaucuccggccccgacaacggcgccgucgccguccucaaguacaacggcaucaucaccggcaccaucaaguccuggaagaagcagauccuccgcacccaggaguccgagugcgucugcaugaacggcuccugcuucaccaucaugaccgacggccccuccaacaaggccgccuccuacaagaucuucaagaucgagaagggcaaggucaccaaguccaucgagcucaacgcccccaacuuccacuacgaggagugcuccugcuaccccgacaccggcaucgucaugugcgucugccgcgacaacuggcacggcuccaaccgccccugggucuccuucaaccagaaccucgacuaccagaucggcuacaucugcuccggcgucuucggcgacaacccccgccccgaggacggcgagggcuccugcaaccccgucaccgucgacggcgccaacggcgucaagggcuucuccuacaaguacgacaacggcgucuggaucggccgcaccaaguccaaccgccuccgcaagggcuucgagaugaucugggaccccaacggcuggaccaacaccgacuccgacuucuccgucaagcaggacgucgucgccaucaccgacugguccggcuacuccggcuccuucguccagcaccccgagcucaccggccucgacugcauccgccccugcuucugggucgagcucguccgcggccucccccgcgagaacaccaccaucuggaccuccggcuccuccaucuccuucugcggcgucaacuccgacaccgccaacugguccuggcccgacggcgccgagcuccccuucaccaucgacaaguga

SEQ ID NO: 114074 - RNA, 1413 nt, Artificial Sequence
  derived and/or modified CDS sequence (opt2) from neuraminidase__InfluenzaA__ADC45716
augaaccccaaccagaagaucaucaccaucggcuccaucuccaucgccaucggcaucaucucccucaugcuccagaucggcaacaucaucuccaucugggccucccacuccauccagaccggcucccagaaccacaccggcaucugcaaccagcgcaucaucaccuacgagaacuccaccugggucaaccacaccuacgucaacaucaacaacaccaacgucgucgccggcaaggacaagacccccgucacccucgucggcaacuccucccucugcuccaucuccggcugggccaucuacaccaaggacaacuccauccgcaucggcuccaagggcgacgucuucgucauccgcgagcccuucaucuccugcucccaccucgagugcaagaccuucuuccucacccagggcgcccuccucaacgacaagcacuccaacggcaccgucaaggaccgcucccccuaccgcgcccucauguccugcccccucggcgaggcccccucccccuacaacuccaaguucgaguccgucgccugguccgccuccgccugccacgacggcaucggcuggcucaccaucggcaucuccggccccgacaacggcgccgucgccguccucaaguacaagggcaucaucaccggcaccaucaaguccuggaagaagcagauccuccgcacccaggaguccgagugcgucugcaugaacggcuccugcuucaccaucaugaccgacggccccuccaacggcgccgccuccuacaagaucuucaagaucgagaagggcaaggucaccaaguccauggagcucaacgcccccaacuuccacuacgaggagugcuccugcuaccccgacaccggcaccgucaugugcgucugccgcgacaacuggcacggcuccaaccgccccugggucuccuucaaccagaaccucgacuaccagaucggcuacaucugcuccggcgucuucggcgacaacccccgccccaaggaccgcgagggcuccugcaaccccgucaccgucgacggcgccaacggcgucgagggcuucuccuacaaguacggcaacggcgucuggaucggccgcaccaaguccaaccgcauccgcaagggcuucgagaugaucugggaccccaacggcuggaccaacaccgacuccgacuucuccgucaagcaggacaucgucgccaucaccaacugguccggcuacuccggcuccuucguccagcaccccgagcucaccggccucgacugcauccgccccugcuucugggucgagcucguccgcggccucccccgcgagaacaccaccaucuggaccuccggcuccuccaucuccuucugcggcgucaacggcgacaucgccaacugguccuggcccgacggcgccgagcuccccuucaccaucgacaaguga

SEQ ID NO: 114075 - RNA, 1413 nt, Artificial Sequence
  derived and/or modified CDS sequence (opt2) from neuraminidase__InfluenzaA__ADC45738
augaaccccaaccagaagaucaucaccaucggcuccaucuccaucgccaucggcaucaucucccucaugcuccagaucggcaacaucaucuccaucugggccucccacuccauccagaccggcucccagaacaacaccggcaucugcaaccagcgcaucaucaccuacgagaacuccaccugggucaaccacaccuacgucaacaucaacaacaccaacgucgucgccggcgaggacaagaccuccgucacccucgccggcaacuccucccucugcuccaucuccggcugggccaucuacaccaaggacaacuccauccgcaucggcuccaagggcgacgucuucgucauccgcgagcccuucaucuccugcucccaccucgagugccgcaccuucuuccucacccagggcgcccuccucaacgacaagcacuccaacggcaccgucaaggaccgcucccccuaccgcgcccucauguccugcccccucggcgaggcccccucccccuacaacuccaaguucgaguccgucgccugguccgccuccgccugccacgacggcaugggcuggcucaccaucggcaucuccggccccgacaacggcgccgucgccguccucaaguacaacggcaucaucaccggcaccaucaaguccuggaagaagcagauccuccgcacccaggaguccgagugcgucugcaugaacggcuccugcuucaccaucaugaccgacggccccuccaacaaggccgccuccuacaagaucuucaagaucgagaagggcaaggucaccaaguccaucgagcucaacgcccccaacuucuacuacgaggagugcuccugcuaccccgacaccggcaucgucaugugcgucugccgcgacaacuggcacggcuccaaccgccccugggucuccuucaaccagaaccucgacuaccagaucggcuacaucugcuccggcgucuucggcgacaacccccgccccgaggacggcgagggcuccugcaaccccgucaccgucgacggcgccaacggcgucaagggcuucuccuacaaguacgacaacggcgucuggaucggccgcaccaaguccaaccgccuccgcaagggcuucgagaugaucugggaccccaacggcuggaccaacaccgacuccgacuucuccgucaagcaggacgucgucgccaucaccgacugguccggcuacuccggcuccuucguccagcaccccgagcucaccggccucgacugcauccgccccugcuucugggucgagcucguccgcggccucccccgcgagaacaccaccaucuggaccuccggcuccuccaucuccuucugcggcgucaacuccgacaccgccaacugguccuggcccgacggcgccgagcuccccuucaccaucgacaaguga

SEQ ID NO: 114076 - RNA, 1413 nt, Artificial Sequence
  derived and/or modified CDS sequence (opt2) from neuraminidase__InfluenzaA__ADC45760
augaaccccaaccagaagaucaucaccaucggcuccaucuccaucgccaucggcaucaucucccucaugcuccagaucggcaacaucaucuccaucugggccucccacuccauccagaccggcucccagaacaacaccggcaucugcaaccagcgcaucaucaccuacgagaacuccaccugggucaaccacaccuacgucaacaucaacaacaccaacgucgucgccggcgaggacaagaccuccgucacccucgccggcaacuccucccucugcuccaucuccggcugggccaucuacaccaaggacaacuccauccgcaucggcuccaagggcgacgucuucgucauccgcgagcccuucaucuccugcucccaccucgagugccgcaccuucuuccucacccagggcgcccuccucaacgacaagcacuccaacggcaccgccaaggaccgcucccccuaccgcgcccucauguccugcccccucggcgaggcccccucccccuacaacuccaaguucgaguccgucgccugguccgccuccgccugccacgacggcaugggcuggcucaccaucggcaucuccggccccgacaacggcgccgucgccguccucaaguacaacggcaucaucaccggcaccaucaaguccuggaagaagcagauccuccgcacccaggaguccgagugcgucugcaugaacggcuccugcuucaccaucaugaccgacggccccuccaacaaggccgccuccuacaagaucuucaagaucgagaagggcaaggucaccaaguccaucgagcucaacgcccccaacuucuacuacgaggagugcuccugcuaccccgacaccggcaucgucaugugcgucugccgcgacaacuggcacggcuccaaccgccccugggucuccuucaaccagaaccucgacuaccagaucggcuacaucugcuccggcgucuucggcgacaacccccgccccgaggacggcgagggcuccugcaaccccgucaccgucgacggcgccaacggcgucaagggcuucuccuacaaguacggcaacggcgucuggaucggccgcaccaaguccaaccgccuccgcaagggcuucgagaugaucugggaccccaacggcuggaccaacaccgacuccgacuucuccgucaagcaggacgucgucgccaucaccgacugguccggcuacuccggcuccuucguccagcaccccgagcucaccggccucggcugcauccgccccugcuucugggucgagcucguccgcggccucccccgcgagaacaccaccaucuggaccuccggcuccuccaucuccuucugcggcgucaacuccgacaccgccaacugguccuggcccgacggcgccgagcuccccuucaccaucgacaaguga

SEQ ID NO: 114077 - RNA, 1413 nt, Artificial Sequence
  derived and/or modified CDS sequence (opt2) from neuraminidase__InfluenzaA__ADC45771
augaaccccaaccagaagaucaucaccaucggcuccaucuccaucgccaucggcaucaucucccucaugcuccagaucggcaacaucaucuccaucugggccucccacuccauccagaccggcucccagaacaacaccggcaucugcaaccagcgcaucaucaccuacgagaacuccaccugggucaaccacaccuacgucaacaucaacaacaccaacgucgucgccggcgaggacaagaccuccgucacccucgccggcaacuccucccucugcuccaucuccggcugggccaucuacaccaaggacaacuccauccgcaucggcuccaagggcgacgucuucgucauccgcgagcccuucaucuccugcucccaccucgagugccgcaccuucuuccucacccagggcgcccuccucaacgacaagcacuccaacggcaccgucaaggaccgcucccccuaccgcgcccucauguccugcccccucggcgaggcccccucccccuacaacuccaaguucgaguccgucgccugguccgccuccgccugccacgacggcaugggcuggcucaccaucggcaucuccggccccgacaacggcgccgucgccguccucaaguacaacggcaucaucaccggcaccaucaaguccuggaagaagcagauccuccgcacccaggaguccgagugcgucugcaugaacggcuccugcuucaccaucaugaccgacggccccuccaacaaggccgccuccuacaagaucuucaagaucgagaagggcaaggucaccaaguccaucgagcucaacgcccccaacuucuacuacgaggagugcuccugcuaccccgacaccggcaucgucaugugcgucugccgcgacaacuggcacggcuccaaccgccccugggucuccuucaaccagaaccucgacuaccagaucggcuacaucugcuccggcgucuucggcgacaacccccgccccgaggacggcgagggcuccugcaaccccgucaccgucgacggcgccaacggcgucaagggcuucuccuacaaguacggcaacggcgucuggaucggccgcaccaaguccaaccgccuccgcaagggcuucgagaugaucugggaccccaacggcuggaccaacaccgacuccgacuucuccaugaagcaggacgucgucgccaucaccgacugguccggcuacuccggcuccuucguccagcaccccgagcucaccggccucgacugcauccgccccugcuucugggucgagcucguccgcggccucccccgcgagaacaccaccaucuggaccuccggcuccuccaucuccuucugcggcgucaacuccgacaccgccaacugguccuggcccgacggcgccgagcuccccuucaccaucgacaaguga

SEQ ID NO: 114078 - RNA, 1413 nt, Artificial Sequence
  derived and/or modified CDS sequence (opt2) from neuraminidase__InfluenzaA__ADC45782
augaaccccaaccagaagaucaucaccaucggcuccaucuccaucgccaucggcaucaucucccucaugcuccagaucggcaacaucaucuccaucugggccucccacuccauccagaccggcucccagaacaacaccggcaucugcaaccagcgcaucaucaccuacgagaacuccaccugggucaaccacaccuacgucaacaucaacaacaccaacgucgucgccggcgaggacaagaccuccgucacccucgccggcaacuccucccucugcuccaucuccggcugggccaucuacaccaaggacaacuccauccgcaucggcuccaagggcgacgucuucgucauccgcgagcccuucaucuccugcucccaccucgagugccgcaccuucuuccucacccagggcgcccuccucaacgacaagcacuccaaccgcaccgucaaggaccgcucccccuaccgcgcccucauguccugcccccucggcgaggcccccucccccuacaacuccaaguucgaguccgucgccugguccgccuccgccugccacgacggcaugggcuggcucaccaucggcaucuccggccccgacaacggcgccgucgccguccucaaguacaacggcaucaucaccggcaccaucaaguccuggaagaagcagauccuccgcacccaggaguccgagugcgucugcgucaacggcuccugcuucaccaucaugaccgacggccccuccaacaaggccgccuccuacaagaucuucaagaucgagaagggcaaggucaccaaguccaucgagcucaacgcccccaacuucuacuacgaggagugcuccugcuaccccgacaccggcaucgucaugugcgucugccgcgacaacuggcacggcuccaaccgccccugggucuccuucaaccagaaccucgacuaccagaucggcuacaucugcuccggcgucuucggcgacaacccccgccccgaggacggcgagggcuccugcaaccccgucaccgucgacggcgccaacggcgucaagggcuucuccuacaaguacggcaacggcgucuggaucggccgcaccaaguccaaccgccuccgcaagggcuucgagaugaucugggaccccaacggcuggaccaacaccgacuccgacuucuccgucaagcaggacgucgucgccaucaccgacugguccggcuacuccggcuccuucguccagcaccccgagcucaccggccucgacugcauccgccccugcuucugggucgagcucguccgcggccucccccgcgagaacaccaccaucuggaccuccggcuccuccaucuccuucugcggcgucaacuccgacaccgccaacugguccuggcccgacggcgccgagcuccccuucaccaucgacaaguga

SEQ ID NO: 114079 - RNA, 1413 nt, Artificial Sequence
  derived and/or modified CDS sequence (opt2) from neuraminidase__InfluenzaA__ADC45804
augaaccccaaccagaagaucaucaccaucggcuccaucuccaucgccaucggcaucaucucccucaugcuccagaucggcaacaucaucuccaucugggccucccacuccauccagaccggcucccagaacaacaccggcaucugcaaccagcgcaucaucaccuacgagaacuccaccugggucaaccacaccuacgucaacaucaacaacaccaacgucgucgccggcgaggacaagaccuccgucacccucgccggcaacuccucccucugcuccaucuccggcugggccaucuacaccaaggacaacuccauccgcaucggcuccaagggcgacgucuucgucauccgcgagcccuucaucuccugcucccaccucgagugccgcaccuucuuccucacccagggcgcccuccucaacgacaagcacuccaacggcaccgucaaggaccgcucccccuaccgcgcccucauguccugcccccucggcgaggcccccucccccuacaacuccaaguucgaguccgucgccugguccgccuccgccugccacgacggcaugggcuggcucaccaucggcaucuccggccccgacaacggcgccgucgccguccucaaguacaacggcaucaucaccggcaccaucaaguccuggaagaagcagauccuccgcacccaggaguccgagugcgucugcaugaacggcuccugcuucaccaucaugaccgacggccccuccaacaaggccgccuccuacaagaucuucaagaucgagaagggcaagaucaccaaguccaucgagcucaacgcccccaacuucuacuacgaggagugcuccugcuaccccgacaccggcaucgucaugugcgucugccgcgacaacuggcacggcuccaaccgccccugggucuccuucaaccagaaccucgacuaccagaucggcuacaucugcuccggcgucuucggcgacaacccccgccccgaggacggcgagggcuccugcaaccccgucaccgucgacggcgccaacggcgucaagggcuucuccuacaaguacggcaacggcgucuggaucggccgcaccaaguccaaccgccuccgcaagggcuucgagaugaucugggaccccaacggcuggaccaacaccgacuccgacuucuccgucaagcaggacgucgucgccaucaccgacugguccggcuacuccggcuccuucguccagcaccccgagcucaccggccucgacugcauccgccccugcuucugggucgagcucguccgcggccucccccgcgagaacaccaccaucuggaccuccggcuccuccaucuccuucugcggcgucaacuccgacaccgccaacugguccuggcccgacggcgccgagcuccccuucaccaucgacaaguga

SEQ ID NO: 114080 - RNA, 1413 nt, Artificial Sequence
  derived and/or modified CDS sequence (opt2) from neuraminidase__InfluenzaA__ADC45815
augaaccccaaccagaagaucaucaccaucggcuccaucuccaucgccaucggcaucaucucccucaugcuccagaucggcaacaucaucuccaucugggccucccacuccauccagaccggcucccagaacaacaccggcaucugcaaccagcgcaucaucaccuacgagaacuccaccugggucaaccacaccuacgucaacaucaacaacaccaacgucgucgccggcgaggacaagaccuccgucacccucgccggcaacuccucccucugcuccaucuccggcugggccaucuacaccaaggacaacuccauccgcaucggcuccaagggcgacgucuucgucauccgcgagcccuucaucuccugcucccaccucgagugccgcaccuucuuccucacccagggcgcccuccucaacgacaagcacuccaacggcaccgucaaggaccgcucccccuaccgcgcccucauguccugcccccucggcgaggcccccucccccuacaacuccaaguucgaguccgucgccugguccgccuccgccugccacgacggcaugggcuggcucaccaucggcaucuccggccccgacaacggcgccgucgccguccucaaguacaacggcaucaucaccggcaccgucaaguccuggaagaagcagauccuccgcacccaggaguccgagugcgucugcaugaacggcuccugcuucaccaucaugaccgacggccccuccaacaaggccgccuccuacaagaucuucaagaucgagaagggcaaggucaccaaguccaucgagcucaacgcccccaacuucuacuacgaggagugcuccugcuaccccgacaccggcauggucaugugcgucugccgcgacaacuggcacggcuccaaccgccccugggucuccuucaaccagaaccucgacuaccagaucggcuacaucugcuccggcgucuucggcgacaacccccgccccgaggacggcgagggcuccugcaaccccgucaccgucgacggcgccaacggcgucaagggcuucuccuacaaguacggcaacggcgucuggaucggccgcaccaaguccaaccgccuccgcaagggcuucgagaugaucugggaccccaacggcuggaccaacaccgacuccgacuucuccgucaagcaggacgucgucgccaucaccgacugguccggcuacuccggcuccuucguccagcaccccgagcucaccggccucgacugcauccgccccugcuucugggucgagcucguccgcggccucccccgcgagaacaccaccaucuggaccuccggcuccuccaucuccuucugcggcgucaacuccgacaccgccaacugguccuggcccgacggcgccgagcuccccuucaccaucgacaaguga

SEQ ID NO: 114081 - RNA, 1413 nt, Artificial Sequence; identical to SEQ ID NO: 113497
  derived and/or modified CDS sequence (opt2) from neuraminidase__InfluenzaA__ADC45837

SEQ ID NO: 114082 - RNA, 1413 nt, Artificial Sequence; identical to SEQ ID NO: 113497
  derived and/or modified CDS sequence (opt2) from neuraminidase__InfluenzaA__ADC45848

SEQ ID NO: 114083 - RNA, 1410 nt, Artificial Sequence; identical to SEQ ID NO: 112774
  derived and/or modified CDS sequence (opt2) from neuraminidase__InfluenzaA__ADC53559

SEQ ID NO: 114084 - RNA, 1410 nt, Artificial Sequence; identical to SEQ ID NO: 112774
  derived and/or modified CDS sequence (opt2) from neuraminidase__InfluenzaA__ADD14088

SEQ ID NO: 114085 - RNA, 1410 nt, Artificial Sequence; identical to SEQ ID NO: 112774
  derived and/or modified CDS sequence (opt2) from neuraminidase__InfluenzaA__ADD14090

SEQ ID NO: 114086 - RNA, 1410 nt, Artificial Sequence; identical to SEQ ID NO: 112774
  derived and/or modified CDS sequence (opt2) from neuraminidase__InfluenzaA__ADD14094

SEQ ID NO: 114087 - RNA, 1410 nt, Artificial Sequence; identical to SEQ ID NO: 112774
  derived and/or modified CDS sequence (opt2) from neuraminidase__InfluenzaA__ADD14096

SEQ ID NO: 114088 - RNA, 1410 nt, Artificial Sequence; identical to SEQ ID NO: 112774
  derived and/or modified CDS sequence (opt2) from neuraminidase__InfluenzaA__ADD14098

SEQ ID NO: 114089 - RNA, 1410 nt, Artificial Sequence; identical to SEQ ID NO: 112774
  derived and/or modified CDS sequence (opt2) from neuraminidase__InfluenzaA__ADD14100

SEQ ID NO: 114090 - RNA, 1410 nt, Artificial Sequence; identical to SEQ ID NO: 112774
  derived and/or modified CDS sequence (opt2) from neuraminidase__InfluenzaA__ADD14102

SEQ ID NO: 114091 - RNA, 1410 nt, Artificial Sequence; identical to SEQ ID NO: 112774
  derived and/or modified CDS sequence (opt2) from neuraminidase__InfluenzaA__ADD14104

SEQ ID NO: 114092 - RNA, 1410 nt, Artificial Sequence; identical to SEQ ID NO: 112774
  derived and/or modified CDS sequence (opt2) from neuraminidase__InfluenzaA__ADD14106

SEQ ID NO: 114093 - RNA, 1410 nt, Artificial Sequence; identical to SEQ ID NO: 112774
  derived and/or modified CDS sequence (opt2) from neuraminidase__InfluenzaA__ADD14110

SEQ ID NO: 114094 - RNA, 1410 nt, Artificial Sequence; identical to SEQ ID NO: 112774
  derived and/or modified CDS sequence (opt2) from neuraminidase__InfluenzaA__ADD14112

SEQ ID NO: 114095 - RNA, 1410 nt, Artificial Sequence; identical to SEQ ID NO: 113744
  derived and/or modified CDS sequence (opt2) from neuraminidase__InfluenzaA__ADD14114

SEQ ID NO: 114096 - RNA, 1410 nt, Artificial Sequence; identical to SEQ ID NO: 112774
  derived and/or modified CDS sequence (opt2) from neuraminidase__InfluenzaA__ADD14116

SEQ ID NO: 114097 - RNA, 1410 nt, Artificial Sequence; identical to SEQ ID NO: 112774
  derived and/or modified CDS sequence (opt2) from neuraminidase__InfluenzaA__ADD14118

SEQ ID NO: 114098 - RNA, 1410 nt, Artificial Sequence; identical to SEQ ID NO: 112774
  derived and/or modified CDS sequence (opt2) from neuraminidase__InfluenzaA__ADD14120

SEQ ID NO: 114099 - RNA, 1410 nt, Artificial Sequence; identical to SEQ ID NO: 112774
  derived and/or modified CDS sequence (opt2) from neuraminidase__InfluenzaA__ADD14122

SEQ ID NO: 114100 - RNA, 1410 nt, Artificial Sequence; identical to SEQ ID NO: 112774
  derived and/or modified CDS sequence (opt2) from neuraminidase__InfluenzaA__ADD14124

SEQ ID NO: 114101 - RNA, 1410 nt, Artificial Sequence; identical to SEQ ID NO: 113833
  derived and/or modified CDS sequence (opt2) from neuraminidase__InfluenzaA__ADD14126

SEQ ID NO: 114102 - RNA, 1410 nt, Artificial Sequence; identical to SEQ ID NO: 112774
  derived and/or modified CDS sequence (opt2) from neuraminidase__InfluenzaA__ADD14128

SEQ ID NO: 114103 - RNA, 1410 nt, Artificial Sequence; identical to SEQ ID NO: 112774
  derived and/or modified CDS sequence (opt2) from neuraminidase__InfluenzaA__ADD14130

SEQ ID NO: 114104 - RNA, 1410 nt, Artificial Sequence; identical to SEQ ID NO: 112774
  derived and/or modified CDS sequence (opt2) from neuraminidase__InfluenzaA__ADD14132

SEQ ID NO: 114105 - RNA, 1410 nt, Artificial Sequence; identical to SEQ ID NO: 112774
  derived and/or modified CDS sequence (opt2) from neuraminidase__InfluenzaA__ADD14134

SEQ ID NO: 114106 - RNA, 1410 nt, Artificial Sequence; identical to SEQ ID NO: 112774
  derived and/or modified CDS sequence (opt2) from neuraminidase__InfluenzaA__ADD14136

SEQ ID NO: 114107 - RNA, 1410 nt, Artificial Sequence; identical to SEQ ID NO: 112774
  derived and/or modified CDS sequence (opt2) from neuraminidase__InfluenzaA__ADD14138

SEQ ID NO: 114108 - RNA, 1410 nt, Artificial Sequence; identical to SEQ ID NO: 112774
  derived and/or modified CDS sequence (opt2) from neuraminidase__InfluenzaA__ADD14142

SEQ ID NO: 114109 - RNA, 1410 nt, Artificial Sequence; identical to SEQ ID NO: 112774
  derived and/or modified CDS sequence (opt2) from neuraminidase__InfluenzaA__ADD14144

SEQ ID NO: 114110 - RNA, 1410 nt, Artificial Sequence; identical to SEQ ID NO: 112774
  derived and/or modified CDS sequence (opt2) from neuraminidase__InfluenzaA__ADD14146

SEQ ID NO: 114111 - RNA, 1410 nt, Artificial Sequence; identical to SEQ ID NO: 112774
  derived and/or modified CDS sequence (opt2) from neuraminidase__InfluenzaA__ADD14148

SEQ ID NO: 114112 - RNA, 1410 nt, Artificial Sequence
  derived and/or modified CDS sequence (opt2) from neuraminidase__InfluenzaA__ADD14150
augaaccccaaccagaagaucaucaccaucggcuccgucugcaugaccaucggcauggccaaccucauccuccagaucggcaacaucaucuccaucuggaucucccacuccauccagcucggcaaccagaaccagaucgagaccugcaaccaguccgucaucaccuacgagaacaacaccugggucaaccagaccuacgucaacaucuccaacaccaacuucgccgccggccaguccgucgucuccgucaagcucgccggcaacuccucccucugccccgucuccggcugggccaucuacuccaaggacaacuccauccgcaucggcuccaagggcgacgucuucgucauccgcgagcccuucaucuccugcuccccccucgagugccgcaccuucuuccucacccagggcgcccuccucaacgacaagcacuccaacggcaccaucaaggaccgcucccccuaccgcacccucauguccugccccaucggcgagguccccucccccuacaacucccgcuucgaguccgucgccugguccgccuccgccugccacgacggcaucaacuggcucaccaucggcaucuccggccccgacaacggcgccgucgccguccucaaguacaacggcaucaucaccgacaccaucaaguccuggcgcaacaacauccuccgcacccaggaguccgagugcgccugcgucaacggcuccugcuucaccgucaugaccgacggccccuccgacggccaggccuccuacaagaucuuccgcaucgagaagggcaagaucgucaaguccgucgagaugaacgcccccaacuaccacuacgaggagugcuccugcuaccccgacuccuccgagaucaccugcgucugccgcgacaacuggcacggcuccaaccgccccugggucuccuucaaccagaaccucgaguaccagaucggcuacaucugcuccggcaucuucggcgacaacccccgccccaacgacaagaccggcuccugcggccccgucuccuccaacggcgccaacggcgucaagggcuucuccuucaaguacggcaacggcgucuggaucggccgcaccaaguccaucuccucccgcaacggcuucgagaugaucugggaccccaacggcuggaccggcaccgacgacaacuucuccaucaagcaggacaucgucggcaucaacgagugguccggcuacuccggcuccuucguccagcaccccgagcucaccggccucgacugcauccgccccugcuucugggucgagcucauccgcggccgccccaaggagaacaccaucuggaccuccggcuccuccaucuccuucugcggcgucaacuccgacaccgucggcugguccuggcccgacggcgccgagcuccccuucaccaucgacaaguga

SEQ ID NO: 114113 - RNA, 1410 nt, Artificial Sequence; identical to SEQ ID NO: 112774
  derived and/or modified CDS sequence (opt2) from neuraminidase__InfluenzaA__ADD14152

SEQ ID NO: 114114 - RNA, 1410 nt, Artificial Sequence
  derived and/or modified CDS sequence (opt2) from neuraminidase__InfluenzaA__ADD14154
augaaccccaaccagaagaucaucaccaucggcuccgucugcaugaccaucggcauggccaaccucauccuccagaucggcaacaucaucuccaucuggaucucccacuccauccagcucggcaaccagaaccagaucgagaccugcaaccaguccgucaucaccuacgagaacaacaccugggucaaccagaccuacgucaacaucuccaucaccaacuucgccgccggccaguccgucgucuccgucaagcucgccggcaacuccucccucugccccgucuccggcugggccaucuacuccaaggacaacuccauccgcaucggcuccaagggcgacgucuucgucauccgcgagcccuucaucuccugcuccccccucgagugccgcaccuucuuccucacccagggcgcccuccucaacgacaagcacuccaacggcaccaucaaggaccgcucccccuaccgcacccucauguccugccccaucggcgagguccccucccccuacaacucccgcuucgaguccgucgccugguccgccuccgccugccacgacggcaucaacuggcucaccaucggcaucuccggccccgacaacggcgccgucgccguccucaaguacaacggcaucaucaccgacaccaucaaguccuggcgcaacaacauccuccgcacccaggaguccgagugcgccugcgucaacggcuccugcuucaccgucaugaccgacggccccuccgacggccaggccuccuacaagaucuuccgcaucgagaagggcaagaucgucaaguccgucgagaugaacgcccccaacuaccacuacgaggagugcuccugcuaccccgacuccuccgagaucaccugcgucugccgcgacaacuggcacggcuccaaccgccccugggucuccuucaaccagaaccucgaguaccagaucggcuacaucugcuccggcaucuucggcgacaacccccgccccaacgacaagaccggcuccugcggccccgucuccuccaacggcgccaacggcgucaagggcuucuccuucaaguacggcaacggcgucuggaucggccgcaccaaguccaucuccucccgcaacggcuucgagaugaucugggaccccaacggcuggaccggcaccgacaacaacuucuccaucaagcaggacaucgucggcaucaacgagugguccggcuacuccggcuccuucguccagcaccccgagcucaccggccucgacugcauccgccccugcuucugggucgagcucauccgcggccgccccaaggagaacaccaucuggaccuccggcuccuccaucuccuucugcggcgucaacuccgacaccgucggcugguccuggcccgacggcgccgagcuccccuucaccaucgacaaguga

SEQ ID NO: 114115 - RNA, 1410 nt, Artificial Sequence; identical to SEQ ID NO: 112774
  derived and/or modified CDS sequence (opt2) from neuraminidase__InfluenzaA__ADD14156

SEQ ID NO: 114116 - RNA, 1410 nt, Artificial Sequence; identical to SEQ ID NO: 112774
  derived and/or modified CDS sequence (opt2) from neuraminidase__InfluenzaA__ADD14158

SEQ ID NO: 114117 - RNA, 1410 nt, Artificial Sequence; identical to SEQ ID NO: 112774
  derived and/or modified CDS sequence (opt2) from neuraminidase__InfluenzaA__ADD14164

SEQ ID NO: 114118 - RNA, 1410 nt, Artificial Sequence; identical to SEQ ID NO: 112774
  derived and/or modified CDS sequence (opt2) from neuraminidase__InfluenzaA__ADD14174

SEQ ID NO: 114119 - RNA, 1410 nt, Artificial Sequence; identical to SEQ ID NO: 112774
  derived and/or modified CDS sequence (opt2) from neuraminidase__InfluenzaA__ADD14184

SEQ ID NO: 114120 - RNA, 1410 nt, Artificial Sequence; identical to SEQ ID NO: 112774
  derived and/or modified CDS sequence (opt2) from neuraminidase__InfluenzaA__ADD14194

SEQ ID NO: 114121 - RNA, 1410 nt, Artificial Sequence; identical to SEQ ID NO: 113128
  derived and/or modified CDS sequence (opt2) from neuraminidase__InfluenzaA__ADD14204

SEQ ID NO: 114122 - RNA, 1410 nt, Artificial Sequence
  derived and/or modified CDS sequence (opt2) from neuraminidase__InfluenzaA__ADD21449
augaaccccaaccagcgcaucaucaccaucggcaccgccugccucaucaucggcaucgucucccuccuccuccagaucggcaacaucgucucccucuggaucucccacuccauccagaccggcgagaagaaccacuccgagaccugcaaccgcaacaccaucaccuacgagaacuccaccugggucaaccagaccuacgucaacaucuccaacaucaacaucgccggcggccagggcgucgccuccaucauccucgccggcaacuccucccucugccccgucaacggcugggccaucuacuccaaggacaacuccauccgcaucggcuccaagggcgacaucuucgucauccgcgagcccuucaucuccugcucccaccucgagugccgcaccuucuuccucacccagggcgcccuccucaacgaccgccacuccaacggcaccgucaaggaccgcucccccuaccgcacccucauguccugccccaucggcgaggcccccucccccuacaacuccaaguucgaguccgucgccugguccgccuccgccugccacgacggcaugggcuggcucaccaucggcaucuccggccccgacaacggcgccgucgccguccucaaguacaacggcaucaucaccgacaccaucaaguccuggcgcaaccgcauccuccgcacccaggaguccgagugcgucugcaucaacggcuccugcuucaccaucaugaccgacggccccuccaacggccaggccuccuacaagaucuucaagauggagcgcggcaagaucaucaaguccgucgagcucgacgcccccaacuaccacuacgaggagugcuccugcuaccccgacaccggcaaggucgucugcgucugccgcgacaacuggcacgccuccaaccgccccugggucuccuucgaccagaaccucgacuaccagaucggcuacaucuccuccggcgucuucggcgacaacccccgcuccaacgacggcaagggcaacugcggccccguccucuccaacggcgccaacggcgucaagggccucuccuuccgcuacggcaacggcgucuggaucggccgcaccaaguccaccaacucccgcuccggcuucgagaugaucugggaccccaacggcuggaccgagaccgacuccaacuucuccaugaagcaggacaucaucgcccucaccgacugguccggcuacuccggcuccuucguccagcaccccgagcucaccggcaugaacugcauccgccccugcuucugggucgagcucauccgcggccagcccaagcaguccaccaucuggaccuccggcuccuccaucuccuucugcggcgucgacuccgagaccgccuccugguccuggcccgacggcgccgaccuccccuucaccaucgacaaguga

SEQ ID NO: 114123 - RNA, 1413 nt, Artificial Sequence
  derived and/or modified CDS sequence (opt2) from neuraminidase__InfluenzaA__ADD21469
augaaccccaaccagaagaucaucaccaucggcuccaucuccaucgccaucggcaucaucucccucaugcuccagaucggcaacaucaucuccgucugggccucccacuccauccagaccggcucccagaaccacaccggcaucugcaaccagcgcaucaucaccuacgagaacuccaccugggucaaccacaccuacgucaacaucaacaacaccaacgucgucgccggcaaggacaagaccuccgucacccucgccggcaacuccucccucugcuccaucuccggcugggccaucuacaccaaggacaacuccauccgcaucggcuccaagggcgacgucuucgucauccgcgagcccuucaucuccugcucccaccucgagugccgcaccuucuuccucacccagggcgcccuccucaacgacaagcacuccaacggcaccgucaaggaccgcucccccuaccgcgcccucauguccugcccccucggcgaggcccccucccccuacaacuccaaguucgaguccgucgccugguccgccuccgccugccacgacggcaugggcuggcucaccaucggcaucuccggccccgacaacggcgccgucgccguccucaaguacaacggcaucaucaccgagaccaucaaguccuggaagaagcgcaugcuccgcacccaggaguccgagugcaucugcgucaacggcuccugcuucaccaucaugaccgacggccccuccaacggcgccgccuccuacaagaucuucaagaucgagaagggcaaggucaccaaguccaucgagcucaacgcccccaacuuccacuacgaggagugcuccugcuaccccgacaccggcaccgucaugugcgucugccgcgacaacuggcacggcuccaaccgccccugggucuccuucaaccagaaccucgacuaccagaucggcuacaucugcuccggcgucuucggcgacaacccccgccccaaggacggcgagggcuccugcaaccccgucaccgucgacggcgccgacggcgucaagggcuucuccuacaaguacggcaacggcgucuggaucggccgcaccaaguccaaccgccuccgcaagggcuucgagaugaucugggaccccaacggcuggaccgacaccgacuccaacuucuccgucaagcaggacgucgucgccaucaccgacugguccggcuacuccggcuccuucguccagcaccccgagcucaccggccucgacugcauccgccccugcuucugggucgagcucguccgcggccucccccgcgagaacaccaccaucuggaccuccggcuccuccaucuccuucugcggcgucaacuccgacaccgccaacugguccuggcccgacggcgccgagcuccccuucaccaucgacaaguga

SEQ ID NO: 114124 - RNA, 1410 nt, Artificial Sequence; identical to SEQ ID NO: 112774
  derived and/or modified CDS sequence (opt2) from neuraminidase__InfluenzaA__ADD21747

SEQ ID NO: 114125 - RNA, 1410 nt, Artificial Sequence
  derived and/or modified CDS sequence (opt2) from neuraminidase__InfluenzaA__ADD21767
augaaccccaaccagaagaucaucaucaucggcuccgucugcaugaccaucggcauggccaaccucauccuccagaucggcaacaucaucuccaucuggaucucccacuccauccagcucggcaaccagaaccagaucgagaccugcaaccaguccgucaucaccuacgagaacaacaccugggucaaccagaccuacgucaacaucuccaacaccaacuucgccgccggccaguccgucgucuccgucaagcucgccggcaacuccucccucugccccgucuccggcugggccaucuacuccaaggacaacuccauccgcaucggcuccaagggcgacgucuucgucauccgcgagcccuucaucuccugcuccccccucgagugccgcaccuucuuccucacccagggcgcccuccucaacgacaagcacuccaacggcaccaucaaggaccgcucccccuaccgcacccucauguccugccccaucggcgagguccccucccccuacaacucccgcuucgaguccgucgccugguccgccuccgccugccacgacggcaucaacuggcucaccaucggcaucuccggccccgacaacggcgccgucgccguccucaaguacaacggcaucaucaccgacaccaucaaguccuggcgcaacaacauccuccgcacccaggaguccgagugcgccugcgucaacggcuccugcuucaccgucaugaccgacggccccuccgacggccaggccuccuacaagaucuuccgcaucgagaagggcaagaucgucaaguccgucgagaugaacgcccccaacuaccacuacgaggagugcuccugcuaccccgacuccuccgagaucaccugcgucugccgcgacaacuggcacggcuccaaccgccccugggucuccuucaaccagaaccucgaguaccagaucggcuacaucugcuccggcaucuucggcgacaacccccgccccaacgacaagaccggcuccugcggccccgucuccuccaacggcgccaacggcgucaagggcuucuccuucaaguacggcaacggcgucuggaucggccgcaccaaguccaucuccucccgcaacggcuucgagaugaucugggaccccaacggcuggaccggcaccgacaacaacuucuccaucaagcaggacaucgucggcaucaacgagugguccggcuacuccggcuccuucguccagcaccccgagcucaccggccucgacugcauccgccccugcuucugggucgagcucauccgcggccgccccaaggagaacaccaucuggaccuccggcuccuccaucuccuucugcggcgucaacuccgacaccgucggcugguccuggcccgacggcgccgagcuccccuucaccaucgacaaguga

SEQ ID NO: 114126 - RNA, 1410 nt, Artificial Sequence
  derived and/or modified CDS sequence (opt2) from neuraminidase__InfluenzaA__ADD21777
augaaccccaaccagaagaucaucaccaucggcuccgucugcaugaccaucggcauggccaaccucauccuccagaucggcaacaucaucuccaucuggaucucccacuccauccagcucggcaaccagaaccagaucgagaccugcaaccaguccgucaucaccuacgagaacaacaccugggucaaccagaccuacgucaacaucuccaacaccaacuucgccgccggccaguccgucgucuccgucaagcucgccggcaacuccucccucugccccgucuccggcugggccaucuacuccaaggacaacuccauccgcaucggcuccaagggcgacgucuucgucauccgcgagcccuucaucuccugcuccccccucgagugccgcaccuucuuccucacccagggcgcccuccucaacgacaagcacuccaacggcaccaucaaggaccgcucccccuaccgcacccucauguccugccccaucggcgagguccccucccccuacaacucccgcuucgaguccgucgccugguccgccuccgccugccacgacggcaucaacuggcucaccaucggcaucuccggccccgacaacggcgccgucgccgucaucaaguacaacggcaucaucaccgacaccaucaaguccuggcgcaacaacauccuccgcacccaggaguccgagugcgccugcgucaacggcuccugcuucaccgucaugaccgacggccccuccgacggccaggccuccuacaagaucuuccgcaucgagaagggcaagaucgucaaguccgucgagaugaacgcccccaacuaccacuacgaggagugcuccugcuaccccgacuccuccgagaucaccugcgucugccgcgacaacuggcacggcuccaaccgccccugggucuccuucaaccagaaccucgaguaccagaucggcuacaucugcuccggcaucuucggcgacaacccccgccccaacgacaagaccggcuccugcggccccgucuccuccaacggcgccaacggcgucaagggcuucuccuucaaguacggcaacggcgucuggaucggccgcaccaaguccaucuccucccgcaacggcuucgagaugaucugggaccccaacggcuggaccggcaccgacaacaacuucuccaucaagcaggacaucgucggcaucaacgagugguccggcuacuccggcuccuucguccagcaccccgagcucaccggccucgacugcauccgccccugcuucugggucgagcucauccgcggccgccccaaggagaacaccaucuggaccuccggcuccuccaucuccuucugcggcgucaacuccgacaccgucggcugguccuggcccgacggcgccgagcuccccuucaccaucgacaaguga

SEQ ID NO: 114127 - RNA, 1410 nt, Artificial Sequence; identical to SEQ ID NO: 112774
  derived and/or modified CDS sequence (opt2) from neuraminidase__InfluenzaA__ADD21787

SEQ ID NO: 114128 - RNA, 1410 nt, Artificial Sequence; identical to SEQ ID NO: 112774
  derived and/or modified CDS sequence (opt2) from neuraminidase__InfluenzaA__ADD21797

SEQ ID NO: 114129 - RNA, 1410 nt, Artificial Sequence; identical to SEQ ID NO: 112774
  derived and/or modified CDS sequence (opt2) from neuraminidase__InfluenzaA__ADD21817

SEQ ID NO: 114130 - RNA, 1410 nt, Artificial Sequence; identical to SEQ ID NO: 112774
  derived and/or modified CDS sequence (opt2) from neuraminidase__InfluenzaA__ADD21827

SEQ ID NO: 114131 - RNA, 1410 nt, Artificial Sequence; identical to SEQ ID NO: 112774
  derived and/or modified CDS sequence (opt2) from neuraminidase__InfluenzaA__ADD21837

SEQ ID NO: 114132 - RNA, 1410 nt, Artificial Sequence; identical to SEQ ID NO: 112774
  derived and/or modified CDS sequence (opt2) from neuraminidase__InfluenzaA__ADD21847

SEQ ID NO: 114133 - RNA, 1410 nt, Artificial Sequence; identical to SEQ ID NO: 112774
  derived and/or modified CDS sequence (opt2) from neuraminidase__InfluenzaA__ADD21857

SEQ ID NO: 114134 - RNA, 1410 nt, Artificial Sequence; identical to SEQ ID NO: 112774
  derived and/or modified CDS sequence (opt2) from neuraminidase__InfluenzaA__ADD21867

SEQ ID NO: 114135 - RNA, 1410 nt, Artificial Sequence; identical to SEQ ID NO: 112774
  derived and/or modified CDS sequence (opt2) from neuraminidase__InfluenzaA__ADD21877

SEQ ID NO: 114136 - RNA, 1410 nt, Artificial Sequence; identical to SEQ ID NO: 112774
  derived and/or modified CDS sequence (opt2) from neuraminidase__InfluenzaA__ADD21897

SEQ ID NO: 114137 - RNA, 1410 nt, Artificial Sequence; identical to SEQ ID NO: 112774
  derived and/or modified CDS sequence (opt2) from neuraminidase__InfluenzaA__ADD22494

SEQ ID NO: 114138 - RNA, 1410 nt, Artificial Sequence; identical to SEQ ID NO: 112774
  derived and/or modified CDS sequence (opt2) from neuraminidase__InfluenzaA__ADD22504

SEQ ID NO: 114139 - RNA, 1410 nt, Artificial Sequence; identical to SEQ ID NO: 112774
  derived and/or modified CDS sequence (opt2) from neuraminidase__InfluenzaA__ADD22514

SEQ ID NO: 114140 - RNA, 1410 nt, Artificial Sequence; identical to SEQ ID NO: 112774
  derived and/or modified CDS sequence (opt2) from neuraminidase__InfluenzaA__ADD22524

SEQ ID NO: 114141 - RNA, 1410 nt, Artificial Sequence
  derived and/or modified CDS sequence (opt2) from neuraminidase__InfluenzaA__ADD22534
augaaccccaaccagaagaucaucaccaucggcuccgucugcaugaccaucggcauggccaaccucauccuccagaucggcaacaucaucuccaucuggaucucccacuccauccagcucggcaaccagaaccagaucgagaccugcaaccaguccgucaucaccuacgagaacaacaccugggucaaccagaccuacgucaacaucuccaacaccaacuucgccgccggccaguccgucgucuccgucaagcucgccggcaacuccucccucugccccgucuccggcugggccaucuacuccaaggacaacuccauccgcaucggcuccaagggcgacgucuucgucauccgcgagcccuucaucuccugcuccccccucgagugccgcaccuucuuccucacccagggcgcccuccucaacgacaagcacuccaacggcaccaucaaggaccgcucccccuaccgcacccucauguccugccccaucggcgagguccccucccccuacaacucccgcuucgaguccgucgccugguccgccuccgccugccacgacggcaucaacuggcucaccaucggcaucuccggccccgacaacggcgccgucgccguccucaaguacaacggcaucaucaccgacaccaucaaguccuggcgcaacaacauccuccgcacccaggaguccgagugcgccugcgucaacggcuccugcuucaccgucaugaccgacggccccuccgacggccaggccuccuacaagaucuuccgcaucgagaagggcaagaucgucaaguccgucgagaugaacgcccccaacuaccacuacgaggagugcuccugcuaccccgacuccuccgagaucaccugcgucugccgcgacaacuggcacggcuccaaccgccccugggucuccuucaaccagaaccucgaguaccagaucggcuacaucugcuccggcaucuucggcgacuccccccgccccaacgacaagaccggcuccugcggccccgucuccuccaacggcgccaacggcgucaagggcuucuccuucaaguacggcaacggcgucuggaucggccgcaccaaguccaucuccucccgcaacggcuucgagaugaucugggaccccaacggcuggaccggcaccgacaacaacuucuccaucaagcaggacaucgucggcaucaacgagugguccggcuacuccggcuccuucguccagcaccccgagcucaccggccucgacugcauccgccccugcuucugggucgagcucauccgcggccgccccaaggagaacaccaucuggaccuccggcuccuccaucuccuucugcggcgucaacuccgacaccgucggcugguccuggcccgacggcgccgagcuccccuucaccaucgacaaguga

SEQ ID NO: 114142 - RNA, 1410 nt, Artificial Sequence; identical to SEQ ID NO: 112774
  derived and/or modified CDS sequence (opt2) from neuraminidase__InfluenzaA__ADD22544

SEQ ID NO: 114143 - RNA, 1410 nt, Artificial Sequence; identical to SEQ ID NO: 112774
  derived and/or modified CDS sequence (opt2) from neuraminidase__InfluenzaA__ADD22557

SEQ ID NO: 114144 - RNA, 1410 nt, Artificial Sequence; identical to SEQ ID NO: 112774
  derived and/or modified CDS sequence (opt2) from neuraminidase__InfluenzaA__ADD22567

SEQ ID NO: 114145 - RNA, 1410 nt, Artificial Sequence; identical to SEQ ID NO: 112774
  derived and/or modified CDS sequence (opt2) from neuraminidase__InfluenzaA__ADD22577

SEQ ID NO: 114146 - RNA, 1410 nt, Artificial Sequence; identical to SEQ ID NO: 112774
  derived and/or modified CDS sequence (opt2) from neuraminidase__InfluenzaA__ADD22587

SEQ ID NO: 114147 - RNA, 1410 nt, Artificial Sequence; identical to SEQ ID NO: 112774
  derived and/or modified CDS sequence (opt2) from neuraminidase__InfluenzaA__ADD22597

SEQ ID NO: 114148 - RNA, 1410 nt, Artificial Sequence; identical to SEQ ID NO: 112774
  derived and/or modified CDS sequence (opt2) from neuraminidase__InfluenzaA__ADD22617

SEQ ID NO: 114149 - RNA, 1410 nt, Artificial Sequence; identical to SEQ ID NO: 112774
  derived and/or modified CDS sequence (opt2) from neuraminidase__InfluenzaA__ADD22627

SEQ ID NO: 114150 - RNA, 1410 nt, Artificial Sequence; identical to SEQ ID NO: 112774
  derived and/or modified CDS sequence (opt2) from neuraminidase__InfluenzaA__ADD22637

SEQ ID NO: 114151 - RNA, 1410 nt, Artificial Sequence; identical to SEQ ID NO: 112774
  derived and/or modified CDS sequence (opt2) from neuraminidase__InfluenzaA__ADD22648

SEQ ID NO: 114152 - RNA, 1410 nt, Artificial Sequence; identical to SEQ ID NO: 112774
  derived and/or modified CDS sequence (opt2) from neuraminidase__InfluenzaA__ADD22658

SEQ ID NO: 114153 - RNA, 1410 nt, Artificial Sequence; identical to SEQ ID NO: 112774
  derived and/or modified CDS sequence (opt2) from neuraminidase__InfluenzaA__ADD22668

SEQ ID NO: 114154 - RNA, 1410 nt, Artificial Sequence
  derived and/or modified CDS sequence (opt2) from neuraminidase__InfluenzaA__ADD22688
augaaccccaaccagaagaucaucaccaucggcuccgucugcaugaccaucggcauggccaaccucauccuccagaucggcaacaucaucuccaucuggaucucccacuccauccagcucggcaaccagaaccagaucgagaccugcaaccaguccgucaucaccuacgagaacaacaccugggucaaccagaccuacgucaacaucuccaacaccaacuucgccgccggccaguccgucgucuccgucaagcucgccggcaacuccucccucugccccgucuccggcugggccaucuacuccaaggacaacuccauccgcaucggcuccaagggcgacgucuucgucauccgcgagcccuucaucuccugcuccccccucgagugccgcaccuucuuccucacccagggcgcccuccucaacgacaagcacuccaacggcaccaucaaggaccgcucccccuaccgcacccucauguccugccccaucggcgagguccccucccccuacaacucccgcuucgaguccgucgccugguccgccuccgccugccacgacggcaucaacuggcucaccaucggcaucuccggccccgacaacggcgccgucgccguccucaaguacaacggcaucaucaccgacaccaucaaguccuggcgcaacaacauccuccgcacccaggaguccgagugcgccugcgucaacggcuccugcuucaccgucaugaccgacggccccuccgacggccaggccuccuacaagaucuuccgcaucgagaagggcaagaucgucaaguccgucgagaugaacgcccccaacuaccacuacgaggagugcuccugcuaccccgacuccuccgagaucaccugcgucugccgcgacaacuggcacggcuccaaccgccccugggucuccuucaaccagaaccucgaguaccagaucggcuacaucugcuccggcaucuucggcgacaacccccgccccaacgacaagaccggcuccugcggccccgucuccuccaacggcgccaacggcgucaagggcuucuccuucaaguacggcaacggcgucuggaucggccgcaccaaguccaucuccucccgcaacggcuucgagaugaucugggaccccaacggcuggaccggcaccgacaacaacuucuccaucaagcaggacaucgucggcaucaacgagugguccggcuacuccggcuccuucguccagcaccccgagcucaccggccucgacugcauccgccccugcuucuggaucgagcucauccgcggccgccccaaggagaacaccaucuggaccuccggcuccuccaucuccuucugcggcgucaacuccgacaccgucggcugguccuggcccgacggcgccgagcuccccuucaccaucgacaaguga

SEQ ID NO: 114155 - RNA, 1410 nt, Artificial Sequence; identical to SEQ ID NO: 112774
  derived and/or modified CDS sequence (opt2) from neuraminidase__InfluenzaA__ADD22698

SEQ ID NO: 114156 - RNA, 1410 nt, Artificial Sequence; identical to SEQ ID NO: 112774
  derived and/or modified CDS sequence (opt2) from neuraminidase__InfluenzaA__ADD22725

SEQ ID NO: 114157 - RNA, 1410 nt, Artificial Sequence; identical to SEQ ID NO: 112774
  derived and/or modified CDS sequence (opt2) from neuraminidase__InfluenzaA__ADD22735

SEQ ID NO: 114158 - RNA, 1410 nt, Artificial Sequence; identical to SEQ ID NO: 112774
  derived and/or modified CDS sequence (opt2) from neuraminidase__InfluenzaA__ADD22745
